United States Patent Application Publication US 2026/0103690 A1 - sequence listing, part 89

SEQ ID NO: 440289 - protein, 480 aa, unidentified
MIPGIHYTEKGGFKMKPFYMGIDVSKGYADFMILNSKKQPVAQCFQLDDTFEGHQSLYKILGRFLTDHPESALFAGVESTGGYENNWYNSLIEFQGSLNIQTARLNPLGVMHNSKAGLKKNTTDKISAQNIAEYLIAHPEKVVYQKDDQLAGLRKQWGFVKMLTKQSTQFLNQLNTLLYTANPELLSHCQDGVPSWMLKLLVQYPSAARLKNAHAKTIANIPYVTRMRAQQLIANAKRSVASATDTTTEQLIVATTRQILHLKTTIAEQMKRMIKECPISEIELLKTFPGISDTSAIGLIIEIQTVKRFAGVKKLVSFFGVHPVYKISGDGVGGFKMSKQGRKEPRQILYMVALSAIRYNPLIKETYEKHQQQGKHNMAAIGICMHKILRILYGMLKHNKPFDPQIDIRNRQRKVRVKSDTPAKDTNRRFQDYDQKAPVTRRQRKKRLERERPHNVGDIKPGVTAPVPLADIIADILPQL

SEQ ID NO: 440290 - protein, 410 aa, unidentified
MEVVHAHCAGLDVHKDTVVACVRHMADGKVATTIRTFSTATQELLALSDWLSAENATHIAMEATGVYCKPVWNILSDGEFELVLGNAAHIKNVPGRKTDVKDAAWLADLMAHGLVSGSFVPDQATQEMRDLLRTRKQLVRERTSHTQRIQKTLECANIKLDSVVSNVVGVSGRRMLEALISGQTDPRELAAMAHGRLQATPAELEAALRGRVTTHHRFMLRLHLDQIDSFDQAIARIDKEVKDNDKNFRAAVELLKSVPGVGSLAAEVIVSEIGIEMNRFATAGNLVSWAGLCPKNDESAGKRRSNRLKAGAPWLKTTLVQCAWAAARSKDTYLHAQYVRIRARRGNKKAICAVAASILTTAYHMLKDGTFYEDPGPDYFDRRNKDQQANKLVNRLRNLGFHVILQRASA

SEQ ID NO: 440291 - protein, 362 aa, unidentified
MQQSTTIIAFDQHAATTVAAVLLPSQRTPALHSLTSDSATLLKFVERVRRHGPVRCCYEAGPCGFELQRTLTARDIPCDVIAPALIPRRAGDRIKTDRRDAGQLAVLYRAGALTAIHIPTEQEEAARDLLRCREDIRADLLRARHRLSKFLLRHGRRFTGTKKAWSKRHDAWLRTQTWSIAALDQTHAACLRAVDEAIARLRSVEQDLRALLTLEPLRPRVERLRCFRGMDDLTALTIAAELGDARRFASAPRAMAFVGLVPSEHSSGTKRARGAITKTGNAHLRRVLVEAAWHYRHKPFLGAALRRRQQGALDGIVAQAWTAQQRLYRRYHRLAGRGKPHHQVITAVARELTGFVWAALIH

SEQ ID NO: 440292 - protein, 355 aa, unidentified
MNKIKTNFQGQTIFVGMDIHKASWNLGIHLNDMFIKNVHQKPNPSLMAAYLKQHFPGARYKAAYEAGKFGFWIQRQLTQLGIECLVVNPADIPKSQKDTLHKTDPRDARNIGLRLQSGVLHSIHIPDEQQEADRVFFRHRKRIWKDLTRCKNRIKDLLAFSGIDIPEQYDNANWCHNFILWLKTIDCRQSSRRTALNYMITQMEFLRKELLAISNDIRKMMREQRYKTNYYLLRSIPGIGPLTAASLLVEIGDVKRFETFYHLNSFIGLLPMEHSSGENENKGILTVRKHRQLRSDLVESAWTAKRTDPAMSLYFQEQVKRKDPKIVIIKIARKLLSRIRYVLINQTSYEYGIVK

SEQ ID NO: 440293 - protein, 367 aa, unidentified
MKKVSTVAAIESSDFSRPKLTIGLDLGDRSSWYCVLDERGELQGERKVSTTAKAMREAFHRIPRSRIALETGTHSPWLSRLLSGLGHEVIVAHARKVRLIGESRRKDDRLDARTLARLARIDPQLLSPVKHRSAQAQADLTLIRARAGLVRARTALVNTVRSLAKSYGERLRSCNVRNMDPEKAEGLSPELQAALEPLLRTIESLSAGIREYNQRIEALAQRSYPEVALLKQVKGVGTLIALTFLLTLEDPHRFRKSRDVGCYLGLQPGRRNSGQSEPQMHISKEGDPYLRTLLVQGAQHILGPFGTDCDLRRWGLKLAERGGKNGKKRAIIATARKLAVLLHRLWVTGESYEPLHNSRCRAVPAVA

SEQ ID NO: 440294 - protein, 467 aa, unidentified
MTIKIRLNTKRSLRMPKKIKKLQKKVRKLDNLMQINLNAAGIDIGSSEIYVCVPEGRDKESVKSFGTFTCELNQIADWLDKCGVDTVAMESTGVYWVPLYENLESKGFKVYLVNARHVKNVPGRKTDTLDCQWLQQLHTYGLLSGSFHPDKEIAELRSLVRHRDNLLRYRSSHIQHIQKALHLMNIQLDTVIGDITGYTGMKIIRDIVAGERDPHELASYRDPRCKKSEEEIAKSLEGTYKAEYIFQLKQSLELYDYYGQLIKECDSEIEKKYTQFPRKVKEEEKLLDKSKKIPRKNEPDFDLHGYLYQVCGVDLTKIDGLNVLSVQAIISETGVDMSKWPTENHFASWLGLCPYNDISGGKVLKVRTKKTKSRANKALRLAAQSLYRSQSALGAFYRRMKARLGAPKAITATAHKIARIIYSMLKSHTEYCDPGASYYEKKYKERTIRNLKRKASQLGLQVIEGTV

SEQ ID NO: 440295 - protein, 349 aa, unidentified
MSQNLNSAVAVIGIDIGKNSFHVVGLDNRGAIVLRQKWSRGQIEARLANMPPCLIGMEACVGAHHLSRKLKALGHDARLMPARYVRPYSKGQKNDFRDAEAIAEAVQRPTMKFVATKTAEQLDLQALHRVRERLVSQRTGIINQIRAFLLERGVAVRQGLRFLRAELPRILATPADVLSARMVRVIRDLAEDWRRLDERVDHLSSEIAALARQDAGCERLMSVPGIGPIISSAMVAAIGTGDAFSKGRDFAAWLGLVPKQISTGDRTILGKISKRGNRYLRVLFVQAAWVVLIKPRSWERHGLKHWIEAAKKRLHRNVLAIALANKLARIAWGVLAGSRTFEASKLQAA

SEQ ID NO: 440296 - protein, 336 aa, unidentified
MTLYCGIDLHSNNSVICVINDKDLRLLETKVDNKAELVIKALSRYKKRLKAVAVESTYNWYWLVDSLKEAGFNVLLVNTAKVVQYSGLKRTDDRYDAFHLAHLMRLDILPTGYIYPKATRGLRDLVRKRIQLVQDRSREIIRLKSFIQLHTGETIKATSVKAKKFSLPVFGDQNTQLSLKSSIIVIRSLTQQIKAIEKAILQQLESSESFTNLKTVPGIGDVLAETILLETGDIRRFDGPGNFASYARCVESRRTSNGKTKGQNNRKNGNRYLAWAFIEAANFAIRRSEKAKRFYQQKSKATNVVVARKALAHKIARACYWIMRKGEAYDESRLFA

SEQ ID NO: 440297 - protein, 387 aa, unidentified
MSQVSDLSRSLVPFDQNITLTVVVELSEASWLVAGLIPGVDRQPVKKQEPEPVALLRLLERWRVEAVRAGRTIGRIALAFEAGRDGFWLARWLQARDIEVHVVHSTSVAVSREHRRAKTDRLDTAMLMRVFLGWLRGERGHCRMVAIPTLEQEDAKRPSRERESLVGERTRIVNRMKAALARLGIRGFKPTLRKAPQRLDALRTPEEVSIPPNTLDEIRRDMVRLAVVREQIDVIERARLARLEQAPASGPHAMVRLLARVIGVGLETADMLVQEVLSRNLRDRRAVARYVGLTGSPDESGRRRREKGLAKAGNARVRRGLIQLAWRFLRFQRDSTLAQWYRTRTGGPKGARKTTMIVALARKLLIALWRMVTIGEIPAGVALRQVI

SEQ ID NO: 440298 - protein, 348 aa, unidentified
MDRYIGLDVHANSCTVAVVGPSGRRLGSQVVETNGAAIIEAIRAIARPRHVCLEEGTQSAWLHEVLSAHADELVVIQESERNQGQKSDKRDAFALADGLRLGKYACRVFKAPRQYSRLRALAHTYEMIRGDVARTKNRIKAVYRSRGIATQGKRVYGPSRHEWVEQLPSANQAAVELLYRELDHLVELKEAAGTQLIAESRLHAISRLLETGPGLGPIRVARLIPVVVTPNRFRTSRQFWSYCGLGLVMRSSADWQRPKGKWVFAPVKKTIGLNPRCNRTLKGLFKSAALTVISKPDHPLTQHYQRLLDAGTKPPSARLTIARKIAAITLAIWKHEEAYDPARTQPKD

SEQ ID NO: 440299 - protein, 392 aa, unidentified
MKKNSTTAKKSPKQALAKGQKKQIRQLAAEQRLTIGLDLGDRTTHYCILNEAGEVVSEDQLQTTKTGLESLFAKMPASRIALEVGTHSPWISRHLAAMGHEVIVANAHKVKLITQSVRKNDRIDARQLARLARVDPQLLSPIRHRGEEAQMDLAVIRGRAELMEARTKLINSARGLVKPMGERLKGCDADQVGVGLAEGLREEARRAIEPLLKAVEAISEQIGKCDEQIAEITKRYPEVKVLQQVYGVGPLIAATYVLTLEDAERFAHSRDVGPYLGLTRKQRDSGDSQPELGISKAGDGLLRSLLVEGAHCILRKGAPESDLRAWGMGKMGKGGKRAKKRALVAVARKLAVLLHHLWATGEVYDPQYNRKAAEAAAAKAKAKGKGKAEAAA

SEQ ID NO: 440300 - protein, 351 aa, unidentified
MPRTTTLHAVTAIGIDMGKNTLHLIGLDARGAIVLREKVARGRIALRLANLPPCLIGIEAGMATHYVARELAALGHDVKQVPATYAKPFRQGHKNDFRDAHAVAEAVQRPTTRFVPAKTNEQLDLQALHRVRSRLVSERTAVINQIRGFLLERGIVVRQGLRFLRQQLPDILAKRADVLSPRMVRIVADLANDWRRLDERIETVTDEIEALAKSDDSCRRVMTVPGIGPIISSAMVAAIGNGAAFARGRDFSAWLGLVPKQMSTGDRTILGRISKRGNGYLRTLFMQAARVNLLRSANWPKHGFGLWLVRAAQRLHPNVLAAALANKLARIAWTVLAQERSYEARVTKAAA

SEQ ID NO: 440301 - protein, 347 aa, unidentified
MDQIIIGVDTHKSNHIAVAISHQGARLGTMTIPTTRQGYRDLEAWASELGKIKAFGIEGTGSYGAALSRDLLVKGHTVLDVMRPNRQLRYLHGKSDSLDAESAARSVLNGQTSALAKTQTGSSEMIRHIKIARDSAVKAKSQAMITIKTLIINAPAELRDTLDQIKGPISLIRHIAALRPGEITSSTASAKASMRAIARRWLSLREEIQAHEVELERMACEKAPELMKSHGISTQTVAEMLILVGDNPERIKSEAALAKLCGVCPIPASSGKTNRMRLNRGGNRQANAALYRVAIVRMRDDEETKTYAARRTAEGKTRREIVRCIKRYIVREIYRHLCVSPSASSSP

SEQ ID NO: 440302 - protein, 450 aa, unidentified
MGSNYAGVDWASEKHDVLIADETGQELLAATFVHDEAGLRSLCRALVRHDVQLVAVERPDGLLVERLLDAGLRVLALHPNQVAATRARFRASGGKSDRFDAFVLCELARTDSHRFRVLEPDSDQTKALRALTRGREELVQARVALCNQLRAELERFWPAPIGLFSELDSQISLAFLEHYPSPVEARTLGEKRMAAFLARHRYSGNQAPAKLVAKLRSAPQGRAGAAEIQVRKRLVLALVAALKPLVADIKALERQIAQALDEHPDGAIFRSLFRDPKSVVTAATMLAEIGDCRARYPTGDTLAGDAGQAPVAVESGKRKVACFRWACNKRLRDAFCTLADSTRQWHPWAQAHYARAIADGHDHPRATRTLGRAWCRVVWRCWQDRVPYDPARHRALQRHVLVTVPTPSGPRPDTTATQRMLGAAVTHGAARRAEREALDGKPTSATTLGG

SEQ ID NO: 440303 - protein, 331 aa, unidentified
MDFKETIGIDVSKPFIDAAIHTARKHRRFKNTAEGFCQMLLWVSENTNVTRQHTLFAFEHTGLYSLPLSAFLSERHLSYVLIPGLELKRSMGIARGKDDRMDAKAIALYAYRRREEVTPYTLPSKRLLELRKLLSLREKLVKQRTGFKATNTEIKGFLTRTDNAMYFAVHEAMIKALNQQILAVERQLELVIQAEEPLKRMFDLIVGIKGVGTQTALFMIAFTNGFTLFPNFRKFASYAGIAPFPYQSGISIKGKSQVHCFANKKFKSLLSSCATIAIRCNPEMRMYYQRRISEGKGKMSTLNIIRNKLLSRIFAVVQRGTPYVDTMAYAS

SEQ ID NO: 440304 - protein, 377 aa, unidentified
MQSIKTLCGIDVSAQKLMARKRRDGADDGKEFANDATGHRQLIKWLGRQARVCLEATGVYHLQLALALVAARVEVMVVNPRVAKDFAGSLGRRSKTDRVDAAVLLDYVQRMEFVAWEAPRAAVLELRELSRRVRELVQARTNEKNRLHARNASAISRSVVADLQAHILQLDKRIKAVERAAIEVIKRDRDLNEQVKLVKEAQGFGLRSAILLVAELAVLDPTMTTREIVAHAGLDPRTYESGTSVARQVRISKVGNARIRAILYMNAISAIRHDRGARLFSAQMIVRGKKRMQAVVAVMRKLLHGIWIVLQRRVAFDSRVLFAASLAKAESSDSAVAAIQPETNGDHPKGRSEAKELRQQLDARSSEAKPRKRPKVA

SEQ ID NO: 440305 - protein, 343 aa, unidentified
MYYIGLDVHKKTISYCVKNAAGQVLSEGKIGSTRRELDAWVRTLPEPRMMAMEATIFTGWIYDHLLPHAEKVKVAHPLMLRAIAAAKKKNDKIDASKIADCLRCDFLPESYMIPTEMRDRRRFLRYRNLVLRQSVQMKNRISGMLMETGVSYEKLRLHRKGYFDQLMKTNEEVSDSIRPLLKLCREQIDRSIRLDATLLRTLERDPLLSGRLERLRTIPGVGPLTALTWVLEIGDVSRFRSIKQAISYCGLCGEEVRSADKVMRTPISKQRNKHIQSMLVEAARLAPRYSPELALLYDRERQRGDGNRATLAVARKLVAHMVAVERRQSSFMPAGEFKQTAAA

SEQ ID NO: 440306 - protein, 416 aa, unidentified
MEVLYPRCAGLDVHKDTVVACVRLAAEGSVQTEVRTFDTTTPGLLALADWLNEGGCTHVGMEATGVYWKPVWHVLSDGDVTLILANAAHVKNVPGRKTDVADATWLADLLAHGLIRASFVPEPATQEMRALLRTRKQLVREQASHVQRIQKTLEDANLKLASVLTNIMGVSGRAILKALINGETDPDYLLTLIDRRVKAPRDKVHAALQGRVTDRHRFLLRLHLRQIDTLDAAVAEIDQEVDRDLDPFRDAVRLLCSIPGVSDLTAQVVVSEIGIDMSRFPTAGHLISWAGLCPRNDESAGKRRSNKMRKGAPWLKTTLVQCAWAGVKKKTSYLRAQFQRLCHRRGPKKAICAVAASILTAAYHMLRDGTFYHDLGPDHFHRDSPTAQARRLVSQIAKLGFVCTITETHPEAVVSV

SEQ ID NO: 440307 - protein, 347 aa, unidentified
MVTIGIDPHKSSHTAAALEASGETLGELRLRADGATLSRLGAWAVGWPQRVWAIEGAGGLGRLLAQQLVAAGETVVDVPSALTAQVRVLHRGHGRKSDGIDARSVAIVAQHRDDLTRVSADDHSALLRLLSDRRDELTAERRRAVNRLHRLLRELHPGGAPRQLSAQHATRLLATIKPAGLVDTERKAMARGLISDVRRIDRALLENRRRCAQAVAASGSSLTEIFGISEVLAAKLIGHTGDITRFASADHYASYSGTAPIEVSSGEQTRHRLSRAGNRSLNHALHLAARVQTMHPGPGRDHYQRKQTEHKSSAEALRSLKRQLAKVVYRHLRDDQLLQISPTPELT

SEQ ID NO: 440308 - protein, 391 aa, unidentified
MVCVGIDVAKDKHDCCILDSDGMVRADCFTIPNNMDGFKQLLQTIRNCTKKSDKIKVGLEATGHYSYNILGFLLDNGLPTYVINPLHTNLYRKSLSLRKTKTDRVDARTIATMLLSDVDLKSYTDIAYHNEELKSLTRYRFDKVQECAKLKQSVSRLATILFPELEGLVSSIHGTSIYALLSEYPGAKQISEVHLTKLTNLLTTASKGRYRKEKAIQIREAARASIGSVMPAKSLELKHTIKLIRELTSEIDEIEVSIQKIMDELNPPILSIPGVGIQSAAMILAEIGDFSNFESPDKILAYAGCSPSTYQSGKLTNCYAHMEKRGSRYLRHALYNATKYVCYWNPVFAEYLAKKRAEGKHYNVALSHAMKKLVRLIYALQKSGKTYLTAA

SEQ ID NO: 440309 - protein, 355 aa, unidentified
MESTKYVGLDVHTEATTVAVMNSAGKLIMESIIETKAITIRQFIQGLRGDLHVTFEEGTWAAWLYDLLKPYVTKVVVCDPRKNTLLKVGNKSDRIDPKKLAELLRNGSLSEVYHGENGVRTLKELARSYLTISKDLGRVMNRVKALYRSWAIPCAGTQVYAPCHRSEWLSKITEAGVRRRAEHYYQQLDALQTLRHEVRKDLLLESRKHNATKLLRQVPCIGPIRAAQLVALMQTPHRFRTKRQLWTYSGLGLETRDSAQYRYVEGQLQRSKKPQQLRGLNANHNHDLKNIFKGAATMASISAGPFHDFYEALLTKGMQPTMARLTLARKIAAITLIVWKKGARFDPQHLKQQAA

SEQ ID NO: 440310 - protein, 390 aa, unidentified
MFYLGIDIGKFNHAAALMDQRGKVVSTLPSFPNTRSGFQNLLALITKHLPSVEGLRIGMEATGPYWIPLAEWLKTHGWTPVILNPIKTASLRNYGVRGSKTDTIDSVLIANTLRIEGEQPQPVSPKLSEELRHFTRLRADMTKDRTRLALRMTSLLDRLFPELLSSFSKTLSPSCLALLSEAPTPSKVLALGEERLAALLRKVSGGNLKATQAQEIMDKAIESVGVPSQAMEEVLALLLEQINLLGSQLRTLDRRITDLYEEAGLCFTSFGGVGILSAATILGEFGSVTKFTQPKQMVAFAGIDPKLRNSGKHQGQVHISKRGPRYLRRALYLACQGAVRNDDDFHSIYQRYRDKGKSHKEAIIAVMNRFIHVLYAIWRDNRPYYPLTQA

SEQ ID NO: 440311 - protein, 330 aa, unidentified
MSQQWFAGIDVAMDELVLACCDEQEHFLPEQRFPNTKAGITRLKRELRKLGQVRLCLEPTSCYHLAALDALSAVAALCVSVVNSYATRCFARALLVRGKTDHVDAQVLARYVLRCNPPRFTPPRGIALELRAITRRVGTLVKDRTSQRNRLHASRKAGDPRCVLHSIQDQIKYLDRQIKALEDAALKLLRTDAQLQKNYKLLLSVKGIGQRSALALLGELGVTPPDMGKAQWVALAGLDPKPQESGKSQNAPRHISRQGNVHLRRGLYMPALVAAHRSGPAQAYYESLKQRGKKPLQAIVALMRKLLCAIWGMFANQQPFDPQRFFHQTA

SEQ ID NO: 440312 - protein, 398 aa, unidentified
MTRKNTLKSLPTDTEFRVVGLDLAKSDVSVAAIPVDDNTPSLVDRMTYADLLDWAGKISPTLFAMEPCNGYSLLCLQLENLGHEIKVISGSTVSMWINTHLSGQKTDLNDAIALARLAVSDAELTPIRHKSITEIRIQTVQAVRQQLMSQRSKSIVSFKALAQQWGIPCAAGHRNLKKLRESIEAKVDLITRPVANAMLFLLDAVKSLDRQIGQLNQTLQELVMSDERGRLLQSVLGVGTQISARVITVVGNIERFNSPRSLVAYVGVAPRNFITGHKNLTKKKHGNCPDLSHKGQGKISRRGDKLLRSLFIQGAACLYMQFCKDQLPECQLKRWILKQLARQKTYGKLIVSLAAKLIRIVWAVLTYREKFNIQKAGMTRSMWSEMALETPLNKGVPA

SEQ ID NO: 440313 - protein, 377 aa, unidentified
MSKIRFVGLDVHADTIAVAIAEPEGEVRSLGMLPNRLESIRKLVAKLGPAKQLKACYEAGPTGYVLYWQLTALGVACEVVAPSLVPVKPGDRVKTDRRDATKLARSYRAGDLTPVWVPDAAHEALRDLVRTREDARQDQQRARQRLGKFLLRHGCRPPEDVKKNWTHKHLDWIKRQVRFDQPALEAAFLDYVHEVEHAADRLQRLEKAIDDVLATAPAEIQEVVRALQALRGVGQLVAVSVVAELGSLSRFSNPRQLMGYSGLVASEHSSGNRIQRGGITKTGNSHLRRLIVEAAWAYQHKPWIGGWLAKRQQGLDEETKAIAWKAQWRLCTRYKKMAARGKNKPQIVTAIGRELLGFIWAIAVRTEARCTPDRKAA

SEQ ID NO: 440314 - protein, 393 aa, unidentified
MMVKVSTAVVIGVDPHKRLNAVVVVDAGGEVLDRGTFATSTVGLRQLGTFARRFKVRTWAVEGCNGVGKALAQRLVAAGERVKDVPTRRTALVWVFAGGNGRKSDDTDALSIALVGLRTPGLVEVVPDERAATLRLLAHRREELVATRTQVVCRLHRELLILLPGGTKRGLTAARTKTLLATVRPRDEVGKARKAIAVDMLGDLVTVDKKIKAIGVQIKDLVAATDTCVTDIYGVGPVTAALVLGQVLDVARFVDEGHFASYNGTAPIEWGSGGGQGPFILNLGGNRRINHALHMVAVTQIRGDTPGRGYYRRKLAEGKTKKEALRCLKRKISAAVYRHLVDDNTQVEERGPGGQLGATTKISAVDPTPTVDTSIKPQPGPQPQATPAAARAS

SEQ ID NO: 440315 - protein, 381 aa, unidentified
MKPGGEIVYTPFEVQHTREGMSELVSLLRGSGEEVRVVLESTGSYHCPVVAALLENGIFVSVVNSLRMKRFCSQSIRRVKTDQIDAMQIALYGLAYWQELQPTRLPENTYRELQLLARQYYQMTSMLIKAKVDFNAICDQVLPGMQELMSDHAGRHKLSDFVLRYHHTAHILKMGETRFRKDYCKWAEKKGYRNHERMAALIFATAQNGIPVLPDAPSTQIVITEAIRVLHTVEASRDAILTQMQALAKTLPEYSLVREMPCIGDTLAPRLIAEIGDVRRFHSKRALIAYAGIDAPPYQSGKFSANNRHISKRGNRYLRKTGYEVMQSYVMHKPANDPIFTFIEKKRSEGKSGKLAMVAGLNKFLRVYYGKVTELYRSLPQ

SEQ ID NO: 440316 - protein, 421 aa, unidentified
MTVYLERGYNCKEYQWFYKQYQNIYSKEFFMIYVGIDVAKDKHDCFITNSDGEVLFKSFTIPNNRDGFETLFQKIQSVSDDLTKIKVGLEATGHYSYNLLGFLLDKGLTTFVINPLHTNLYRKSLSLRKTKTDKVDSRTIATMMMSDMNLKSYSDTSYHNEELKSLTRYRFDKVQERAKLKTSVSRLVCILFPELEKLVPSLHMASVYALLSEFPSAHSVASAHLTRLTNLLSESSRGRYGKDTAITFRESARNSIGSNMPAKSLELKHTIKLIQELTSEIDEIETKIKSIMDEINSPILTIPGISYSMGAMILAEIGDFSRFDSADKILAYAGMSPSTYQSGQLDNCYSHMEKRGSRYLRYALYNATKYVCHWDESFGAYLAKKRSEGKHYNVALSHATKKLVRTIYAMEKSRQTYRITA

SEQ ID NO: 440317 - protein, 354 aa, unidentified
MFTREPSCKLGTLGRRDAQDRSATIGGQTKGDIPRRAPASIRDRAAETADVSKATQRGVHRPSSFSLTGGTMDNKSRVFGVDVSKATLLIGDYECATPLKVDNTPVAIAQWLSTIAHGSIVAMEATGIYHQVLASLAHAAGMRVFVLNPRALKHYAEAIGQRAKTDAVDTCMIARYAMHEQARLVSWQPAAAEASELTQLLKKRRGLVEASQTLSQMLCGMPALTSAREELLATLKRMIKNTEFLMRAELAKTPQLAELHRRLSGIVGVGFVVAAELVAALSRIRFARADSFIAYTGLDPRPDDSGVRRGRRRLSKRGPALLRCLLYNAGIAAAHSKLLRVPSDAPRAHRKLMR

SEQ ID NO: 440318 - protein, 482 aa, unidentified
MHRLATNKCAITHDVYRFTFEPAGALEITNEYSGLAVAPAHLYCFRRSQAGMSHTLNLAQWSVVMEKQDQLPFAAYVGIDWADKKHDFCIEIPAEGTQEFDVIPHRINLIDQWVRTLYARVKGPIAVAIELTKGPLISALQMYDFIVIYPVNPGSLAKYRQAFVPSRAKDDPTDAALAVDMLRRHPERFKPLRPQSADMRALITLVEQRRQLVGERVRLTNRLRAALKQYYPNALEWFDHVDTIVFCDFIVKWPTLVQAKRARVATLKRFFHEHNVRFPSVVEARITAIKEAVPLTKDDAIIVPYRMKAQAVVEQLKLLLGSIKAFDVEIDLVATRHADYSLFRVLPGAGPSLAPRLLVAFGEDRDRFASASEVQMYSGIAPVTERSGKKHWVHWRLQCPRFLRQTFVEWAAQTINKSYWAGEFYQQQRDKGCTYQAAVRALAFKWIRIVYRCWQTGIPYDEAKYLKTLERRGSPLMVKKTA

SEQ ID NO: 440319 - protein, 356 aa, unidentified
MSRDIQYIGMDVHKEAIVIAVLNGSGKLVMESIVETQASSILQFIHGLRGELHVTWEEGTWAAWLYDLLKPHVHQVLVCDPRRNALLKEGNKSDKIDARKLADLLRTGMLRPVYHGEHGLRTLRELGRSYQTLSQDLNRVMNRIKALYRGWSIPCAGTQVYAPRHREEWLHKIEHVGVRRRAELLYQQLDGLQMLRRTLRPELLAESRKHKAAKLLRQIPCIGPIRAARLIALMQTPHRFRSKRQLWTYSGLGIETRDSAQYRFVRGQLQRAKKPQQIRGLNRNHNHEMKDIFKGAATRASCGAGPLRDFYLTLLDKGMKPEMARLTLARKIAAIALTLWKKEERFDAEQLKTQAA

SEQ ID NO: 440320 - protein, 382 aa, unidentified
MQTIAPVNPTILLAIELSTSTWLVAARLPGLDKPRLSRIDGGDTAALLALISSLRARAACELDATMGVVCCFEAGRDGFWLHRLLTAHGVVSYVLEPTSILVNRRARRAKTDRLDAEGMLRVLAAYLRGDHQACSMVRVPTPDQEDAKRTHREREHLVQERLRIENRIEALLFTQGIRKRPSLRSWERDLTVLRTGDGRKIPRHLRAELDRLRRRLVLTLELIREVEVERDQVTKTKPQDQAHHKMTALCRIRGIGENFAAVLTREVFYRSFDNRRQIASYVGITPMPYQSGAMDRDRRIGRAGNPRARTTMIQLAWLWLRYQPDSELAAWFRERVGTLAGRTRRIAIVAMARKLLIALWRYVETGVIPTGAEIRAETTVAA

SEQ ID NO: 440321 - protein, 311 aa, unidentified
MTDCNIGIDVSGATLDVAMHPTGQTWQYPNDLAGVTALAQHLQTYRPARVVLEGTGGLELLAVGVLAAADLPVVIENPRKVRHFAKATGRLAKTDRIDAQVLAHYAATVQPPVRPLPDAQSQELRALVARRQQLVEMLTAEKNRVFRATPRLRPPIQKHVRWLEAELTDLDHDLSDLIQASPVWQAKERVLRSMPGIGPVASCTLLGSLPELGILNRHAIAALVGVAPFNWDSGRHRGTRAIAGGRAHVRTALYMATLVATRFNPVIKAHYQHLLAVGKPKKVALVACMRKLLTILNAMLHSGMPWTTQYA

SEQ ID NO: 440322 - protein, 325 aa, unidentified
MTNETREPVYVGIDVSKDSLEVALADKAASVRFANDEQGVKALLEHLAGHHVAVVLLEATGGLEKRCAHALYLAGMTVVVANPRQAHEFAKSMGYLAKTDGIDARILSHFARTLHGSERFDKLLFKMATPQQEQLQALVTRRSQLVQMRVAESNRLNLAHALSAKSIQAVIKLLDKQIKTLDEDIGNRLKQHFAQKLKLLEGFKGIGEGTKAVLMAALPELGRLNRREISKLVGVAPLNHDSGKMRGKRSVWGGRADVRSALYMAALSAVRFDPTIKAFYERLRAAGKPPKVALVACMRKILSILNAVIKSNTAWEQRCPQASTA

SEQ ID NO: 440323 - protein, 411 aa, unidentified
MKDLLTCCCGLDIHKDVVVACLLQGPTDNKPTSEIRSFSTLHTALVELRDWLAQVNCHHIAMESTGIYWQPIYDVLESVFVDEMTLLVVNARHMKNVSGKKTDMRDAEWIATLLRAGLLNGSFIPSKDIRYLRQLNRYRKALVHDITAQKNRVEKFLQSSGFRLSTFMSSIFGTSGINIMSILIGKGSISLADLDLCLKARSRNRIDEIMPALNGSLDEKQRRFLKMLLTHLQDLQDNLAEIEDDITQAMLSYQDDVAIIKTIPGISDIAAASIIAEIGNDMSRFKTSQHLCSWAGVSPGNYESAGKKKKARINKGNPYLKSMLCEVSWVIAGKRNTYLSSWYWRMKQRLGAKKAIIALARKLLVIVYTLLKGRSSYNELCFEQRRAAVERKRVGHMIRELVNLGYGIVPA

SEQ ID NO: 440324 - protein, 364 aa, unidentified
MIVIGTDTHKRTHTCGAVSAATGQLAAELTATAREPGFRELLAWGRSLDEERIWAIEDCRHVSGSLERFLVASGERVVRIPPKLMGQSRRGERSSGKSDPIDALAIARAALREGPDTLPAAHLDERSLQVKLLLDHREDLVKARSEDQCRLRWHLHDLWPELEIPAGALDRTVWLDRLARKLARAEQGTRVRIARELLTEVRRRTRRAAELEREIDALVKAQAPELLALEGCGALTAAKLIAETAGAGRLSSDAKFARLAGVAPIPASSGMRTRYRLDRGGNRQLNCALHRIAVTQGRCHAPAREFLAKKQAEGKSRIEALRCLKRHLARRVWRLLNQSEIDLSMSNSVNPQRGSLAPQFAAVA

SEQ ID NO: 440325 - protein, 379 aa, unidentified
MSDCSEVFVGIDTSKLRNAVAIADGGRDGEVRFLGEIENSEAATAKLVRKLASQYQRLTFCYEAGPTGYGLYRQITELGHECIVAAPSLIPKRPGDRVKTNRRDAVGLAKLLRAGELTAVWVPDRHHEAMRDLTRARETAMLDLRRKRQQITGLLLRQGRHYQEGNQERRKPWTKIHKAWLMRQKFEHPERRLVFEEMMLAMREAEERLARLEQAIRVAVADWSLAEVCTGLMAMRGIDLVSSAGFLAEMGDLNRFPTPSELMANLGMVPSEKSTGETIKRGPITKAGNRRARRLLVECAWAYRHPPRVGVTKQAKVAAAPRAVREIAWKAQHRLYGRYRTLIRRGKLKNVAIAAVARELAGFIWAVNREITVAGAATR

SEQ ID NO: 440326 - protein, 399 aa, unidentified
MDLPHTLGRSLMNKIIYIGMDVHSTNFTLCSFEPGYGFEADKIFGQTRIKEDIFNSTVKYINKLKSMRPDVDVVCGYEAGCLGYNLHRKLNAKEIESVILAPTTMAVARNSSKKKNDYRDAITIAKCLASSAYKAVYIPDEKDEDVRDFIRMRDDHKTALKQIKQQLNAFCLRHGHHYDKTKWTGLHLNWLRKLELSKLQRETVEEYLATYEALTSKIAALDIRIEDIASEERYAEKVNKLKCIKGIKTHTALSFVCEIGDFNRFKSADKFAGFIGLVPGECSSGNTERMLGITKAGNRHLRRLVVEISNTYRRGTVGRKSAALKERQKDMPKDVVAYADKATNRCQRKYQRMMFKGKNSNQAVAAVARELCCFIWGMMTGHHSRTAQAEVPVYRSELD

SEQ ID NO: 440327 - protein, 339 aa, unidentified
MKYTPVGVDIAKHLIQVHFINEHTGEVVDKQLRSKDFLTFFSNREPCLIGMEACGGSQHWAREPKKLGHEVRLLQARFVKAFVMGNKNDVMDARAIWMAVQQPSKEIAVKTEEQQSVLVLHRSRRQPVKFRTAQINALHGTLLEFGETLHKGRAAMDRELLAALERMKTKLPPYLITVLEDQYTRLSELDMLIDDPEKQLNSVARQSETCKRLMEIPGVGPLIATAAVATMGKASAFKSGREFAAYVGLVPKQTGSGGKVRMLGISKRGDTYLRTLFIHGARSAALLTKEPDPWITELKKRRPTGVAIVAMANKLARTVWAIVAHDRKYDKNHVSIRPY

SEQ ID NO: 440328 - protein, 472 aa, unidentified
MKSKSSRKPNPVDPVAEEIPDAEHELVIERVAAIDVAKASGKVCVRLPGKTGRRFSRVWDVPARTGAVSELAEQLIESGVEKVTVESTSDYWRIWYYLLEAAGLDVQLVNARDVKNVPGRPKTDKLDAVWLAKLTEKGLLRPSFVPPAEIRQLRDYTRLRVDLTRERTRYWQRLEKLLEDALIKISAVASTLDTLSTRDMIEALIAGERDPGRLADLARGKMKAKRSELIAALDGRFDDHHRELARMLLDQIDTLTAQIATLTSRIEQLLAAMPDTRSRGDGGTGGDPDRPSTGHGVEPETAARFTDAMLLTPVERLDEITGIGELNAQVVLAEVGLDMTRFPTPAHLVSWAKLCPRTIQSGPVTRGGKTGRGNPYLKGALGEAAAAAARTDTFLGERYRRIVKRRGKLKALVAVARAILVVIWHLLANPEARFRDLGPDYHTQRIHTERKLRNHIAQLTAMGYRVTLEPAA

SEQ ID NO: 440329 - protein, 346 aa, unidentified
MMIIGCDFHPSWQQVSWMDMETGDCGERKLVHASGDARMFYQQLAAPVLIGMEATGNSQWFIELVEDLGHEIWIGDAAQIRASYVRKQKTDQRDAAHILKLVVEGRFPRLWTPDREQRDLRQLVLHRHKLVEIRSRVKNELQHLSLNKGMQRKRKLWSQAGQKMLRELPLKPWAACRREDLLGLLATLDQQIGKLDWAVQQAAEENPQAKLLMTQPGVGPNTALAYVLTIGDVSRFPRGKQVASYLGLIPREESSGGRQKLGAITKQGNRMLRSLLVEAAQITVRFDPEMKKQYLHRCHQKPKGVAKVATARKLAVRLYWMLRTQKPYPEIVRIESSSRVPLVGAS

SEQ ID NO: 440330 - protein, 352 aa, unidentified
MRKITTIGLDLAKKVFHVHGVDAEGNVVVARRLRRKEVLAFFANLTPCLVGIEACGSAHYWAREIAKLGHTVKLMPPRYVKPYVKRGKTDPGDAAAICEAVTRPTMSFVPVKGLEQQGLSMLHSARSQLTGQRTQLTNAVRGHLSELGIVAARGMLGFAELAAIVRDESDKRLPVTARAALMILVRQIETISTEIAALDSTLRKENNASELGPRLESIPSVGPVIASALRARVTDAALFENGRHLSAWIGIVPENDSTGGKIKQKGLSKKGDRYLRSLLVNGAMAVVRQAQKRPDKHPWVAKLLGRMSAKQAAIAIANKTARIAWVLMVHGGVYEAGHRAPQYRAEACVAAG

SEQ ID NO: 440331 - protein, 402 aa, unidentified
MYYLGIDVSKVSHQCIILDANGEALGKSFTVQSSKDDFAKLVKKLLELNIPKNDLTVGLEATGNLWENLYSFLKERGLNVILLNPYQTNKFHQATLKKAKTDSIDALVIAGLLRSGCASSSYIPDEEIQSLRDLVRLKDGYLKDIKNYKRKAYSLLGLVFPEFLNLVKDPFNIVSTQMLLKYQTASDFKSAKPKDLLKIARGHQGNTYDEAWADKVIRAAKDSIYSGKASKARGLVLKSLIQNIKSLKEQTELLDEEIQNLLKPDDKSSNNDVDNLLTIPGVGPKTVAVFLAEVGDIKRFSRCKDFIGFVGLYPQIEQSGSSLNRAKLTNKGSRLLKHALYIASVASLIHNPYLKSVYRDKISQGKSAKQAIIVVARKLACIMYSMLKNNTAYNPQRVALAF

SEQ ID NO: 440332 - protein, 378 aa, unidentified
MKRILKIGMDVHTTNYTLCAMEPIIGEDDRVFATIKVTPDYKNILLFIENLKMKLGLDDEYDIQCGYEAGCLGYSLYHQLTAAGVKCVILAPTTMLTPQGVRIKTDMRDAYMIAQCLSYGGYHAVYIPTEDDDSVKEYLRMRNDHKLALKKIKQQINAFCIRHGFCYDGTKWTQTHLKWLKKLEITNQLYQETLDEYMASYEEQEAKIERYDKRIEEIAEQTKYHDKVKKLGCFLGIKTHTALSLIVETGDFERFAKGNQYASYLGLAPGENSSSDNIHRLGITKAGNSHLRQLLIEASGGICKGAVGHKSKELRARQNGNTAEVIAYADKANTRLRSRYYKFIRHGKKRNVAVAAIARELACFVWGMMTDNIEMKAA

SEQ ID NO: 440333 - protein, 345 aa, unidentified
MEIVTLGINLAKNIFALHGVDAAGKVVLQRPAVKRAKLADLTASLAPCLIGLEVCSGAHHWAREMTRQGHTVRLIAPKFVAPYRMSGQRGKNDAADAAAICEAVGRPNMRFVPVKSIEQQSELFLHRARQGDVEQRTGLINCIRGLLSELGIVLPQQAETVRRELGQLLEDLPGHCNTVAADAITDLELLDARIAEYDRHIALCAKGNAEAQRLMQLSGMGPTTASALVATVGDGHDFASGRQFAAWLGMVPGQYSSGGKQRLGGITQAGDRYLRTLLILGARSVLQSARQKEDAISRWTRDIEGRRGDWRAVVAMAAKNARLAWAVLRRGEDFKLYGHGAPAAV

SEQ ID NO: 440334 - protein, 430 aa, unidentified
MNNNTQNEKIKAITERTLVVGVDVGSDTHYARAFDWRGIEFSKTPLKFSNTEEGFNTFKEWYEAYAKEQNKDKIIVGMEPTGHYWFNLGNFLQEDGKKLVLVNPHHVKKSKELDDNNPTKNDRKDPKVIAGLVREGRYSETYIPEGVYAELRVASNLRFQIREELTRTVNRIARWISIYFPEYKGLYVKFDTVSGILILEKAPLPEDIIALGVEGINQVWRDAKLRAVGIKRAKSLYEAASHSIGTKTGANAARLEIKVLLEEYNSKKVRYDEVMALIESLVTQIPNAEKLLEIKGIGVNTVAGFLAEIGDVRRFNDPKKIQKLAGYALVENSSGKHKGETRISRRGRKRLRYLLFEAAMSVVGKNREFAMLHVYYTTRDKNPLKKMQSLIAIACKLIRVFYALLTNDKAHYDPDKMMMDIHRPSGVRVA

SEQ ID NO: 440335 - protein, 342 aa, unidentified
MQITTIGLDIAKNVFQVHGIDADEKVVVRKQLRRGKLMAFFEALSPCLIGIEACATAHHWARELTKLGHEVRLMPAKDVKAYVKRNKNDAADAAAICEAVRRPTMRFVRIKSPEQQGQLMQHRTRDLLMRQRTQVINALRAHLAELGIVAAKGDSGVKELLAIVADDGDERLPIDARASVIVLAAQLGAVQTLIGSIEKRIKMQHRANEASQRVETIPGIGVLGATAIVATVPDPTVFRSGRDFAAWIGIVPRQDSTGGKQKLGPISKQGDRYVRRILIVGAHSVLRRAQENPEKYPWLTQLLARRPFKVVAVALANKMARTAWALLAHGGTYRAPELAQAA

SEQ ID NO: 440336 - protein, 413 aa, unidentified
MNWQRKSNGMKQVIGLDVSKGKSTVTIYDSYRQCKYEGEINHTRRDFEQLHKRIVDITSLDDQAPDIVFEATGVYSKPIEAFLKDYGYAYCRMNPLEANLQMAKMRRHKTDISDAHELAKTHFKMEREPTYIQDDYYEQMRALTRYYDEIDEEMILLKNRMHSILQLSFPELEKILTPNSALFLNIVQLYPHPTLVLAHSKTVIKNRLKANTRKNLSLERAEKKAIALLEAAQNSYPAIRSTDVRCEQVRDYANRIAELKDKKEALVQQMITLSKDRKEYIVLRSIPGIGDSTACRLIGEMGDIRRFQNAKQLNAYAGIDIMRYQSGNTQYHDRINKRGNKHLRKLLYFMVCAMIMKKKDKPNHFVDYYYKLKTQPQRKPHKVAIIACINKFLKVTFQLLTHGILYDYETALS

SEQ ID NO: 440337 - protein, 479 aa, unidentified
MRKLIPPSDRACQKSFQQGVNRNEKKSKRTKGIEEAHPFAGMSQVNPNAAGVDIGAVEIVACVAGDETTQIVKAFGNYTMDLQAIGKWLKEHNIKTVAMESTGVYWIPLFEELERQGFECLLISSRSLRRVAGRKSDILDAQWIQTLHSYGLLESSFRPQAELIALRTLLRHRAQLLEHRSPHIQHIQKALLQMNVQLSQALSDVTGDTGQAIIRAIVSGERDPQKLAALRDRRCKKSAEEIGKALTGTWREEHLFIVKQSLELYDFYTQQVESCDAEIDRLYAATRPDWKVEDVPPLSPKKRNSHSKNAPQNAADIRQHLKRISGVDISVVDGFGVSLAQTVIMELGTDMSKFPTEKHCCSWLGLAPKHEISGAKVLKNKTLKTKNRAGQAFRMAAQSVQNADCVFGALYRRLRARLGPAQATVATAHAIARVVYRMLKYKVEYETISVTEYEKKYEEQQIKYMKKKAAKLGFQLVPA

SEQ ID NO: 440338 - protein, 437 aa, unidentified
MEEVTDEPLYRDRVCGIDIGKAGMVATIRVPSDRDPARRAQETRSFGTTRREVLALADWLGCWQVPAVVMEATGDYWKGPFYRLEAEGFECVLADARQVKNLPGRPKRDPSDSRWLAVCFERGAVTSCFVATPEFRLIRLHTRYRRDLIEERTREKNRAEKLLESAAIKLSSVVTDLHGVTGRDIMDHLIAGVRDPKVLAQLARARARRKISQLEEALEGAEFFTAGHAALLKTMLERIDRVSAEIDALTAVIEQLLAPYEEQLQQAESMPGWGRRSAQDAIAETGVDMTRFRTGAHLSSWAGRTPLDNQSGKRTGRARHKKGNRYLAAITGETAIAAGKTQTREGARYRRIARRRGKPKAQVALGNTQLKVFHKLLSSPGTRYEDLGADYYERQRDVRRQIAHHVGKLGALGFEVTLCRGPGPEPEPDRPGNTQAA

SEQ ID NO: 440339 - protein, 411 aa, unidentified
MYYVGIDIAKSFHVVSIIDDGETKVINKPFKINNDLKGFEKLLTILDSVTLDKDDFLIGLEATGIYGENLLEFLNSKGYSVKLLNPFQTSRYREQITMKKIKNDNIDSLVIALFLKDGKYSSGYVTDDEYQSLRTLYRNRVSIQSDMKEVKKRLLTQITVTFPEFESFTNPFTISGLALLDKYPTAHHYKHSSVDRIMKVFSHIQGNNFNRDKALKLLELSKESIYSGKAKDARAIAIRSSIRLLKMYLSEIDIIETEIVALLDKKGINSQTLDELPTKNSLIENLKTIPGVSDKTIAAVISECGDLTRFPSIPKFIGYLGLFPTENSSGNSKSIGHLSKRGSSLVKHALYLSATSCLIHNKQMKQLYDTKRSQGKSKKESLIAVSRKLATIIYSIFKYNTPYNPNRVFTN

SEQ ID NO: 440340 - protein, 520 aa, unidentified
MATSRTRKRPGARRFYHSVAKPSGLLHPRVQQVGPEHFGIVCFDCAKVRSKFLLADFYGRVLIPPTTVTHNRPDLDAAVAQVRQAFAEHQLADGLVAIERTGRYHRLVQRAFAAAGFETRIIHPFVTKQYRQPVDPGNKTDDTDLSAIHRATVTGCALLEATRDAAWTTLQLLVRQRRDLVRKGAALNCQIREHLEAAVPGFAACFDKLWDSPVPWHLLQHFPSAAQLGAAGLTALCQSLRQAGIRFQRRTVQAVLDWAERAAPGDVAADQHLRIALAYYRDRQQKTLEIQALERDIAARLAQTPYILLLSFPGINVVSAADFGGEAGPMEHYATAKAITGRAGLCPSRYQSDRVDKANGPLVRAANRALRAAILGIADNLIVCNHHFQVLATQWAAQGKDPRHTRVKVGLRFCRIAFQMVAGRQVFRHPAIQGRHYILDKLTAFHRDHDTGMVEVLRDLQAAIAQVPPREHAAEARPLQEELQKIHDGRRRGPQLLGDILPIVLARLGVGVVQSEESGE

SEQ ID NO: 440341 - protein, 321 aa, unidentified
MNKYKEIYGIDISKDVFDVYGSKSGHNQFKNEAKGFVSFMKHLPKDVLVVMEATGYYHYRLAQFLYKSGVIVSVVNPLSVKRFIQMKLAKVKTDKSDAKAISEYGEMNAVPLYTALTDVQSECLQLFRLLDSYIKHRTATKNKLKGEEVLGIPSKFVYRSLKRNLKHLNKEVESLELRLLDLIKQDQQHQLTLLKSIPGMGVKTALFLIVVTDGFEKFETASQLCSYVGITPTIRQSGSSVRGRSRISKVGNKKLRNLLFLCSFSACKYNKACREIYERLVAKGKSKKLALIAVANKLLKQAFAITKSGRPYDENFVSRLA

SEQ ID NO: 440342 - protein, 368 aa, unidentified
MDSEYYTTIGMDVSDRTTKVCVMTKERGARRILEETTIPTTRAGIRAYLAGKGANWPVVFETGTHCRWMKREIESLGMKAIVANPSKLRMVTESNTKNDRNDARELARFALADVELLHPVRLRGERCQQALRLMKARDMLVKVRTMHVNELRGFAKSMGFRLPDCPANRVHVMDKSGWPADFESVAWPLMDVLETVDLKIRAYEAQIRSLAESQELKDAVDRVREVYGIGLLSGVALVASIDADPGRFRKARDAGAYFGLVPKQRQSGEMDVQCHITRAGSDFVRRLMIEAAQIAMRDCARDTDVKLKGLRICARGGRIAKKRALVAVARCLVVTAVALLKKPDAEYVPLSELARREFEAMRYEETAA

SEQ ID NO: 440343 - protein, 401 aa, unidentified
MSKKNTRNALDTSLSYAVIGLDLAKADCAVAAVPCSDDDLGLIDRMDYESLFEQAEKLGPTLFAMEPCCGYSQISLRLQNMGHEVKVISGHAVKNWIATHKSNQKTDLNDATALAKLALYDHDLQPIRVKNVEECRIASVQAIRIQLRTQATKSLVCFKSLCQCWGIVIRRGSLNTKKMAEAVAAVEKLLGAEVASSLMILRDAYKFTMKQINALDKLLDALVEANEQARTMKTVLGIGTQTAARLAVTTGDIKRFPMPRSYVAYFGLAPRNIITGHSGTPSPSKRGALKPVSSRGQGKVSRRGDRVARSFIIQGAATIYMLYCKDMLPECQLRRWLHEQIKRGKPYGKIIVSLAAKLLRIVWALLTYGEKFDSHKAGVPRSVLAAMEKPLKHDAAAESAA

SEQ ID NO: 440344 - protein, 354 aa, unidentified
MGLKHQKEKRSMDYFGGLDVSVKDTSVCIVDDTGGIVREVKVASEPEALLAVLVNPSYRFKRIGLEAGPLSQWLFSALVEAGLPAICVETRHMRAVLKAQINKTDRNDARGMAQMMRVGLYRPVHVKTLRSQKLRMLLTHRKLLQSKAIAIENDLRATLRNFGLKVGVVGTVRFEARIRELVENHPDLTLLVEPLLVVRGVLREQLDILHRRLLAVVRDDNVCRRLMTVPGVGPVVALTYRATVDVPARFRKSKSVGAVFGLTCSRDQSGERDRPGAISRCGDEMMRAMLYEAAQSMLRSKKWSWLKAWAMKIARHRGMKRAIVALARRLAVIMHRIWVDGTEFRWTREAAAAA

SEQ ID NO: 440345 - protein, 348 aa, unidentified
MLHVGLDLSRKRLDYCLLGGDGERVERGAVAPDGDALAGLVRLVELRHGPRAVCAAIESMNGARFVHDVLERCGWEVAIADAQKVKGLAPLACKTDRIDAWVLAELSRRELVPAIWLPSFEQRQERERARFRLYLVRHRSSLKQRVHSELMAFGHSCAVSDLFGRQGRELLERLVFPEPWRASVLCAVAMIDDLERQIDGIESELKALGACHPYVPLLLTVPGISWVLGYTIAAEIGDISRFASPKKLCGYTGLCPRVYQSGGSDRRGPLAKHGPKYLRWALMVAATNAAKHPLYRERYQHTKQRLGKQRGPKVAQIQLARTLAEAIWHMLTRNQTFAPAGAPLPLAA

SEQ ID NO: 440346 - protein, 329 aa, unidentified
MEKDSKGLAAIDVSKDKLDVSSRDAMGKRRRKTVRNTPGGRADLSAWFKANGLEGASVCLEATGRYGDALAEELHAEGFVVRIANPGRVKRFADALGSRNKTDSSDADVILEFAAALPPPVWTPPRAEIRSLRALLVVRDGLVGDRAEWMNRAKAELPGDEASLARLQIARLDREIADLDATLAMALSSDPALDAKRELLSSIPGVGPVLSAVFLSVVPESGFQRAKELVAFAGLNPRRVESGTMRGATRISKVGHGRLREALYMAAMCGMACNPLLAAFAARLKAREGGMAGKAVVVALSRKLLTICHGVLRSGRPFEAPPTAPAPAA

SEQ ID NO: 440347 - protein, 355 aa, unidentified
MNSVRYIGMDVHRDTISVAVLDESGRLMMQSVLATRAAAILDFIRGLRGTLHVTFEEGTHSAWLYDLLVRRVAKLVVCNPRKNALLKSGSKSDAIDARKLAELLRAGMLSAVYHGETSALEVQHVARSYTLLTEDTTRVMGRLKAVFRGQAVACAGKKLYGKRHREEYLAQLGTGGLGRRAECLYQELDALQQLRREVRRELIVECRKHAAAKWLQSVPFLGPIRAALLIGRVQTPHRFRTKRQFWTYCGLALETRDSGEYRVINGQVERKRRPTQIRGLNWNHNHEMKNLFKAAATTASMRAGIFREFYVGLLAKGMRPEMARLTLARKIAAIALKIWKKGETFDAEHLKRQAA

SEQ ID NO: 440348 - protein, 476 aa, unidentified
MKNQNIYRNNNYALKETLSNYKPEQLLYIPIEVGKFNHKASIVNFFGDIVVKLFEFPNKKHGLDFFVKKLNFATTSSNAQKIFLGCESCGHYHLNLVHHLKQLNFPIEIINPRDTRKENPNKNSKTDNIDLGAIARVLISNKGGRQIVPEGVYYNLQRAARTRRKFVQRKTSSKNIITGLLDRIFPGLWDKDAPIFSDRWGKASMLLLERYPHPHRIIRLGEQRLARFLRKNNTKLGMDSAHKIIDAAKDSLTKPLSELHMDIFALKSHIKCLNLYNETIAQLEQEIACLLVQTPGIYLLSIDGISVIFAGEFTAEVGDINRFAYANQIISFAGSCSKVFESAEYQAQGLHISGRGSKFLRSTLNQVALALNAWCEPFHLYYTNKALQKPDKPGIARIATGNKFVKLAFALMKYEQLYKPRGLLLDEKNYYSNLWSKIIRKLSGFNLTNISQENNYLLKIKKYLEEKYALTLPTKL

SEQ ID NO: 440349 - protein, 421 aa, unidentified
MRAFGLDVHRDFCEVAIAEEGMVRSAGRIATRVESLELFAQSLVATDVVALEATTGADKIVSLLQAQGIRVVVANTRKLRSISEARAKTDRLDARTLARLLTAGLLDEVWTPDERTRTLRRLTNRRERLVRARTRAKNEAQGVLARNLCERPPVTDAFGKGGRRWLAGLELPVDERLTLDGCLRQVDFLDAEIAALDGEIAKQALAWPEVLRLMSVPGVNVQTAATFMAAIGDIGRFSSPRKLVSYLGLDPRVRQSGNTAARHGRISKAGASEPRHMLGEAAWKVMLTPGPLRAFFERIRARRGTQVAATATARKLAVLFWYLLARGEDYAFARPAMTRNKIRRLELLAGAPPQKGRKGIAGGKSKAVFDAERELSRQAETAYRRLVSDWRSSSPAKAGAGATPGRASHRPSKGKAARQTP

SEQ ID NO: 440350 - protein, 407 aa, unidentified
MDLLKTVFGIDVSSRKSNVCIMVNGQKVNDYAISNDMVGFNQLLGDLKQVTNPQINFEATGVYSRRLQAFLDMHELRYVMMNPLEAKRKTKDDLHQNKTDKLDALYLAKLQSEHPQRLAYVQSEEYQELMANNRIYEQASHDLITNRNRLHKAIQLTFPEIEHLMVNPRGKNYWSIVLRFPHPDIVLETKEADIIDFLKGLTGIGKKRANDIAQSLIRLAKVACPAVKKNSAHIRGLKMAINNILSAEEECQTALQEMAKLAPKRDLEILTSIPGIGENTALRIISELGDIRRFNSPSQLNAFVGVDPQVYESGNLTAHLSISKRGTAIGRKVLYLAINQIQSAKKVGNPCHIADYYEKRKRSSETASHKKAAIASIHKLLRTIFALIKKDQLYSYDVAKHNQRLLS

SEQ ID NO: 440351 - protein, 454 aa, unidentified
MKKAYLGIDVSKGYADFILIDAEKKPISKDFKLSDTRSGHDNLERFLNSMQSDHELDLIICGLESTGGYENNWHYMLNRLMPERIKVKRINPRGVRHEKEASLVRSENDKVSARAIAVHLVNQETRIMEGNECDLEFYQARKFYRHIQSVVKDQTRVKNRLEKLIYESFPELLGMVQGGSVTKWIVRLLIKYPGAQKVANASVKSLSKIQGITKEKAESLKKKAKDTVGVPSSIHMQKTIRSECFEIHRYDAQIALKKKDLETSYVNEQVENLMTINGFGHYTSCGLIMEIEDPNRFEKASSLSAYFGVYPEYKESGDGKLKPRMSKKGRASCRAILYMAARNVVIHDEYFKAYYAKQRAKGMAHCAAIGVVMNKLLRVVWGMLKSKKPFDSKIDLANQNRPKGDSIQKSIKAEEITLDAPISSRKRRKIKAMQESQDPKKESNTRSSPSPVQT

SEQ ID NO: 440352 - protein, 367 aa, unidentified
MQIRRPPVSFNGTSVGLDVHALSVVAHAVDEETGRVERARLCPDHGEILDWLHRLRGPVRVAYEAGPTGFGLARALFDAQIDCVVAAPSKLIRPAGDRVKTDARDAAHLTRLLRLGEITAVTVPDADVEAVRDLVRAREDARADLMRVRHRLSKLLLRQGRVYSGGHAWNGVHETWLRRQRFDDVHTTAAFDHHFDAVLTATAARDRLDEQIVAVAASPRWADPVDRLGCLRGISALTGLALTVEIGDWARFTGCSIGAYVGLVPCEYSSGTSRVQGSITKAGNAHVRRLLIEAAWHHRQPYRNPGPTMRARWAKVDPAFKARGHAGNRRLHQQWCRFNERKKNHVVANVAVARELAGWCWSLATLT

SEQ ID NO: 440353 - protein, 429 aa, unidentified
MKSLNDSLSLFRVMRASVRGSEKYLLVGIDVAKCKHHAFFGTPNGRTLRKNLVFDNSTKSFESLRSLARDLQNQHGLVEVVYGVEPTASYHKPLAEYLIRQGDQVVYVSNVAVKNNRALLDGRWDKNDKKDAANVADLVGQGRCLYYDVPEESLRELRSLIAYRSKLKKQEHALRMRLRNNLFAQYFPELDRLFVKTGQPDDMVLSIAEHCLDPREIARMEFDDFLKLITTRKIRIEQEKRLRELWEGAKNSAGCLVHDAARWEAKSLVSQLKTLREIVKDNELRMKTAAQQYPEYQSLLSIPGFGPIVSAMVLGAIGDPYRFENQRQVLRLAGLDLSAARSGKNSDSAKPVISKQGKAALRYALVQAAMVSSSSNPTVRSYFSGLLQGRELERGIKLKMKVKLAAKLLVIAWTLMKSREQFKPSCFPG

SEQ ID NO: 440354 - protein, 419 aa, unidentified
MSFKILKNNCCGLDVHKTWIYACIGITDSFKRTEYKQARFSSFTKGLQELCLWLAKYNCIDVCMESTGKYWIPVFNVLEKNNIFVTLSHPKYTKPQKGNKTDRKDAKWICDLYMCGMVKPSFIPPADIRQLRDLVRYRFKLTCMITGEKNRAHNCLTVSNLKLDDVFSDIFGKSSRSITEQILQHPGEVFDVAPFVDSRCKTPIEEIQAAVDGAISHEQAVKLRQCLKHIDELEMHKTEIEREIFRLSQKYESVLDLIRTIPGFDKNPLTAIQVLSEIGADMSVFPTAKNLVSWAGCCPRNDQSSRKIKSTRISRAGSYFKPVLVQIANALIKSKKHPEFTTRYRRIKARRGHKKAIIAICRMILTAIWHILTDLKPYTPEGFLESRPVNKEKVLTISQALNLIKQRGYIIKDDVGPVT

SEQ ID NO: 440355 - protein, 370 aa, unidentified
MLDTTTFVGLDVHARSIKAVSLDVMTGEVRAATFGYDAGAVAEWVRSVDPRARCVYESGVTGFDLQKRLTGLGVDCAVGAVSKTIKPSADRRRKNDRNDAEFLARMLSVGNVVEVWVPDDECEAARDLTRALEDARDDLSRSKQRLSKFLLRHGLVFDERTPTGRRKGNWTRAHWSWIESIRFAEGADEEVLAYYVDAVRRAAEEKARLEGLVEAEARKPRWRRRVDSLRCLKGVDTATAADLVFEAGEFSRFRNARSFAAWVGLTPSEHSSGESDRRGAITKAGNKHLRKALVEAAWHYLTCSARPKDLARGQAPDRVARRHAAKGVRRLVERREALLARGVHNNKANVATARELACWVWAVGLMAEEA

SEQ ID NO: 440356 - protein, 401 aa, unidentified
MDRVAGLDVHKDSIFCCVKRGRYQSAVKVFSTTTQGLKELYHFLHGEPVVKVAMESTGIYWMPVWRALEQDFTLLLVNPYFIKQMPGRKSDVQDAVWIATLLDKKLLKSSLVPEKEIRILREYLRRYVHLQGQMTRVIQQLERRLSQCNIKICSLTSKINNNSVIKVVRSIIAGQSSSQELTSLVHKRTVNRHGQELIEQSLDGIIEQHDRFFLGQIMQEYDLINAQCEELLAQAEQLADQNYKAHIERLCTIPGISKLAAVIVFCEIGGDISKFASAENLVGWAGMRPKNDESAGKIKTTRIGKGNRYLRRILVQSAWAASRTKGCYLKSKFEKLSLRKSRKKALIAIARKELVLVWNILSKQEDYKEPKITLSPQQAQRKKSYYQAKLNQIEQQLEKVG

SEQ ID NO: 440357 - protein, 351 aa, unidentified
MTNITTIGVDIAKNYIQIHGATDKGKTLLKKRLPREKFLPFMANLPSCLVGMEACGGAHYWATELKKLGFDARIMSPQKVKKYVDSHIKNDERDAAACAEAVTRENVAFVSIKTTEQISIQSTHRIRSFYVRQRTALMNMVRGLLLEHGVAIKKSESALIKKLNELLDIENSCLDEENKSNFQSLYDDLKNLDSRIDQQTTKLRSLAKQDELCQRLQTIEGIGAITATALIAKIGNGCDFKNGRELSAYLGLVPKQHSSGDTQRLLGITKHGDRYIRVLLVHGGRAVVQASRRINKLTGDYQKQDPHSQWIRKLTDRSGTNKASVAIANKNARMVIALLKNQTIFDAKLAH

SEQ ID NO: 440358 - protein, 422 aa, unidentified
MKKRIYRKMPVNQFQPSSISRDEVGARLVVAVDVAKVDMVAAIAAGDGRVLNTIAWKAPAENVAVLEVLRVFRAAGFLIEVAMEPSGTYGDVLRYQLEKEGFPVFMVSGKRTFDAREIFDGVPSLHDAKSAAIIAKLHVEGLSKPACAPCPERRQLRAAITIMDLHQRRYLQLVGNLEGWLARHWPELPALVELTAASLMALLARIGGPADVVANRSVAAKLLRGMSHGLMAEEKITAVLDSAGTTVGVPLVGLERDALMAIAAEAHRALRAFKVAKTGVEKLSAHTPAVVLAPVIGKTTAAVIYTEVGDVRSFSSAGSFLKAMGLNLKEKSSGTIKGQLKLTKRGSSRVRHYLWLAVFRWIQKDPIANAWYQRKKERDGGKSSRAAVALMRKLAKALYHVGRGATFDSSKLFDVRRLGLAA

SEQ ID NO: 440359 - protein, 449 aa, unidentified
MTNGSGVSRGDRNRNARLSRLREAVPVTNAIVGIDLADRKQMVVVTDHDSRVLARRTFRCKAWDLGAALDWAADRASRAGFTRVTVAAEPTGHRWRVLGQLAADRGMSFVCVQPALSSWARKTEDLTTDKTDDKDAVLIARLSGQLRCYLPEPVDEIWGRLRHLGTRREQLIEEHVRCVQQIRDLLECVWPAALEAAKWPFRSTTWVAAMTVVMGRDGGDLDRTRRLGPGRFEHAVRKEVIKRGKVRPCLRIVRRLFTALSDPAGVIAHRPGAFERLAWTLSDWDHAKAKLAATEARMVAVLDQLQLTELASSIDGLSPVGAAAILAETGNLTRFTSARAVVKHAGLAPRERMSGTFTGRARLTGAGRPGLRVAAWRAVWGCLQTNRVYAARYRHLTTRETNKLTPTQAQTAVAAAILRQLYAVVVHQQAWDPAVAAHGTRHAMQVAAA

SEQ ID NO: 440360 - protein, 406 aa, unidentified
MHVRCAGSDVHKKTVVCCVMISQSGGGVEEHKATFGTMTPDILALSDRLKSHGVTHVAMESTGVYWRPVYQLLEGQFTLLVANAQHIKRMPGRKTDVTDAQWLADLLRHGLIVPSFVPAQPQRELRELTRHRSNVAARRAQCINEVHRTLEGTNIKLSSVATDITGVSATDMLQQLLAGQTDPAVLAELARGTLRKKIPQLRQALQGTVRPHQQLILTQLLADIQSCDAQILDLNTDIANRLTKEQEVLKRLDEIPGVNHKVAEVIVAELGTDMKRFGSASRAAAWSGMCPANRESGGRRYRARSRFGNKHLKSALTEAGRAAGRSKDTYLGAQYRRLTARRGGKRAALAVGHSILTIAYHMMDRGTPFNELGADYFDRRNPERVKARLVARLEKMGYTVQLEPVS

SEQ ID NO: 440361 - protein, 467 aa, unidentified
MSRKKRSAKSSSHRGSLPVDNAPSTDRALEMLHPHAAGIDIGATQHFVAVPAEADETPVRSFGTYTADLEAIADWLQKCGVKTIAMESTGIYWIPLFELLERRGFAVVLAEPSQLKKTPGRKSDVLDCQWIQQLHSFGLLRNSFRPDDAIVVLRGYLRQRNMLVEYSSAHVQHMQKALELMNLKLTEVIDDITGKTGMRILDAILAGERDAHRLAKLRDRRCKNDEATIALALQGNWREEHLFCLRQSVALHREYQRQLALVDEQIEAYLRTFEDHSSHPLPAAKRRKPGKHEPAFNIRSLLYPLTGVDLTSIAGIGPHAALRLVAETGTDMGRWETEKHFCSWLALCPGVNKSGGRKQSRSGRTRPSANRAATVFRLCAQSILRTQTALGAFGRRIRAKLGGPKAITAVAHKLAKIYYGMLRYGKAYTDQGADYYDKQYKSRVLANLQRRAQQMGYDLTPNTETFD

SEQ ID NO: 440362 - protein, 348 aa, unidentified
MAKSTLEKKSKTARYAGIDFHKTFSLVTLGDKHGEEILQEKLWHSDVSSIKKFFKTHDKVVCAIESCRGYEWFLDLLRDLGLEVHVCNPVKMKVICQTAFKNDKIDSRKIMDLLARNYLPTSYQATPEERHLRERVRWRANLVRKGTSIKNAIKAVLAKENISIKDACSRTGRLKLVEAKISKAHRAILDDMFESLDANDTAVAIQTKWLEQCAKKDKRVALLKTIPGFGSISAIAFIAEVGEVSRFKRPSQVASYFGLVPRLSESADKRRQGGITKTGSTELRWLLVQDAWTAVRNSPELRRRYLNICRRRGKQIAVVSIARKLAEIAFCVLRDRKPFNESNLRKRD

SEQ ID NO: 440363 - protein, 338 aa, unidentified
MIVIGVDVHKHSLTAVAVDKTGRLLAERTLRGAEDGLLAWAAALDSERLWAVEDCRHVTGALERELVAAGERLLRVPPKLTAPERRAGRVRGKSDSIDALAAARASLREPRLDRPRAGEERLRELKLLVVHRDDLVDERRRAQQRLRWHLHELDSTLAVPPAALDRAAQLERVSRWLRRREQTVLVRISRDLVGRCRSLTCAILELERELAAMTAQIAPALLELPGCGALTAAKLLAEIGPIERFQTDAQLARHGGVAPLEASSGRVRRHRLDRGGNRQLNCALHRIAVTQARVHPAARAYLERKQTEGKSRREAIRCLKRQLARVVFNTLKASPVLT

SEQ ID NO: 440364 - protein, 338 aa, unidentified
MNIVFLGIDLAKNVFQLCGVNQAGKPVYTKRTGRKELLQTLANIPACLIGIEASTGAFYWQREFEKLGHKVKIISPQYVKPFVRGQKNDGNDAQAIAVALMQPTMQFVPPKSPEQQDIQALHRARQRIVNHRTATVCQIRGLLLDRGIPIGSAVSRARRAIPLILEDAENGLSSRMRRTIAELYDLFNDLGRRIHFFDKEIETVFRQSEACQRIAKVKGIGPKTATAVVAAIGKGTEFKNGRHFAAWLGLVPRQHSSGDRQVLMNMTKKGDKHLRTLFIHGARAVVRVATNNNDGHMNQWVNQLKERRGFNKTTVAVANKNARIIWSMLRNDTGYQVV

SEQ ID NO: 440365 - protein, 425 aa, unidentified
MKITNIAEEINLNQIMDISVDVHKDNLNFFFVTGGKEFTDECRNRTDVIERRIKKYIKIAKDNEMNNLRIICEPTGQYQNSLLRTARRHGCLTCYVNAESVKKFRVVETNDTGKTDTKDPRVISTLARLNKVIKHRMLGEDYLMLRKLGKIYDETDVEIVRLKGRLNKLMVELFCDYSFKKDFLYSNSGFALVEKYGCNPYRIIKSGFNRFCRTMKKAAPRIHEKTLKRLFEDAQSSVLNELPPGYIEVLQQRFYQLFQDYLKQSKGKEEIVEKMIEILNRLREKDPNIPPPTVGVISAKNLARLLGETGPLDDFSNWRKLMRYFGLNIRMRQSGQYQGQNKITKKGRPLGRKVLDNIVLPLVKQGCLYGDYYHVKKDKEKRPGNKAMTIIMRNFLKKFYGWYQSGKAFDQKRFFNSESRYSKAA

SEQ ID NO: 440366 - protein, 466 aa, unidentified
MPNETSANANKIAKKELARRLRSADPGLEVVHPNAAGIDVGNGSHYVAIRPDRDPEPVRRFACFTADLYRMAEWLRSCGVKTVAMQSTGVYWIPLYDILEEFGFEVFLVNARHTKNLPGRKSDVQESQWLLKLHTHELLNNSFQPSSDIRVLRTYWRLRAAHATGMATCIQRMQKALTQMNIQLANVISDLSGTTGQAVVRAILNGERDPQKLAELRDWRIHATKEEIAKSLQGNWRPELLFIVRQQLEMYEAYQRQIAECDQQLQKHLASFASAPSTSGDRCNPPQSKKSKRYRYMPQFPLSNELMRISGIDLTQIDGVDAMTAQTLISEVGLDMNRWKTESHFASWLGLCPDNRISGDKVLSRGTRRVINRAATALRIAASTLIRSKTYLGAQYRRLRTKLGAPKAITAMAHRLARLVYRMLKYGQKYVDKGADYYEQRSREQQINFVRKKAAQLGLQVTIAQS

SEQ ID NO: 440367 - protein, 355 aa, unidentified
MTSMNFIGLDIHNSMNFIGLDIHKKTISYCVKDAAGEVLAEGTILSTRQSLDVWMRTLCEPWTVAMEATMFTGWIYDYLLPHAAAVKVAHPLMLRAIAAAKKKNDRIDACKIADCLRCNFLPECYMASTEIRERRRTLRYRKLLVRQNVQLRNKVSQMLMESGVVYNKQKLHKVGYFKELMTTNPDIGEGLRPLLTICRETIVRIGKTEGALVRSLARDPLLSDRVQRLMTIPAVGPITALTWVLEVDDVARFGSVKQAISYCGLCGAERSSADMVKRMPISKQRNKHLQSVLVEAAKLGPRLSPDLALVYETEKQKGHANRATIAVARKLVAYLLAVDRSGREFVVAGERREAA

SEQ ID NO: 440368 - protein, 390 aa, unidentified
MFYAGIDVAMDKHDCVVLDSGGNCVVEVFTFENSSNGFQLLRKVLKSCSKKPKNIKVGLESTGHYSDNLLAFLNSIGYDPVLFNPLHTNLFRKGQSLRKTKTDHVDAHTIATMLRTEDLKSYSQPSYHLSELKSLTRYRSTLVSDCSRRKISLVRLCQILFPELKNLVPSLHMSSVYTLLSELPSADKVAKCNLMHLTSLLSSASKGHYGRDKAVEIREQARTSIGIRSIVKELELQQTIELIRILQQQIEAVENKINELMEDIDSPITSIPGIANRMAAVIIAETNNFKDFERAEQVLAFAGLDPSVYQSGQLTSTHSKMVKRGSKYLRYAIFNATKYVCHWDPTFNAYLAKKRAEGKPYNVAVSHAAKKLTRVMFHLVKTNKEFVPQV

SEQ ID NO: 440369 - protein, 371 aa, unidentified
MRFYSSQHQFYAGIDLHARSMHVCVLDGAGTVVYDRNLACHFPTLLEALAPYRGDLVIGAECMFGWYWLADRCAENHIPFVLGHALYMKLIHGGKAKNDRLDAAKIARLLKGGNFPLAYVYPQGMRETRDLLRRRMYLVHKRAELITHLEILNAQNNLPPFGKKLSYAGNRAELHIAERFAHPSVQMSATLDLDLIDKLDELIAEVELYLTRTAKVDDVQMYHRLRTIPGVGPILALVLLYEIHDLARFEEVGQFLSYARLVRCEHESAGKKLGWGAKKIGNAHLRWAFAEIACLFLRASERAKQWKQKQEQKHGSGKALGILAARLARSVFHMIRKQEAFDAKRFWNGQVSGEQPGPSRKKPAKSRRKAS

SEQ ID NO: 440370 - protein, 312 aa, unidentified
MSDPVYVGLDVSKHHLDLAFEPVGDARRLPHTEEGVTALVAQLHAIPPALIVLEATGGYETHVATALALAGLPVAVVNPRQVRDFARALGRLAKTDAIDAQVLALFAARVRPEPRPLPDQAHQALAALVTRRRQLVEMLTAEKLRVPLAQGRIRHDLQAHIQWLEQRIHDTDHDLRAALKASPLWRVTDRLLQSVPGIGPTTAAVLIAELPELGRLTRQQLAALVGVAPLNHDSGHRRGLRRIWGGRADVRRALYMATLVATRYNPVIRAFYRHLLAAGKPKRVALVAGMRKLLTILNAMIKSQQPWAPAHP

SEQ ID NO: 440371 - protein, 353 aa, unidentified
MRTYYVGMDVHRATIAIVVLNGAGKVVEQLVVETSATRVRCYLKQLQGRVYVTFEEGTQAQWLYDVVQPLVTEVIVCNPRHNKLLKAGNKSDRIDAQKLAELLRNGALKAVDHRDHGVRALKELVRNYDCLVSDTTRVMNRLKAMFRQQAIACGGHEVYRQDRRAVWLAKLTERGAKARASSLYRQLAALKALRHEAKLAMVREARRGAAYLWLMSVPRLGAVSVAQLLAVVGTPHRFRTKRQFWSYVGLAVVTSSTADMEVVDGVLRRSRRPVATRGLNRNHNHLLKRVFKNAATSACQSAPFKQHYERRLQQGMDPALARLTVARQLSAITLSLWKRGEKFQAERMKRQAA

SEQ ID NO: 440372 - protein, 361 aa, unidentified
MTNTSREQQLTAGLDLGDKYSYLCVLDTDSGELVEDGRLRTTPEDLRRRFDFEKKLRIAIEVGTHSPWVSRLLEACGHEVVVANPRKTRLIYGDKRKTDELDAQKLARLARADPELLYPIEHRGEDSQAHLALIHSRDALVRSRTQLINHVRGMVKSFGARLPKCSAESFHKKVADALPSELAEALGGVVETITSLTERIRDYERRIERVCKESYPQETGLLRQVPGVGAITSLTFVLTLEDPERFEKSRAVGAYLGLVPGKDQSGESDPGRPISREGDKMLRRLLVSSAHYILGPFAPDCDLRRHGEKIAERGGKNAKKRAVVAVARKLSVLLHRLWITGEAYEPLRNARLSRALGEEVA

SEQ ID NO: 440373 - protein, 347 aa, unidentified
MKHYAGIDVSLNSSSVCVVDESGKIVREVKVASEPVALINWFKSLCTRMERIGLEAGPLSQWLYGALRESGLPVELLETRHVKAALSAMPVKTDRNDARGLAQLMRLGWFRPVHCKSIAAQEVRALLTARKLVQSKLYDIEMSLRGILRGFGLKVGPTTSRSFAARINHLVAGQASLETVAQALLSVHAAALREFKILEKQVRQIGRADERVRLLMSAPGVGPLVALTYVSAIDDPKRFTSSKAVGAHFGLTPKKYQSGETDITGRISKIGDSTVRAVLYVAAHIILTRPIHGGALKSWAMRLAKRAGMKKAKVALARKLAVVLHRMWVSASTFDFEKANGCMRAAA

SEQ ID NO: 440374 - protein, 406 aa, unidentified
MELVAIHQRVIGLDVHQAQITACAILAEPDGELRIERRQFGTFKRDRRELAAWAASLDPDEVVMESTGIYWKSPYAALEAVGIRATVVNARHVKQVPGRKTDIGDAQWLATLARAGLLRGSFVPPAKLRELRLIARQRQKLVGQLSAEKNRLHKILTDAGIRLGVVVSDIHGQSARAMIKALLQGQAPHEILQLASRRLKASREELHNALQGELTASHVFVLDEQMRHIEELEACIARFDARLLSELASEMNALALLQTLPGVDVIGAAMLLVEIGSDMSAFGTPDRLASWVGICPGNNESAGKRKSGRVRKGNPYVRRLLCEFAHAATRTRSAFQSKFQSLIVRRGYKRAIVALAHKMLRTIFFMLKRGEHYRDSATNYEQLSVQRNASRWIKALTRFGFIPVAA

SEQ ID NO: 440375 - protein, 372 aa, unidentified
MKKIITFIGLDVHKSSIEIAIAELGRGGEVRSYGKVDGSLAALDKVVRKLFSLNYKLHFVYEAGPCGYDIYRHLTAQGFDCVVVAPSKIPRQSGDRIKNDRRDAIKLARLHRAGELTPVYVPCTEDEAMRDLTRGREDAKGAEKKSRQRLSAFLLRQGHRFTGRSPWSTAHMRWISDIKMPHPAQQIVLQEYVDTITECANRVERLTDQIQQLLPSWQLFPIAKSLQAMRGVSLIVAATTVAEIGDLKRFDNPSELMSYLGLVPSEHSSGEKTKRGSITKTGNGHVRRVLIEGAWAYRFPARVSRELRRRQEGLSPEICAISWKAQLRLCARYRRLMAKGKSKQVVVTAIARELCAFMWAIAHKVETPVMGK

SEQ ID NO: 440376 - protein, 426 aa, unidentified
MGYRIVGIDVHKRMLAVVIADVAVEGEYQFERRKVGTSPSELCRLADWLTTEQVEEVVMESTAQYWRPVWATLEQRWRPKRLGEGAGARSGQLHLAQAQSNRGASGRKKDFPDAERLVKRLVAQELKLSFVPDVEQRLWRTIMRRKHQLTRNRVQFQNRLECLLEEAHIKVSSLVSDLLGKSARRMLQAVAEGASSPEAIAALADHRLRATAQQLCDALGACRDLHPVYRQLLKMALEELKLMEEQIDKLDQEMASLLSAHQDVVQRLTEVPGLGVDSAQQIIAEVGPAAAAFPSAKHLVSWVGVCPGEEESAGVNYSHRSPKGNRQMKGLLNQVSNAAVKTKGSFFEFIYRRLVPRLGHAQAIGAIAHRLCRLIWIILHRAIRYEERGPAVSRSKTERRAAKMIRELRRLGYRVEPNPCHTGASI

SEQ ID NO: 440377 - protein, 341 aa, unidentified
MEKYVGLDVSMEETSVCVLDGGGNIVFEGKTSSQPDALSKLLRAKASDAARIVLETGSLASWLWHELRSRNFPVICLDARHVRAALSMRVNKTDRNDARGLAELARMGWYREANVKSMESRYTHSLLAARAKLVDLRRDVENQMRGLLKGFGLPPGKGGIKALLEKIVVIMREAPHLHMLFKPMMLAHSALVTQVEFYDVQILKLAKGDETTRRLMTAPGVGPATALAFRSTIDDPNRFKSSNDVGAYLGLTPRRYQSGELDRTGRISKRGDRLTRLYLFEAASVLLSVVKRWSVLKAWGVRLAKRVGIKKAKTAVARKLAVILHCIWVDGTEFQWGKEKA

SEQ ID NO: 440378 - protein, 365 aa, unidentified
MNYIFVGCDSHDKTLVTKIAVNREAGERKAFAASRWGRRKMIEFLKTKVEQVGGAQVAVAYEASGNGFILCDELRAAGFECHVLAPTKIERSVKQKRNKNDERDADRLLEILRGHYLAGNRMPSVWIPDPQTRDDRETPRTRQDLSQKATGIRTQVQMLLKRNGIEKPEGIGKGWTKSHRQWLKTLSERGDANRPGMRTALGSLLRQLEFYEEEIGRLDPVMQELANTPRWKPIVDALMTEKGVGLNAALKYATDMGDFSRFRRGRQVGAYYGLVPSSQESGETNDRKGHITREGSPSTRQILCQATWARVRHDPNEREVYRRLVARNPKKKKIALVAGMRRLSVRLWHVGVAAQLQMKAAEATQ

SEQ ID NO: 440379 - protein, 404 aa, unidentified
MIFVGVDWSETHHDVCVLNEAGDVLSRKKIPDTLAGVRALHELLALYVREPDEVLIGIEKERGLIVVSLLGANYRVYALNPLSVARYRERHGTSGSKSDPGDAKVIADVVRTDRHNHREAGSDSENANAIKVLARAHQRAIWNRQRETNALRSALKDYYPGALLAFGTELDESDAVEVLAIAPTPALGAQLSLAKITSALRRGGRQRNLERTAKKIQAALREEQLRERPKVELAYGTITKSHVALIKGFSVEIAELETALATDFEQHPDAKIIRSLPGLGMVLGARVLGEFGDSPNRYADAKSRRNYAGTSPVTKASGKFRVVLARYSRNAQLAGTADQWAFCSLRNSPGARAYYDELRARHKTHRQAIRQLANRLVGILHACLEQRALYDEDLAWKHREDIAA

SEQ ID NO: 440380 - protein, 337 aa, unidentified
MWYIGLDVHTKKTFVCILNEDGKKIKTRAITGPYPHVVAVLKDLLKGQRCKIVFEASTTYGWLYEQLSTIATQVQVAHPGQLRLIFRSKRKSDRVDAGKLALLLYLDQVPVVHVPTLDVRAWRGLIEHRKRTVDKRTRAKNASRALLRTHAIWRPKNLWCKKGMAWLADVEFAHRGDTVRRDMLLEEVMHLTRQIATVESELARISQGHPGVTLLQTIPGVGIRTAEAVMAYIDNPGRFRRNKSIGTYFGLVPCEDTSMKQRFGHITREGPSTVRRMLIEATWQSIRRSETIRAYFERVQRGDKERKKKALVATAHHLLRTMLSMLSSGETWRDTAA

SEQ ID NO: 440381 - protein, 346 aa, unidentified
MEHYVGLDVSLKLTAICIVDRTGKIEREGVVPSDPEAIAVFVKSHAPHVVRIGLETGATSTWLWTELRELGLPVICIDARHAKAALKMQINKSDRNDAVGIARIMQCGWYKEVRVKDLDSHAVKALLVSRALLVKIKRDLENQIRGLLKNLGLVIGRAKMNVFAVRTAELIDNRPALAAAVVPLVKAREAIERQIADLDRKVLWLARKNAQVRQFMTAPGIGPVTALCFLATIDDPSRFKRSRSVGAYLGLTTRRFASGEIDWTGRISKCGDKMLRSYLYEAANVLLTRVAKWSALKAWGVRVAKRCGLRKAKVAVARKLAVILHRMWIDGTEFKWSSKEASNQPA

SEQ ID NO: 440382 - protein, 342 aa, unidentified
MNHYAGIDVSLECSSVCVVDASGKILREARVASAPEALIAWLRSSGFEFERIGLEAGPLSQWLFAGMREAGLAVELLETRHVRKAFEAMPVKSDRNDARGIAQLMRLGWFRPVHCKSMSAQETRSLLTARKLVQSKLHDVENSLRGILRGFGLKVGKTTGQKFAGRIEELVTGQPHLQMIAKALLAVRAVLRTEFAAFEKQTRRMVRSDMQARLLTSIPAVGPIVALTYASAIDDPARFKSSKQAGAHFGLTPKKHQSGETDYTGRISKIGDASVRTALYEAANVMLTKPVKGCSQLKSWAMRIKRRAGMSKAKVALARRLAVIMHRMLADGTPFNAAAAAA

SEQ ID NO: 440383 - protein, 412 aa, unidentified
MMNPVIGLDVAKGESQVQAFLDKKQPYKKSFKVAHTLEGLNSLLNFIKEVEDVSGGHPPIILESTGHYHTPIVQYFEDRGYLLIIVNPLISYRAKSSSLRKVKTDIIDAHHLCELYYKEDLEPYKQRGIQLLNLRNLTRQHENMTGMFVQTKLQFQAVLDQVFPEYCGVFGSLYSDVSLRTLQAFPTSEEVLEADKETIANKIKELCKSRSQQWANSQAEKLMAAAAQNPFQKALYHSLSLSLNMYINMLLEYKKHLSMLEDEIDALAKNIEECKIIQSIPGIGEKIAATIISEIGEIDRFNHPKKLVAFAGIDPSVFESGTFKGTLNRITKRGSSRLRHTLYMAVKCAIRDCRKKKTTDEIIPRNKRLREFYDKKREEGKPFKVAVIACANKLLHWIYALLKSKSAFQDLA

SEQ ID NO: 440384 - protein, 356 aa, unidentified
METAYDGRQVVGMDLHRRRSVLVRMTEDGRRLGVSRIANSPAELRAQIARAGTSPRVVLEATYGWYWAADTLAAAGAEVHLAHPLGVKAFAYRRVKNDERDAADLADLLRMGRLPEAWIAPSEVREVRELTRYRQKLVSLRTSCKDQVHAVLAKLGVPVTCTDIFGVAGSAWLDQLGLPQPYAGKVTSLRQLTAELTTEISMLSEVTADLLAGDRGYQVIQQLPGIGAVLAAVIIAEIGDVARFKTAAQLCSWAGLTPRHRESDTKVARGHVSKQGSRHLRWALIEAIQRLPRESVIGSVKAGIVDRRGKEARNIAKVAAARRLLTLVYYGLRDGQIRCLSRPADQPATQPPARAA

SEQ ID NO: 440385 - protein, 319 aa, unidentified
MQRIFVGVDVSNNFLDVHVRPTSVRKRFANTSAGITDFLAWVRPHAAERIVFESTGPYQMAAVGALLAEGLPAVVVNARQVRDFAKAMNYLAKTDTIDAAIIAHFGEVAVTKIRPLESEEIRTLRELLDRRGQLVHMLAMEKNQRHSATVARASAKVLQSIDKHIAYLEKQIHDLEERMDRLIENSATFRARNEILQTIKGIGPQVSRTLLIHLPELGQYTRQTIAALVGLAPFNDDSGDHVGQRHIRGGRHKVRLGMYQAAIAAIRHCPRMKAFYAALKARGKASRIAIIAVARKLLVLANAMIRDMAPYREPANSVC

SEQ ID NO: 440386 - protein, 392 aa, unidentified
MSQQHCHFDASRSHTALEQDSTIIAVIEMSQSKWLVAALVPGVKRHPLKKLDAQEEGLLKLLHRWRNEAGQAGREIKRIVVAYEAGRDGFWLARWLRGRDIEAYVIHPTSIAVSREHRRAKTDRLDTELLMRAFLGWLRGEKRHCSMVAIPTIEEEDARRPNRERQNLVTEQTRIVNQTKAIFARFGIRTFRPTLRKAEEKLKGLRTAEGTSLPENTRAELCRHLARLRVVREQIRAVERERLRKLAAAPAAEKGSHAMVFLIARVLGIGIETADMLVSEVLSRRWRDRKAIARYAGLTGSPDESGKRRRERGLARAGSARIRCGMIQFAWRFLRFQKDSALAQWFAARTADRRASTRKTMIVALARKLLIALWHLATRGEVPQGVILRPAS

SEQ ID NO: 440387 - protein, 322 aa, unidentified
MHAFHLGIDVAKAKLDCALRLPDGKFFHKVVENKQTAFTQLLTFLGKHHAQGVHVCMEATGIYWEAIAEFLAAREGFTVSVMNPAQIQAFAASRLTRTKTDKVDAKLIAAFCAERRPEPWQAPSAPERNLRALVLRLENLQAIRIQESNRFEVARECVKDDICEHLQWLDGKIEVLIKNIRQLLHNDDDLGPKQKLLISIPGIGERTVAILLAYYAHPERFHNARQAAAFAGTDPRQHDSGSSVHGKPRLSKIGHAFLRKALYMPAMATLYKTAWGQRFRQRLAAAGKAPKLIIGAMMRKLIHVAFGVLKSGKPFDPARHGV

SEQ ID NO: 440388 - protein, 371 aa, unidentified
MKKFITFVGLDVHKNSIEVALADAGREGEIRHYGAIDGDLDSFGRLLRKLVSTGKELRFVYEAGPCGYEIYRYLTAKGFDCAVVAAPAGDPTKSGRKRIKNDRRDAMTLARLHRAGELTYVFVPREDDEAMRDLTRAREDASNAQRVARQQLTGMLLRLGFRYSGKKSWGLAHIRWLSGIKMPTPAQQVVFQECIHAIKETTDRLERLTRQIEELAPAWRMFPVLRAYQALRGVCLVVAATVIAELGDLTRFDNPKHVMAFLGLIPSEHTSGEKTRKGGITKAGNGHARRVLTEAAHAYQFPARVSRALLERQEGLDKTILDIAWKCQVRLCSRFRRLMAKGKNRKTVVTAIARELIAYMWAIAKQVPISA

SEQ ID NO: 440389 - protein, 377 aa, unidentified
MTPCVFEMVQNAQTGGCSNSRPSLDLSPLTPEAQACDGARDKPGVFANPNSCEGRPRTTRKGWKMAQMVATVGIDVSKDRLDVAVHPTDEEFSVTNDAMGWRLLVRRLKPLMARAIGIEASGGYERGAISALLEAGLPVRSVNPWKLRLFAKAAGVLAKNDRLDAGVIARFVATMPSREVRRDVAVEHLAELVTARRQLVDAVQQTSNQTEHLRDCGLRRLQARRVRQLERDVAQLDQLIAEAIAASPLLSARRDLLCSMPGVGPVLAATLLALLPELGSLPNRSIAALVGVVPYDFDSGRMRGRRHIFGGRAAVRRVLFMATQVAGRFNPTLKAFKQRLLATGKKPKVAIIAAMRKLIVTLNAMVRDNLPWRSVAA

SEQ ID NO: 440390 - protein, 404 aa, unidentified
MYNAVGIDVSKGKSTIAVLQPGGTVIRKPFDVSHTSQSLIELAHYLGSLEGSTKIVMECTGRYHEPMLKALYEAGLFVSVVNPHLIKNFGNNSLRKVKSDPADARRIARYTLDNWAELRQYSGMDNTRTQLKTLNSQFSFFMKQKVAAKANLIALLDNTYPGVNKLFDSPPREDGSEKWVDYAYSFWHVDCVRRIGLKTFTERYRAFCRKHHYIFQPDKPEKLFHASKELVAVFPKEKTYKLLIQQSIQQLNLASGHVERLRQEMNALASTLPEYSTVMGIYGVGKTYGPQLIAEIGDVSRFTHREALTAFAGVDPGVDESGQHKSKSNRASKVGSARLRKTLFQIMTTLLQNAPEDDPVYRFLDKKRAQGKPYYVYMTAGANKFLRIYYGKVKECLRNLEQAE

SEQ ID NO: 440391 - protein, 341 aa, unidentified
MNAATHTLGIDIAKRNFEVNLRSLEPGPARHSSGFPNNPKGFGALQRWLIQHSITQAANLHACLESTSRYGDALAAWLHSQGYQVSMVNPRRTRHYADSQLSRTVTDRIDARLIADFCAEQRHKLVLWEPLSSDHRELQDLTRTRTALVEHRDALANLLETATGLVRKAVQRQRANLQREIERFDREIKKLLDQQPDSKLSTQVALADSVPGVGLLTAATVVAELPCIDKISRASQAIALFGLDPKSKTSGETVKTPARLSKMGSKRGRRALYMPALVALRHNPLIRALGQRLKAKGRSGNYIVVAAMRKLLRQIFGVLKSGQPFDPNWSKSHARQLQEVV

SEQ ID NO: 440392 - protein, 359 aa, unidentified
MASIASDPADVIVGVDTHKDQHVAVALDGLGRRLGQWSAPATPSGYADLLAWAASLGRVAAFGVEGTGSYGLGLARFLRRHGIVVLEVARPPRKGQRRRQGKSDPVDAEHAARAVLAGSGPVTPKTGEGSVEAIRLLKVARDTAVVAHSQAMITLKATLVTANDALRAELEPRTDFALVTACAALEVSGDLADPDVAMRHALRALACRWLELHEEIKAHTRHLKTLTTRTAPELVATFGIGFDSAAELLCAAGDNAGRVRSEAAYAKLCGACPIPASSGKTSRHRLNRGGNRQANAALFRIVVVRMRWHPATIVYVQRRTAEGLSKREIIRCLKRYVAREVYQLLPVPATATAEPLQAA

SEQ ID NO: 440393 - protein, 462 aa, unidentified
MRPPCNVDAGAGRHDRPPTGTRRPERTDRRETNVQPGDIDVWLGLDVGKSSHHACALDHDGNTILDTPVDQDEKQLRRTIVKLQRRGTVLVIVDQPNTIGSLPLTVARDMGARTAYLPGDAMRKAAQLLPGGSKTDRRDARIIASTAPRMPETLRDREPDDETMAALRLLSGWDEDTAHELTRTVNRLRGLLLHLHPALERALAGDRIKSDTALGLLEHYKGPDGLRRAGAARIREYARRHGLKGTAITDAVADAIGEQTVTVPGTRAAESLIPQLVSDLRRLRDRRTDISRQVEELLADAPLLTVLTSMPGIAARTASQILLAIGGDIGRFKDAAHLAAYAGIAPVTRQSGTSIHGERPARGGNKRLKNALFQTAFAAIRLDPESRAYYDRKRAEGKRHNAAVMCLARRRCNVIYSMLRNGTLYQPGGTHTTTTTPPRTETTPAHAPRPRQDTTHPGTRRT

SEQ ID NO: 440394 - protein, 344 aa, unidentified
MKEIKTIGLDLAKHVIQVHGVDARGNAVLVKQLKRDRVALFFANLPPCLVGMEACGSAHYWARQLEKLGHSVRLIAPQFVKPYVKTNKNDAADAEAICEAVSRPNMRFVPIKNAEQQGVLALHRARQGFVKARTAQANQIRGLLAEFGIVLPQGIGHIAKCLPAILEDGENELPGVFRQLAARLGAHLKELDRQVSELEEQIQRWHRENEASRRLARIPGIGPLTASALVATIGDAKQFKNARQLAAWLGLVPRQHSSGGKPMLLGISKRGDAYLRTLLIHGARSVIRIAERKTGDAQDWLIQLIGRRHKNIATVALANKNARIVWALLAQGRTYQSDYAPAEA

SEQ ID NO: 440395 - protein, 354 aa, unidentified
MVTVGIDPHKDMHQAVALAQDGTRLGRAKKVNTGPQALGQLLAWIRALAANSPVLWAIEGGPGLGRALADALLGAGQEVVWVPPRAMAAHRRLGGPVGAKSDVIDAVAIARAALADPGLARHRIDPQVRQVRVLVNLRQNLTDQRVALTNRVLAAVHIELDHRLGQGALATRAKVGRVRALVEGAGLDEMVRWALLEQLEEIHTLFVRAAEVERRLKELVEPLAPNLLGIRGVGVVWAAVLLAQVGDVSRFATSARMARWAGSAPIPVFSSGRDRHRLHRGGNRQVNRALHSIGVVQVRLGEPAREFVRSREGAKGTKGAYRALKRHLVDVVYRAMVADQVVRGRAEVCLQPAT

SEQ ID NO: 440396 - protein, 415 aa, unidentified
MNDRKRWYAGVDWASESHHVRLLDEGGSDIGERIFKHSGEGLAEMAAWLLATSGADEPGQIHIAIEVPHGPVVEMLIERSFAVYVINPKQMDRFRDRFTLAGAKDDSLDALVMGSALRTDPHCLRRLAASDPVVVELREWSRIAEDLATERGGLTNRMRQQLWRYFPAFLDLNADPGAPWLLELWQAMPTPDKARRIRPASVAAILKRNRIRRLDAAQVLEILRQPPLTVAAGTTEAARAHIATLVARLRLINRQLAEAHHQLDALTARLGSAEDAEPGQVTQRDAEILASLPGIGRIVLATLLAEATDALQRRDYPALRSLTGVAPVTKRSGKTRLVVRRHACHRRLSNAAYHWARVATQHDHTSRAKYAALRARGHSHGRALRSIADRLLNVACSMLKSSTTFTPSIATKITP

SEQ ID NO: 440397 - protein, 420 aa, unidentified
MKPLSDDEFTAFIGIDWADRKHDICLQGAHGERREFARIEHKVDAIDQWAISMRQRFGGPIAVALELTKGPLVYALQKYDFFVLFPINPATLAKYREAFKPSRAKDDPTDAEHALELLMHHRDRLAALNPQSVPMRTLLHLVEQRRRVVDDKTRFTNRLGYALKQYFPQALDWFDHTDTIVFCDFLTRWPTLLQVKRARATSVRAFFWSHNVRHVNVIDERIQAIKSARALTEDVAVITAYRLQALVLVDQLRVTLQAIDRFDAQIAEIAPSLPDYALFKSLPGAGPHLTPRLLVAFGEQRERFATAAEIQKYSGVAPVTERSGNKCWIHWRWQCPTFLRQTFVEWAAQTINKSFWAGAFYRQQRDKGSSHQAAVRALAFKWMRILYRCWQTRTPYDESIYLNALKQRGSTLLSKLVTQT

SEQ ID NO: 440398 - protein, 343 aa, unidentified
MLHIGLDLSRRRLDVCVRDVDGELVGEFATAPDADGLRVLAARFTDPVRAVVESMTGARFVHDTLEAHGWTVEVADAQKVKALAPLTAKTDRIDARVLADLSFRDLIPAIWLPPPQVRAMREVGRFRLHLVKHRTALKNRIHSTLITHGRSVPVSDLFGATGRRLLDELELSPAWAESTKATLEVIDHLDTHISELNHQLRAAGAEHRDVELLQTAPGIGPVLGFTIASEIGDINRFVSPSKLVGYTGLCPRVIQSGETDRRGPLTKHGPRWLRWAMIEATIHAARHRVYSERHQRTIKRLGPQRGPKVARVDTARRLTKAIWWMLTRKEPFAPRGSSPPLVA

SEQ ID NO: 440399 - protein, 394 aa, unidentified
MRREPVVEMSITWVGLDAHKKSISVAMLLPGARVPEEWTIENEAVAIRRLAQRLEKASGEREIRCCYEAGPCGYALQRQLERTGRIVCEVVAPSLIPVKPGDRIKTDRRDARKLAEMNRAGLLTVVQPPTEEEESLRDLCRCRADAKADQMRARHRLAKMLLRRGIVFNGTTRGWTSKHVAWLKTLRFENVFDRVVFDDYLLAISHVDERLRALDLQIEQAAQHPRYREHVAWLRCFRGIDTNTAMSILTELHGVERFQSPRQLMAYLGLVPSEHSSSTAVRRGSITKTGNAHVRRLLIETSWHYRHRPGVGPNLRKRREGQPARVIAIADRAQQRLYRRYQRMLMQGKPPNKAVVATARELAGFLWAALTQHQQPRGSKETAARRHEKDKRAL

SEQ ID NO: 440400 - protein, 447 aa, unidentified
MKKVFVGIDVGKFKNSISIIDTEGNPIIKKGLSIENDYYGFARLEEQIDLIINNYGFTYDDCIAGVESTGHYWFNLRDYLKDIGIETVMIKTDSVKHRRALEEGQKGKNDTLDARVIASCLRNGNYVYIRENERELRALQKLTRMRNDISDELVALKNKIHRCIDICNPVFFKIFENLNSKTGVALIKLYPSPQDIINVDLDNIKRELGKIVDKPNMRMVSLYKEECEIWSRLIKEPSYAEKVEMIAYIDKFLLQNESKEHLDKQIKEIAKNIIPLYSEFEKIRGIPLIQLISVLSEIGDIRNFKNTRAILAFLGLSLKGNASGKYVGERRINKAGSRIVRKHLFNIMDSLVKHNEYFRIAYCYYKSYNHKNPTKKRSMQIAVMCKFVRVMYGMLKHNTTFDYKEMLKGYYFGDCNMKVFKEEFEGEKRTKKIENYKLAYSIFVNYS

SEQ ID NO: 440401 - protein, 411 aa, unidentified
MERIVERPGALDVHRASVTACVRVWQERELTEHVAEFQTTVAGLLALRDWLEALDVRQVAMEATGVYWKPVWAVLEDRFEPMLVNARHVKQVPGRKTDVKDAQWLCQLLESGLLRASLVPPKPIRTLRNLTRYRKTQINDRQRETARLHKILEDTGIKLGCVASDIMGKSGRDMLDALVAGTTDPVVLAELARGHLRKKIPALRDALEGRFDAEHALIVGQILAHIDFLDEAIERLSDAIEQQIAPFARQRDLLMTIPGVKQRTAEVLIAEIGVDMNVFPTPKHLASWAGMCPGNDESAGKRRSGGTRKGSKWLRATLTEAALAATRTKHSYLAAQYQRLRGRRGHSKAVTAVGHSILTAAWHMLHTGELYHDLGGDYYTRQNPDRLTKRLIRQLEGLGHHVTLEPREVAV

SEQ ID NO: 440402 - protein, 423 aa, unidentified
MKYALVRVLPEVPPGGVCAGIDWASADHAVCVVDLAGRVRDRFTAVHDRAGIAGLIARLRGSGAAEVAIERGDGVLVDALLAAGLTVVVIGSRQVKNLRSRYISSGGKDDRFDAFVLADTLRTDRARLRPLVPDSPATIALRAAVRARRDLVAHRVSACNQLRAHLAVAFPGAIGLFSELDSPVSLAFLAAFPGQQAAARLDEQALAAWLATVPRRGNTAPAGVLAARLAAAPRGAAGADAAQAAVTAQLAAATAGLAGRVRALEAEIAAQLAAHPDQHIFTSLPRAGTLRAARLLAETGDCRARYPDPWSLAGLAGVAPVTRRSGTYISHEFRWNVNRQLRDAICDFADGSRHASPWAATVYAAARDRGKDHPHAVRITARAWVLIIWRCWQDGTSYDPAKHRALQDILTRQAAADTPQPHR

SEQ ID NO: 440403 - protein, 355 aa, unidentified
MESVKYVGLDVHDSTISVAVRNREGKLLMESVIATKATAIVDLLKGLRGSVEVSFEEGTQAAWLYDVVVRHVTRVVVCNGRKNALLKSGNKNDRIDARKLSELLRGGMLSPVYHGERSTRTLQQLVASYMAFTEDTGRAMRRIKALYRSQAIACTGKKCFGKRHRAEWQEKLTNPGQRRRAEWLYQELDALQGLRREARLAVIAEVHKYAAAKYLRTIPFFGPLRTAVVIARVQTPHRFRTKRQLWTYCGLGLETRSSADYIEQDGQIVRRKKPVFIRGLNWNYSHELKNVFKSAATTASAMDGVFREFYDMRVAQGMLPAMARLTLARKMAAIALVLWKKGETFDRQHLTPQAA

SEQ ID NO: 440404 - protein, 442 aa, unidentified
MGTKSTSAALTDYRGGTAPAGSRLYVGIDAGRRQYVVAAIVLERMENGSWERAAVHSIQTTGQGFRELIVWLQAFGHTPGQIRIGCEPTGLWCAETVVAWLERHGYEVQWLQTWALHERRRLAIGKQTKTDALDARLIARLLYEREFHAQNRGFLKTGPRSTDGLRLLVRSRVRLIEQRTRLRLQLTNVEDALFPELKEFFKSSITSPAVRRLLEAFPTPKSIAAGPPEDVYRVLIVEGRSRIHAARVNELRQLAAESAGLVEVEPILHAQGWLLRQLNAVDEQIEDLELSIVAALQSWPAEQRAVLASFPFMSHMRQAVLLAAIGDVNTFRNDGQLRKFLGWYPEARESGTTISTHRLGNSGNRLGRREVWFWAMQLITPRQPATPFAAYYRRLRTRGVPGHAAVGHLAGKLISVLFFCLRSGRLYDPAQHARALGLGDAR

SEQ ID NO: 440405 - protein, 365 aa, unidentified
MNQITHIGLDVHKDSIAVAVLRPVTGEVDERVVPNTPEAVRRLLRRHDPGSTRVCYEAGPSGYDTHRLVASLGFSCDVIAPSLIPRRSGSRVKTDRIDARNLARLHRAGELSCVRVPSSAEEALRDLIRVREEVKNDRRIARQRIRSFLLRYGKRYPHGTDRWSHRFEVWARSLRFEEPHANEAFSHLLGAYFVRDAQLSEMGRRIEELAGQEPLLGPVALLSTLRGIATLSAVTIAAETCDFARFASAGSYMGFTGLVPSEHSSGSSRHQGSITKTGNRHVRRVLVEAAWAYRHAPAVRGKLRERLEGHSPEIVAYSWAAQCRLHGTYRRIAGRKGAHTAVVATARELSGFVWGLMTGNLGPAR

SEQ ID NO: 440406 - protein, 364 aa, unidentified
MASIPRRDLIHLGMDVHKDSISIATLRPDDSMDVEKIFHDEASVRRFLHRFPDRRSLSTCYEAGPTGYELHRLIEGMGIRCDVVAPSLIPKAPGDRVKTDHRDARKLARLHRAGELSAIRVPTPIEESVRDLCRARADMVADLDRARRRLGALLLRHGQVWRGGTRWTLKHHAWISSLSFDRPALQATLSHYRAVVEVRTAEVEAIERDLLAYSDLEPFADAVRRLCAYRGVARVGALTLASEVCDWARFPRASAFMGFAGLGVTEYSTGGKTRRGHITKTGSTHLRTQLVEAAWSYQHGPSVGPTLRRRQEACTPDTVARSWAAQRRLCARFRTLAARKNVKSVVAAAVARELGGFLWGEMTA

SEQ ID NO: 440407 - protein, 338 aa, unidentified
MKVKRQNVGVDVSKGTLASCMVFLTEDFEVKIKASKTFPNNAKGFSELLNWANSKKDGNLELSFTMEPTGVYYEGLAYYLFEKKQIVHVVLPSRAKKYADSLQEKAKTDKLDAKSLGRLGVERKLEKWHVGSPVYRKLKTLTRERNALIKERTVFQNQLHALNHSADPFKKSVTRLKQIIRFINKQIKTIELDCEHIVNKDEMVKAKVDKVTTIPGVGFITAIVVIAETHGFALITSIKQLVSYAGLDIKIRESGKWKGKSKITKKGNVHIRKALYFPSYSSVKYSETNRKFYIKLFDKKGKSMVAATAVQRKLLGLIYTLWKNDTIYIENYKQNKAA

SEQ ID NO: 440408 - protein, 403 aa, unidentified
MNFFERMVFMKLVGIDIGKHKHFVSIVDKLTGEVILQPVAFSNNAQGFEFLISQIALYPVDSVLIGMEDTGHYHFALLRFLLQKNYNVALINPKTTDLNRRMDGGITKNDKLDTLNICDILSSNKLKKPYRLTSSKKFDLYEQKQLTRLHHSLKEQINVLSNRLQKCIDLVFPEYNSLFKSKYGKVYMSILKQFGSAKAIAQADIRTLRKCFDITGRGNRISLTAEKLKESAKTSVGISSLADEMQIKHLIAHIELLNDQLKEIDKKIEEFSTDLNSPIISVPGISHFSGTSILAEYGDIFNYSKPSKIIKAAGVAPFHYESSQYEAKHSAITKQGSSYLRKTLYQVIVPVIRFNKVFKDYYDLKRSQGKSHRCAQGHCIRKLLRVIYHLVTTNQQFDASLLR

SEQ ID NO: 440409 - protein, 332 aa, unidentified
MWCHGARLCKVGQPGVPLVDVPCFVGIDVAKAQWDIALRPSGERWAVPNDASGVTTLVDRLQALHPTLIVLEATGGLERAATAALATAGRPVVVVNPRQARDLARATGQLAKTDALDARARAHFADVIRPTPRPLPDAQTQELRALLGRRQPLIVMRTAEQHRLAGTSERLTKDIAAHMTWLNAGLTALDDDIETMLRASPLWRDNDDLWQSTPGSGPVCARTLVLALPELGTRTRQPIAALVGVAPLHCDSGTLRGRRTIWGGRAHVRTVLYMGTLVATRFNPQINVFYERLLAAGNVKKVALTACMHKLLTMLNAMLKHRTPWQPQEVQS

SEQ ID NO: 440410 - protein, 317 aa, unidentified
METEKAYVGIDVSKETLDMAVHASEQRWRFANTDSGITEALACLEELSPALVVLEATGGMEYPLAAALAVAEIPVAVVNPRHVRDFARATGRLAKTDSIDAKVLAHFASAVHPTPRPLPDTQGQELKAILTRRRQLIEMLTAERNRLYSARSKAVKAHIRDHIAWLEKEMIQINDDLGRSIRETPVWEEKDDLLKSVPGVGPVLSTTILADLPELGLLNRRQIAALVGVAPFNRDSGHLRGKRTIWGGRAVVRSALYMSTLVATRYNPIIRDFYRHLLSAGKPKKVALTACMRKLLTILNAMLKHQTPWYYPTSEMA

SEQ ID NO: 440411 - protein, 406 aa, unidentified
MERVPIHKRVIGLDVHQAQITACAIIEEADGETRIEQRQFGAFKRDRRALADWAAALEADEVVMESTGIYWKSPYAALEAIGIRATVVNARHVKQVPGRKTDVGDAQWLATLARAGLLRGSFVPPAKLRELRVISRQRQKLVSLLSAEKNRMHKVLTDAGIRLGVVVSDIHGQSARAMIKAILAEKPPHAVLDLASRRLKASREELHDALQGELTASHVFVLDELLRHIEELEARIARFDARLLGELASEKNALALLQTLPGVDLMGAAMLLVEIGSDMSVFATPDRLASWVGICPGNNESAGKRKSGRLRKGNPYVRRLLCEFAHAASRTKSAFHARFQSLIVRRGYKRAIVALAHKMLRTIFFMLKRGDYYRDSATNYEQLSVQRNASRWIKALTRFGFLTAAA

SEQ ID NO: 440412 - protein, 278 aa, unidentified
MEAQAKVAIGLDVGDRFTHVAVVDEAGELIEESRVRTTREAIRRRFEAEAPARVGLEVGTHSPWMSRLLERAGHEVLVANARRLRFIYDSDNKSDRTDAEALARVARLDPKLLSPIRHRTERAQQHLAVVRARDVVVSVRTALINHARGAVKAVGSRLPRCSAPSFVSKVAEHVPPELDSALAPVLESIRELTDRIRSYDREIERLCTEHYPETERLKQVAGVGSLTALAYVLVLEDPDRFRRSRAVGPYLGLRPRRAESGQCESTASDHEGWRRSAT

SEQ ID NO: 440413 - protein, 370 aa, unidentified
MPPPSTLYVGLDVHTDSIAVAYVAKAHDAEVIYLGTIGTRQADIDQLLRNMPSKAKHLVCVYEAGPCGYWLSRDLTKKGHRCWVVAPSVIPKKAGDRVKTDRRDAVQLARLMRAGDLTPVDVPQVEDAAIRDLTRAREEAIGDVKTAKFRLTAFLLRHDIRYTGRAAWGPAHLRWLSEVVCPTPAQQLVFQAYVRAVNEHTERLQRLEQALQEHVKPWRLQPVVEALQALRGVQFTVAVTLVAELGDLTRFDNPRQLMRYLGLIPSAYSSGERRRQGGITNAGHTHARRALVEGAWAYRYPAKGSRHIQRRLEQLPKPIQDISWKAQVRLCQRDRHLMARGKHANQVVVAIARELVGFLWAIAQQVPVTS

SEQ ID NO: 440414 - protein, 386 aa, unidentified
MVQSGRVVIGMDPHKRSVTIEVMAGDETILGGGRFATDPDGFTTLREYVRAWPDRVWAIEGCNGIGHHVALRLLAEAQEVVDVPPKMSARARVFATGQGRKTDATDAHSIALVGTRMAGLRPVIDDEQLAVLRTLADRRRALGQEHTRMVAQLHHLLLELVPGGAKKFLSAAQAKEILSKVRPRDAAGKVRRRVAAELVGDLERTYKRKKAADKELTELVRATGTSLLDLTGIGPSGAARLLVEVGDITRFPDRAHFASWTGTAPIDASSGDHVRHRLSRGGNRQINRVLHIMATVQLRSPGIGRDYYDRKKADGKTSMEAMRCPETTTLRRRLPGHARRRRRPHHRREDGPGRTPGNVSHIQRDRLTSPHRHFGSVTSRTRHPRP

SEQ ID NO: 440415 - protein, 354 aa, unidentified
MKHLQLKDGDRLRRQCIGIDVSKKKFTFCLCQSTEQDLHFYTKPKEFENSEPGFRHLLAWSGNEVDSSVPYSFLMETTGCYHESLALFLARKGMTVIIVHANKAKNFARLNGQRTKTDPVDSKMLATMGCDTPGLKPWPIPDEKYLQLRDMSRLSEQLEKTRTQVLGRMESITYSGYVTKSVLKAHKSLLKSIEKVQAANEQDMAELVNGDPVIKAGVDNMESIKCIGKKTAILVAAETFGFHQMTSAKQVASYAGLDVKKEQSGDSDKKGHMTKRGNAHLRAGLYFPAMVASWSNPQLMEDYNRICASHPQSKNIALVALERKLLCLMYSLWKNGSQWDPEYGQDKKQEEAMS

SEQ ID NO: 440416 - protein, 395 aa, unidentified
MFIVGIDIAKRSHEAIIIAEDGQVVRKAFSFRNNCTGYNLLLEQVRRLTLVKSQIVFAMESTAHYWLALYARLLKDGYAVMVLNPIQSRSLRELYIRKAKTDARDSLIIADLVRFGRCKASNVPQDKILALRELCRSRAYLVDMAADLKRKLIALLDRIFPEYESLFDSVFSKASIAVLSKYSTPQKVKNANLRKLTDLLMESSNGHFGEWKAHQLKEAACSSFGIDDSGGVYSTLLEMFLEQILSLTAQADSLEKQISVFFQEFNNPLTSIPGVGTVLAATILSEIGDITRFSSADKLLAYAGLDPSVKQSGEFKSNQNRMAKRGSPYLRRAIWLASTVAVHRDPMFQTYYEKKISEGLHYMNVIGHVSRKMTAVIFAVLRDGQPYQPILQSAG

SEQ ID NO: 440417 - protein, 341 aa, unidentified
MQITTIGLDIAKNVFQVHGIDAAEKVIVRKQLRRGQIIAFFEALAPCLVGMEACATSHHWARELTKLGHEVRLMPAKDVKAYVKRNKNDAADAEAICEAVRRPTMRFVRIKSAEQQGQLMLHRARDLLMRQRTQLINALRAHLAEVGITAAQGREGIKELLAIIAQDEGSRLPVDAHASLTVLAAQLQAVQTTIGSIEKRIVAQHRSNEASKRLETIPGIGVIGATTITAVVTDPKAFRSGRDFAAWIGIVPRQDSTGGKQKLGPISKQGDQYLRRILIVGAHSVLRRARQQPQKYPWLTQLLARRPFKVVAVALANKMARIAWALLAKGGTYRAPQLAAV

SEQ ID NO: 440418 - protein, 426 aa, unidentified
MKNREILSTLFVGIDVSSKDNAVCAIDFDETRHLETSVQNNQPGAVSLAKKLASVMTGHSGFTRLVIAMESTSCYSTHVATFLSSSEILMPFKPFVYVLNPKTVANYKKSYVSVGSTDPIDAFMLADFARVGRIKTEPWRGPQFLALQRLTRHRLHLAEAITREKTYMLTNVFLKFSELAVLPKDEAPFSNNYGASAAAVLTEFLSPDEIASMPSAELVEFICKYSKNSFADPSKVAQLLKQAAVNSYRLDKCLYEPLTVSIASSFNCINAFEDEKKKINKAIEKAVKGFNANEYQSLMSIPGIGPVFSSGILAEIGSVKAFRSHDAIAKYAGLVWNPNQSGNFTADDTYMSKAGNRYLRYYLIEAANSVKNHCDVFNHFYHKKFAEVKKHQHKRALALTSRKLIRLIFGLLDNNQLYSKSVEQKI

SEQ ID NO: 440419 - protein, 480 aa, unidentified
MAKRAVQHADLKAVPMLLNESLYVGIDVGKAKHVAGFLSKTLLSRHERFEACPALVFDNSREGFRLLIERICSLAPLEHLFVLMERTGHYHRALEQYLQELDITVYVMHVQSRSAGMLKTDKRDALTLANQLYNQLELGVQVPNKRQLIRRVVPPTEPAAELRGLIRHRYELIHESTRRKNKLTAICDELFPELVRVVKDPNGQVALALRERFPTPATLAPASLTTLQQIRGGARSISSAKLVELQRQAAQSIGVKEVARLRGLVLEQTQLIKELQLLQAHVQQLDDEIVGSVEQAREGQILLSFPGIGPIMAATSIAAIGSIHNFPSAASLKSYFGWAPVVAQSGSTLDHTRLTPGGTRTMKHMLFLAVFQAIRLKDNEWARLYERLVKIKCPFDERTQSYLGKTRVIGRVAGQMTEAIYALLKRDAELLSKIPPGQDPPPPLLYDPEVHRQHHLGHYRPLKSTPPPNTITLLHPSPAQ

SEQ ID NO: 440420 - protein, 452 aa, unidentified
MSKVRFVGLDVHAETIAVAVAETGGEVRSIGVIPNKLESVRKLLHKLGPVQHLRACYEAGPTGYVLYWQLTKLGVACEVIAPSLIPAKPGDRVKTDRRDAEKLARCYRAGELTPVWVPDDDHEALRDLVRAREAAKKDQLKARHRLGKFLLRHGQRPEGLKAWTKKHLEWIKSHVHFPQAALEATLADYLEEVDHVAARIVKLEKAIDEAIQNAPPEIRAVIEALQALRGVAQTTAATIVSELGSLSRFQSPRQLMGYSGLVACEHSSGNRIQRGGITKAGNGHLRRVLVEAAWAYQHRPNVTGFLLRRQKNLALSDEAKKIAWKAQQRLHKRYLAMSARGKNKNQIVAAIGRELVVSYGPSRWPRKHNTNSPLPPNRVLHSDALLDSSADDSGGTTKRRTLLIFYAVRASAPTRVPSPRQLPTDHDYAVSTREYQSDQSSRLLLRCHPPAV

SEQ ID NO: 440421 - protein, 385 aa, unidentified
MRNKTFVPREYDVFAGLDVDKKSIAATFSGHQGFIRSLSMPYKVEDLLNHVRNHFADQKVAFVYEAGPTGYGLYDGLAAQGYTCLIAAPSMIPRAPGQRVKTNRLDSKALSESLRGGQLKSIHVPSPLYRQLRHLTQLRDTMMSEAVGMKQRIKSLLLFEGIAFPPAPAGSQWSFIVKAKLRKLPCSNTVRFKLDQLLDSLEFAEKQVFKSTKEIRRFCQTDPELSQCIEYMMTVSGVGWIVASQLLARIGDWRELENIRQLGGFLGLVPTEHSTGDKTDRGPITHPGDGRLRSKLIQASWSAIRKDGELREFFRSVCQRHPRKVASRVAIVAVARKLSVRISVVLMKQRPYEVRKKVHSAPLTQEETSPQGTTRRRAEPGGKNS

SEQ ID NO: 440422 - protein, 408 aa, unidentified
METLHRRCAGLDVHQKEIVACRRIASGRKARSELARFATTTQGLLALSAWLAEAKVTHVAMEATGVYWKPVWHVLRHDFELILANASHIRNVPGRKSDANDAAWIADLLAHGLIRASFVPPQPIQELRDLTRTRRELTREIVRHTQRIQAALEEANIKLASVISDILGLSGRRILKTIVAGESDPRRLAELGHPKLACTREELAAALEGRLRDHHRFLIGQHLKMIEQVEATIGEFDARIEAALAPFRDAAGRLKDIPGVSDNVAQTVIAEIGADMNAFPTADHLVSWAGMCPRLDESAGRKRSRRLRKGAPWLKPVLVKAALAAVKVKNSSLRARYFSLKPRLGHKKAIIAVAAAMLRIVYHMLKDGTFYQDLGPDYRRPRNPQRAARNLANRIRSLGYVVDIKKAA

SEQ ID NO: 440423 - protein, 382 aa, unidentified
MQASRKSTPTAVHCGTIFVAIELSQKTWLITLHSPDRDQFSRHRLEGGDHAGLLALIEKVRARATQQLGSTPRVVSCYEAGYDGFWLHRLLEAAGISSLVFDAASIAVEQRSRRAKTDRIDGELLLRTLMAHLRGEPRVVRIVRVPSVEEEDARRASRERDRLITEQTAHSNRIKSLLRLLGMAVGNPRRRDWLAWLKRQRDWQGRPLPPHLLAEAQREHARLMLVREQLAALEQVQAAQASPVPVPMAERRDLLQRLKALGPAFSATLVNELFYKDFRNRREVASYCGLAPSPWQSGGIDREQGISKAGNRRARHKAIELAWLWLRHQPNSALSHWFRTRTANAGRRAKRIAIVALARKLIVALWRYLTAGLVPEGATMKA

SEQ ID NO: 440424 - protein, 408 aa, unidentified
MEQVIERCCGLDVHKQTVVACVRVPGPDGTRVQQVRTFGTTAAELLTLRDWLEAQAVTQVAMESTGIYWKPIFYVLEEAFTCVLANAAHIAQVPGRKTDVKDCAWIAQLLEHGLIRASFIPPPPVRELRDLTRYRKAVIQDRSRAANRLHKVLEDAGIKLASVATDVLGVSGRAMLTALVEGTTDPGVLADLARGTLRRKLPALRQALAGRFRPHHGFLVGQLLAHLDYLDEAIATLSTQIEAAITPFAAMVTRLDSIPGVSQRTAEVLIAEIGVDMRVFPTAGHLASWAGVCPGNNESAGKHRSGRPRPGNRWLRMTLIEAALAASRTSTALGARYRRVLRHRGHHKAVIAVAHAMLVIAYHLLSRETTYHELGADYFDRHQTDRLRRRAVQTLERQGYRVTLEPAA

SEQ ID NO: 440425 - protein, 363 aa, unidentified
MLHAGLDLSRKKLDVCLLSDQGEHLDQLAVPPDVDSLRRLARRVVEVHRQPVCAVIESMTGARIVHDTLEQQGWSVEIADAQKVKGLAPLACKTDKIDSKVLAVLSHRDLVPAIWLPDPSVREERELARFRLHLVKHKSALKCRIHSTLINFGKPCPVTDLFGVEGRRLLKRLQVPEPWRGNITASIELIDDLERQIAEINHRLKKGHAEHPYVPLLLTVPGIGWVLAFTIAAEIGEIERFPSPEKLAGYTGLCPRVNQSGEKDRRGPLTKHGPTYLRWALLEATMHALRHPAYAERYQRTKRRLGKQRGAKVAQVDIARRLAHAIWHMLSRKEEVRSPRRRFSSGGLTALFGLAPERTSNFA

SEQ ID NO: 440426 - protein, 372 aa, unidentified
MPDVSSNQPADVRLWVALDVHKLSIVAAMLPPRGGRPEIARIETTRVAVRRFIDRLGGPEGLAVCYEAGPGGFDLFRVLSELGVACDVIAPSLIPVRAGDRVKTDRRDAKKLVRLYRAGELVYVQAPSKETEGLRDLMRCRDDLRRARTAARHRVSKQLLRHGRIYRDGKTQWTKTHRAWIARQRLDDDLAQAALEQMLIHLDGLDRQLDALDRELEQIARTGRWAETVQILTRFRGIATRTALGLIAEIGDFARFGHPRELCAWLGIVPTEYSSGEQRHRGHITKTGNHHARRLLIEAAWSYQHRPRRPDRGPEPDPRAWQAQIRLHRRYHHLTVARGKRSTVATVAVARELAGFLWAATTHQPYAVEAAA

SEQ ID NO: 440427 - protein, 589 aa, unidentified
MLPQSTTATQTRIGVGIDTSRYGHYAAFLRDDLHAAAGELQFVESAAGYAQLRQRFQEIDAKHGNVHFFIRLDAAGQYADNLLHFLRSLATPPTKVGGSPFTFTISCGDPIRNKNYRVALFGAKKSDPVEARATARYALTEQPAASAILSDAMRTLRQVAGRLQAVVRQRTRLINQFHHLLALTFPELALLIKDIATGWVLELCHRYPTARHLAQADADQLQQIPYLPHDRINALLEHARSSIASLYNDAVAELVRDQVRQLRDARARQLRLEKALADAYHALPEPNHLDTIPGIGAVTAAVLTAFMLDIERFDTPNKLVAYFGTMPIEVGSGVDRDGNARASKRYVMCRRGNDLVRRYLWMAALSAIRANPAVRALYARVLAKHPDRKAIAVGHAMRKLLHLVFAVWKTGKPFDKENYPWDTPAHVEVPGEPPASAGGGGPAQEQTAGLTLDEPAKQEVTAARSITSTVILPPPKPLDENAFLDFAHLKKQLPITRVLEHLGLASKLRGPGAQKRCACPIHRADGRGRTFSVHLAQNVFQCFEVSCQKKGDVIDLWAALHGLDLRAAALDLARTFDLEPTPATEKRNG

SEQ ID NO: 440428 - protein, 348 aa, unidentified
MPNYNQAHQFYAGVDLHARSMFVHILSAKGKTVFERDLPAEPDAFLDAVQPFRKNLVVGCECMFAWYWLADLCEDKRIPFVLGHALAMKHIHGGKAKSDKIDAGKLANMLRGGMFPLAYVYPRAKRQTRDLLRRRCFFVRQRAQLITHIVNTNSQFNLPPFAKKLSYAANRSAEIAERFTDPSTRLMISADLNLIDAYDAQIAELERHLLKSAKVDDPVTFGFLRTIPGIGPILGLILLYEIDRIERFPEAGNFLSYSRLVRCAHESAGKVKGFGGKKIGNAHLKWAFSEAACLMLRTCIPVKTWLQRQESKRGKRKALSVLEAKIGRTVYHLWHKQMAFDAKKFLRS

SEQ ID NO: 440429 - protein, 391 aa, unidentified
MFLLGIDIAKLNHVASCIDSSTNEIVFSNFKFKNDFIGFSALLDKIKTFDTKNLIIGLESTSHYGENLINFLFKQHFKVALINPLQTSHLRKANIRDAKNDNLDSLNIAKSLIFAKLNFISEKNINCFYLKKLTRFRSSLIKQRSKAKIQLTSLLDLLFPELQYLFKSKIHSKAIYSLLKKYPSAEEIAALKDDEISNLLYASSKGHFKKEKSIELKSLAKITVGIKDTSISLHVIQLIELIELYDKQIKDIVTKIADTVDKLDTKLLSVPGISIIACAIILGETNNFNNFSDSTKLLAFAGLDPKIRQSGNFNASSCRMSKKGSPYLRYALIFTAWNIVRHSEKFNKYYCLKRSQGKSHYNSLGHVAHKLVRVIFTLIKKNIVYQEENLE

SEQ ID NO: 440430 - protein, 453 aa, unidentified
MNPFSVSPEPSPVAAWIGLDWADQQHVICLYEVATGQSTVSRLEQKPEALQDWLSQLRQRFGGAPVAIVLEQARGAVIYALLSADFVRLYPVNPQSLASYRKAYAPSGAKSDPADAVLLMEMVRNSPERFRAWKPDDADTRSLQLLTQNRRQLVDQKTALTNQLTSLLKTYYPQALELAGVLDSLQACDFLTQWPTLEALQHARPGQIRQLYREHGHPSPEQLDRRLEQIRQARPLTTDPAALLSGSMMVQALVQQLRPLLGAIERFDRQIAVLFRKHPDRPLFDSLPGAGAVLAPRLVAAFGTDRDRFQSAQQAQQLFGIAPVTEQSGKQRWVHWRWACPKFLRQTFHEFAGVSIQFCDWARAFYDKQRSKGKGHHAAVRSLAFKWIRILFACWRNRTPYNDRCHTANLAARSVPTSETQRSASTPTGQAAKPADFQFKSVAGFWKISPTAS

SEQ ID NO: 440431 - protein, 411 aa, unidentified
MPYTIAAIDVHKKVLMVAVADMSAPEADQHFEHRRFGATRSELHALAAWLEQRAVQEVVMESTAQYWKPVWLSLEPHFQLHLAQAQSNRAPGGRKSDFRDAERLLRRLVADELFLSYVPEPEQRLWRTLTRSKVQLVRDRARLQNQIEALLEEARIKLSSVVSDLIGASGQRILRALAAGEHDAHRLAALGDRRLQASEQELADALNGDLQPAHRAILQLFLARLELVDAQLVCLSQLAADQLRSHQCAIARLVMVPGIGLDSAHQILAEVGPTAQAFPTPEQLCSWVGVCPGRNESAEHNHSGRCPKGNRYLRRILCQAAQAAVRKNGSFLQALFRRLLPRLGYLKAVWAIAHRLCHIVWKILHQGAEFIEHGQLGSSQEQKRRARKLVTQLRRLGYSVELNFVAPPQAG

SEQ ID NO: 440432 - protein, 343 aa, unidentified
MSIAVLGIDLGKNSCSLAGLDERGAVTKRRRMRPESIVRFTAALSPCIIAMEACCGAHHIGRLLTAQGHTVRLMSPEYVRPYVKAQKNDERDAEAIAEAATRPTMRFVELKSEEQLDIQTLHRARDRLVGERTALINQLRAILLERGIAVPQGRYKLEKYLDAEGESTHSALSGRISALIDDMREQWRELDRRICALDAEFAERARHDEAARRLATIPGIGPLNATALVAAIGDAHAFDRGRDLAAWLGLVPRQVTTGGKPRLVGITKRGNKYLRKLLIHGARSAMPSLAKSATPLGGWLRALMERVHRNAAVVALANKLARIVWVILRQRKVFDAMATVAVA

SEQ ID NO: 440433 - protein, 317 aa, unidentified
MLKDTTETAGIDTGKHTLDFAVHGKEGLGQVDNTEAGWRRLAADLAKAGVSRVGIEATGGYERGVTRHLQDQGFTVLVLQPAQVRAFARLHLCRAKSDRIDAALIAACTHLLEPQARKPDPRLDELAEQLTFIEQLEADVVCWKTRLEHTHDERLRGLVEADIKRLQARRADELKRLLKAVRDHADLAERLKLVLSVPGIGPRTGLALIVRMPELGNISREQAAALADLAPFVQQSGSWTGQAHIAGGRKRLRRSLYAAALAAAFRWNPALNALYLRLTQRGKPHTVALVACARKLLVFANAVLARGTPWTEKPAGA

SEQ ID NO: 440434 - protein, 445 aa, unidentified
MTGFAGGAAQAGNVSRIRGLAPDRCLVVAVDVGKRSAAALVADHHGQIVGELFEFDLTVSGVGRFIGVVADAERLIGAQSVRVGVEAAGHYHRAVATALTRKGFDVVELNPFQVKTARVQLGQARVKTDRRDCLAMVELLVRGQGWPLHRLDGPVAEHAVWVAHRRRKLDAAQALGSQIHALADLAFPGLTGCFSTGLEAKTLRMLLRTLPNPALVAVMTPADLVRHAANHKVRMLRPKAAQVIAAATEALCVPDAQRRAAASLLTAEVSSFDAIQCQLVACDERLAELLPQTPAGILLTVPGIGVVTASYYGAALGDPWRFRNADAAYRYSGLAPTSYESAGRRAATVRISKIGSVELRQAMLALGSGLVLHHPDFAAYKRRLRDAGKKPIVAAIAVAHRAHRLAFALLKSQKPYDATQWAASVTGQRKAGRPVMATTEATSTT

SEQ ID NO: 440435 - protein, 347 aa, unidentified
MNKITTLGIDLAKRVFQVAAQDAQGVEQPLDKSRFTSREAFAEYLRSLAPPLQVGLETGPGAQAWARLLQSGGIEVRVLPAQRVAEHRSGAKNDANDARAILRALRDTSIHPVPVKSVEQLVMQALHRARQGWTRRKTALSNQMRGLLLEHGVTAAKGDAALVLALTRVSGNELVPARLKVLIQTLWDDWQSQVARIAASDAELKALARQDPLARRLHAIPGIGPISATALSCKGLDPERFRNARMFAAYFGVVPDQHSSGATLRLGRMSKRGDGYIRQLLINGAHAVVRVVRPDATDSLSRRVRRWRDRHGRKGAAVRLANHNLRVIWAMLEKDRDYRRSEPMPDH

SEQ ID NO: 440436 - protein, 403 aa, unidentified
MNSVGIDISKGRSTIAVMRPFGEVVISPFEVRHTGSELSKLAKQLKSLDGETRVVMEATGNYHASVAKLLHNAGLYVSVINAKLVHGYGNNELRRVKTDRKDAVKLANYGLDRWLTLPRYIPEEDTRLLLKNCYRQYRQYSKVQTVLKNNLISLLDTAFPNANRLFSSPIRGDGSEKWVDFVAEFWHCRCVSEKSERAFTSKYLRWCRKHGYNFREAKAHTIYAEASGHIGVTPKSETTKLLVEQAVAQLRATSTALAALKHEMQSLASQLPEYPVVMDLFGVGPTLGPQLIAEIGDVRRFYSKKALVAYAGLDAPPNDSGDVTGRHKSMSKIGASSLRRTLFLVMSVYLQTAPLDEPVYQFMDRKRAEGKPYRVYMMASANKFLRIYYATVKAYLESLEHTA

SEQ ID NO: 440437 - protein, 354 aa, unidentified
MIIIGVDYHPSFQQIAFVDSETGDYGEQRLGHPEEAERFYRDLAGQGKKVRVGMEASGHARWFERLLVELQFELWIGDATEIESKRVRKAKTDREDARLLLRLLMEDRFPRIWVASWENRDLRQLLWHRHRMVQARTRIMNQLQAVALNEGLRCKKRLWREHGRKQLESLRLMPWASRRRKDLLEFLDRLNPTIADLSQAIEQQVEKCPAAQRLMTHPGVGSLTALAFVLIIGQAERFRCGKQIASYVGLVPLEKSSGNRRRLGHITKQGSSMLRFLLVEAAQVSVRCIPEWRNKYVHLALRRGNKIAKVAMARRLAVRLYWMWRNKWDYEEIVKFGSHVGQLEHRDGVKSNTE

SEQ ID NO: 440438 - protein, 375 aa, unidentified
MSEITRALIARVGVDLAKQVIQVHAVDASGRRVVARAFKRDQFLAWCAQLPAGCLVAMEACSSAHHWARKLRALGLDARLIAANFVTPYRMEGKNGKNDATDAAAICEAASRPSMRFVPIKTCEQQGVMSLHRVREGLKEERTACINQIRGVLTEFGLAFAKSPKALRAVLADVIEDASNELSTMARLVMQRAFEHWRELDEHLRWCDRQVGQHVRASPAAKRAAKITGIGELGASALTAAVGDFKQFKSGHQFGAWLGVVPRQDSSGGKIRLGRITKRGDDYLRTLLIQGAKSAVMTADKRDDPTSLWLAQLAARVGWQKACVAMANKNARILWAVMTREEGFDPNHISVKPQAKPSARESAAVASSDTVACPA

SEQ ID NO: 440439 - protein, 397 aa, unidentified
MYIVGIDIAKRKHEAAVIDGEGTVIIKPFSFTNNCSGYNRLLAMLTKAKLPLDEVSFAMEATGHYWLALFTRLQKEGFRVQVINPVQTNSIRSFYIRQAKTDPRDALLIAEVIRFGHFSESTLHPENIYELRELCRGRHAIVSMQADVKRKVVALLDQVFPEYETAFTNMFGDTSMAILQTCPTPKELSEMPFEELCHLIEVSSHKRFRMAKAQELQALARNSFGFAMAGDVFSTMIRLYAKHLVFLKQQVREMDRKIAEIMETLDTPITTITGIGPTLGAYILSEIGDISRFSSAAKLAAYAGIDPTMRQSGEYNGVRNRMSKRGSPYLRHAIWLATSSAVLHDPALKLYFQKKRDEGKPYMASVGHACRKMVSIIYAVMRDNKEYVPCIPNEISA

SEQ ID NO: 440440 - protein, 256 aa, unidentified
MTSKPEVFVGIDVSKHRLDIAVRPSGETWSVANAPEAFGPLLKRLKALHPTLIVLEATGGLEAAVVAELAHAQLPVAVVNPKRVREFGRASGQLAKTDPLDANLLAHFAEAIRPPVRPLPTAESERLASLVTRRRQVLNMLTAERNRQQTVLGAMRERIATHITWLEGEAQALDEELRQFIKQTPAWQATDELLQSVPGVGPVLSMTLIADLPELGQLDRQEIAALVGVAPMNRDSGHKRGKRRTQGGRASVRNVL

SEQ ID NO: 440441 - protein, 464 aa, unidentified
MTAGKKLWRNRKERKEWARRLQSEDPGLEVVHPRAAGIDVGNAAHYVAVRPDRDPEPVRRFECFTVELHRLADWLQSCGVKTVAMQSTGVYWIPLYEILEERGLEVYLVNARHTKNLPGRKSDVQESQWLLKLHTYGLLNNSFQPVSEIRVLRTYWRQRGEHVREAATCIQRMQKALTQMNVQLANVISDISGLTGQAIIRAIVAGERNPLKLAALSDPRVHASREEIAKSLEGNWRPELLFVLQQEVDMYDIYQKRIAECDQRLQKHLASLTHPLPLQPPTQKPKTKKPAAKNAPRFDLSSELQRVTGVDLTRIDGIDVMVAQTILSEVGLDMSRWKTESHFASWLGLCPDNRISGDKVLGRGTRRVVNRAATALRQSANTLMRSRSYLGAQYRRLRTKLGAPKAITAMAHRLARLVYRMLKYGQAYVDKGTEYYEERFRQQQIQLLRKRAAKLGLQIAEIQA

SEQ ID NO: 440442 - protein, 350 aa, unidentified
MPEIVTIGLDIAKNVFQLHGVDRSGKIVLRKALRRSQVPGFFSTLPPCLIGMEACATAHHWARTLMAFGHAVRLIPPAYVKPYLRRQKNDAADAAAICEAVTRPSMRFVPVKSPQQQSTLMLHGARDLLIGQRTALINALRGHFAELGIVVAQGARNTRQLIALLHDDASPDLPATARMALQPLAAMLIGIEAQIAKLDKAILAAHRSDPISVRLATIPGIGPIVASCLSASIPDASLFQGSREFAAYLGLVPRQHSTGGKARLGSISKMGNRHLRKLLVVGAHAALYSMKSGKTRTALADWARSLLAKKPFKVVAVALANKMARIAWAVMARSTAYEPGSKGAAVPAAS

SEQ ID NO: 440443 - protein, 366 aa, unidentified
MEEVITYVGVDAHKRELHVAMLIGTAATPVTWTVENEPKAIDRLHRKLEREAPGPVRVCYEAGPCGYALQRQLTKGRATCVVIAPALMPRKPGDRVKTDKRDARKLAELWRAGLLTAVRPPTPAEEAVRDLCRARDDGRDDVQRARHRLGKLLLRRGLHFAGRNWTKAHRQWITTLTWEHAAERAVVDDYLLAIDQVESRLVELDARLAETADTEPYREPVAWLRCFRGIDTLTAMLILAELHDFRRFPSPRALMAYLGLVPSEDSSGDRHRRGRITKTGNTLVRRVLIEASWHYQHRPGVGAGLAARRTGQPARVIAIADKAQQRLCRRFRRLTAKDKPTAKVVVAIARELTGFIWAALQPATTA

SEQ ID NO: 440444 - protein, 355 aa, unidentified
MQKYKVSFKGQNIYVGIDVHLKTWHVTTLTESGYKYSFAQHADAKELFDRLNKKFPEAHFKSAYEAGFCGFSAHYALTELGVENIVVNAADIPTTGKEKVMKTDAVDSEKIAWSLKRGELKGIYVKDKRYMDDTNLMRLRQRFIKDLSRLKCRTKSLLYTQGVTYPERFSRNRTHWSRNFMKWLREEVELLSEEKMTLMLLCDEVENMRKAVLKVTREIRRLSTTEKYKENFELLTSVPGFGLIISMTMLTEMDNNPMRFPNERKFVAMLGLIPTCHDSGEKTVSGEKTFRGNKQIGPLIVEASWIATQRDYQLGAYYTNCCQSMKPQKAIIKVARRLACRAYAVMKTKKKYVLS

SEQ ID NO: 440445 - protein, 342 aa, unidentified
MYYIGLDVHKKTISYCVKDASGRVHQEGKLGATRCELDSWMRTLPQPWTVAMEATIFTGWIYDHLHPHATQIKVAHPLMLRAIAAAKKKNDRVDASKIADCLRCDFLPECYMAPTEIRDRRRTLRYRYLLVRQMVQTKNRISGLLMETGVTHNKQRLHKVGYFRELLASNEEVSESIRPLLRLSRDTIARLQKTERALVSSLQRDPLLTERIKRLRTVPGVGPITALTWALEMGEISRFPSIRQAISYCGLCGDERSSAEKSIRTPISKQRNKNIQFVLIEAAKLAPRQDHDLAMLYAREKEKGNANRATLAVARKMVAYLLAVDRGKRDFVPVEHGSNAAA

SEQ ID NO: 440446 - protein, 409 aa, unidentified
MVTELRGLDLPRFGKWTSDHVIVGYACARALSQSHNHEAGPMTRVAFYVGLDVHKDSISIAVAHGGRDAAQQLARIPNDSVKLLKKLDRLGIRESISCCYEAGPTGYGLHRFLEEAGIHSTVVAPTLIPVKSGDRVKTDMRDAKKLAHFHRSGDLTAVWVPDRQTEALRDLVRAREAAKADERAARHRLGKFLLRHDRLYPGKTAWTGLHIEWIRDQKFDQTAQVHVLREYLRAVEEITDRVDRLDKDISDEGKASSLWPLIQALQALKGVRTLTATAIAVELGDLRRFDNPRRLMSYLGLVASEHSTGSTTKRGGITKTGNRHLRRLLVESAWSYRHPPRRARELKKRTEGVAAELIDIGWKAQHRLNRRFRILVGRGKTRQVAVTAIARELAGFVWAIGQEVTLSAP

SEQ ID NO: 440447 - protein, 428 aa, unidentified
METPVANSQVVAWVGLDWADQRHEVRLQAVGSSQIESCTVEQKPEALHAWVAQLQARFPQGRIALTLEQSRGAVIYALMNYECLWLYPVPPKGLARYRQAFFTSGAKSDVSDADLLLEMVRSHRDRLRAWQPDDALTRQLRLLVEHRRETVADRTRLTNRLGALLKTYFPQALEWAGELRSVAACEFLSTWPSLQAWQAAGRSTQRKFYRRHRRLPAEELEKLLDAIAHAQPLTHDRALVEASVLMTQTLVEQLRTVIAALARLDQTLEKLFDQHPDQQLFRGLPGAGDALAPRLAAGFGTDRQRYQKAEEIQQFSGIAPVTEASGKHRWVHWRRACPKFLRQTFHEFADASRKKSLWARAYYEQRRRQGASHHSAIRALAYKWIRILYRCWQSHTPYDESVYLAALRRRHSALWLAVGSLSIQEAQT

SEQ ID NO: 440448 - protein, 414 aa, unidentified
MLKIVYRVCCGMDVHKSFIVTCIASTSEQGVTTYKSKRFSTFTGDLRRCAAWLSENNCKDVCMESTGKYWIPIYNILERTCNIVLTHPKYVKAIRGKKTDKRDAKWIADIFKHDLVAGSFIPPADIRQLRDLVRYRWKLTNFTTGEKNRAQNCLTVSNFKLDDVFSDVFGKAASAITVRILENPTKKITDVSAFRTKGMKASNEQVLAAVDGEMCVEQAEKLRIIRSHMDSLELCKLNLESLILSTAEKYLPQLNLVMTAPGIQSFAAIGIISEIGVDMSVFPTSKHLCSWAGLTPQNNESAGKKKTTRIGRAGAYIKPLLVQCALNAIRAKQFPEVRNRYLALKKRRGHKKAIIAIARMLLTAIYNMLKKNEPYNSELYRKSDRPPVHREVSMEEAIFILQRQGYLVTAPSTS

SEQ ID NO: 440449 - protein, 326 aa, unidentified
MLFMGIDVSKAKLDCSLLLDVASGKRRAKTVANSRTGVSELLAWCAKQHAPSHELHAILEGTGVYHEQAALALADAGVTVSIVNPAQVKDFGRSLGVRTKTDGVDSLVLARYGALLKPRPWTPPAQEARVLQALLSRREAIAQDLQRERNRLEKADATETPPLIRQSILDSLAFLEQQLAKLQQDIDDHINKHPNLQADRELLVSIPAVGPQVGNHLLAVMHNHHFQSAEQLAAYLGLVPVERQSGSSILGRPRLSKAGPARIRAVLYMAAIVGTQHNPHIKALYQRLQARGKSKMSALGAAMRKLVHLCFGVLKTRQPYQANYAI

SEQ ID NO: 440450 - protein, 349 aa, unidentified
MNQDEIILGVDTHLDKHVGAVISAAGKLIATQSVETTSAGYLQLLAWARSLGELRRAGIEGTATYGAGLTRVLRDNNIDVFEINRPDRATRRLRGKADPTDAESAACAVLSGRATAIPKKQAGAAYAMRAVSVARRSAVKARTQAINQLRGILVSAPQEVRERLLHTKTEACVSACARIRSLGKTPLLQSLTTTLRLLAKRWLALAAEIKLLDTQLEHLTNNHAPRLRKEFGVGAQTAAVLVCVAGDNPDRIKSEAALAALCGVSPLQASSGKTTRHRLNRGGDRAANNALWTIAMVRMRSDARTQAYVARRTAQGLSPKEIQRCLKRYIVRALYPLILADLGKLAAAS

SEQ ID NO: 440451 - protein, 388 aa, unidentified
MRATDPRPEEQTAIHTNLGAIFVSLELSRSTWLITSLSPGGGETMSKYSVRGGDVTGLMERLSVLQDKAERRTGRRVPIVTIQEAGLDGFWIHRTLEGEGIESHVVDAASIATSRRCRRAKTDRIDGEALVRTLLAYKRGEPRVCAMVRVPTPEEEDRRRLSRERKTLTAERVAHVNRIKGLLFTHGVEYEPAHRNRRARLEELRTRDGGLLPTHLKRQISRELDRLELILDQIKALEVERNALLVPAEHEVPTPAKMLLDLKGIGAEFATVLWTEGLFRQFDNRRQVAAYAGLAPTPWQSGTIDREQGVGKSGNPRLRTTMLQLAWLWLRHQPDSALSRWFHGRVERNGGRFRKTMITALARKLLVALWKYATAGVVIEGATMRTAR

SEQ ID NO: 440452 - protein, 318 aa, unidentified
MLDEKGKILEQVRLKNDPQTLLRYAETLSSGSKIALEATGNWYYFYELMENKCPEIYLAHPLKTRAIAEAKIKTDKIDSTILAHLLRADLLPTSYIPSKEIRDIREILRYRASLVSLRTSIKNRVHAILSKNGIDIEYSDIFGKKAIKYLKDLRLRTCYKHSLDGYLRLVVTLNTLIDDITETIKYIAEDNPQARLLDTIPGISYYSALLIISEIGDINRFPDAKRLCSYAGLVPSVHSTGGKTRYGSITKQGSKWLRWILIELSHHFVDGSNRMNKMYIRISKSHGKNTARVAVAREMLKVIYYMLRDKRPFIFEAE

SEQ ID NO: 440453 - protein, 344 aa, unidentified
MAIAVLGIDLGKNSCSVAGLDGTGRVVLRRRLTRESVVRLAGTLPACVVAMEACCGAHHLGRVLREQGHEVRLMSPEYVQPYVKAQKNDERDAEAIAEAATRPTMRFVELKSEAQLDAQILHRARSRLVGQRTALINQLRAVLLERGIVVAKGRRRLEEYLIGLLDGDRPATLSPRICLLIEDMRLEWSELDQRIAALTAEFVARAREDQAARRLATIPGFGALNATALVAAIGAGETFRRARDLAAWLGLVPRQATTGGRPRLLGITKRGNTYLRTLLIHGARAALPSLSASQSPMGEWLRGLIGRAHKNKVIVALAGKLARIAWAVLRSGETYVKEGRPVAA

SEQ ID NO: 440454 - protein, 442 aa, unidentified
MGTKSTSAALTDYRGGTAPAGSRLYVGIDAGRRQHVVAAIVLERMENGSWERAAVHSIQTTGQGFRELIVWLQAFGHTPGQIRIGCEPTGLWCAETVVAWLERHGYEVQWLQTWALHERRRLAIGKQTKTDALDARLIARLLYEREFHAQNRGFLKTGPRSTDGLRLLVRSRVRLIEQRTRLRLQLTNVEDALFPELKEFFKSSITSPAVRRLLEAFPTPKSIAAGPPEDVYRVLIVEGRSRIHAARVNELRQLAAESAGLVEVEPILHAQGWLLRQLNAVDEQIEDLELSIIAALQSWPAEQRAVLASFPFMSHMRQAVLLAAIGDVNTFRNDGQLRKFLGWYPEARESGTTISTHRLGNSGNRLGRREVWFWAMQLITPRQPATPFAAYYRRLRTRGVPGHAAVGHLAGKLISVLFFCLRSGRLYDPAQHARALGLGDAR

SEQ ID NO: 440455 - protein, 338 aa, unidentified
MEYGAIDLHLRYSEIRIIDGDGKVVREKRVVTSRDTLTRAFADVGAVRILLETGTESEWVAQTLEAAGHTVVVADPNYAPMYGEVRRRVKTDRRDVAALAEANRRGWYRATHRRSAAQRTVQQILRSRRQLVAMRTGTISLLRALLRQEGYRLPSGSAAQVPARLARLTLPEALAPTLAPLRHVIETLTRELAGIDTRLGGYAAADPVVTQLQTVPGVGPVVALTFRATLDEVTRFEAAGQVSAFLGLVPREDSSAERRHRGHITKAGSRELRSLLIQAAWACWKSRGSGTLRAWAERLAGRRGRRIAVVALARRLSRILYAVWRDGTTFDGARVAAA

SEQ ID NO: 440456 - protein, 323 aa, unidentified
MSQPNPLCVGIDVSKTTLDIATANNEFAQFTAGNDTDGFELIIAELRKHSVALVLMEATGGLEAAVACSLQAEGFDIAVINPRQARNFSRAMGYLAKTDRIDAKVLSQMAEVINRHPERERFIKAIPDAERQILAAMVVRRRQLITMLVAERNRLHPAHPQNRKSINTIIKALEDELSRIDEAMNNHIKTHFKELAARLSSIKGVCAMTVATLLSEVPELGSLSRREISALIGVAPVNRDSGTMRGRRTIFGGRAGVRTALYMAALVATRFNPVIKDFYTRLITAGKVRKVALVACMRKLLTILNAMIRKNEEWSDSYHKFSL

SEQ ID NO: 440457 - protein, 349 aa, unidentified
MARPIRAVIGGVDTHAATHHAVVVDLLGVIQGSQEFTAAGYAELLAWLRSHGRIDRVGVEGTGAYGAGLARHLHDKGVSVIEVPRPDRRLRRQRGKSDPIDAEAAARAVLAGTATVKPKLANGSIEAIRAIRVARNGAVKAKTAATNALQALLITAPEPLRAQLRCRSTIKLVQTCVGLRPDMARLHEPTQALKLALRSVAQRADALAIEARQLNRQLTALTERAAPANSAVFALGPDTTSALLVSIGDNPDRLRSESSFAHLCGVAPIPASSGKTNRHRLHRGGDRSANHALHIAVIVRLRYCERTRAYATRRTADGLSMAEIIRCLKRYLAREVFIALRADYAAITT

SEQ ID NO: 440458 - protein, 344 aa, unidentified
MDHYAGIDVSLECSSVCVVDASGKVVREAKVVSEPEALIGWFGSLGFELARIGLEAGPLSQWLYAAMKQAGLAVELLETRHVSDAFKAMPVKSDRNDARKIAQLMRLGWFRPVHCKSITAQEIRAMLTARKLVQSKLLDFENSLRGILRGFGLKVGKTTRTNFAGRIEELVKGHPNLQTIGQALLRARAVLLAEFNGFEKRVRAMSRLHDKARLLMSAPAVGPIVSLTFACAIDDPSRFTSSKQAGPHFGLTPKKYQSGETDYTGRISKHGDASVREALYEAAHIMLTKPIKGCSDLKSWAMRIARRAGTNKAKVALARKLAVIMLRMLKDNVPFNPAAKAATA

SEQ ID NO: 440459 - protein, 315 aa, unidentified
MNLPIRIGMDTSKSVFQLHGVDENEVVVVRRQFRRAEMIRYFERLPPVLVAIESCGSSHHWARLLQSFGHEVKLIPPQYVKAYVKRGKNDAADAEALCEAVTRPSMRFVPVKSKEQQAACMLMTVRERLVSVKSQLSNAFRSYAAEFGIVGPAGRQNVTALIKRVLEDDSLPEMARDLFRLQAEEYAAVQARLAKIEAKLMKWHREDDVSRRIATIPGVGPIGSSMLSMKAPPPETFRSGRDFAAWLGLTPKDHSTGGRQRHGGITKAGDSVLRSTLIVGATALLRHIRKGRHKPTPWLASLLERKPPKLVAVAF

SEQ ID NO: 440460 - protein, 363 aa, unidentified
MTVVGIDAHKAWHTLVAVDDVGKRVAEFTVQARAAGHRQIVVWLERFDDVRVAVEDCRHLTRRLEADLLAAGHRVVRVHTRLMAGMRRSTREPGKSDPIDAEAVARVALREDDLHTAELPGLMREIKLLSEHRRTLVARRTAMQSKVRWFLHEIDPDLHVPSRALRRYRLGELLAHLDGHEGALVEIARDLLEDIAALTVRINALERRLDKLVRTTHPTLREVPGLGVLGAAMILGETAGARRFRSKDAYARFNGTAPIPVWLGNKVRFRLSRGGNRTINTALHMAAVTQLRLGSEGAVYYDKVTTAGKTRTEALRLLRRRISDRVFAALRADEQRADHAATTADPLAQNTPTLSSHELRRGA

SEQ ID NO: 440461 - protein, 405 aa, unidentified
MACYAGLDWGATAHAVCVVDEAGRAVARFHVRHDAEGLAELTARLARLAAAADMPIAIERPSGIVVDRLVAAGHSVVPIHPNVVKACRPRYRAAGGKSDPGDAYMLADILRTDGSRFRPLVPASDQIRALRALVRARDDLVAQRVALANQLRSLLGEFWPGAAAIFAAIDSPIALAFAERYPSPDSANGLDAKRLAAFLAQHHYSGRRSPAQLLSRLHAAPHGHAGAHEAKAKGELVRALVAVLKPLVGEIAKLSARIEHAVADLADGRIIMSFPRTGRICAAQILAEIGDVRARFPSESQLAAEAGICPVTHASGKSRGGVFRWACNHRLRAAITCFADNSRHSSPWAADIYRRARARGCDHPHATRILARAWVRILWKAWQDRTTYDPAKHTAALALATATPG

SEQ ID NO: 440462 - protein, 387 aa, unidentified
MPQQLDDLSRSLTPLEQDSTIVAVIEMSQASWLVAGIVPGIERHPLKKLEPSEVELLRLLMRWRAEATQNGRTIARIAVAFEAGRDGFWLARWLRARGIEAYVIHPASVAVSREHRRAKTDRLDTGLLKRVFLGWLRGEPDHCHMVAIPTLAEEDAKRPNREREGLVRERTRLVNRMKSCLVRFGVRTFKPTLRNAPDRLATLRTPEGVPLPPNTLLELRRDMARLRFVMDQIKEVEEARAQGLNQAPPDKTHVMVRLLARVIGIGLETADMLVQEVLARTWRDRRAVARYAGLTGSPDESGSRRREKGLAKAGNARVRRGMIQLAWRFLLFQKESALAQWYRARTADARGSTRKTLIVALARKLLIALWRMVTTGEVPAGVVLRAA

SEQ ID NO: 440463 - protein, 317 aa, unidentified
MIHLGIDIAKLKFDVALLAQGKFKTKVFANDSAGISACLKWLGTHADGPVHTCLEATGSYGEALACALHDAGHTVSVINPARTKAYAQSLGLRQKTDAVDAKMLARFVQTQEPAVWTPPPAELRALQVLLRRLDALVEMRTQEKNRLGVAEPTVSASIAQHLDYLQSQIDALKAQIENHIDQHPGLKQQQDLLDSIPGIGAATSAWLIGELNLTRFDSARQAAAFVGLTPRKDDSGTSVRGRPRLSKQGNSLLRKLLYFPALTAMTHNPLVRALCLRLKAKGKHNMAIIAAAMRKLIHIAFGVLKSGKPFDPTLADT

SEQ ID NO: 440464 - protein, 427 aa, unidentified
MNYTQNKKISQITPSTLIVGIDIAKDKHVARAQDDRGIEFGKRLFFENRIHGFENMLDWAKKLQQENNKTHVIFGVEPTRHFWLSLAYFLRARGYDFVLVNPMHVKKSKELDDNSPTKNDTKDARVIAQLVKDGRYSVPNLLEGIYAELREGVKLRDQLVKQLIIIEGRIQNNIQRYFPEFLDVFKEWDGKAAMGTLRLFPFPSDIKKMTPDEVLVKWKPFVKRGVGIKRATRLIEAANKSIGIKIGLRFAKKELHNLLDQFELYKQQLEDLDQELEDLVYEIPGAQEIIDIKGIGVTTVATFFAEVGDINKYSHPQQLVNMAGLSLREHSSGKYKGQTRIDKRGRKRLRKALYLAIRPMVRHNPTFKALHTYYTTRPNRPLKRQQSLIALCGKLLRVFFVIGQKQCEFDGNKLLQGLPELKALQAA

SEQ ID NO: 440465 - protein, 363 aa, unidentified
MEKQISVLGVDIAKQVFHLVGMDAHGTILVRKRLYRAQVMAFIAQLPPTLIGMEACGGAHDWARRFREHGHEVKLMAPQFVKPYVKANKNDLRDAEAIAEAVTRPTMRFVAVKSLAQHDLQALHRVRERLMKARTALINETRGLLHEYGIIVPQGAATFRTHVLAKLATEDAKLTPHSLGLFRQLLEELDALEARVATYDAQLAQVAQTHPVCQRLMTIPGLGELTATALVAAVSDAAQYKYGRQFAAWVGLVPRQHSTGGKSRLLGLSTHGDRYLRTLLVHGARSCLRWIDRQHDRRSQWVRSVMERRGWNRATVALANNKARVAWVLMGTEQVYRAAASGAPSTPDCQKAWQHRTPSARCR

SEQ ID NO: 440466 - protein, 327 aa, unidentified
MHIAIGIDVSKDKLDLGWLRDPQTNKKKTKVFRNKSTELVELSRWILKNTAAEPQDVLITVEPTGVYHEALVYHLHAQGFNVFMPNPARIKAYMRAEGLVHKTDKSDAIVLARYGIQTSNLQLWTPEAPEIRELKAMMRRLDGLEKDRMREMNRLEASTISACSERVTQSLQDMIAVLDAEIKALQKDIDDHIDRHPDLKKNRELLTSIVGIGPVVSRELVYLLAAKPFQSAKQVANYAGVIPQVQQSGKWEGRTRLSKEGPGRLRAKLYMAAVVAKKHNPVVRDQYERLLATGKNKMQALGAAMRKLVHLSFGVVKNQQEFQPQLL

SEQ ID NO: 440467 - protein, 311 aa, unidentified
MKIPPQFIGCDVSKHYLDIFDADGAVIRRIVNDPQGIAAWLDGLPDRTDRHVVFEATGRYDRHLSAALHARGLRCSRVNPARARDFARALGLMAKTDAIDARMLAAMGQCLAPAPTPEREASRDRLARLHKRRDQLVAMRQKEKLRQMEAVPEEHDSLARHITWLDAEIAAVEQDRDTLLREDAELARLNRLLRSIPGIGPVASATLLALMPELGSASPKAVAALAGLAPFNVDSGQFRGHRAIRGGRRRVRNALYMAAVTAARSYSRFAAFADGLKERGKPAKVAIVALARKILITANAILRDGVPFNAS

SEQ ID NO: 440468 - protein, 345 aa, unidentified
MSREKVREMSNYVYIAGLDVSKDEIAVTVLKKGEREKISFVVDNDGPKFEKELKKRLPQLCVEDSLIVMEHTGVYHLRLAYYLYENGYNVAIINPLQIKRYAESKLSRAKTDRIDSGIIAEYGERTEEIRLFKPMEDEQMEIKIKLGQLEDLQVQLNILNNQKHALEYQPLVSVKELVKPYERVIEVIKLELKKIEKELKELVLGSYREVAELLTSIPGIGEKTASVIISYLKGFEDFNNAKAVASYIGLCPSVYESGKRVKKGRIIKRGNAYIRKMLYLCALSAKRFNKACKELFERLIQRGKTKKQALIAVANKLIRQAYAVLKSREKYNEELAMYGKKCLTN

SEQ ID NO: 440469 - protein, 282 aa, unidentified
MKHTTVGIDIAKRVFQLHWVDVETGEINSLQIKREKFLDFFINRQPCLIGMEACSGSQHWARDLMNLGHQVKLMTGKLVKSFVMGNKGDVADAKAVWTAVQQPGIKPIAIKTEQQQAILALHRMRQGLVKMRIMQTNALRGLLTEYGEVMPQGKMGLRKGIAAAIAHVESRLPAIVVEALHAQWLRITDLDKHIAEIEAQLKSWLKTDSSAKAIAEVPGVGLLTATAAVATMGDAKTFKSGREFAAWLGLVSKQTGTGGKTKLLGISKRGDTYLRTLLIHGA

SEQ ID NO: 440470 - protein, 371 aa, unidentified
MEHTRFIGLDIHKERISGAVAESGRSGAVEYLGEIANEPGAISKLCDRLRRPGKPLAFCYEAGPCGYGIHRQLTRLGHRCDVVAPSLIPTKAGDRVKTNRRDATMLARLHRAGELTPVWVPDADHEAMRDLIRLRGVVRQIVTRARQHLQGFLLRHGRKHGRGTAWRMAYRRWLSTLAFEHPAQQIALQDYVDAVMDAERRLKRVEEQVFGLLPDWNLRPVVDGLQAMRGIALINAVVLVTEVGDFTRFSNPRQLMAYFGLVPGERSSGETVRRGAITKTGNAHVRRALVEGAWAYRMKARIGRHKVDRIEALPKVVRDIGWKAQVRLCTRYRRLRARGKTANVVNVAIAREMVGFIWSIACTIQSAPRAA

SEQ ID NO: 440471 - protein, 338 aa, unidentified
MKEYKLISIDLAKNVFQVCAFSERNKVAFNRKASRRALLNILRNIAPTTVVMEACYSSNHWGRAIQELGHLIHLIPAYQVKPFVVGNKNDANDAVAIAEASWRPKASFVSVKTIAQQDVQTLLRVREQIQKVRIMVSNQIHGFLSEYGVFCKKGHKALVETLAEALAPESRQLSDVAIEVIHLQMQQYKRLRKQEEKINDTLVALCRGNPSYHFLQSIPGIGPIVAATLLASVGDPAYFRNGRQFSAWIGLTPLQYASGEKSRMGKMSKRGNRSLRKMLIHGARSIVNWVAKKDDKLSLWIKELQKRMNPGKVVVAVANKLARMSWAVMNNQVEYAAR

SEQ ID NO: 440472 - protein, 452 aa, unidentified
MGKRNGLSRGDARRNARLLRLRGVVRHDRAILAIDLADTTQALAVCDHDSRVLARRTVRGHAWQLEEALGWGRQVAVQHGFAGIVVGCEPTGHRWRIVAELCDRLGLELVCVQPLLVARAREGEDLTTDKSDPKDAVVIARLVGELRCYVPERPDQVWARLRQLGARRAQLTTTAGACRQQLRDLLECAWPAVLEAAAKPLDSVTFRAAVSVVLARNPGDLRRLGYARFARQVTRELARWGGQRRCQRIVRAVWTAATSPQALALGVGAQRPGALERAKLTLDDWHHALGQLAEVERRMTGVLDQLQLTGLVASIPGLSAVGAAAILAETGDPARFDSARALVKHAGLCPRANESGAYAGTTRISGRGRPALRLAAWRATWGALAHNPVLQARHAHLTSRQHNPLSTAQARTALAAALLRWLWVVVTKHIGWQAAIAAGQLDPRKEVTAPAA

SEQ ID NO: 440473 - protein, 356 aa, unidentified
MSRDTKYIGMDVHKEAIVIAVFNDSGKLMMESIVETQASSILQFIHGLRGELHVTWEEGTWADWLYDLLKPHVHEVLVCNPRRNALLKEGSKSDKVDARKLADLLRTGMLRPVYHGENGLRTLRELARSYQTISKDLNRVMNRLKALYRGWGIACSGTQVYAARYREEWLHKIPHAGVHRRAELLYQQLDGLQALRRTLRPELLAESRKHKAAKLLRQIPCIGPIRAARLLALMQTPHRFRSKRQLWTYSGLGIETRDSAQYRYVHGQLQRSKKPQQIRGLNQNHNHEMKEIFKGAATRASCGVGPLRDFYVALLDKGMRPEMARLTLARKIAAITLTLWKKEERFDAEQLKTQAA

SEQ ID NO: 440474 - protein, 430 aa, unidentified
MRGAKAMEVLYRACAGLDVHKKTVVACVLAVGLDGAVRKEVRTFGTMTRELEALAAWLAGQQVEQVAMESTGVYWWPVWNILEEQGLALLLVHPQHMRQVPGHKTDVGDSEWLADLCRHGLLAASFIPPGAIRELRELTRMRKTLVQERTAMVNRLQKTLESAGIKLASVASDVLGVSGRHMVEALVAGEADPEALADLARRKLRGKLAVLREALTGRVKPHHRLLLEICLAQIDCLEAQIGKLDTEVARRVAPFQHQIDLLVSISGIRWLTAVGLLAELGPDLTRFASAGHLASWAGVCPGNHESAGKRRGGTTTRGNVWLRGLLGEAAWAAVRVKGSACRARFYRIARRRGTPKALVAVMHHLLAVIYHVLTEDTPYREDGPDYYKPADAERQARAALRTLQKLGYIVQATKPDVVPPQQALPPEEAA

SEQ ID NO: 440475 - protein, 426 aa, unidentified
MTITAGDSLQPDQMHIVHPRAAGLDVHKLQITAAVRLCQPGGAVECATRQFSALPAGLSELTQWLQSPRVTAAAMEATGIFWQAPWEALEAARIAPQLLHAQFVKQVQGRKSDVADSLWLARICQFGLCRPSYVPPRNFRQLRQLSRYRRKLVGERSRARNRIHKTLDHDGLRLGGALSDIFGRNGRKILAGLAAGRSQAEILASLSGHVRHKRELLEQVLEAQLDAHAVWKLGDLLRAHEAANTSIAELDARLEEGLAEMAEQVRLLETVPGIDRGSACAILVELGPDLSAFDKTANVAAWAGLAPGNNESAGKRRSGRLRRGNATLRATLAECAHGAVRTKGSQFHGHHNALKARMPYKRAILATAHKLLRTIVAMLRDERPYIDPGIDYDKLLVDRNAARWLRKLAEHGYLERIRCGSQPAAA

SEQ ID NO: 440476 - protein, 308 aa, unidentified
MTNGKRSTKVVANSRAGLTDLLGWLDKRHTEPSHVHVALEGTGVYHEMAACGLHDAGLSVSVVNPAQVRAFATGMGVRTKNDIVDSHVLARFAMHARPMRWSPPAPEARILQALMARREALAQDLQRERNRYEKAEITAPTALVLHSILETIEFLERHLASLQREIDDHIAAHPSLKANLMLLQSIPAVGPQVGRTLLAIMHARHFDSAQQLAAYLGLVPVQRQSGSSIQGPSRLSKAGPAKVRATLYMAAVVAKRYNPHIKTLCERLAARGKSTMSIIGAAMRKLVHLCFGVLKTRQPYRANYVAIA

SEQ ID NO: 440477 - protein, 313 aa, unidentified
MDKRFVGIDLGLRSFDVAVRPDGLHWELPHTAAGIGAFISRVAKLHPQLVVMEACGNLERSLARSLERNGIPVAVMNPRQVRQYARSIGRLAKTDKLDAEVIARFAEFVQPVPRTRPNENAEEFRDTLARRQQLVAMLTAEKNRHRQADPSIRSGIARHIRWLSDALREIDEEIRQQQSHDSDRAERAQLLKTVPGVGSTISATLIGFLLELGKLDRRKIASLAGVAPFNRDSGVRRGRRAVWGGRAQVRRALYMSVITGIRCNPMIRTFYERLRDPGKPGKVALVACMRKLLTILNAMIRDRRPWQSELAGT

SEQ ID NO: 440478 - protein, 446 aa, unidentified
MRAIGLDVHRDFCEVAISEEGRTRSAGRVRTVPEELQLLAQSLAATDQVVLEATGNALAIARILEPHVAKVVLANPKKVRVIAEAKVKTDRIDARVLAELLAAGYVPEVWVGDEATRALRRHVSRRRGLVKRRTALKNEVSSVLMRNLKRRPPVTDLFGVRGRAWLAGLDLPVDERETVEACLRQLDFLQGELELAERRIAEHAVGSDEIRRLMTIPGLDVTAAAALMAAIGDIHRFPTPRHLVGYLGLHPSIRQSGSGRARHGRTTKQGSASARQALTEAAWAATKAPGPLRAFGQRVAARRGPTIAAVAIARKLAVLAWHLLTREQDYAYQRPGIVQRKLRRLELRAGAPRSKPGPHPRPEPLDTKPRPRRNRDRAPSRDRLPPTRHRLASNPTATQRRERSESAATSLTFIGSRASRRSDAAGTDPSPTCPHEGQRGRSPNSF

SEQ ID NO: 440479 - protein, 408 aa, unidentified
MKALHRRCAGLDVHQAEIVACRRIVVRSRVQSEVQRFATTTQGLIELLEWLVEGKVTHVAMEATGVYWKPVWNILVGEFELVLANAGQVRNVPGRKSDVNDATWLADLLAHGLIRASFVPPRPIQELRDLTRTRRELTREIVRHKQRILATLEEANIKLASVVSDVFGLSGRRIVKAMIAGESDAQRLADLGSPRLSCKRSELVAALTGRVRDHHRFILGQHMKTIEQIEATIEEFDARVEAALAPFRDAIERLTRIPGYGVGVVQTVIAETGGDMSQFETAEHLISWAGLCPRLDESAGKRRSTKVRKGAPWLKPVLVQAAKAGAKTKGSSFKARYWNVASRAGRKKATIAVAAAQLRVAYHMLKDGTCYQEMGENYRRPKNPARAAQNLAKRIRALGYQVDIKVAA

SEQ ID NO: 440480 - protein, 281 aa, unidentified
MSDRVESSYVGVDLSKGRLDVAFRPTGGHYRFSNDPNGIDALVCRLAKEHPALVVLEASGGYERPAAAALAASGLAVAVVNPRQARDFAKATGRLAKSDALDAESLARFAEALRPEPVRRRIWAHVRWLEKEISRTDGELKGAIEGSPTRRENEALLRSVPGVGPVLARTLLAELPELGTLSHKHLSALVGVAPFNFDSGTLRGKRMVWGGRSRVRSTLYMASLTATPHNPLIIRAFYERVVAAGKPRKVALVACMRKLLSILNAVVRDRVPWSPTHVLSP

SEQ ID NO: 440481 - protein, 465 aa, unidentified
MGAGKMNRKQRKELGRRLQSANPGLEVVHPHAAGIDVGNGAHYVAVRPEQDAEPVRRFECFTADLHRMADWLEACEVKTVAMQSTGVYWIPLYEILEQRGFEVYLVNARHTKNLPGRKSDVQESQWLLKLHTHGLLNNSFQPTAEIRVVRTYWRQRGEHVRGASTCIQRIQKVLTQMNVQLANVISDLSGLTGQAIVRAILAGERDPRKLAELSHPRIRAGREQIAKSLEGNWRSELLFVLKQEMEMYDTYQHKIAECDRELEATLKQFAVPERASTEQPKIPNAKKTKRIQRNAPGFNLTSELHRITGVDLSRIDGVNAIVAQTIISEVGLDMTRWKTEAHFASWLGLCPDNRISGDKVLARGTRHVINRAATALRMAATTLIKSQSYLGAQYRRLRTKLGAPKAITAMAHRLARLVFRMLKYGQEYVDKGTQYYEQKHHEQQLHLLKKKAATLGFQVVEIGVA

SEQ ID NO: 440482 - protein, 355 aa, unidentified
MMIIGCDYHPGFQQIAFVDTETGELQERRLEHREEAERFYRDLGAQGVKVRVGKEASGHARWFERLLAELQFELWTGDAAAINAKRVRKQKTDRQDAQLILRLMLKDDFPQIWVPSWENRDLRQLLWHRHRMVQARTRIMNQLQAVALNEGLRCKKRLWRDAGREQLEKFQLAPWASRRRRDLSELLDRLTPTIAELTAAIEQEVERYPAAQRLQTHPGVGALTALAFVLIVGRAERFQCGKQIACYLGLVPLEDSSGQRRRLGHITKQGNSLLRFLLVEAAQVTVRSDPEWRSKYCHLALRRGRKIAKVAMARKLAVRLYWMMRKEWDYAQLSKFGSYAGKPGNRDGVNQTSSK

SEQ ID NO: 440483 - protein, 440 aa, unidentified
MSKRAYRATRVNDVNWDQLAQGKDGLDIALGVDVGKYSLWAVCRWADGRFERPWRVQNPGEIPTLLTLLKRVSAGRKLVVAMESSGTYGDALRQALADNQIEVQRVGGKAAHDYAEVFDGVPSQHDGKDAAVVAELAALGKAMPWEYQPADPWEQELAYWVEWMVAHRQMLTIWQGRLEGLLARHWPEATQVLKLSSGTLLRVLKRYGTPQALAADGEAAKLLARWGGAFLAPEKIEQLLAGAGASVGVRLGEWQQRQIQNYAQQALAARQEANRAERRLRSLAAGHAVLQAQGKVVGVPTACVLWVSTGDPRKYHAAGAYRKAMGLNLVERSSGTYQGRLRISKRGSSRTRQWLYFAVLRLVQKCGVRPWYEAKKAHDEADARRVVVAVMRKLAVALYYVGVHNEEFQPGRLFGRIRRRRDSPGEQKSRTKRRSRAEQI

SEQ ID NO: 440484 - protein, 343 aa, unidentified
MQVTTVGLDLAKHWFQVHGVDADGQIVVRRRLRRSEVLAFFQSLPPCLVGMEACATAHHWARELAALGHTVKLMPPAYVKAYVKRNKNDAADAEAICEAVTRPSMRFVPVKDAHQQSVLMLHRARSLLVRQRTMLVNSLRAHMAEFGIIAPQGLRNVEALIKQIAHKQERLPELARAILQMIADQLYDTMARVRQIELRLAKWHRQNRVSQLLATVPGVGIMGASAIAATVADPSLFRSGREFAAWLGMTPRQNSSGGKERLGRTSKRGDKYIRSLLIAGAVAILRHARTRSTKDAAWVRSLLARKPTKVAAVALANKTARIVWAVMARGDGYRAKTPIGPAA

SEQ ID NO: 440485 - protein, 353 aa, unidentified
MDSKKYIGMDVHKESISIAVRNAAGKIVMECVVETKASVILDFIHGLRGELHVTFEEGTWATWLYDLLKPHVTKLVVCDPRKNSRQGNKNDRIDARELADRLYMNKLSSVYHGEAGVRALKELARSYLTISKHLSRVMTRVKAIYRSWGIPCAGKQVYAPRHRAEWLAKITEVGVLRRAEFYYQQLDALRLLRHEVRRELLAESKKHKATKLLCQIPSIGPIRAALLIALIQTPHRFRTKRPLWKYSGFAIETHSSADYRNVKGQLERTKKQVSVRGLNRDCNHDLKNLFKSAATIASVKPGPFQEFYAVLVAKGMRPEMARLTLARKIAAIVLIVWKKGVSFDAQHLKSQTA

SEQ ID NO: 440486 - protein, 332 aa, unidentified
MNAVSTLGIDLAKNTFSVHGIDADGVVTVRRTVSRSKLTELVVRLPPCLIGMEACSGAHEWARRFTTAGHTVKLMAPKFVTPYRKSGKNDGNDAEAICEAVGRPNMRFVPIKSVQQQSDLSLHRVRQGFVAERTATFNRIRGLIAEFGYVLPNGVEQLRRQVPDLLERLPAQVARCVRDLLEHAERLRSKALEYEREIRMSVRDNELARRAHTRPGIGFITASAAVATVGNGHDFKNGRQFSAWLGLVPRQYSTGGKTRLGHITKRGDPYLRTLLVMGARSVLRRAYRESDPLSRWALALQQRRGYHRACVAIAAKNARVVWALLAKESASA

SEQ ID NO: 440487 - protein, 410 aa, unidentified
MTYVLALDISMGKSYAVIYEDETCLWEDSIIHTKTGFSYLLAEIMNLPSIPEVVFESTGIYSRPLETFCQDNQLPYILLNPLQAKKQLEEATLRSWKTDKQDAHQLARSHWRNKRKPKLIQIDIYLVLRELSRFYQEVEADIKRNRMYLHNCLQLTFPELEHFFSNRLTPYALTLIGLYPHPDLVLESTPTKIKNRLMKTTRKKISENRARKKAEELVSYAKDSYPATQVDSVHCQRAEYYAEKLQDLLQQKADLRIQLIEKAHHLEEFALYATIPGIGELTSALLIGELGDIRRFETSNQLNAFVGIDIRRYQSGKYIGKDHINKRGNPKGRKILYFTVRNMIRQQRSAPNHIVDYYYKLKRQPTPKKDKVATVACMNKLLKCMHSMVRNHTSYAYAHPVSKTNNIPVV

SEQ ID NO: 440488 - protein, 453 aa, unidentified
MSKETKKKVKRASSLSVPIVHENAAGIDISARGHAVAIPPDRDKVCVREFGAFTEDLYSIAEWLKNCGITTIAMESTGVYWKPLYRVLLEYGFSVALVNARHVKNVTGRKNDMDDAQWIQKLHSGGLLNSSFLPDETTESLRVLIRHRKRLIEDSSRYVLRMQKALELMNIKIHSVINDITGKTGTAIIEAILQGERNPSNFLQYVDSRIKADHDTICKSLMGSWHEEQIFTLAENYQLYKYIQQRIVICESKIEQHLQKQVAINNEGIIEALEKEKMVSKKKKTKNQPLFNVKNYLMKIHEVDVTAIFGISENTALEILAETGTDLSKWETENHFISWLNLCPNNKISGGKLISSMVMKKKAGYATQAFRAAANSVQRSDNWLGDYFRRMKAKGGNKYAIIAVARKIAIIYYKMVRYKKEFKPVDADEYRKKYKAAKIGYLEKQLAKLREAA

SEQ ID NO: 440489 - protein, 348 aa, unidentified
MITIGIDPHSRTHTAAALDERGRVLAEITVGSDVRELDRLVRWIQSVGPERIVAVEGARGFGLALCRRVLAAGETVLDVAPALTASERRSNRKAGKNDRGDAVAVARIALRELGLPHASAEMIGADLKLLVDARDQLVREATRTRNRLHALLLVIAPGYQEHIRDLTSSAGLLIARRLASRARATDRVRSSLACSAITRLRSLSGEIGAVERDITSALDQVAPANLLSICGVGPLVAAKILGEVRDVGRFSSAAAFASYCGTAPIPASSGTIIRHRLHRGGNRQLNRALHTVALTQARRDDRAKAFLARKRGEGKTPRDARRALKRHLADAVYRALLLDAEGARSIAA

SEQ ID NO: 440490 - protein, 394 aa, unidentified
MYYIGIDIAKKSHEVCFMDQNGQILDGNSFKIPNTLSGVNKLQQMLDRYALTPENAQVGMEATGHYWLVLYSWLFEKGFDIKVINPIVTDALRHMRIRKVKNDRVDAEIVAKVLMLGEYQETAIADGDILALRQLCRFRLWQVQTMGDLKRKVIALLDQVFPEYADLFSDVFGMTSKELLLQYTTPEEIAAVSARKLTTLLGKSSKGHFGKEKALEIQAAAKGSLGITVATDAFAFQIRQMVEQLEFVEEQITLLDQQIESYMAKLESPITTIPGVGPVYGAVILSELGDIHRFPSAKQIVSYAGIDAQVNESGDFKGTEAHMSKRGSPYLRRAIFGAAFVASWADPQLKEYYQSLRARGKPHRVAVGAVARKLCYLIFAVLSENRAYEVRARL

SEQ ID NO: 440491 - protein, 425 aa, unidentified
MEVIHRRCSGLDVHKKTVVACVRLVLDGKITREVRTFETTTSGLLLLLAWLTELGCTHVAMEATGVYWKPVWNILSDGDFELVLANAAHIKNVPGRKTDVSDAAWIADLLAHGLIRSSFVPEQEIQELRELLRTRKQLGRQQSRHIQRWQETLESANVKLDSVITDIVGKSGRAMIQALIAGKTDPVRLAALADQRIKASRQELCEALRGRVTNHHRFLLHLHLQHIEFADAAIQDIDRNVTALITRMDQEVEAGQTRATFQSLILLLMTIPGIDVLSARIILSEIGRDMSRFPTAGHLLSWAGLCPRNDESAGKRRSTRLRKGDLWLKTLLVQCAWAARRKKGSYFNAQFLRLRGRRGPKKAACAVAASLLTTIYHMLKDGMQFQDLGVDHFDRRSKDVRAKRLVNQLANLGFHTKLTPLAQAA

SEQ ID NO: 440492 - protein, 357 aa, unidentified
MKSQDSNYVGIDCGKKSLEVIRINSEGSYERQQFSTTEIGISKLINWLNPNDVVGLEAGSQSFRIAKSILNKGIQVIVLNPGDLATIYQSLKKTDKEDSLKIARLIQRFPIEELPTVPVPTDEEEDNRRLCSEQENWTRQLTQGKNRLHSLFTQAGLTHITKKHLRTKANRETSVALLPSRYHKEAERILQVLDLVEQNLKLIEEEIKEALRKNQTYTQTIMSMPGIGMITSLAILSYMGDCKRFSSAKQAAYYVGLVPRVDISGDSAYYGRIVNRGCHSIRRVIVQAAWSLVRCQHGGKFKEFYERLYSKKGAKKSIIAVSRKMIEVLYSMIRTGTLFDSMPEEVLYRKLAQYGLM

SEQ ID NO: 440493 - protein, 369 aa, unidentified
MKTTKKTKTTPSVVSTPAALAPPGGCTIGLDLGDRSHYHCVLDAAGQLIHEGSIPNDRAALTALLTQYPAATVALEAGPHSPWISRYLTGLGAAVIVANPRKLHAISRHERKCDRRDAAMLARLARADVALLHPLQHGSAQAQHDLLGLKLRDALVRTRVGLINTVRFTLKSLGYPVSNPSSEAFHKHIVSEVPADCLPVVRPLLAVLTLITEQIKTLERDLVTRSKKDYPVTQRLQQISGVGPLTALCFVLKIGDPTRFGRSRDVGPYLGLCPGRDQSGDTDKQLRISKCGDGLLRRLLVSAAHYILGPFGPACALRAYGQHLTGTSTREKKRAVVAVARKLAVLLLSLWKHGTDYEPRVPALVMTPV

SEQ ID NO: 440494 - protein, 411 aa, unidentified
MNAVGIDVSKGKSMVSVMRPLGEVVSKPFTVRHTGSELKELADCLKSLDGETRVIMEHTGRYYEPVAQFLHDAGLYVSAVNPKLIKDYGNNSLRKVKTDKADSKKIAKYGLDNWVELRQYASMDTIRYQLKTLNRQCNLYTKTKTMMKNNLIALLDQTYPGVNALFDSPVREDGTQKWVDFVAPFWHVDCVRGMSLTAFTERYRKWCKRHGYHFSSDKAAEIHAGAKEQIAVMPKDDLTKRLIRQAIDSLNAVSKTVEQLKAEMLKLSAQLPEYPVVMGMHSVGDSLGPQLMAEIGDVTRFARRSSITSFAGVDPGADQSGGHEAKSVPTSKSGPPELRKALFLVMDNLLKSMPQDDPVYRFMDKKRAEGKPYLVYMTAGANKFLRIYYGKVKEYLAKLEQPSEPVSNERI

SEQ ID NO: 440495 - protein, 365 aa, unidentified
MGQNTHVDWTGQPIYIGLDIHQGHWEVSIHTQSVEHKTFHQDPEADQLVRYLHRHFPGATSHAVYEAGYCGFAPYRALTALGVDCLVVHPPDVPTTDKQRRRKTDRTDARTLAQDLRAGLLVGIYVPTRAAEAARDLVRWRATLRQEQTRTKNRITSLLQRWEVAVPAGCQGPWSQAGLDALATVEVGPAAATTTVQYQGRLLRTLRQQEAAVRRELRALAATDAYRAQVALLQTIPGIGFISALTWLTELGPIDRFARFDQLCSYVGLVPGEHASGQEADRSTGLDHRGNPRLRRLLIQNSWTAVRKDPALTQRFDTLTARMPKQQAIIRIARKLLRRLRHVLRTEEPYATGVVASPDQGSPDQ

SEQ ID NO: 440496 - protein, 353 aa, unidentified
MEQVKIQAEVILGVDTHLDVHVGVVIDAVGRVQGTLAIATNRSGYEQLLDWAQGFGVLRRAGVEGTGSYGSGLTRFLEERGIAVFEVNRPDRSRRRSRGKSDPTDAESAARAVLADDATCIPKAQSGLAEALRTLSVARRSAVKAKTQAVNQLRALLVSAPSFIRDVVLKVKPEDCVAACAALPHDDVNPVLASLKTTLQLLAKRWTALHEELRELDKQLARLTKLAAPRLLARFGVGPQTAATLLVTAGDNPTRLRNEAALAALCGVSPLDASSGKMSRHRLNRGGQRQANNALWTIAMVRMRSDARTREYVARRTREGLSKKEIHRCLKRYIVRELYPLILADLKESVRPT

SEQ ID NO: 440497 - protein, 414 aa, unidentified
MNELHYIGFDVHKKSIQFCVKSADGAICQEGRIRATRPALAAWCAQQKVPWKGGMEATMFSGWIYDALKPHAVNLKMAHPAMLKAITTGKHASDRLDARKIADLVRMDWIPSVWVAPPEIREMRLQLRYRNLVVRQATQVKNRIACTLMEHGAEFTKKKLHQEKYFHELLEQLDEVPESVRNLLRRARGSLQMFTVTQKALLQLLETDPRLAARVQLLKSIRGVGVVMALTWALEIGDPQRFGSIGQALSYCGLVAAFQQSAEKVYRGHLSKKRNAHLQTMLIEVAHLAPRYHPELQRVYNEAKEKRHANAGTLAVARKLVAYLMAVDKSGKPFQMRTPEAAAAPGSPAGSQVASPPAPPIAKSQRVAQRSSPSRVRSAAPKDGAPRTAPGRCAAEAVAMGGSDGKAKRAGKRR

SEQ ID NO: 440498 - protein, 407 aa, unidentified
MLFVGDDWAEDHHDVEVQDEAGRRLVKARLPEGLAGITRLHELVGAHLPEDADPAQVVIGIETDRGPWVSALVAAGYQVIAVNPLQAARYRERYSTSGAKSDAGDAHALADMVRTDRHQLRAVAGDSELAEAVKITARAHQTLIWDRTRQVQRLRAALLESFPAAVAVFDDLAAPDTLELLAKAPTPELARRLTIAQLSAALKRARRRDIAEKSRKIRAAFQAGQLPVSPVIAGAYAAVVRAQAALIGTLNAEIDRLAEQVDAHFGQHPDAEVYRSQPGLGPVLAARVLAEFGDDPDRYTNAKARKNYAGTSPITRASGKKKVALARYARNHRLADALHQQAFCALGASPGARAYYDALRARGAGHHAALRQLGNRLVGILHGCLKTQTAYNEATAWPQNVTLDAAA

SEQ ID NO: 440499 - protein, 355 aa, unidentified
MNQEKYMGMDVHQATISVAVMDGRGKLIMECILETKAGTILEFIGGLQGSLSVTFEEGTSAAWLHDLLKPHIAHLIVCDPRKNALLKDGSKSDRIDARKLADLLRLNRLNPVYHGEHGVRTLKELGRSYLTITQDLTRVMSRIKALYRSWAIPCSGSTVYAPRHRAEWLAKIVEPGVHLRAERLYQQLDLLQPVHQQARHDLLVESHRHPAVKLLRQIPAIGPIRAALLVALLQTPHRFRTNRQLWAYSGFALETHDSGEYRMVRGKVRRNRERLTVLGLNDNHNHDLKNLFKGAAISASTRPGPLYDFYVGLLQKGMRPTMARLTLARKIATITLTMWKKGVDFDAKQLNRQAA

SEQ ID NO: 440500 - protein, 373 aa, unidentified
MFHFTTLFIGMDVHKESFSLCYYDMMANQFKHSTKVGPNVSYIVNYVNELRRLYGQDAEVLCGYEAGCLGFTLYHQLQAHGIPCIVMAPTTVMKEGSKRVKTDKKDAAQLAKALAFRSYRPVHIPTVEDEQVKEYIRMRTDHKVALKKIKQQILAFCLRHDFRYTEGSSNWTQKHVRWLRSLNPDGLYAEILTEYLLTYEKLVDQIERYDARIEQLGQSDSYQEKVSRLSCFIGIKTLTALSIVTEIGDFNRFATAQHFASYLGLTPSENSSGDKERRGAITKAGNSHVRRLLIEAAQSLAKGTIGYKSKELKRRQSGNRVEVIAYADKANERLRRRYRTLVLGKNKKQNVAKTAIARELSGFILGMMTGRIA

SEQ ID NO: 440501 - protein, 404 aa, unidentified
MSITCGIDWAESHHDVAVLNETGEVLARRRIDTGVSGFSQLINLLSEHAENPAEVPVGIETDKNLIVVALQGAGFTIYPINPRAVARYRERHGQSGKKSDPGDAFVLADILRTDRHHDRPLPAISDAGLAVKALARQHQEAIWALHQTLSRLRSVLLEFYPQALQAFPILKHKAALAILGAAPTPDAGMKLTSRKVVAMLHKCGRRNDAALVEQILTALKMPALRQPAPVEQALGQTVTGLLGVVAAMHAAVEQLEAALEVEFAEHPLAPVLRSAPGLGPVLAARVLAEVGDDLQRFATANGLRAFAGTAPVTRASGRSSHVKARRVRNKRLGDACHWWAFAMLTKSAGAREHYDRRRAIGDTHNAALRNLANKLIGRLWWCMQNGELWDDTTAWAATPSALPT

SEQ ID NO: 440502 - protein, 354 aa, unidentified
MVTITNDPAPNIVVGVDSHKETHQVAVLDRTGALMGNRSFAVTLHGYRELEAWLATLGTVDRVGMECTGSFAAGLTRYFRERHVDVFEVTTTHRATRARRGKDDAIDAEMAARKVLSGEARARAKDTTGDIESIRLLKLSRESAIKARTVALLQIRDVLITAPAELREWIESAGGTRHRVNRAGALRPDVERLDEPLQAAKFTLRQLSRRVKFLDEEITNLDLQLAELVKRCAPNLLQCRGIGTQHAAQLLITAGQNLERLHSDGAFARLCGVAPVPVSSGKTNRMRLHRGGDRQANRTLHLIAVSRLRIDPRTQIYMERRRKDGLSKMDVLRCLKRFIAREVYNALKLDLLHC

SEQ ID NO: 440503 - protein, 332 aa, unidentified
MDSIKQCVGIDISKSSFAASLCVTSDDGVLGYRDVSNFRNEKTGFNQLMRWVRKHQEKDVPLVFLMEATGVYYESLAHHLHKIGQQVHVVLPNTSKHYFSSLNIKTKTDKVDAKVLSRFGVERRHKLWQPPSRELLELRNLTRYYVQLQEQKTAINNIKHSKEESFKVQSFILQSNKKLITQIDKQITQCKLKIEQLIANSQELKRKVDIILSIKGVGIITVATIIAETLGFVQVRNIKQLVSYAGYDVVQRESGTSVKGRTRISKKGNRYIRNALYFPAMVGCRYNPNLKEVYRRINQNKPSKMIGQVAIQRKLLVLIYTLWKNETEFQIK

SEQ ID NO: 440504 - protein, 421 aa, unidentified
MLKIHRFNCAGLDVHKNLIVATIGITDKKTRVTEYIQKDFSSLNYDLYNLKNWLIEHKCFDVCMESTGKYWIPVFNVLETEAKMNIVLVHPKYVKAIKGKKTDKKDSKWICDLFKHDLLKSSFIPSKDIRELRDLSRYRFKLICMRTSERNRYQNSMTVSNIALASVVSDPFGKTAKAIMNEVLSTEAIDEAKITKLIHGSCRNKDKIIESLKNSKIEPDQRFKMTEIQSHMNELDKHIEAVEIEIIKRASRYFDDFIHITEIDGIQLMSAILIISEIGVDMTQFETDKQLCCWAGVSPANNESAGKKRSVRISKAGQYLKPVLVQCALAAIRKKNSYFGQKYTRIKKRRGHKKAIIAIARMMLVSIYHMILTGEKFNPSDYESFKDPKPQREKNNYTVETALAFLKSQGFDVSSIQEIPK

SEQ ID NO: 440505 - protein, 456 aa, unidentified
MSKQRKSAMPAVHAKPTQRKHAAGIDIGATSIYVAVPVDRDPQPVRSFQTFTEDLHRLADWLQRCRIKTVAMESTGVFWVPLFQILEQRGFEVCLVNARHVKNVPGRKTDVSDCQWLQYLHSVGLLQASFRPAQQVCALRSLLRHRDSLVQTASTYAQRIQKALDQMNLQLHHVISDITGVSGVTILDAILNGERDPLKLASLRDHRIKATEETVAKSLVGDYRPEHLFTLRQSLDAWRYHRKLIAECDDEVQRHLVQFASKADPKQNPLPHPRKVSSSKVYSSQPGYDLRTEHYRILGVDLTEVPGINTLLVHTLLAEVGPDLSKFRSAAAFASWLGLCPDNRISGGKTLSVRTRHVQNRAALALRIAAHTLHHNQSVLGHYYRRMRAKLGAPKAITATAHKLARILYHLLTTGQPYQESIFAERETQNQKRALFSLHARARTLGYQLIPLTAST

SEQ ID NO: 440506 - protein, 410 aa, unidentified
MELLHRRCCGLDVHKETVVACLRLVSDGKVTTEVRTFQTTTADLLHLSEWLAANGCTHVAMEATGVYWKPVWHILDDGEFGLVLANAAHVKNVPGRKTDVNDAMWLAELLAHGLIRASFVPDTQTQEMRNLLRTRKQLVREQSSHVLRVQKTLEDANIKLDSVLTDLMGKSGRAMIEALIAGETNPTTLASLADRRAKASHEEFREALRGRVTKHHRFLLRLHLNQIDALNAAMATLDAQVEENLGPFRTAVGLIISIPGIKNLGAHVIVSEIGIDMSRFPSHAHLISWAGICPRNDESAGKRRSNRLRKGAPWLKTTLVQCAWAAVKKKNSYLQAQFYRIKARRGPKKAIMAVAASILTAIYHMLKDGTMYKDLGHDHFDRHSTDQQKQRLVKRLAELGYVVEIKPLAA

SEQ ID NO: 440507 - protein, 412 aa, unidentified
MSKLSRTQRGGVPISDPHPWEGLTRMQPQAAGLDIGAHEIMACAPGPNDTQDVRAFGTYTADLHALVAWLLERHVQTVAMESTGVYWIPVFETLEAHGLRGCLIRATAIHRIPGRKSDVLDCQWIQTLHTYGLLADSFRPDADLIALRTLLRHRAQLIEHRSPHILHMQKALTQMNIQLAQALSDVTGQTGQAIIRAIVAGERDPHRLAALRNYRCQKDAHEIALALTGTWRAEHVFVLTQSLECFDFYTRQLNACDAEIERLYTSLRPAWGMPEPPLPPQKPHSHNKNTRPDTPLRNQLRRLTGVDLVAVPGLSVSLAQTIVAEVGTTLDQFPDAKHFCSWLGLAPHNDISGGKVLKSRTLKNHNRAGQAFRQAAAALMRAKCHFGAYYRRKKSQIGPAQAAVATAHKNLS

SEQ ID NO: 440508 - protein, 337 aa, unidentified
MVYVGIDLHKKTIVLCVVDQQRVVLTRKTLSCAEPKKIVAFFRELGEFQAVVEATASYEWLWLLLEPLARRLVLAHPKKLRIIAESRRKSDRIDAQVLAEFLARDEIPESYRPTPRQRQHRVLVRHRCYVRRRAAAAKVKIRRILADYNADRSNLFSIEGQKYLSRVKLAAADRFVIDQLRDERTHRLKQLTAIEQQLREFAKRAPAAEREARAALASVPSVGTVTVDVVLSEVADVQRFRSTKEVVAYAGLAPGFRESAGKRHDLSISKEGSRLLRWALVEAAWRLVRSTQRWRTVFENLSQRRGERKAIVAIARRLLTILVAVWRSGQCYRPLMA

SEQ ID NO: 440509 - protein, 365 aa, unidentified
MASLPSGPGVVHVGMDTSVREIVCGVLRPGMEVPAVDRVPNDEESVRRLVGRLGDRRLLAVCYEAGPSGYELHRLLSSMGVACEVIAPSLVPKGSSDRVKTDRRDAVRLTLALRAGMLTPVRVPSPSEEAVRDLVRARGDLLDDRRRAQQRLSAFLLRHGRVWGATKWTCAHRAWVDRQEFGEPAMQETLDAYRGALEAREAELRAAEARLGAWAGREPLAPAVARLGAYRGIAELTALTLAAEVVDWRRFATARAFMGFTGLVPAEYSSGARTRRGSITKAGPEGVRTALVESAWAYRHRPAVGALLRRRQAGADPGTLARSWKAQQRLHATWRKMAARGKPPGVTAAAVARELAGFVWAEMTS

SEQ ID NO: 440510 - protein, 419 aa, unidentified
MKNIETEKLKTVNNETLIVAVDIGKTVNHGYFRAPNGEDVKPFPFYNNGQSFKEFWRKLCQFQREYELEDIVIGFESTGPYAEPLSHYLRKKPVKLVQVNPMHTKRLKELTGNSPNKTDNKDPRVIADVISLGHALTLVVPEGEAAELRRLTQARERSVKSRISISNQLQHLIFVVFPEFLSVMKNTSTKSAIYLIKNHPAPESIVNMGLESLTMVLKKVSRGRLGQKRATELFEAAWKSIGIDEGKQSILLEIEHLVSNIENEGRYIDSFEKQMDDYLRQIPYSRNILSIKGIGIITVAGLIGEVGDFKKFNTISEIMKLAGLDLYEVSSGKHKGQHHISKRGRSLIRKLLYFASINVVRAKGIMHKRYQQMLSRGMPKTKALIAISRKLLRLIFALARDNAVYAENYGQPHTYKLAA

SEQ ID NO: 440511 - protein, 343 aa, unidentified
MKTITTIGLDIAKSVFQVHGVDAAGEVVIRRQLKRRHVLAFFQKLPSCLVGIEACASSHYWSRELQALGHTVRLMPPAYVKPYVKRQKNDMADAEAICEAVTRANMRFVPTKTPEQQSCLMLHRTRHLFIRQQTAVINSIRAHLAEFGIIAPVGRKGVTELLHVVADPSDRRVPEVARACLAALGTQLLRLKQQILEFDRMIMAWHRSNQTSKRLHYIPGVGPILATALVASVADPRTFRSGRNFSAWIGLVPKQHSSGGKDRLGSISKQGDRYLRSLFVAGALAVIRYAKVHGTKHRPWLTALLGRRPTKVAAIALANKIARMAWAMMAKGERYKQPVALAA

SEQ ID NO: 440512 - protein, 406 aa, unidentified
MGRFDHRDIDVFVGVDMAKQDHYAQAITTAGVEVFHRPVLNDQTAIDKLIDDAGRHGRLALVIDMPSSAAQLLLTIAHARGVPVAYVTGLQMRRAAELYAGAAKTDPRDAWVLADFARRHADQLAWIEVSDELLSKLRILNGRDVDLAEDANRATNRCRDALTSISPALERAIGPRLGLAGVRALLAERPTPTALRAADHATLRALIATRSPRLADKLAADIDTALAAQTVTLPGEDTWGEIITGLIADLERLHTQRAAIAKHIETVFLEHPLGQVLVTLCGFGPRTGARTLAEIGDPTRFKDGGRLAAYAGLAPVDRRSGKSINNAAASRRGNHRLKNAMFLAAFVATQHDPAAKAYYQRKRDEGKNHNAAVICVARRRCDLIHAMLTTTTAYDPHRSENLTAAA

SEQ ID NO: 440513 - protein, 394 aa, unidentified
MFYIGIDIGKRSHVASIMNDEGKVVLKGFSFPNTIEGGEKFLGKIHDFSSLPDDFTVGMEATGHYWLAVFSFLHEKNFLIHVLNPIQTDGWRKGTEIRKRKNDIIDSVLIADLIRFGSFVETTLSDENIFSLKQLSRYLTYLVGTASDFKRKIIAVLDQVFPEYDTVFGKAGVFGKASKELLLEFSSPETLNEISADTLAKLLSDASRNRLGIEKANALKNAASRSFGITFAQETFTFQLRSMIEQLKFLEPQIKNTETEIKKIMATLHSVIETIPGIGPINGATILGEIGDISKFSNPTKLVAYAGLDATVSQSGQYQATHNVMSKRGSPYLRKALFSAALIAVQHDPVLKAFYEKKRSEGKHHLTALGAVSRKLCYIVHAILKKNEPYEIRM

SEQ ID NO: 440514 - protein, 351 aa, unidentified
MYYAGLDLHRTYFTLCVLTSEGQVVCDHRRLPADLEPLTSILRAVGGPVTVTVEATRQWAWLHDRLTAAGFTVQVAHPQQVKLICHARCKTDPIDARKLAELTRVHLLPSIWVPSPEVRSWRQLIRGRAALVRWRTRAKNRIHGCLAAENLRVATTDLFGCAGREWLAHAPVSPTARREITVQLAVIGALETQITGYDADVKRIAKHPDAQRLQTIPGIGVFGAALLLAEIGTIRRFATAHELAAYAGLVPSTRSSGDKTSHGSVSGASNHWLKWILIEAVQTLKQVPGPVRFHYERLLRAKGKPKATVAAARKLCTYIYWMWTQELSYAAWLETETKRVGCPMHTLASSA

SEQ ID NO: 440515 - protein, 391 aa, unidentified
MICVGIDIAKDKHDCCILDSDGTVRADCFTIPNNMDGFKQLLQTIRNCTKKSDKIKVGLEATGHYSYNILGFLLDNGLPTYVINPLHTNLYRKSLSLRKTKTDRVDARTIATMLLSDVDLKSYTDIAYHNEELKSLTRYRFEKVRERAKLKQSVSRLVTILFPELEKLVPSLHSASVYALLSEYPGAKQISEVHLTKLTNLLVTASKGHYGKEKATLIRETARASIGSVMPAKSLELKHTIKLIQELTSEINEIEDSIQKIIDELNPPILSIPGMGVNSAAVILAEIGDFSNFSSPDKILAYAGCSPSTYQSGKLTNCYAHMEKRGSRYLRYALYNATKYVCHWNPVFAEYLAKKRAEGKHYNVALSHSMKKLVRLIYALQKSGKTYLAAA

SEQ ID NO: 440516 - protein, 374 aa, unidentified
MDDYSEAFVGFDTSKLRNSVAIADGGRGGEVRFLGEIENTPVATAKLVRKLAAKYERLTFCYEAGPTGYGLHRQIKGLGFECVVVAPSLIPKRPGDKVKTNRRDALSLAKLLRADELTAVWVPDGGHEAMRDLTRARETAMLDLRTKRQHVSAFLLRLGRPYPQSRKTWTKAHVNWIASQKLEHPQQRLVLEEMMLAIRQAQERLARLEQAVAAAVPEWSLAPVVTALMAMRGIDLISATTLLAEIGDLSRFRTPTELMAYLGLVPSEHSTGDTIKRGPITKAGNRRARRMLVECSWSYQHPPRVGQAKQPKVDAAPPAVREIAWKAQCRLYRRYRALIRKGKLKTVAIVAIARELAGFIWAVARAVNTAPVAA

SEQ ID NO: 440517 - protein, 413 aa, unidentified
MKYEIITAVGIDVSKGKSTVAVRRPGGEVVLTPFQVTHDAAGLSGLIRTLRDVGGDIRIVMEHTGMYWRPIALALKEAGFFVSVVNAMLIHDFSDNSLRKIKTDKADSMKIANYALSFWAELRDYSPEDETRQMLKMQNRLYLRTKKSSVVLRNGLISLLDQTFPGVNTLFDSQPKRSNGHFKWVDFVKRFWHKDCVADVSLAAFSDAYRKWCTRSGYRFSQSDAERLHAAARNSVATFPKNDSTKLLITQAVDSLNAVYDALYILRGEMLRLASLLPEFDVVMEMQGAGEVTGPQLMAEIGDVRRFTHKGALVAFAGMDAPPFQSGTFDSKSRRISKRGSPHLRKNLFMVASTILQHSDPANPIFQFMDKKRAEGKHFYVYTVAGAAKFLRIYYARVKAHLMALDAGTSTAA

SEQ ID NO: 440518 - protein, 340 aa, unidentified
MKLYGAIELHSSNNVTVVIDEQDRVVYQKRLPNDLALIVKELSVYQSELQGIVVESTYNWYWLVDGLMAEGYKLHLANTAAIQQYEGLKYTDDNSDARWLAHLLRLEVLPEGYIYPRADRPVRDLLRKRSQMLRHRTIHLLSIQNLLTRNTGSSLNAKRVKGLDVQQVDELLADPDLALAVKANLSVLSSADEQVELLEQTVTQRVQLRAQFSFLKTAPGIGEILALTIRLETGDIGRFSTVGNFASYCRCVGSQKISNGKKKGQGNTKNGNKYLAWAFVEAAHFAIRYNAKIKSFYERKKAKTKIVVALKAVAHKLCRACYYIMRDRVAFNITKAFGPK

SEQ ID NO: 440519 - protein, 343 aa, unidentified
MKYMGIDYHKQYFVATTMDERGKVISKEKVSTDRDSIKSYFEKAGSEGEVKAVMEACYGWEYFYDEVDELVDELIMAHPLKTRLIAEARIKTDSIDSETLAHLLRADLIPPAYAPSSETRDQKNLLRYRSSLTAMKVRIKNMIHSVLTRNHIEDEGFQGLSDKFGKKGLAYMRAVTLKGNDTAILHDYLDLLEETEKKIKSAENRIRAVCRQDEICRLLSSIPGIGDILAVTIRYEIDDIERFISSGKLCSYAGLVPSTYSSGSRTYQGRITKQGNKWLRWAMIEAAQRAPLNDMWLKAFYVRVSKKGKKIARVAVARKLLEIIYRVWTERRPYYKKPVTAAL

SEQ ID NO: 440520 - protein, 400 aa, unidentified
MLSIGIDVSKGKSTVCGMKPGGEIVYAPFEVQHTREGMLELVSLLRSSCEEVRAVLESTGSYHCPVVAALLENGIFVSVVNSLRMKRFCSQSIRKVKTDRIDAMQIALYGLAYWQELQPAKLPEDTYRELQLLARQYYQMTSLLIKAKVDFNAICDQVLPGMQELMNDHAGRHKLSDFVLRYRHTTHILEMGETRFRKDYCKWAEKKGYRNCERMAALIFATAQNGIPVLPNAPSTQIVITEAIRVLHTVEASRDAILTQMQALAKTLPEYSLVREMPCIGDTLAPRLIAEIGDVRRFHSKRALIAYAGIDAPPYQSGKFCANNRHISKRGNRYLRKTGYEVMQSYVMHKPANDPIFTFIEKKRSEGKCGKLAMVAGLNKFLRVYYGKVTELYRSLPAIE

SEQ ID NO: 440521 - protein, 358 aa, unidentified
MQHQVKELNFGGQNIYVGLDTHRNQTTVTVLGENLHHKTFSQPTAADILARYLKKNFPGANYYAAYEAGFSGFWLQETLQSQGINCIVVNAADVPTKGKERNQKNDNVDSRKIAYALRKGDLEAIYVPSKECQRDRGLLRARQRIVSNQTRCRNRIKGLLNFFGVVYPEKFSKSGTHWSRRFIDWLKSVDLGGSGNDTLAIYLEEAEFLRALLAKTMKKINHLSNQERYAKNVKLLISVPGIGRLIAMILLTELERIDRFKTRDSLCNYVGLIPDVYSSDQTVHIGDITQRGNKSLKKFLIESSWIAARTDPALVMKYNQLCSRMNGNKAIIRIARMLLSRIRYILMHEQEYQMAVVA

SEQ ID NO: 440522 - protein, 412 aa, unidentified
MEKVYDKCCGIDVHKKIIVACFVYGRKQEIKEFGATTRELLELSDWLQKGGCEIAAMESTGSYWKPLYNILESVGLKAIVVNAQHMKAVPGRKTDVKDAEWIADLLRHGLLKASYIPSKEQRELRELVGYRKSLVADKTRELNRLQKMLEGANIKLSGTVSSIDGKSARNILKLLVQGEKIDVSKLEELKNQKLIASNLKASYEQLAEDLNGVMTKLQRQMMKELISHIDELDKHIENLNEQIDDHMNLDEKKAVNEIKKVTGIGEDGAKAIVAVIGTDMDRFPTDAHLASWAGLCPGNNESAKKRRSGKTTKGNKLLRTTLVVCAHAAVKVKSSYFYAQFKRISAHRGKKRAYVAVAHSMLIAIYHILKDGIEFEDLGSEYYNQFNKERKINAYLKKLKNLGWELPTTIMA

SEQ ID NO: 440523 - protein, 346 aa, unidentified
MKRTTIGLDLAKRVFQVHSVDPDTGEIFRQTLKRSQVLRYFANRAVSVVAMEACGSAQYWARELVKLGHEVRLISAQFVRPFVKTNKTDAADAEAIWEAAQRPGMRFVALKSEEQQAVLGLHRIREQRVGMRSALVNQLHGLMAEFGIALSQGWREMLHQAGELLAEECAVPELLRGALREQIEQIRALNEQIKTLERQISCWQRRAEACQRIGEIPGVGLLTATAAVAMIGDARSFRSGREFAAFVGLVPRQSGTGGKIKLLGISKRGDRYLRTLLIHGARAVLRWQSRPGRELDPWLKSLLSRRARNVVIVALANKMARMIWALLAHGRTYQRGYGGPMTATVA

SEQ ID NO: 440524 - protein, 355 aa, unidentified
MTSAKYIGLDVHKESISIAVLNSVGKVAMECVIETKASVILQFLNGLSGDLQVTFEEGTAAAWLYDLLKPHVTRLVVCNPRRNALLKVGNKSDRIDAQKLAELLRGNQLQPVYHGEHGLRTLKELVRSYLTVSKDLARVMTRVKALYRSWGIPCSGTQVYSRLYRVSWLSKISEPGVRLRAAFYFQQLDALRTLRQEVRRELLAESKKHKVWNRLCGIPSIGPIRAAMALGILQTPHRFRTKRQLWSISGFAIETRSSADHRHVHGRLQKVKKRVSIRGLNQNHNHDLKNLFKGAAVVASTKPGPFQEFYEALLARGMRPEMARLTLARKIATIVLIVWKRGVNFDAQYLKPQTV

SEQ ID NO: 440525 - protein, 489 aa, unidentified
MENQVFVGIDVSKARLDAALRPGAESFSVTNNQRGIATLVKRLKKLDVSRIVLEASGGYEIVAAAEFGAAGLPVAVVNPRQVRDFARATGRLAKTDAIDARVLAHFGELIQPQSRSLPDAQSRELMALVARRRQVVEMLTAEGNRQGRAGASLTRAIAAHIRWLRKQLGELDAVLEHAIRRSPAWCAKARLLRSVPGIGNVAVTTPLAHMPELGTLNRRAIAALVGVAPFNHDSGKLRGTRAIWGGRAQVRAVLYMCTLAASRRNPVVQAFYARLLAAGKKPKVALTACMRKLLVILNTMLRDQTPWTAETATLPRALPAALSAALRRRRGHPSWFSRYSLTSETVDSLHSKSSLFFSRQGSIISRHLGSRPKELHPLRDNLGAITFAAVVPGFVFAGAQTSFDVYVAPLGQILFADQGQLPVDDYPVPIHAFLLLPVLVGEGFVGRDREVRERLPTWQITQFFEIMADIPDKRDAIQRHGNSSSPFHF

SEQ ID NO: 440526 - protein, 419 aa, unidentified
MGKIIENCAGIDIGKRFLLCCVLTGGAAEEPRSETLRFEVTVAALQRLREWLTNKKVSHVVMESTGSYWIPVFNILEDHFVIVLANPEEVKNRKGHKTDRKDAEHLADLLRHDHVRSSYIPPKPVRDLRDLTRRRLQLTEDATRERNRVQKLLEHVNVKIGNVLSDIFGVSGLDMLLALLSGQATPEEIAQLARGQAKRKIPQVIEALEGHRMSEHERLLIRSCLRHLACLEEEVEELDGEILRRMQLPPFEAAYRLMQTLPGVGQLAAASILAETGTDMAPFPTADQMASWAGLCPGNRESAGIQKGGQTTHGNSYLRTALVQCAWAATRKQGSVFQARFQQLSPRRGQKRAIVAVAHQMLIIAYCMLKQGVPFRDAESVPRQRRRKRRAHHHLCCLRRLGLSVRVVADSNGVLGEKA

SEQ ID NO: 440527 - protein, 436 aa, unidentified
MSSKAYSARSVNLIQLSSLLKDRDRQDLWVGVDVGKMEVQVVLNWAADDFERPWKVVNPAQVGLLVEQFKQLALGRKLVVAMEPSGTYGDVLRQACTDAGIEVQRVSPKAAHDYAEVFDGVPSQHDGKDATVIAELARLGKSVPWSWKVVPQVEQEIEYEVDKMDASRRLQQMWCGRIEGRLARHWPELLRELKLTSPTLLKLLVEHGSPAALAEDGGAAVKLANWSHKNLSEERIAGIIQGARESVGVRPTATDRLRLSEYAHSASDARAQVKAAQKRLLELSAKVKVIQSLAGAVGNATACVLFVYLGDPSDYHCAAAYVKAMGLNLAERSSGMYKGRLKLSKRGSSAVRYWMYLAALRLVKKTSPVRPWYLKKRHRDGEEAGKALVGIMRRLALALYHVGALGEEFDAARLFPGQRKSFKSKCAAAMTTQKGD

SEQ ID NO: 440528 - protein, 355 aa, unidentified
MTSTKYIGMDVHKESISIAVMNAAGKIVMECVIETKASTILQFIDGLRGDLRVTFEEGTWAAWLYDLLKPHATEVVVCNPRKIALLKDGSKSDRIDARKLAEQLYMNKLKPIYHGEHGLRTLKELARSYLTITRDVTRVMNRLKALYRSWGIPCAGNEVYAPRHRSEWLGKISEAGVRRRAEHYYQQLDALRSLRQEVRRDLLVESKKHKAWKLLRQIPGIGPIRAALLIALIQTPHRFRTKRQLWTYSGLGLETHDSAQYRVVEGQLQRSKKPVTLRGLNKNHNHDLKDIFKGAAMRASTATGPLGDFYEALLATGRKPTMARLTLARKIAAITLIIWKKEVRFDANDLKPQAA

SEQ ID NO: 440529 - protein, 411 aa, unidentified
MPNDYDLYVGIDWATEAHQVCLLDATGGLLDEQPVAHTGSALAALADALTRRVADASRIAVAIEIPRGAVVDTLLERGLHVFALNPKQLDRFRDRYTVAGAKDDRRDARVAADALRTDRAAFRRVHAEDPRLIQLREVSRMHEELAQEHTRLSNRLRDQLLRFYPQPLGLCPAADEAWLWTLLDQAPTPAAAQRLAPAALRALLHTHRIRRFTADALHTALQAAPLRVAPGTAEAASEHLALLVPRLRLVHEQHARCGRRLEALLAALAAPAPGDPREHRDVEILRSLPGVGSVVTATMLAEASQPLAAREYQTVRAQTGVAPVTRQSGKRASVLMRYACNHRLRNAMYHWALNSLRGDAACRAHYDRLRQRHSHARALRSVADRLLRILIAMLRAGTLYDPLRHAAKIPA

SEQ ID NO: 440530 - protein, 371 aa, unidentified
MTSIIYVGMDVHTTNYTLCCYSIENDTIFATVNVDPDHMNIVKYLERIERNIGGDCHFLCGYEAGTLGYSLYHQLTGQGLDCVILAPTTMATARKKKGIKNDKRDAANIAKCLAYNTYSPVYVPTGEDNATREYIRMRNDAKDILKRIKQQILAFCTRHGKRFTDGRNNWTLKHLAWLVKLDFGDAVLNETLREYLALYHQAVDKVELFDKRIAEMARSERYVEKVNKLKCFVGIKDHTALATIVEIGDFARFATAQNFASYVGLVPGEDSSGGSVQRTGITKAGNSHVRMLLIEAAQCYSRGAVGVKSKALKERQAGNDPKVIAYADRANDRLKRKCYRIMFKSKRNIAVTAVARELACFIWGMMTDNIA

SEQ ID NO: 440531 - protein, 344 aa, unidentified
MSVYVGIDVHRKRSQVAVIDAKGEVLANRNVPNGVEPILKVIGGLPPGTPAALEAAFGTGWLVELLEDYGFDPHLVHPLRCKAIASARLKNDKVDAAILGQLLRADLLPEAWIAPPAVRQLRALLRHRVQLVRLRTLLRNRIHAVLADHGHDRPAGCWSGPGRAWMASLQLPAVSREVVDDDLALIDALETVIDRLDWEIHQRARSDPRVKVLTQLPGVGPFTALVILAEVGDVSRFGSARKLASWAGLTPTVRGSDRVAHYGHISKQGPVWLRWVLCEAAQTAKRSPQFAAGYQAIATRRGKKIATTAVARKLLTRAWHLLTDAEHAAATQPAAASAPQAGTR

SEQ ID NO: 440532 - protein, 345 aa, unidentified
MTIVETRQIIGGVDTHLDTHVAAAVDGNGGLLGVWSFPTTTGGFSDLYTWLSGFGTLCRVGVEGTGAYGAGLARFLRGAGVAVIEVGRPNRQARRAHGKSDSIDAVEAARAALSGRATALAKTADGNVEAIRVLLIAHRSGRDTRIKCLNQLRHLGFCAPDELRERFRGVPAGALAECAAALRPRSNGDPVVYATKLAMHTLGRRVVNIDSDCAQLHDELTDLVKATAPSLLDLHGVGTHTAALLLVAAGDNADRITSEAAFAHLCGVAPIHASSGKVTRHRLNRGGNRQANHALWRIVFTRMSSDPRTRAYVERRLAEGRSKPEIMRVLKRYVAREVYRHLPGV

SEQ ID NO: 440533 - protein, 288 aa, unidentified
MTESVKVNVGIDVSKDFLDVHVGNVALRRVPNRSSGLSVLKRILSRYSVSLVLCESTGGYENLAVTYFQSLGYDVCVINPRQARDFARSMGRLAKTDRIDAQILCRLADVIDVSPERTRFVKPLTDERRQRLVSMVRRRRQLCDLMISERNRRAKTDSYGSESINTVLDFLTAEIARIDRDISAHVGSCFSDISSLLQSFTGIGPVTASTLLGELPELGKLNRRQITALVGVAPFNRDSGYMRGRRRISGGRSGVRNVLFMAVLSAVRFNPVLKVYGGVISRSFQSGT

SEQ ID NO: 440534 - protein, 333 aa, unidentified
MKDTRLAGIDVGARNLKIEIESARDQRCRVEFANTPAGHRRLIRRLTQGGRRARVALEASGIYSLDLALALHRAPRIEVMVVNPRASRDFAKAFLLRSKTDDIDAWVLLEFVRRMPFVSWQPPRDAALALRAFARRIAALVKIRSQEKNRLHATEHCRELPAAIRNDIEVNLRHLDRRIQQLEEQAVDVVWADPMLRHDLVLLTSIRGVARASALQILAEIRVLPDDLSPRQWVAHAGLDPRTFESGDSVAKPARISRVGNRYLRAALYMPALVASRYEPHVKAFYDELIARGKKPKQALVAIMRKLLHSMHGMLSSGTDFDGEKFRALPQGT

SEQ ID NO: 440535 - protein, 311 aa, unidentified
MNPGAYVGVDVSKDLLDVKALPSNEAQQFSNDDPGVKKLTIFAKKIDPRLIVLESTGGLEMLAVSSLIENHLPVVVINPRQVRDFAKANGRLAKTDSIDADTIACFARDIRPEVRPLKDEHTKLLSALNARRRQIVDMLVAEKNRLHTAPKPNRKSIQKHIQWLERALEDINKDIEKRIKKSPTWRENDKILQSFKGVGPVVSATLLCDLPELGTLNRKKIAALVGVAPLNCDSGRFRGRRRIKGGRGNVRRKLYMAAVASLRHNDMIQEFYNKLIAAGKPPKLALTACMRKILTILNAMMKNQTYWIAPY

SEQ ID NO: 440536 - protein, 352 aa, unidentified
MTRVAEVVDAVVGGDTHSEFHQLEIATPVGAPVASVTVENTREGFADAICWIGRHAPGPRLIVGLEGTRSYGVGLARALRAAGFTVVEVEQPSRKDRRGKGKSDPIDAHHAVLSTLAMDAAKLPTPRADGDREALRILLIGHEAITETKTAHINALRALLTTGDEDDRQLARGSFTVGRLQTIARRRGRAGDSRENAVRRAEARRLAAALLDARRELRQRRGQIDELVSLLAPGMTGQRNVGPISAGRLLLTFSHPGRFRHEAAFASITGAAPVEASSGKTGTRHRLNYGGDRQANRALHDIALNRMIRCPRTRAYVERRRSEGKTDREIRRCLKRYIARQQFRFMTAAMTP

SEQ ID NO: 440537 - protein, 387 aa, unidentified
MQKPHDDSKACLTAFVQDSTLIAVIEMSLASWLVAGMIPGVKREPRKKIGANPEVLLRLLCRWKDEATKAGKEITRIAVAYETGRDGFWLARWLRARGIDAHVIHATSVVVSREHRRAKTDRIDTAMLQRGFLGWLRGERGHCSMATVPTVAEEDGRCPYRERESLVKQRTSTVNRMKSILIQFGVRNFKPTLRKAPQKLADVRTPEGIPLPSNAVAALRRHMERFRILKEQIKAIEQTRLERLQRDPAERFNAMVFLLVRIIGLGVETAEQLVHEILSRNLRDRKAVARYAGLTGSPDESGSKRREKGLSRSGNGRVRKILIQLSWRLLQFQPESDLVLWFKKRTANAHGSRKPMIVALARKLIIALWRYVNTGLVPEGFRLRSAA

SEQ ID NO: 440538 - protein, 341 aa, unidentified
MGDYIGIDLHKTKSFVTRMTAQGHILEQVNLLHTTGALQNYLTALPADAHLAVEATGNWMWLYEQIEDRQLDLVLAHPLKVRAIASARIKTDKIDATTLAHLLRTDLLPTAYIPPRAIRDQRELLRYRASLVRLRTQVKNKIAAILTKTGVQTPTKTAFGVKSRRFLATVSVRACYRLALDGYLRQLAQLTTEIHGADQVIGEHVTADTQAQLLCTIPGIGAYSALLIRSEIGDIHRFPDSRHLCSYAGLVPSVHASADTTRLGRLTKQGSSWLRWILVEVSVHAINGAPQFRSLYYRVAKKHGHNVGRVAVARALLKTIYAMLTTQQPFRPIRRGPPARA

SEQ ID NO: 440539 - protein, 355 aa, unidentified
MNDAKYIGLDVHQATISATVLDSTGKLVMESILETKAATILQFIHGLRGSLHVTFEEGTCAAWLHDLLKPHVTQILVCDPRKNALLKVGNKSDRIDSRKLAELLRSNLLRSVYHEQTGVPAVKELARSYMTITKDLTRVMSRLKAIYRSWAIPCAGQQVYAPRYRAEWLAKITEAGVRRRAELYYQQLDALRPLHQEARRDLLAEGKKHNATKLLCQIPSMGPIRAVLLIALIQTPHRFRTKRQLWSYCGLALETRNSGEYCIVRGQLKRSKKVVAIRGLNKNHNHDLKNIFKGAAIRAAAVTGPFQEFYTALVAKGMKPPMARLTLARKIAAITLLVWKKGARFDAEHLKQQAA

SEQ ID NO: 440540 - protein, 437 aa, unidentified
MEILYTRVGGIDVHKKQVTVTARTPDPKRAARWQTTRTFRTFYADLLAMASWLVHERGVTHVAMESTGPYWWPVYQALREVGGPGLTIEVVNAAHVKAVPGRKTDVKDSQWLAQLMEVGLLRGSFLPPEQVRAIRDFTRYQTKLTEERSREKQRLLKVLEAAGIKLDNVASDTFGVSGRLMLDALVAGERDPVVLAGLARGVLRNKTDDLRLALAGRFTAHHGQMVALHLERIDHLDQMLTQVREKIGRVGADPPVGLLAPFTAQVELLMSIPGIGERVATVVISEIGVDMARFPTAKHLAAWAGLAPGNNESAGRRRKGRHRKGNTHVQSILIEAALAAARTRTRIGARFHRLHRRFGGRQNPGAAKKAAFAVAHTLIKVIWSVLATGQPYTDLGHDFYTRQINPETQARRLIAQLEALSGKKIVFVDEGGEPAVT

SEQ ID NO: 440541 - protein, 437 aa, unidentified
MQILYSRCCGIDVHKDSVTACVLVYSESPEPEVRKKEFSTHFKALGNLRLWLFAQKVTHVALESTGVYWKPVWEALEGHFELILANPYQVKNIPGQKTDARDSQWLAELLAHGLIRPSFVPPRATRDLRDLTRYRVKLAEERNRIHNRIHKVLEDASIKLDTVVSDILGVSGRAMILAIIAGQEHPDWLADKAKGRLRGKRADLRLVLRGRITDHHRFMLGELMDDLEFVERKMERLEKQIAAQCDLPRLARLCTIPGVDVITAWTLLAELGSDMRIFASPRHAASWAGLCPGNHESGGKRLSNRTRKGNRWLRRALCQAAWAATRKKNCYLAAFFYRKAGKHGIRKAIVATAHHLLVIAFCVLRDQTEYREMGGDYFDRLHPERTRNRLVRRLQRLGHHVVLTPRVEFVAVPPQSKPKRGRPCKCAERAIPCKHRT

SEQ ID NO: 440542 - protein, 458 aa, unidentified
MKIKSIYPARNSSQLREVLGKYSPGELLYAPIDVAKYNHKACAVNFFGDILTPAFEFSNNAHGVKFFISKITEAARNAKAKKIFIGLEATGHYHQNLTLHLKSLGYEVAVINPFDSWKERLNKSSKTDKIDLGSIAKSLISRKFSSSTVPEGVYYNLQRATRTRRKFVNRRTSSKNIITGLLDNLFPGLWDKEDTIFSDRWGKASLSVLEHYPTPQMVLRLGEKRLTRFLKKGTTKLGEKTARKIISAAKVALTRSPYEQTMDILALRSHLQAYRLYEEIIFHLEKEIAYLLVQTPGTYLLSVPGISVTYAAEVTAEIGDISRFAYANQIISLAGTCSKKDQTGEHDPQNLPISKKGNKFLRTVLNQAELSLNTWCPDFNAYYSRKVEEKKGRCEIARTATGNKFARLAFALMKHESLYHPHSFNTLVQDPGNYYLLSLWRNTEEVKGFLFREDPSSE

SEQ ID NO: 440543 - protein, 315 aa, unidentified
MYLGIDVSKLTIDCCLISDGLFFERKFKNSQAGFQDLKDWLKENGATERLHCCCEATGKYYEAAAEYLSKYYRMSVENPRKIKGFGTAVLQRTKTDRQDAKTIAQYCKALEPRPWQKPTEAQTKLRELTRYQHRLKRQKAAEQTKLQTAPAYLLPLIQSTITHLQQQIKAVQNQLNQFHKDNPDYKIQKERLKTITGIGEAAANSLLSVLIQKERFKSAAQFVAYLGLDPKENQSGTSLKGRPRISKLGNTHLRTTLFIPAMHAYRSRNFAKYVSRLQKNGKRPKVIIVALMRKLAVIAFTLLKNGQDFQVERYK

SEQ ID NO: 440544 - protein, 384 aa, unidentified
MSAHPTQIQVAAQLQANTLFASLELSKARWLVTVSAPGSDKLSRHQVPGGDGQALLELLWRLQAAAARRSAPVMIIVIQEAGLDGFWIHRLLVQNGITSHVVDPASIAVNRRHRRAKTDKIDGVKLLRTLMAWMRGERQVCTMVQPPSPEDEDRRRLARERARLLKERIQHTNRIKGLLSGQGIPDYDPLHRDRRGRLAALTTGDGRPLPKRLETEIGRELDRLELVASQLAAVERERDALMAQTAEADARAAPAALIRLRGIGPELAALLWLEALFRRFENRRQIAAYAGLTPSPWKSGGIDREQGIAKSGNPRLRRAMIELAWFWVRHQPGSALSRWFVERVGAARGRVRRIAIVALARKLLVALWRYVTQGVVPEGAVLKG

SEQ ID NO: 440545 - protein, 405 aa, unidentified
MKVYIGIDWSENKHDVCMMHETGEVLLVKQIPHTIAGFQQLDQARQSLGVGRQEVILGLETAHNLLVDYLWEQGYEQIYVLPPSAVKSAQKRYRQSGAKDDRWDAHLIANLLRTDQPCYTPWQPDQPLTRQIRAEVRFAQQLGQEVVRDGNRLRSLVLRYYPAALDAFPHLDSVVFLAFLQTYPTLSQAQALSFEQLKIFLREHHHTQVRSWPTIYAGLHSDHPVSNPDLEAAYAPLAVAQTRNLETLIRSRNACLARLDKLFPLHPDHEIYDSLPKAGTLLAPALLAKLGDDRNRYPTPAVLQAVAGTCPFTKRSGKHAYVLFRKACDRDFRHIVQQWAHLSLDASPWAATYYHTIRPHCRTDNDAVRRLANRWLEILWRLWIDRKPYDEALHLKQHTLRHQIH

SEQ ID NO: 440546 - protein, 404 aa, unidentified
MWYAGVDWADQHHDALVINEQGQQVGSIRVDHSLQGFAKLTTFLQQIIGSEPKEQMACIIETTHGLLIAALLEAGWPVYPVNPRTVDRRRSASGAKTDTIDAYLLAKTGRADFADLHRLTPDSAQVAELKTLTRDQDGLIQMQTRLVNQLTACLKAYYPVALELFAKLQQHTTLVFLQTYPTPQAASAASQEQIASVLKQAGHPNPSKAAPAIFATLKLPHLTADAVTTRTKSRLMLALVSQLMPLLEQIAAYDKEITTLFLTHPDHEIFSSLPRAGKRLAPRRLSEVGDDRTRYVDAASLQALAGTSPVLFQSGMYSKAHRRLGCIKPLRNALHQFAWQTTQSEPWAMQYYQRKRAEGKSHTVALRALANVWVRIIFAMWLHHRCYEAITFETAQQRHARRAA

SEQ ID NO: 440547 - protein, 356 aa, unidentified
MLNKFKNFVDFSGHNVYAGLDVHGKSWTTTIIVDDVEHRRFNQPPEPMALYKYLSSHFPGANLFSAYEAGFCGYHHHRKLIELGIENIVINAADLPITNKEKVNKNDHIDSRRLAQALQRNELKAIYVFGPEHEQFRSLFRMRWRAAKEHRRAKNRIRSFMYYYGINSPSDFNPEHWPLGFIHWLNQLTMPTQAGTLSLKYLLKAYHNTREQLLEVTRQLRHEVKLHYPDLYKLLMTIPGVGPIVSMCLIAEIGDITRFKSYRHLSSYAGFIPNSHQSGEKDPKGRLTYRSNKYIRSMLVEAAWVAMRHDPALLKYYRERIVGKESKYIIIKVAHKLLNRVRQVWISQNPYQAGIA

SEQ ID NO: 440548 - protein, 312 aa, unidentified
MEAKFVGIDVSKARLDVDCLPVSTARQFSNDAGGITALVQWLLGSGVERIVVEATGGYEIAVASALAAAGLPVVVVNPKRVRDFAKAQGVLAKSDRLDARVLALFGERIAPPVRALPQAAQRDLTELLDRRHQLVSMRAQEQSRLATVLPVARGDVEQHIAWLDQRIRKHETVLLKRLRANEIWDAKVKLLDSVPGIGPVNLFTLVGRLPELGTLNRQQIAALVGVAPFNDDSGKRRGQRYIRGGRAEVRCALYMATLSAKRWNPVIAQMFERLIAKGKPFKVAMTACMRKLLTILNAILKSTQPWENRLTT

SEQ ID NO: 440549 - protein, 398 aa, unidentified
MFYIGIDIGKRHHEAGLINDKGDHVGKTIRFANSKDGSEKLLQFINQYKLTPDNSVVGLEATGHYWLSTFSFLHKLGFKSTVFNPLQSDALRHFYIRKTKTDVSDAYLIAQVIRIDSPDETPFLEEDLLQLRHLERLRFSFVDQCSDLKRKVISLLDQVFPEYEKIFSDVFGMSSTEVLLHSPLPEDLLNIDTKKLADLLNQVSKGRYGESRALTKTNKIQESALNSFGVTVGSDVFKLQIKLLLEQIKLIEDHLKTIEQTMIEISNRQTHFLTTITGISDVTACVILGEIGSISRFERPEQLVAFAGLDASVHQSGDFNSNRTRLSKRGSPYLRRALWQAAFVASNHDPALSLHYQKLRQRGKAHGTAVGAVARKLTHIIFAILRDNKAYKPRPTLE

SEQ ID NO: 440550 - protein, 386 aa, unidentified
MQKLNDLSRSLTALEPDGTLIAVIEMSLSSWLVAGIVPGVERQPLKKLAVDESALLKLLHRWREEAEKAGRRIERIAVAFEAGRDGFWLARWLKARGIEARVIHASSVAVSREHRRAKTDRLDTELLKRSFLGWLRGERDHCKMVAIPTMKDEDAKRPNREHDSLIGERSRIVNRMKAALVRLGIRGFNPKLKRATTRLDGLLTPEGEPIPPNALAELRRDMERRRLVNNQIRQIEEERLARIEQAPSDGPHVMVRLLARVMGVGIETADMLVHEVLSRNMRDRRAVARYAGLTGSPDESGRKRREKGLARSGNARVRRGMIQLAWRFLLHQKNSALTKWFRSRTENARGTRKPMIVALARKLLIALWRLVREGIVPDGVVLRAAQ

SEQ ID NO: 440551 - protein, 402 aa, unidentified
MNAVGIDVSKGKSMVAIMRPFGEIVSTPFEIKHTTSDINSLVELINSFEDESRIVMEHTGRYYEVLAHQLSEANLFVSAINPKLIKDFDNDSLRKVKSDKADAIKIARYALDKWQSLKQYSVMDELRNQLKTMNRQFGFYMKHKTAMKNNLIGILDQTYPGVNAYFDSPVRNDGSQKWVDFASTYWHVDCVRKMSKNAFIDHYQNWCKRKKYNFSQSKAEEIYGKAKELVPVLPKDDITKIIIKQAVDQLNSVSATIESLRTLMNETASKLPEYPVVMAMKGVGPSLGPQLMAEIGDVTRFTHKSAITAFAGVDPGVNESGTYEQKSVPTSKRGSSALRKTLFQVMDVLIKTMPQDDPVYQFLDKKRAQGKPYYVYMTAGANKFLRIYYGRVKEYLSSLPKS

SEQ ID NO: 440552 - protein, 388 aa, unidentified
MNVGADKSEPLTAIRTDLGAIFVSLELSRSSWLITSLSPGGGEKMSKHSVPGGDFAGLMERFAQLQEKARLRTGQSFRIIVVQEAGLDGFWIHRALQNEGIESHVVDAASIATSRRRRRAKTDKIDGETLVRALLAYKRGEPRVCAMVKAPTPGEEDRRHLCRERKALTAERVRHVNRIKGLLFSQGISGYQPLRRDRRQRLEELQTGDGRAFPQHLKALVNRELDRLELLLKQIKTVEAARDALLAVGQTAKPAPAAMLLDIRGIGPEFAAVLWSEGLFRHFENRRQIAAYAGLAPTPWQSGAVDREQGVSKAGNPRLRTTLIQLAWLWLRNQPRSALSVWFHERVSRNGGRLRKTTIVALARKLLVALWKYVTAGVVIEGVTMKVA

SEQ ID NO: 440553 - protein, 429 aa, unidentified
MKKQQPQQKTQRPPAEDRPENHETYLAPPPPSKGRIIGLDCHPDTFTAAVFRGSTPHDAVKLSSHPDMSLKRLLDWAAKEFTKGDLFLMEAGSNSFEIHRRLLALGLRAVVMESCHVGKQAKTYADNDKMAAARIALVYLQGNAPCVWIPDAATCERRELLHAYSKAVADRTAAGNALKGYLNQYTVRLGSRQQPEAAKTEAWLLQQRDWTPLQRELLADHLAHLRVQSARRKSLLRLIGRQICAEPLMLRCMKLLGIGQINAFALLAIIGDVRRFENPGKLVAYIGLNPGQRESGRGKHIKLGIGKRGRGDMRRLLVQGAHAILRSGRETPLGKWGWKLFARKGNRNIAVAAVARKLLVQVWHLLSGNPPEALETDKSLTIKLNKLAVTLGKGQRAGISLPASLTDCVNHLRERIGAPSAAPPQESLA

SEQ ID NO: 440554 - protein, 410 aa, unidentified
MEVLHAHCAGLDVHKESVVACVRHMANSKVTTVVKTFKTTTQELMALSEWLSSQGVTHIVMEATGIYWKPVWHILSDGEFELVLANAAHVKNVPGRKTDVNDATWLADLMAHGLIRASFVPDEPTQQMRDLLRTRKQMMRERSSHIQRIQKTLEDANIKLDSVVTDILGLSGRRILKALIAGQTMPQALATLAHRRIHASADELEAALRGRVTKHHRFLLKLHLDQIDAFDAAIAAIDQEVNVNVEPFRAAIELLSSIPGVGNLAATVIVSEIGIDMSRFPSAGHLISWAGLCPRNDESAGKRRSNRMKKGAPWLKTTLIQCAWAASRKKNSYLQAQYLRLRSRRGAKKAICAVAASMLTAAYHMLKDGAFYKDPGADHFDRREKGKQALRLVNRLQSLGYVVQITPQAA

SEQ ID NO: 440555 - protein, 402 aa, unidentified
MNAVGIDVSKGKSMVAIMRSFGEIVSAPFEIKHTASDIHSLVELINSVEGESRIVMEHTGRYYEVLAHQLSKANLFVSAINPKLIKDFDNDSLRKVKSDKADAVKIARYALDKWQNLKQYSVMDELRNQLKTMNRQFGFYMKHKTAMKNNLIGILDQTYPGVNTYFDSPARSDGSQKWIDFASTYWHVDCVRKMSLNAFISHYQSWCKRKKYNFSQSKAEEIYGKAKELVPVLPKDGITKLIIKQAVDQLNSASTTIESLRTLMNETASQLPEYPVVMAMKGVGTSLGPQLMAEIGDVSRFTHKGAITAFAGVDPGVNESGSYEQKSVPTSKRGSSDLRKTLFQVMDVLIKTHPQDDPVYQFLDKKRAQGKPYYVYMTAGANKFLRIYYGRVKEYLSSLPES

SEQ ID NO: 440556 - protein, 347 aa, unidentified
MACLISPSYEEEDRPYHTEEEEELKYVGLDVHKRVIQGTVMDEDGAVLKRDRFTNSPGALRSFMEDIGEARVVMESGYCWQQPYQTLEEEGYDVRLAHPLKVKAIAEAKVKTDKIDSETLAHLLRANLLPESYVPPKEIRELRDLVKRRAFLVSTRTRFKNRIHAELTKRDVDPGTPLFTKKGMALLRSLNIDAVNQILPVIDSLDRQIALISGELKRAAELDERARILQTIPGVGYYIALLLVAEIGDVDRFPDAEKLCSYAGLVPSVRRSGDTTRYGGITREGSRWLRWALVEAVHVHLRYDTRLTRFHRRLARKKSHQVATTATARKMLVAVYCMLKAGRPFQP

SEQ ID NO: 440557 - protein, 385 aa, unidentified
MTNEMLQTNDTNTLATLTIRLLVAMEMSLKAWRLVMSPEGGTRKRVKTIEAGNYLALGQAVTEARERFKLPAQTAVVFCYEAGRDGFYPYRQLTEAGHEVWVIDSASIEVSRRKKQAKSDGIDGEKLAELMQRKARGEHKALRIVRVPSPEAEDERLLPREREIILQDLGRLRNQVESILFAHGYRDIPKTASGLKTWVAERRELAPQLRERLGRDLARLTLLETQLHAVEKAMALKVKQEQGTGIAAVAGALMRLCGIGLVGAWVLSSEIFGWRQFRNRREVGAVLGLAPTPYSSGQDEREQGISKAGNRRARSMLVELSWLWLRYQPGSALAQWFKTRFGGGGKRMRRIGIVALARRLAIALWRYAAFGVVPEGATLKQAAKA

SEQ ID NO: 440558 - protein, 430 aa, unidentified
MEVIYSRACGVDVHKRFIVAVICFSDSAKPKYIHKRFSTFNNQLIKFRNWLIENDCQNVCMESTGKYYIPVYNALEGFISNVVVANPKWVKAIKGEKDDNKDAKWIADLFKLGLVRSSFIPEKDIRILRELTRYLFKLINTRSSEKNRFQNALTVGNCKVDMVFTDTFGKSASSIVNLILSDDDYTDEDILSKVHGRCKASPEDILSAVDGTNLNPHQKARINIVKKHMEYIDSLLDEIQLHINEMVAGYENYIQLLCTIPGINRKSAIIIISEIGIDMSQWSSHRKLTSWAGLAPGCNESAGKKKSVKISRAGVYLKPCLVQVAHAAVKDKKCEYYADKFNRISKRRGKKRAIIAVARKILIAVYHILKTGEIFNPSDMADIETTQKQRIEYIKNNLKNAYNQLSRTGLSEEEIINILLRKSSDSPHLE

SEQ ID NO: 440559 - protein, 340 aa, unidentified
MNATAIGVDLSKSVFQLSLSNSAGRVVERKRLSRAQYERFLVQQPPAEIVMEACATAHHWARAARAFGHQPYLLHAQYVRPYVRRNKTDAADADALLRARRDPDLKPVAVKSSDQQALQGLHRIRQQWIATRRQRITLARGLLAEFGISLPAGAAGIVRRLHAVVDAVPAVLLSALMPILDEIGELEQRIKHLDRQLATIAKANPDIQRLMTIPGVGVIIATAMLGSVADIHSFARARQFAAWLGLTPREYSTAQTRRLGRISKRGDGYLRMLLSHGARSALLLAHRQAAKGDQTLTRLQRWVLDVEARTHHNKATIALANKMARIIWVTWTRAEDYQAC

SEQ ID NO: 440560 - protein, 413 aa, unidentified
MEVLYSRCCGLDVHKASVSACVVTREAGRTQKKHGRFGTMTRDLVALAGWLHELGVTHIAMESTGVYWKPVWNVLEGQFQLILVNAQHVKTVPGRKTDVKDSEWIAELLQHGLLHPSFVPELRIRDLRDLTRSRASLSEEASRLVSRIQKVLEDANVKLASVATNTVGKSGLAMLEALIAGESDSEALADLALGHLRAKIPQLRAALEARVRDHHRFLLERLLLQRRFIVGEIAVLDQRLEQIGAEEPDLATTVARWVTVPGIDRVAAWSLVAEMGNNMAQFPTAAHLASWAGLCPGNYESAGKKLGAPMRKGSPWLRRMACQSAWAAARTKNTYLSAQFRRLASKRGKNRAVMAVAHTILVIGYHLQKHQCDYRDLGGDYFDRLHADGLKRYLVRRLESLGHRVALLPQECD

SEQ ID NO: 440561 - protein, 314 aa, unidentified
MSQNNQSNIYAGLDVAKDSLVLEFQSRTYTLSNDAKGQARLVGLLAAVPNIHVVLEATGGYEQAAARALHAAKIALSIIEPSRIRAFARAKGLRAKTDPIDATVLRIFGEAIAPAATPAPTELQEHLGEWVARRRQLVEFLVAETNRCAHYLQAPVRRQATVLLGSLRAQIARCDQAIATLIAQDQSMAARAARLQQVPGVGAVTAATLLAEMPELGTLSDEGAAALAGLAPYNRDSGPWAGTRRIAGGRAPVRCALYMAALSTARHDPILKAFRQRLLDAGKKKMVALTAVMRKLIVLLNRMLKNPSFQLRTD

SEQ ID NO: 440562 - protein, 406 aa, unidentified
MAVMIGIDPHKGSHTAVAVTATEEPLGKVRVRACPAQAEQLVAWAAAWSERTWAVEGAPGLGRLLAQQLVAAGERVLDVQPKLAARVRLLQTENTGKSDPNDALSVAVAALRSKGQRPVLADDHATVLKVWAKRHRDLSRAHNQVACRLHAVLCDLVPGGVADEITAGHAAKILGQITPADPAAEARKELAAELLADIRHLDAQRREIKKKLATAVKASGTSTTQIFGVGPVIAATVIGDVVTVARFPRRDHFAAYNGTAPVEVSSGEKKIYRLSLRGNRRLNHAIHMAAITQIRYKHSDGRGYYERKIAEGKTHKEALRCLKRRISDALYARLRADARNAAAASTRDPGGQPGNDSVSSAAGSHPEHRLFGSATPGPAPSLRSATALPQAMRPSEPSAKKTRRDP

SEQ ID NO: 440563 - protein, 428 aa, unidentified
MADLLEGALPLNLVAIDVARYSNAVLIELSDGKRQRFRMTNNASDFDRLLSYLQALPGNCRVALEPTGDYHRPLAHRLLTAGHEVVSINSVAQARYREAMCNSWDKNDPKDAQVILEMLRRGTYQRYVDPQIAGHHDLQELAKTYYQVSRARTKVQHSLINHCLPLYFPEMHRYWCTTRNEWFVRFLLEFPTPTHVRALDRESFVTAAWDLVGRKVNKRAKLEEIWETAAHTAALPHALDCLAVETFRITLRRYQELNVLREAIEARAEVELHDNADFAHLKTLPGIGSVIAMTILAEAGDLRRFGHHRQFLKYCGFDLAKIQSGTQRGREQLSKRGNARLRLAFWMAGMAAVRMKENSFRSKYERYVHANPDDADLKRKALTAVAAKMARVAYSMIKKNQPYRQFFELGLPSGSIPLSAAVGAQATP

SEQ ID NO: 440564 - protein, 410 aa, unidentified
MTDHKITPDAPVLVAIDISKHRHEILIEVPGRKRRRRLTIQNTREDYDRLIALLADYERPTRIAFEATGNYHRVLAHHLGKAGFELKLVSSVALARTREALHNSWDKNDPKDAQVILHMLQIGAVQFFHDPLVFGTNDIQELSKTHDIVSKSKTELWHRILTHYLPLYFPEAERFHRSSRTDWFLAFLEMFPSPYFITALTKEKFTKAAWQVVGRKVSKTQLLSDIYETAKTSVALPVSEESDAIRMFRLVLSEGRSLIRQRNEIEARAVELLSDRRDYQLLTSIPGIGPINALTILAEAGDLRRFRHHRQFLKFCGMDLATYQSGMFRGQTKLSKYGNARLRRTLWLAGQVAILQRANSFRDKFERYISHDRFNKHLRRKAYTAIAAKMARTVHAIVKNGEPYRPFFEG

SEQ ID NO: 440565 - protein, 392 aa, unidentified
MEKIADRPAEPTAVRTDLGAIFVSLELSRSSWVVTALAPGSGERMSRHGIPGGDIAGLLARFAQLRDKAQARTGRHFPIIVIQEAGLDGFWIHRALVNEGVESHVVDPASIATSRRRRRAKTDRLDGETLVRTLLAFKRGEPRVCAMVRAPSPEDEDRRRITRERKVLIAERVEHVNRIKGLLFAQGIRGYEPLRRDRRARLEDLRTGDGRDLPPHLKAQILRELDRLELLLEQIKAVEAERDAALAEEPQDGETPAAAKMLLDIRGIGPEFAALLWSEGLFRHFDNRRQVAAYAGLAPTPWQSGAVSREQGVSKAGNPRLRSTMIQLAWLWLGHQPQSALTRWFRARVEQNGGRLRKTAIVALARKLLVALWKYVTSGVMIEGAAMKPSTP

SEQ ID NO: 440566 - protein, 347 aa, unidentified
MISFYLGIDLHLRRTFMVLMNARGEVIDKQRISNQEIKKYLEEKVPQDTYAVLEATRNWPFMYDLLNAHVQQVDLVHAKGVQAIAAATVKTDQIDASTLAHLARLNYVPKAYAAPQEVRDLRQLLRHREWMVYQRSKAKNRVHAVLAGYNLVSPVTDLFGVAGRKYLQEVVEKELRPAAQQVVVDHLATIDHLSERIRTLEKGISLNEVQNHNMTLLKSMPGVGKLIALTVMAEIGDIGRFHSPKSLCSWAGLTPRVHSSDAVVHHGHITKEGSRYLRTAMVQAATVACRVSPKWYREHERLASRCGSRSARVAVARRLLGVIYYMWINNCPYQENYGQKQPVTLGA

SEQ ID NO: 440567 - protein, 343 aa, unidentified
MNINLLGIDISKDIFQLHGINKTGQAILKKRIDRNKLAEYIANLPSTEIVMESCGGANYWARVFQRSGHAVKLISPQFVTPFVKTNKNDANDAEAIAEAASRPSMNFVPIKKVEQQDIQSLHRVRSRIVKNKTALINEIRGLNLEYGVTIPRGAQNVKKILRLIIDDNSNELTLSARELMEDLYVELQETEERLKNINNKIKLICKENELCQRILTIPGIGEITASAIVASVGNPNEFKNGRHMAAWLGLVPRQSSSGNKQMLLGISKRGDRYLRTLLIHGARAVLTRYKNGDNAYGRWVSQKRATHPFNKAAVAIANKNARIIFSLLKADQDFDPSLQLGAA

SEQ ID NO: 440568 - protein, 345 aa, unidentified
MHIASIGIDLGKTTFHLVALGERNKILLRKKFSRAQLLAYTANLPTWLIGLEACAGAHFLGAALREQGHEVRLIPGQFVKPYRKSNKNDFLDAEAIAEAVTKQNMRFAQLKTQEQLDWQAMHRVRDRLVQRRTALINEIRGFLLERGITFAAQPIHLRKNLPTVIEDADQNLSPRLRWLLDRMWQEWKQIETDVEAITDEIERISNEDARCRQLRQIPGFGPLVSTATVAAIGNGSAFRRGRDFAAWVGVVPRQYSTGGKQKLYGISKRGNVYLRRMLIHGARSVLFRVKYDTGGFGQWVRRLAQRAPHNKVVVAIANKLARIAWAVLSSGQDYRHPPLQQRAAA

SEQ ID NO: 440569 - protein, 352 aa, unidentified
MSGTAAQNAIAVVGVDIGKNSFHVVGLDDRGAIVLRQKWSRSQVEARFANMPPCLIGMEACVGAHHLSRKLKAFGHDARLMPAKYVRPYSKGQKNDFRDAEAIAEAVQRPTIKFVTTKTADQLDLQALHRVRERLVSQRTGIINQIRAFLLERGIAVRQGQRFLRTELPRILATPPDVLSPRMARAIEGLAGDWRWLDQRIEELSNEIEELARRDPACVRLMSVPGIGPIISSAMVAAIGTGDGFSKGRDFAAWLGLVPKQISTGDRTILGSISKRGNRYLRVLFVQAAWVTLVKVSPNKWQGHGLKPWIEAAKKRLHHNVLAIALANKLARIAWSVLARGRGFEANKLQAA

SEQ ID NO: 440570 - protein, 316 aa, unidentified
MVAFVGIDVSKAHLDVCVRPSGELFRVANDEVGIAELVAKLALVSPALTVLEATGGYEAPVAAALALAGVSLAVVNPRQVRDFAKATGKLAKTDALDAAVLAQFADVVRPEPRGLDDEQTLELAAMVARRRQLVEMLTAEQNRMRAARSDRLRKHIYEHVAWLRRQLKDIDRDLDVKLRETPLWREKEDLLRSVPGVGPVLSRTLLAELPELGTLDRSKIAALVGVAPLNRDSGTMRGKRRIWGGRASIRAVLYMATLVASKHNPVIRAIYERLVGAGKAKKVALVACMRKLLIALNAIVRDGKPWLQPAPAQDSC

SEQ ID NO: 440571 - protein, 354 aa, unidentified
MKYFAGMDVSLEETAICVVDETGQMIKEARTTSEPDALHALLASFNLPFERVGLEACSLTAWLHGELTSAGWPAICIESRHAKAAMGAMPNKTDRNDARAIAQIMRTGWFKAVHVKTPTCRSWRSLLVARRAVLNQMRTIENVVRAIFRETGLKLGTPSRKDFIVRAREFVAGEKGLAMMIDPLLEILATMLREFTRLTKQVLVIVRDEPVCRRLMSTPGVGPMTALAFRATIDRPERFKKSRDVGAHLGLTPRRYQSGETDIQGRISRCGDELARTALYEAAHSLLIRSKKWSALRAWGMKIAKHRGMARARVAVARKLATILHRMWVDNTEFRFGREQAANPTIKAITVVAA

SEQ ID NO: 440572 - protein, 332 aa, unidentified
MYLGIDVHKRYAQVAVMDEAGEIVEEVRVENANLDDLAQRYAGAQAALEATSNYYHIHDTLSEHLDVTVAHPKELTQIANSDKKTDRVDAKELARMVRLNSVPESYVPTNEIREARALVRGRQTLVEDRTKYANKVHGLLSDHGITEDVKPLSVEGREFLRELSLPKPWDSLLESYLEVIETLTEEIHNLDETIEERAGSLQETQLLMTIPGVSYYTALTIYAELGEISRFDGDKEVVSYVGLNPVIRESGDSRIEGNISKRGSGRVRWLLVQAAHTAVHTCNDEYLSRFYERLASRKNSQKAIVATARKMLVSIYHMLNRDEVYDPPGVSA

SEQ ID NO: 440573 - protein, 374 aa, unidentified
MGCPAFPTYMEEAPVFSERTSVGLDVHARSVVGHGIDQVTGEVFTSRLVPDGGAVTAWLAGLPGPVAVLYEAGPTGFGLARQLRSAGYRCEVAAPSKLRRPAGDRVKTDARDAEHLSRLLRLDDFTAVAVPEEATEAARDLVRCREDSRSDLMRARHRVSKMLLRHGVVWSGGHAWTGDHLAWLARQRFAQPVSQYAFEEALDQVLATAARRDRLDARIEELAADSAWTPVVRRLGCLRGISTLTGFALAVEIGDWTRFDGNSIGAYVGLVPSENSSGRSRVLGPITKTGNGHIRRLLVEAAWHHRPRYVVGKTLRGRWDLSTPAARARGDAGNRRLHHRWAVFQARKKRYNVATIAVARELAGWCWSLAVIED

SEQ ID NO: 440574 - protein, 313 aa, unidentified
MTLPQITVGCDVSGRRLDVYLHPAAKVGSFANDAAGIAALVAWAIRHGAFVVLEATAPWDQPLVRALEGTGLAFHRANPGRARAFARSIGMLAKTDAVDARMLALYGATLNLPATASVAPERLKLQSLNSRRDQLVEMRKAERTRLKGVTDPVVIDSLKAVIDLFDSQIRALERRIGATIDKARDLARDAALLRSAAGVGPVCAAVILASLPELGRIDRRAAAALAGLAPVARESGLMRGKRHVQGGRKRVRDALYMAALTAIRTGRWKQAYDLLRARGKAPKAAIVAVARKLLVTLNAALRQHRPVINAANP

SEQ ID NO: 440575 - protein, 359 aa, unidentified
MSIAHLQGSGNVIIGIDTHADTHVAVAITDRGGRLDELAFNADPVGFARVDSWARSLGTPIAWGVEGTSSYGAGLSRHLTRTGAVVFEVNRTDRALRRRVGKTDPVDAEAAARAVLAGTATAIPKTGDGPIEAIRVTRLVKRSAIKARTQAINQLKALIVTAPDALRADLAGLTNPRLINRCARLRPADTLQDPAAATRRALRRLARRIQHLTDEIDDLDAELTELVTATAPALLDEFGIGPDSAAALLIAAGDNPHRLHSEAAFAALCGTNPIPVASGKTGYHRLNRSGDRQANAALYRAVLTRLAYDPETKAYIAARLAHGGANKKHLIRKLKRYLARQLYPIILDALTPTNAAHAA

SEQ ID NO: 440576 - protein, 317 aa, unidentified
MWLVHAMRLARVASDRPAPSLTHRGRAMQENSKIFVGLDTSKMKISVALAEEGRQGEVRFLGDIDNTPDAIRRLVRKLTGRFRELLFCYEAGPTGYGLHRQITALGHACSVIAPSLIPKRPGDHVKTNRRDALTLARLHRAGELTTIWVPDPGHEAIRDLVRAREAAMEDLREKRQQLQSFLLRHGRIYPGLRSWTLVHARWLSNLTFEHPAQYLVLREYRQAIEDAEARLERLTQQVADVVSTWSMAPVVEAYQAMRGVAFLTAVTFVAEIGDVRRFETPRQLMAYLGLCPRNARPGTRSDAAASPRPATQELAVF

SEQ ID NO: 440577 - protein, 316 aa, unidentified
MNTKTNQNINVGVDTGKFQLDIYIRPLDIYFTVSNDDKGIKEALKVIKKHKPERIIIEATGRLEMPFIMACAKAGLPFVIANPVHVKRFAGAIGQRAKTDKLDAKLIAYYGEAIKPSLSQLKPEKMQLMSDLVARRNQLLVMQTMEKNRLQILPKELAMTIKPILTAFKHQITKIEEKILKLIESCPEYQAKNTILQSMKGIGKIAAASIISNLPELGYMTNKQASALVGVAPINRESGRFKGLRKIQGGRHQVRTVLYMAMMSAIQSNPVFKAQYEKLVSAGKPKKVALIACVRKMIVILNSMLRDGVMWKAQKV

SEQ ID NO: 440578 - protein, 361 aa, unidentified
MTGTMTWVGLDVHARSTDAAAIDSMSGELTRVRFGPGVDGPLAWLGELPGPVRACYEAGPTGFGLYRAAAAEGVGMQVIAPGKTPRGPSDRVKTDRKDAELLARLLLAGSLTRVVVPPPEVEAAREMTRAHDACRRDLMNARHRVSKMLLRHGRVYPESTTWTAGHRRWLSAQQFEEPASAMVFADLVAAVDGLASRKAAIALRLSELATDERWWATVARLRSFRGIDTLTAFSLHLELGADWKRFETAPALSAWLGLTPSLSQSGESSRQGAITKTGSMLARRLLVESAWHYSREPRLGATLANRQAGQPDHILAISNRAQQRLHRVNRRMRARGKPHNVTVVACARELACFLWAAATAD

SEQ ID NO: 440579 - protein, 346 aa, unidentified
MEQYIGLDVSLKLTAICVVDRTGKIEREGVVHSDPEAIAAFIKSCAPHVARIGLETGATSTWLWTELNKLGLPVICIDARHAKAALKMQINKSDRNDAVGIARIMQCGWYKEVRVKDLDSHAVKALLVSRALLVKIKRDLENQVRGLLKNLGLVIGPAKMNAFALRAAELTEDRPELAVAVTPLLTARVAIEQQIADLDRKIMKRARNNAQVRQFMTAPGIGPITALCFLATIDDPGRFRRSRSVGAYVGLTTRRYASGEIDWTGRISKCGDKMLRSYLYEAANVLLTRVAKWSALKAWGIRLAKRSGLRKAKVAVARKLAVILHRMWIDGTEFKWSSKEATNQPA

SEQ ID NO: 440580 - protein, 375 aa, unidentified
MSKIRFVGLDVHADTIAVAVAEPSGEVRSLGLIANRPESVRKLMHKLSPVEQLRVCYEAGPTGYVLYWQLTALGVRCEVIAPTLVPVKAGDRVKTDRRDALKLARSYRAGDLTPVWVPDAAHEALRDLVRAREAAKRDQLRARHRLGKFLLRSGWQRPEHLKTPWSKPHLEWIKTKVHFAQPAQEVALTDYVHEVEHVALRLERLDRAIQEAARLAPPRMRAVIAALQALRGVAEIAAVTIVAELGEISRFRTPRQLMAYSGLVPSEYSSGSTRRQGSITKTGNAHLRRVIVEAAWAYQFRAWLGGYLLRRQTGLSQEIRDIAWKAQNRLHLRYRKFLARGKNKPQIVTAVGRELLGFIWAIGVKVEAEQQRIAA

SEQ ID NO: 440581 - protein, 338 aa, unidentified
MENYKWFMGIDVSKGKLDITVLQGNERVMYEVIENTAKELNEFAKRVKKQEGFKWNECLVCAEHTGIYNAHLLAVSQKQQWDLCLESAMQIKQSGGLQRGKNDAVDSYRIALYARKNAEFINLWQPPRKVITELQKLSALRNRLIGAKNQLKRALNEDKAFTNKSILKSMEYCCENSLAAIKDDIETVEEKIKTIIAEDEILKKLFAIVESVPAVGSVMALKMVITTNEFKNINDPRKYACYSGVAPFEHSSGSSIRGQTRTSKKANQQVKTLLHMCSMVAIQHSPEMAAYFERKVKEGKNKMSVLNGIKNKIIHRVFACVNRNEHYKKDYKNNLALS

SEQ ID NO: 440582 - protein, 441 aa, unidentified
MEKVISFEKVNEAAAGIDIGSEKIFVSPDGLLVKNFGTYTSEYHRCINYLQEHDIKRVAMEATGIYWISLYNLLEGAGIIVSLVNPKETKQKKGKKTDVRDCRWIQKLFSAGLLKESFIPEGKMLDIRYLVRERLDIIEMGSTYVNKMQRCLELMNIKLTEVISQIHGASGMRMLKAIIKGERNPEALLLLCDERIKKKKSEEVLKALEGNYNDTWLFMLEQNIKLWEQHQQQITQIDKRIEALLEDLTAGKTIDESAIGKIKPVRHHRPQIDNLHETLVKFFGVNVTSISGINSYTCLRLIGETGTDMNRFETKKHFVSWCGLSAGQHQSGKRSKWVKQAPCNKAGQIFKEVAQSLENSKYIAIGSFIRRLKARRGASIAYKAGARKIAEAYYNILTKGVAYVEYGIQQYEQQLKQKEMTILKKLAKKHQVQIIEKQEAA

SEQ ID NO: 440583 - protein, 366 aa, unidentified
MKKTSTVQALQSEDFKEQKLTIGVDLGDRWSFYCVLDEAGKIVLEQKLPTTPEAMKQTFGKIPRSLIALETGTHSPWVSRLLTELGHEVIVAHAQKVQLITKSNRKDDRHDARTLARLARIDPELLGPVRHRSVQAQIHLTVIRARAELVSARTALVNAARGLVKSYGQRLPKCGTQQVNWELAAALSTELRDVLEPLLKEVESLNERIKEYDERMEKIAKEVHPEVSLLKQVKGVGTQIALTYVLTIEDPHRFLKSREVGCFLGLRPGRRNSGESEPQKKISKEGDRYLRTMMVQGAHYILGPFGQDSDLRRWGLKLAARGGQNAKKRAVVAVARKLAVLLHRLWVSGEAYEPLRNSQKAIRAVA

SEQ ID NO: 440584 - protein, 391 aa, unidentified
MVCVGIDVAKDKHDCCILDSDGTVRADCFTIPNNSDGFKRLLQTIQDCTQKSDKIKVGLEATGHYSYNILGFLLDNGLPTYVINPLHTNLYRKSLSLRKTKTDRVDARTIATMLLSDVDLKSYTDTAYHNEELKSLTRYRFEKVQERAKLKQSVSRLVTILFPELEQLVPTLHIASVYSLLSEYPGAKQVSEVHLTKLTNLLVTASKGRYGKDKAIQIRDAAKTSIGSVMPAKSLELKHTIKLIRELTSEIDEIEDSIQQIMDELHPPLLSIPGMGIHSAAMILGEIGDFSNFESPDKILAYAGCSPSTYQSGKLTNCYAHMEKRGSRYLRYALYNATKYVCYWNPVFAKYLAKKRAEGKHYNVALSHAMKKLVRLIYALQKSGKAYLTAA

SEQ ID NO: 440585 - protein, 335 aa, unidentified
MLNFLIFSGNQPPVINLIGVKRMQDLLEVCCGLDVHKETIVACLLKGSVNDEKPQKIIRTFSTLLEGLEELKAWLESENCHNVAMESTGIYWQPIYNVLESAFDGTMSIIVANARHMKNVPGKKTDMKDAEWIATLLRAGLLNGSFIPPQEIRELRDLTRYRKSIIEEISSQKNRIEKHLQSCGFKLSNFLTDIFGVSGRAILNHIAEHGSITAKEVENYVRGKARAKLNDIKLSISGRMNKHQREFLKLLLKHLDEMYEHLREIEENINSELDKYKRQIEQLDSIPGIDVTAAAAIIAEIGTDMSKFKTQEHICSWAGLSPGNNESAGKKSPLE

SEQ ID NO: 440586 - protein, 396 aa, unidentified
MQVTTIGLDIAKNVFQVHGIDAAEKVVVRKQLRRSQVLEFFKALPPCLIGMEACASAHYWARELTKLGHKVRLMPARDVKAYVKRNKNDAADAEAICEAVRRPTMRFVQVKSAEQQSQLMLHRTRDLLMRQRTQVINALRAHMAELGMTAAQGNAGLRELLAIIAGAADDRLPAEAHASLIVLAAELQAMRTLIASIEKRIIAHHRSDEASKRLRSIPGIGLVGATAIAATITDPKAFRSGRDMAAWIGLVPRQDSTGGKQKLGPISKQGDRYLRRILVVGAHAVLKLARQKPEKYPWLTQLLARKPFKVVAVALANKMARIAWALLVKGGPYRARAETVETVDRKTRSGPTAGVNPKTCSRYMLTGGEFSSWQSSIDRHGLAGLRTTRIQQYRMQ

SEQ ID NO: 440587 - protein, 452 aa, unidentified
MSRKKTRLQSVTEPPQVRPDVAGIDISPEVIYVAVDPRHHMPVRRFGTFTGELRRIADWLRECGVRSVAMESTGVYWIPLYQVLEECGIEIYLVNARHYKNVPGRKTDVCDSAWLQYLHAVGLLQGSFRPEQQICAFRMVLRHRQALVQFASQHIQHMQKSLDQMNVQVHRVLSDITGLSGLAIMDAIVAGERDGRRLAALRHGRVQASEETIVAALEGDYRAEHVFTLQLSLESYRHYQNQIATCDRKLRTMLDELEGRSGCQQAPPPARKKMRTPKDEQLRAKFFRIFGTDLTAIPSVNVGTVEVLLGEVGPDLRRFRSAGAFANWLGLCPNETITGGRVLASKTRKIESRLALSLRMAAESLCRDKSYLGAFYRHMKVRLRGAPQAITAAAHKLARIIYTLVVKHVQYDDSVFAEIEQRNREKQRLRLIKQARTMGYNLVPLPNASIVS

SEQ ID NO: 440588 - protein, 345 aa, unidentified
MNKIIRIGMDTSKHFFQLHGVDAAEQPVLRRKLRRKQLAAFFAGLEPAVVGIEACAGAHHWARTLTELGHEVKLMPPQFVKPYVKRGKNDAADAEALCEAMSRPTMRFVPVKNPEQQAALMLVGVRDRLIRNRTQLTNSIRGYAAEFGVIAAKGLDKIEPLLARVAMDEGLPALARELFALQAEEYAQLQARIEDIDARLMAWHRQDKLSRRLARIPGVGPIGASMLSMKTPDPRLFRSGRQFAAWIGLTPKDHSTAGKVRLGGITRAGDEALRSTLVVGATAVIKQARRGRKASPWLLALLARKKPKLAAVALANKIARIAWKLMTTGETYDARRAAPAAAQAA

SEQ ID NO: 440589 - protein, 368 aa, unidentified
MEHTRFIGLDIHKERISVAVAESGRSGAVEYHGEIANDPGAISKLCDRLRRSGKPLAFCYEAGPCGYGVHRQLTSLGHRCDVVAPSLIPMKSGDRVKTDRRDATMLARLHRAGELTPVWVPDADHEAMRDLIRLRGVVRQIVTRARQHLQGFLLRHGRKHGGGTAWRMAYRRWLSTLAFEHPAQQIAFQDYVDAVTDAERRLKRVEEQIAGLLPEWNLRPVVDALQAMRGIALINAVVLVTEVGDFTRFSNPRQLMAYFGLVPGERSSGETVRRGGITKTGNTHARRALVEGAWAYRMKARIGRHKVDRIEALPKVVRDIGWKAQVRLCARYRRLSARGKTANVVNVAIAREMVGFIWSIACAIQSTP

SEQ ID NO: 440590 - protein, 343 aa, unidentified
MSIVILGVDLGKNACSVVGVDSAGAVVVRRSMRRQTLVDYVAKLPACVVAMEACCGAHNLGRLFAAHGHEIRLMSPEYVRPYVKAQKNDDRDAEGIAEAASRPTMRFVELKTQEQLDIQTLHRVRSRLVAERRSLINQLRAILLERGTIFPVGRRKLELGIDALLADEDTTLSPRLRQLVGELRAEWRELDTRVEALNGEFVELARNDAAARRLTSIPGVGVLNATALIAAVGDASSFAKARDLGAWLGLVPRQHTTGGKPRLLGISKRGNTYLRTLLIHGARAALPSLARSETPLGRWLTGMIERGVHRNAIVVALANKLARIAWAALRKDATFERGYPVAV

SEQ ID NO: 440591 - protein, 355 aa, unidentified
MTSSKYIGMDVHKESISIAVRNAAGKVVMESVIEAKANMILEFIDGLRGDVQVTFEEGTWSAWLYDLLKPHVSQLVVCDPRRNALLKEGNQNDRVDARKLAELLQNNQLRPVYHGDHGLRAQKELVRSYLTISKDLIRVMTRVKAIYRSWGIAIDGTQIYIQRHRAEWLEKIREPGVRRRAEHYYQQLDALRTLRLAVRKDLLAESKKHKVWKQLCGIPSIGPIRAAVLLGIVQTAHRFRTKRQLWTYSGLGIEVHSSADHQVVKGQLQRKKKPIEIRGLNKNCNHYLKNVFKGAAATALTKPGPFQEFYTALVAKGMRPEMARLTLARKIATIVLIVWKRGVCFDASHLKPQTA

SEQ ID NO: 440592 - protein, 401 aa, unidentified
MNCVGVDASKGKSTVAVMRPGGEVVIPPYDVSHTVSELSALAERLKSLDGETRVVIESTGNYHAPIAWWLHDSGFYVSVVNPMLTRNYGDNSVRYPKTDKWDARKLGKYGLAYWDELPQYIPEEDIRLMLKTSYRQYQQYSKVQTMLKNNLISLLDTAFPDANRLFSSPSRADGSEKWVDFVAAFPHCECVCELTEKAFTSKYQKWCKKHGYNFSQDKALDIYASACGHIGVMPKTPTAKLLVEQAVSQLQATSAALAALRNEMQSLAALLPEYPVVMKMFGVGPVLGPQLMAEIGDVRRFHSKKALVAFAGIDAPPYQSGQMNVRSRSISKRGSSALRRTLFLVMGVFLQRSPTDEPVYQFMDRKRAEGKPYRVYMMASANKFLRIYYATVKNYLNSLEA

SEQ ID NO: 440593 - protein, 338 aa, unidentified
MIIRPRYVGIDVSKRYLDIFDESLGVPERIANAPQAITQIAARWRCDVLVVFEATGVYDLELREALSQAGIRFARINPARARDFARASGQLAKTDPIDARMLASFARAMQPAAEQAANPARNALAGLAKRRDQLVLMRAQEKNRRSEAEDRAMADRIGRLIEVLDNEIAAIEADISALIKTEPEVSDDAQLMRSLPGVGPVTCMQLIAQMPELGKVGPKQVAALAGLAPFNVDSGAYRGKRKIVGGRKRVRDALYMAALNAVRRADPFKAFYARLRQARKPAKLALIAVARKLLTVLNAIIRDRKPYLYTRPAMRRTATRCVASGTRDGTSPAPGRNW

SEQ ID NO: 440594 - protein, 344 aa, unidentified
MNYYAALDVSLRTVNLCVIDEQGEIKAEAKLASEVEEIAYFLHGLDYEVSSIGLEAGTLTQYLTYGLQSAGFEVICMEARQVKAALSAMRNKTDKHDARGIAQIVRSGWYSRVHVKSIESHHIRALLSSRKAVLNKCIDLENEVRGLFKVFGIKLPPKLGHGAFDAKVRTSIEADAALAQALLPLLDARLVLYRTFRELDNRTRKLARQDRVCQRLMTAPGVGFVTALTFKAAVDDPTRFKRSRTVAAHFGLTPRRFQSGEMDIPGHISRAGDPDVRCTLYTAANAMMTRSSRWSSLKAWGIQLAKARGHRRAVVAVARKLAVILHRMWLDDTQFRWGTEGARP

SEQ ID NO: 440595 - protein, 336 aa, unidentified
MRELLFVYIGVDVSKGTLCVDAGGAFRGVVPNTPDGIRKTLAAVKRKLGRGRAPHVCLEATGPYGEALLAVCRSLGFPCSVLNPAKVRHYAKAMSESAKTDPIDARVIREFAEAKHPAADRVPGGAETLLRQLMTAREALTKSAVQLEGVLDSMTCASARKAVTLAVGCIRRKIKALEDGMAAALKADRRLEGLAAELANIDGVGPLSAAKIVALVPELGSLGRRDAASIAGLAPFRRDSGKFSGKAFISGGRASVRRALYMPALVAVRHNPTLKAFHQRLIGQGKPFKVAITAVMRKLFIHMDGTARKWLAAHGGTGEGVFPQPFPLLPSFPRTP

SEQ ID NO: 440596 - protein, 367 aa, unidentified
MGEISTIGIDIAKHVFQVHGVDGGGEVVLCRRLRRGQVVSFFAALPPCIVGIEACGTAHFWAREIARCGHDVRLMPPGYVKPYVKRNKHDAADAEAVCEAVRRPSMRFVPIKTAEQQAALVAHRVRDLLVRQRTMLVNALRGHSAEFGIVASRGIQKVEELTAAVADESDERIPTSGRNALRTLAAELAALEVRIARVETEIVARARTDAVARRLATIPGIGPIIASRLSAMVPDPSIFRSGRDFAAWIGLVPRQSSTGGKTRLGGISKRGNAGLRRLLVGGAMAAMFRSRALHNDPWLCQLRGRKPVMVTAVALANKIARAVWAIMRHNAVWQPAAARSSSRPHQPGAVLAAVKTMPPTAVAFGQS

SEQ ID NO: 440597 - protein, 344 aa, unidentified
MNKLSRVGIDLAKNVFQLHGVDRNEKTVWRRRLTRNNWQKVLLDKVEPGCTIGMEACAGAHHWARQLQARGFTVKLIAPQFVKPYVKSNKNDANDAEAICEAMSRPGMRFVTVKTVEQQDIQAVHRIRSELLGQRTSKANQIRGLVAEYGLVAPQQMTRLRAAVPNWLEDAENGLTCRFRGLLNGLWDDLIRLDHRVAELDREINAIAQHDPVAKRLQQLRGVGPLIATALIAAVGNAEQFSNGRQMAASLGLTPKQHSSGGKDRLLGISKRGDVYLRSLLIHGARSVIWNAKKKDDRLSQWVTSMAIRRHPNVAAVALANKTVRIAWAMLRQGTDYQPDQIAA

SEQ ID NO: 440598 - protein, 370 aa, unidentified
MLDTTTFIGLDVHARSIKAVSLDVMTGEVRAATFGYDAGAVAEWVRSVDPRARCVYESGVTGFDLQKRLSGLGVDCVVGAVSKMIKPSADRRRKNDRNDAEFLARMLSVGNVVEVWVPDDECEAARDLTRALEDARDDLSRSKQRLSKFLLRHGLAFDERTPTGRRKGNWTRAHWSWIESIRFAERADNDVLAYYVDAVRRAAEEKARLEGLVEAEARKPRWRKRVDSLRCLKGVDTESAADLVFEAGEFSRFGNARSFAAWVGLTPSEHSSGESDRRGAITKAGNKHLRKTLVEAAWHYLTCSGRPKGLAKGQAPDRGARRHAAKGVRRLVERREALLARGVHGNKANVATARELACWVWAVGLMAEEA

SEQ ID NO: 440599 - protein, 316 aa, unidentified
MSEKLQESFVGIDVSKNSLDLRIEPVGQSLQVAYDDTGVSEICQRLTEVSPTLIVMEATGGLETRLASELAAQGLPVAVINPRQARDFAKATGQLAKTDQVDAAVLAAFAQAIRPAVRPLKDADTRELGDLVTRRRQLVAMRVQETLRLGTANSKALQKNLKSHITWLDKQIAKLDDELIQRLRNSDVWKAKEDLLRSIPGVGAVTSLTMLAKCPELGQLNRREIAKLTGIAPLANDSGKHRGKRFIWGGRADVRAVLYMATISAIRCNPAIKAFAERLKQTGKPAKVVIVACMRKLLTIMNAMIKSNTPWTPKIA

SEQ ID NO: 440600 - protein, 363 aa, unidentified
MKKVSTAATKQSRNISQQRLTIGLDLGDRNSCYCVLDEAGRIQWEQRVRTTAKALQEVFGAMPRSRVALEIGTHSPWISRLVSKLGHEVIVANARKVRLIGENRKKDDRLDAQTLARLARIDPQLLSPVKHRSAQAQADLMMIRARASLVRVRTGLVNAARGLAKSYGEHLLGCNVRNMNPEKAEGLSPELQRALEPLLSAIEEVSERVCEYNDRIEALAQTSYPKVELLKQIKGVGTLIALTLEDPHRFRKSRDVGCYLGLQPGRRQSGKSDPQMHITKEGDPYLRALLVQGAQNILGPFGIDCDLRRWGLKLAERGGRNGKKRAIVATARKLAVLLHHLWVSGEVYAPLHNSNRMAVAVAA

SEQ ID NO: 440601 - protein, 394 aa, unidentified
MRFVGIDIGGERHAVAVVNDDGALLVKSTLFGEEAAGYQRLRELLGDPNDCLVAMEATGHYWRNLFAFLVGHGFKVALLNPLRTRRFAEEELERTKTDSVDALGIARFAAQKRPAPTPVSDEVTGELRELVRLRTRYVDELSDRMRQLHRAVDLGFPEFTRHVRIKTLLATAILARYPTARSFARVSIRKLARLAYDGRHHVGEALARALIEGAKVSVGNHHSESYQLQVKYTCADIELLRGRVKQLEQDIERKLEDHEVGKLLTTIDGIGARTAACLIAELGDPSRFRDAAALASYVGVVPRLRQSGKRAFSGARGLPLGNARLRHRLWMPTLVAVRRNPWLRAHYDRLLAAGKRPKVALVACMRKLLCAVYSVARTRRPFVPVLAPGSSTLK

SEQ ID NO: 440602 - protein, 400 aa, unidentified
MMTPDDIDVWVGLDVGKSAHHAHALDHDGNTLYDKPLKQDEKAIRTMLGKLSKHGRVLLVVDQPNTIGSLPLTVARNMGIAVAYLPGTAMRRTAQLLPGDAKTDRRDAHVIAWAALKLPETLRDAGPDDETLAALKLLAGHDEDLAHESTRHVNRLRSLLLQTHPAFERALKGERITRDATLALLERYGGPMGVKRAGIEDVKDWAKSNGLRAGRIIDDMFKAIGEQTVTVPGTLMAETIIPSIAHDIKTIRDRRREVGRQVEKLLEDHPLLTVLTSMPGIGVRTASNIMLGIGGDIANFKSSAHLAAYAGISPVTGQSGTSIKGERPSRRGNKRLKNALWQTAFVASTKHPPSVAYYKRKREQGKHHNAAIICLARRRCDVIYSMLKNGTLYQEPALVA

SEQ ID NO: 440603 - protein, 308 aa, unidentified
MTTIYAGLDISKLNLQLHLHGRFHDLPNTAAGHRRLLGLLAKEAGLHLVCEATGGYEREVVATLHQAAIFLSVLNPARVRHFARAQGQRAKTDHIDAAVLTAYGTALRPKASEPRTETEKQLTELVRRRLQVLDMLVAQRQQAERLILPALRRQAKTLIRHLERDLASIQELLQALRQQTPALDQRAQKLEAITGVGALTALGVLAELPELGTLNRGQVAAIAGLAPHPRESGQWHGRRTIGGGRSEVRRALYMAALVAAHSNSRLKQFYQRLRAVGKPAKVALTAVMRKLIILMNQLLKNPSFVLAN

SEQ ID NO: 440604 - protein, 445 aa, unidentified
MARKSKKQRLEIIYPHCAGIDVGSQEHWVAVDPGQDDDSVRCFSSFSDDLYALANWLKSLDVEVVAMEATGVYWIPLYEVLDALGFQVHVVNARATRQVSGRKSDVLDCQWIWQLMSHGLLRGAFRPADQVCVLRSLVRQRATKVQEQSRCVLHMQKALSQMNVQLDNVVSDLTGKTGLAILRSIVSGERDPQQLAKLRDRRLRADEATVARSLYGNWRKEHLFALTQALDHYDFESVQIHECNQAISQTLIDLPALSQEEAPTPVKSLRNPQRTRAEQTALHQALYAVLGVDLTAVPTLGIETVLVIASEIGPDLSRFPSNRHFCSWLSLAPPTRISGGKPLPGKTPKVFNRAGQALRQAAANARNSDSFIGAAHRARLARMDTAKAIKATAHQLARLIYAMLTKGQAYVEQGIEAFEARRQDRQFRALQRKAAKFGLALVEAV

SEQ ID NO: 440605 - protein, 427 aa, unidentified
MSYRVAAVDVHKKMLAVVVADVAGEGEYRFERRKFGATPGELHVLAQWLDQQEVEEVVMESTAQYWKPVWGTLEQYWKPKRQQREGAGKMCGTLHLCQAKSNHGPRGRKNDFADGERMVKRLVAHELVLSFVPDSEQRLWRTVTRRKVQLTRIKVTYKNQLESLLEQAHIKLSSFVSDLLGVSARRMLQALADGETDPTVLAAMADCRLRATPEELRDALGACTQLNGVFRRLLKLALEELALVEAHIEKLEKEAMDLMQEHQDAIQRVAEVPGFGLDSAMQMIAEVGPKAAAFQVAKALSSWVGVCPGSDESAGESHSTRSPKGNRHMRRLLNQAAQSAVKAKGSIFELTFSRLLPRLGYKQAIWAIAHRLCRLLWLILHQGVRYEERGPAVSAKSKRTRAARMIRELKKLGYCVEGGPVPVAARA

SEQ ID NO: 440606 - protein, 386 aa, unidentified
MRQANDLSRSLATFDQPTTLIAVIEMSQSSWLVAGIVPGLERHPLKKLAVDEGSLLRLLQRWRDQAIRAGCRIERITVAFEAGRDGFWLARWLRAHDIEGYVIHPTSVAVSREHRRAKTDRLDTELLKRAFLGWLRGEADHCNMAAIPTIEEEDGRRPHRERESLVAERTRIVNRMKGCLARLGIRGFKPTLQRAPKLLSTLRTPEGTPLPPNALAEMGRDLARLHFVEGQISEIETARLERLEQAPTEKSHAMVRLLARVIGVGIETADMLVREILSRNLRDRRALARYAGLTGAPDESGSKRREKGLARAGNARVRRGMIQLAWRFLMFQKESALAQWYRSRTVDARQGTRKSLIVAMARKLMIELWRFVTTGETLLGVKMRPA

SEQ ID NO: 440607 - protein, 453 aa, unidentified
MAQRNRAVSLKPGKSRAALTITHPNAAGIDIGSAAHFVAVPPDRDDEPVREFPSFTVDLNAIADWLAACKVDTVAMESTGVYWIPLFELLESRGFTVLLVNARHVKNVSGRKSDVLDCQWLQQLMTYGLLSGAFRPAEQVCVLRSLWRQRGMLLRSQGRHVQHMQKALTQMNVQLANVIADVVGETGQKILRAIVAGERDGQVLGAMKNTRIRASTEEIAKSLQGNWRAEHLFALKQALDAFDFVGTQLTECDTQIEQQLQTLQMHDGEPAKGKKRGRARNAPKFDLRTQLFKMCGVDLTRIDGIDVTTALAVISETGADMSRFPSDKHFASWMGLCPGTKITGGKVMSGATKRCANRAAQALRLAAAALRTSQSALGAYFRRMCARMDKPKAVAAAAHKLARLIYTMLTKGEEYTDQGQAYYEERYRERVLRQLSQRANKLGMQLVAAPQAA

SEQ ID NO: 440608 - protein, 339 aa, unidentified
MSKPIQPIQAMVFCGIDVSAATLAVAVQQEDQRFEERIFDNTASGHKALIRWLHKLKARARVSLEATGIYSLDLALALDAAEGIEVAVLNPKLIHRFAQTLRRSKTDSADAQVLAEYSARMPFTPWSAPGRSGLELRSISRHIQGLTVEHARASNRLHAAEKSASTPRCVVEDLKRSMASLQRRMARLRGKALELIGRNEELRKRFELLIDMPGIAAISALELLGELASLSPEMSVRQWVAHSGLDPSHRESGTSVHKPSRISRAGNRHLRRALYMPALVAVRRDPHMKAFYEALLERHKAKLQALIAVARKLLHAIYGIFKSQMPYDGSKLFPQLQMA

SEQ ID NO: 440609 - protein, 323 aa, unidentified
MADAKRFVGIDVAKAQLDVAIGPNGESFSVANDETGISELLRRLEPADLVIIEATGGLEVPVASALATAGIAVAVVNPRQVRDFARATGQLAKTDALDAQVLARFGEAVKPQVRALRDAQAQALEALVNRRRQLVEMLTAEKNRRANSPKVIHKGIDEHIRWLEKRLSGLDDELAGLVRETPIWRERDELLRSVPGVGKVLSTTLLAHLPELGALNRKQIAALVGLAPFNRDSGSIRRGTKTASRHTGFLASRESPRIATSGALIVGVNAVPPIPPFINSLVCNGCSRRIDRRGAAGRCSLGENIPSSSEGRRAFTALKPERL

SEQ ID NO: 440610 - protein, 344 aa, unidentified
MEHFAGLDVSVKDASVCIVDDTGKIIREVKAASEPEALLAALKSPAYHFKRIGLEAGPLSQWLFSALAEAELPVVCVETRHMQAVLKAQINKTDRNDARGIAQMMRTGLYRPVHVKTLRSQKLRMLLTHRQLLQAKAIAVENDLRGTLRNFGLKVGMVGKVKFEARIRELVENQPDLAVLVEPMLIVRRVLREQIVILHRRLLAIVRDDEVCRRLMTTPGVGPVVSLTYRATVDVPARFHKSKSVGVVFGLTCAKYQSGEIDRSGRISRCGDEMMRVMLYEAAQSMLRSKKWSWLKAWAMQIARRRGMKKAIVALARRLAVIMHRIWVDGTEFRWTREQAAAAA

SEQ ID NO: 440611 - protein, 345 aa, unidentified
MPIVGGLDIHRKQITFDYLDTVTGQVQCGQITPADRAHLRAWLARFHGRDDVAFAVEGCTGWRYVAEELAAAGVAAHLAEPADTAFARGRKRHAKTDKTDCRHLRALLAEGRLPECWIPPGHILECRALLETYHDLRAEHTAWVQRVHAVLFHQGAPALGEGTLRTEQGLAALRAAAAAHLSPAGQLQVATALEVIDALETRLHVLRHQLLDAARHLPGAKVLAARLYGVGPVTALAMTCWLAGAGRFSSSRKAVRFAGLDITVYSSDRKGPPGRLSRQGPPVLRWAVYEAGKTHARSSAPDHGYYAAVKDRQNGKRAALSEARKILRQACHILAELGDDALAAA

SEQ ID NO: 440612 - protein, 342 aa, unidentified
MHNPDVCGLDVSAQELVVMVRRDGKTEPCRSFPNTHPGHRELQRYLTHKRERVRVCMESTGLYGLDAALALQADTRIELMVANPRAVKDFSRALLQRSKTDPLDARVLLEYAARMPFQRWQPPPAEALQITALARRIHALTQQCTREKNRLHAVEATATTLRVIVQDLRRSVRGLESAIARLSRAAHKILSATPELERRFRLLQSTPGIGAISALQLLGELVLIPGNCDVRQWVAYAGLDPRQHESGTSVHQKARISKVGNRHIRRALYMPALTAVRFAPHLRAFYLHLQARGKCKMVALVAVMQKLLHAIFGMFKHDASFDGAKLYPALSLAAPPEVACAA

SEQ ID NO: 440613 - protein, 343 aa, unidentified
MDHFAGLDVSVKETSVCIVDDTGKIVREVKVASEPEALLAVLMNPAYRFKRIGLEAGPLSQWLFSALAEAGLPVICVETRHMRAVLQAQINKTDRNDARGIAQMMRVGLYRPVHVKTLRSQKLRMLLTHRKLLQSKAIAIDNDLRGTLRNFGLKVGVVGAVKFEARIKGLVENLPDLAVLVEPLLVVRRVLRDQIAVLHRRLLAIVREDEVCRRLMTVPGVGPVVALTYRATVDVPARFHNSKAVGVSFGLTPSKYQSGEINRTGAISKCGDEMMRVMLYEAAQIMLVRSTKWSWLKAWAMQIARRRGMKKAIVALARRLAVIMHRIWVDGTEFRWTREVAAA

SEQ ID NO: 440614 - protein, 362 aa, unidentified
MRESTVTVGLDVHARSIRLAAVRANELLEERTLPYDEEAVARLLRRWPAVRCCYEAGPTGFGLYRHLTQRGIDCVVVAPGLVPQRPGDRVKTDPRDARKLARLLAGGLLEPIHVPLPGLEAVRDLVRAREDARLDRMRDQHRLSKFCLRHGRQLPGLSWSVVRRKWLSEQWFEFVAEQLPFDTYLHALDLVDARIEALERAIRETAEQEPWRELVAQLRCLRGVDTLTALALVAEIGDFSRFKCAKEFMAFVGLVPAEHSSGEKRRQGSITKVGNAHVRRLLVESAWHARRRPKVGYELARRQRGQDAIVVERAWRCQQRLYQRWQRMAGRGKPQQKIVVACARELAGFVWAIATDQPLRTI

SEQ ID NO: 440615 - protein, 320 aa, unidentified
MASRESLFIGIDVSKQTLDVAFGADPHAPRETIPSTDEGVQLLVTRLQRLQPTLIVLEATGGLERMVFAQLLQAGVPTARVQPRRVRALAHAEGRQAKTDRLDARLLARFAERVRPPHHQATDEQRASLRDLLVRREQVIQMRTAEINRLTAAAPNLRPGIQQHIDWLDQEIRALEQERDNEAERTDEVRRKRELRESVPGIGAITALNLLLRLPELGTINRKEAAAFVGVAPYANQSGAQHKPRHISGGRRDVRSVLYMATLAATRRRLVRRAFYQRLCQAGKPRKVAIVAAMRKLLTILGAILRQQKPWDPAVHTSAP

SEQ ID NO: 440616 - protein, 340 aa, unidentified
MKLYGAIDLHSTNNVTVVIDEQDRVVYQKRLPNDLALILKELSVYQSELQGIVVESTYNWYWLVDGLMERGYRVHLANTAAIQQYEGLKYTDDHSDARWLAHLLRLEVLPEGYIYPRAERPVRDLLRKRSQMVRQRTTNLLSIQNLMTRNTGESLSANRVKGLDVQQVDELLPDGDLALAVKANLSVMSSADEQVELLEQTVTQRVKLRPQFSFLKTVPGIGQILALTIMLETGDIGRFASVGNFASYCRCVGSQKISNGKKKGQGNTKNGNKYLAWAFVEAAHFAIRFNSRIKSFDQRKKAKTKGVVAIKAVAHKLCRACYYIMRDRVAFNITKAFGPK

SEQ ID NO: 440617 - protein, 469 aa, unidentified
MVKSVGIDLAGIGEHKVRCLDEKAQLCDGFGFETTPQGLAKLEEHIFRDGSNPVIVFEPTGLAWVAVAVYLRSRHPECRLVRTQSRNVAALRKYLRRSSKSDKIDAITLAKMPFVDAERLAEVFLPSAKIYAIQRLSRQRRHLELDIASRKTRISSILDGYLPGVRQTISNLWSKQARVFLSSRINPLTVAREGEDALTLFLATARPRRKADAIDSHMLYQSCQAAATIYLMSESAGTINDDFFSTLQEEIARELRLMDVEEAESESITKHVNELYQELHPSNNLGTIPGVGEHTAPIFLSVIGDPTRFRSQAAFANYTGVVPDSRQSSKVEAKGLPMTKAGPAIMKWALYQSADMGRRYDPQMAWLYYREMVHNGKNHKQSMGAVMSHIGSRILAVLRENKPYELRDVDGTPISWEAARRLILTRYQVPEEIRRDRRRRTASNASLKKPLSNQREMAAIGVHKAAEAP

SEQ ID NO: 440618 - protein, 468 aa, unidentified
MPTARPNPARRGGAPAATLPPELRRMNLHAAGIDIGAESHYVAVPEGRDPEGRDVRQFAAFTADLQALADWLTRCGIETVAMESTGVYWIPLFELLAERGFDVKLVDPRQLKSVPGRKTDVVDCQWLQQLHTFGLLSAAFRPADQVCVLRSYLRQRAMLVTYAAHHIQHMQKALEQMNVKLAHVVSDLTGVTGLAIIRAMLAGERAPEVLATLRDHRCKHDEETIARSLAGNWRAEHLFELRQALELVEFYRTRVVACDHEIEAQLARFDDKRGGQHLPAEPRQRKIGRNEPHFDGRNHLHRLTGVDLTRIDGIDAHTALKVVGEIGLDMSRWPTEKHFASWLALAPGNKVSGGKKISGRTKASANRAAAALRQGANSLYHSKSALGAYFRRMKARLGAPKAITATAHKIACLIYRMIKFGTEYVDKGQDYYERRYRTRVITSLSRRAQELGYQLTKIADSALTPAPA

SEQ ID NO: 440619 - protein, 343 aa, unidentified
MDYYVGLDVSLKQTSICVVNQAGSIVHEGVADSDPEAIASFVRSKAPGAVRIGIETGPTTTWLWTELKRLGLPVICIDARHAKAVLKMQINKSDRNDAAGIARIMQTGWFKEVRVKDLDSHAVKALLASRALLVKIKRDLENQIRGLLKNLGLVIGRAKFNVFAVRAEELIEDRPELVAAVRPLLDARKAIERQVGDLDRKVHKLARYDVQVRRFMTVPGVGPITALCFKATIDDPTRFRRSRSVGAYVGLTTRRHASGEVDWSGRISKCGDAMLRMYLFEAAGVLLTRVPKWSGLKAWGAKLTKRNGLRKAKVAVARKLAVILHRMWIDGTEFNWSTKKAAA

SEQ ID NO: 440620 - protein, 406 aa, unidentified
MEVLYERCCGIDVHSRSIVACVRKGKKNEIREYGTYTRDLLELAEWLKESKCMMVAMESTGVYWKPLMNIFEMEEIPAIVVNAQHMKALPGRKTDVKDAEWIADLLQHGLLRASFIPDKEMRELRDLLRYRKSKTEERTREINRLQKFLEGANVKLTETISDINGVTGRKLLNLLIRGKTIQIEDIESSRDGRLKVSSEELLKACEGYFSALQRELVQEVIRNIDTLNQAIERLEEMVDRYLSDSYSDAAKKLEKIPGIGEISSQVIVAETGIDMSRFPNADHFCSWAGLSPGNNQSAKKRKNSKTNKANKTLKTTMIQCARSAVKNKDSFFYAQHQRLVVRRGANKAIVAVAHSMMIAVYHVLSGEDFVDLGSNYYNQFNRERKINSLLKQLERLDYPMTQVATA

SEQ ID NO: 440621 - protein, 408 aa, unidentified
MNPLFVGIDVSSKNNVVCLMKPDGTKFSTFSVQNNLGGARILSERIVSALDKLQLNEVTIGMEATSIYGDSLVYALREEGSLGRYRRHIHVLNPKQIRKFKDSYPDLPKNDYVDAFVIADHLRFGRIASEVYMDDYRYRSLQTLTRARFDAVQNLTREKQRFANYLFLKCSGIAQDKDIPNTSATTLALMEAFESVDDLANCDIETLTAFVTAAGRGRFSDPEAAAQAIRAAARASYRLPKTVNDSVNQAMAVSTASMKALEKQIKVLEKAIEQQFKIIPNTLTSIPGIGPVYSAGIIAEIGDIHRFNSQASVAKFAGLVWHKSQSGEFEAEHSQMIKSGNRYLRYYLLEAANSVRRCDSEFRRYYDLKFKEVNKYQHKRALALTARKLVRLVFRLLKDNRLYIPPEG

SEQ ID NO: 440622 - protein, 415 aa, unidentified
MKVVYPVCCGIDVHKTFLVGTIISTTNGVQPNYRKKRFSTYNRDLHRFADWLHMNNCLDVCMESTGKYWVPVFNILEEREIRVTIANPKWVKAVKGNKDDTKDSKWIGDLFRLGLVPGSFIPPKDIRILREFTRYRYKLVSMKSSEKNRFQNAFTVCNVALDSVVSDMFGKSATAITDYLISENPFNSEYCVTLLQRSLKKKSDSVLESIEGYSITPEQKLRMRIVRSHLDYITNAVSQVDSSIDAMVAKHEGLISLLRTIPGVDRNSAITIISEIGTDMAQFGSSKRLCCWAGLTPGNNESAGKKKSVRITRAGVYLKPALVQVAHAAVKATDNSYYRLKYEQIAKRRGKKRAIIAIARMILTAVFKMMSTGEVWTPADLFKVDMPETLKEKQLAKAVKQATKFLEKQGLTVAS

SEQ ID NO: 440623 - protein, 339 aa, unidentified
MKYIPVGVDIAKHLMQVHFVDEHTGEIIDKQVKREKFLEYFSNREPCLIGMEACGGSHHWARELQKLGHKVRLLKGRFVKAFVMGNKNDVMDARAIWLAVQQPVKSVAVKSEEQQATLGLHRMRQQLVKFRTAQINALHSLLLEFGETTHKGRAALAKEVPEALERLKERLPLYLINMLDEQYQRITELDEHLDHIEKQLQAIARQNETCQRLLNIPGVGPLIATAAVATMGDASAFKSGREFAAFIGLVPRQTGSGGKIRLLGISKRGDKYLRTLFIHGARAAALLTKEPGPWITELKKRRPASVAIVAMENKLARTVWAIAAHGRKYDKNHVSIRPD

SEQ ID NO: 440624 - protein, 341 aa, unidentified
MAEYVGLDVSMKETAVSIRRDGKRIWRGKCGSDPKLVAEVIRRRAPDAARVVFETGPLSVWFYHALTAEGLPAICIDARHAKAALDMAPNKTDAHDADGLAQLAEVGFFREVRVKGFDSMLGRTLVAARNRLVQITTELSNQIRGLMKTFGLVVPAGKGSRFEAHVRALLADQAGLAPILLPLLDAWRAMRLRAAELGRQLVASARQSEACQILMSVPGVGAVTATSFATAVEDPENFRRSRSVGAWLGLTTRRYQSGEVDDDGHISRRGDTHLRGLLYEAATVILTRTSAESSLRTWGLKLQERIGFKRAAVAVARKLAVVMHAMLRSGQLFDRTAGVAA

SEQ ID NO: 440625 - protein, 387 aa, unidentified
MIYVGIDIAKRTHYASVMNSDGEILAEPFPFTNDLPGFQKLLSCISSFPKEQLLIGMESTAHYAENLTCFLFRKDFQVCIINPIQTASLRKSNIRKTKTDSVDTFLIMKALSLHDYRLFSMRDYDSLQLKNLCRFRQNLMKARTKVKIQLVSYVDLIFPELQYFFKSGIHTKSCYALLKTESNPDRIAKMHLTRLSNLLKKTSKGHYTKNHAVALKEIASQSVGIKDDTLSLQILQSIEQIEMYTKQISKVEASIREIMDNMDSVIKTIPGIGNLNGAMIIGEIGDISRFEKPCQLLAYSGLDPSVYQSGKFTAARTRMSKRGSKLLRYALINAAWQLTLNNETFKAYYDLKISQGRRHYNALGHVAHKLVRVIHKMMTDNLVFDLD

SEQ ID NO: 440626 - protein, 353 aa, unidentified
MEQFIGCDAHKKFSLFIAMNEEGEYGRPMRVVHDREQMRAFLGALPVGSKIALETSGSYYWLVEEMERAGHQAQLAHALTAKRRMEGRHKTDERDARGLAMLLRNGTLPRVWIPPAGLRDEREMLRWRMHLVEARSRVKNRIHGVLLRYNLLVKVSDLYGDTGRQQLEERLGELPEWSRQSVKEQLETVDHLDLQIQDCEQKLEALLEASVERDLLRSLPGVGKVLSAVIALEIGDIGRFASAQNLTSYAGLVPAARESAGRKRKGKCPADCNTYLKWAFIEAGNVVCVHREKWSQRHVAQLYERVKQSSRMHGKATVAVARHLAEASYWMLTKQQLYREPNLNRPAFSSTHG

SEQ ID NO: 440627 - protein, 350 aa, unidentified
MLIIGCDYHPAFQQIAFVDITTGDCGERRLEHREEAEKFYRDLAAQGMKVRVGMEASGQARWFERLLAELNFELWIGDATVIHAKRVRKQKTDRQDAQLILNLMLKDDFPQIWVPSWENRDLRQLLWHRHRMVQARTRIMNQLQAVAINEGLRCKKRLWRESGREQLEAFRLAPWASRRRQDLLKLLDGLNPTIAELTQAIEQEVEKCPAAQRLRTHPGVGPLTALAFVLIIGKADRFQCGKQIASYLGLVPLEDSSGNRRRLGHITKQGSSMLRFLLVEAAQVTARSLPEWRSQYVHLTMRRGRKIAKVAMARKLAVRLYWMMRKEWDFGTLTKFGAHAGKPGTGDGVK

SEQ ID NO: 440628 - protein, 607 aa, unidentified
MSTIASLDRIGVGIDTARYGHRVSFLRPDRKPAAKPLTVMENRAGYQALQDRLNQLHEQHPTAHFHVRIDAAGQYAVNLELFLRGLKLPMTISVGEPKRNKDYQKAHFPKRTTDDTESQAMARFAVVELPNATPAPSTPMILLREVAGRLQSKVKQTTQAINRLHNLLARVFPELATLTEDMSAGWVLKLLDKYPTAERIAQAQIASLEKIPYLSVEQAHAVHQAAKQSVASLRGELAEALVRDHVNQLRLCQKAEQHLHQLLLEAFADLPASPHLQVLTITGIGEATAAALVAKIVDINRFATPNHLVSYFGVFPEESSSGVDKRGRPLPPGTLIMSPKGNDLVRFYLWNAARNAIQHNPAIRALYRRLRAKGKRGDVAFGHCMRKLLHLVYAVWKTDRPFDKEHFPWEGSSDTQPSATTPPSADAGTTPSANEKAVGHKRDLPAEEVVTTADSTLEPASPAVKPASQSAAPRPKVDFACVREHVTMEQVLQHLGYFASLRGRGRQRRGPCPVHSQPTAPERTFSVHLGKNAFQCFHAECAVKGNVLDLWAAIHRLPLYEAALDLAETFQVPRNREEEPVKGTSSPRTATAKTSAPAAATATDGAK

SEQ ID NO: 440629 - protein, 457 aa, unidentified
MGHARARKIPAQLVEDEEYQLRYERVAGIDIAKAKADVCTRLPPCRDGGRRVSRTEEVPARAGEILALGQRLLAGGVEFVAMESTSDYWRIWYYLLEAAGLSVALVNPAHARQLAGRPKTDRLDAQWIARLAEMGLLRPSFVPPPEIRALRDLTRTRLQLVRDRTREWQRLEKLLEGALVKLSSVVSSLAGTRSARAILAAIADGETRPAALAALAHGNVKGGRAAVAASLEGMQVQGHHRALIRLHLDHVTWLDRMIPAVEDQIEAALDAIEAGWGITADGVPDPGPGPDAAALPAAARLAEIPGISPALARAIIAETGLDMTRFPTAAHLVSWAGLAPVARQSGPRARKPKKGQGDAYLRGYCTQAATGAAGTPTFLGERISRLARRLGPNKAKCAVARSILVIIWHLLADPAARYSDLGPGWHDRKNDRDRKIRAHLRQLQALGLHVELTDTAA

SEQ ID NO: 440630 - protein, 413 aa, unidentified
MDVILERCAGLDVHKATVTACIRYPGPAGERTQVSHTFGTTTPDLLALRDWLAAHRVTHVAMESTGVYWKPVYYTLEDGFPEVLLVNATHVAKVPGRKTDVSDSVWIAQLLECGLLRGSFVPPPVIRELRDLTRYRKTLIQDRTREANRLHKVLEDAGLKLATVATDVLGASGRAMLTALVEGTTDPGLLADRARGRLRAKLPALRQALTGRFRGHHAFLLTQLLAHLDYLDEAIATLSHAIEEHLAPFAEAAVRLQTIPGVKQRTLEAIIAEIGVDMRRFPTAGHLASWAGLCPGNNESGGKRRRGRVRKGNRWLKAALVEASLAAIRTKGSSLGAVYRRICRHAGHNVAVVAVAHAILEIAWHLLAQGTTYRELGADYLHRRNTEQTARRHVRFLETLGYRVTLEPLSAAA

SEQ ID NO: 440631 - protein, 428 aa, unidentified
MNNQEIIRREQYCQIVKEITGSDQYMVVGIDVGKDKHHAFVGTATGTCLFKKLIFENNLDGFARLLTAVDQLKAQNCLEKIVYGLEPTGNYHKPLARHLISSGCNVVLVTGQAVKNNRQLIDGRWDKNDTKDAANVADLVSRGRCLYYDCPSPQINELRGLLSLRRRLKREEHSLRMRIRNNLLAQYFPEMDKFYSACESESLAIVRWCLDPAKISVMEFDKFFNMVTKTGRGIAQTLRLRKIHNLAVESIGCPMGPAAEYEAELLVEKRQQVAKEIQKTADLIEDICREFPEYSYLLTIPGFGPYISAKVLASIGDPCRFDNRKQVIKMAGYDLSAKRSGKTSDQAVPVISKKGNGELRYALYQAANVAAARTDLFRAYFTKILRGRERERGIKTKMRVKLAAKMLIIAWTLMKTKQPFDPEYLNID

SEQ ID NO: 440632 - protein, 422 aa, unidentified
MKARKVKAIRSPQSLVNDKGPIRPAASLPLLNPHAAGIDVGSVEHYVCVPEDAVPPGRAHVRRFGAYTVDLDELVEWLKACGMKTATLESTGVFWVPLVQKLETAGIEAVLVNARHLKHVPGRKTDVKDSQWLQQWHSYGLLNGSFRPAQDICRVRSLMRHRQNLIASCGVEVQHMQKALQLMNVHLHHAVSDVCGATGLRILEAILAGEREAKKLVELRDSQCSKTTAAELEKALAGDWKQEHLFVLKQALETYRHLLKQLTECDAEVEKALAAVVIPQRVAEAEVAPPNPKAKEEPDSKKKNKKRFHHRKTGTCLKRDLTEELKRLCGVDLTQVIGLNVLSVLIIISEIGLDMSRWRNAKAFCSWLGLCPGNKISGGRVLSSKTVHVINRVAILLRTLAPSIGKTDTLQNRFRSRSCRLV

SEQ ID NO: 440633 - protein, 345 aa, unidentified
MPIVGGLDIHRKQITFDYLDTVTGQVCRGQISPADREHLRAWLARFAGREDAAFAVEGCTGWRYVAEELAAAGVTAHLAEPADTAFARGRKRHAKTDKTDCRHLRQLLAEGRLPECWIPPGRILECRALLELYHDLRAGHTAWVQRIHAVLFHQGAPALGEGTLRTGPGLAALRDVSAACLSPAGRLQVATALEVLEALEARLHAVRHQLLQEARHLAGAKVLAARLYGVGPFAALAMTCWLGGAGRFSSSRQAVRFAGLDVTVWSSDRKGPPGRLSRQGPPVLRWAVYEAGKTHARASAPDHRYYATVKDRCNGKRAALSEARKILRQACHILAGLGDDAFAAA

SEQ ID NO: 440634 - protein, 411 aa, unidentified
MEVLHPRCAGLDVHKDSVVACVRLAEGRRVVRHVETFATTTSDLERLSAWLAGHGVTHVAMEATGVYWKPVWAVLCEGDFALVLANAHHVKAVPGRKTDVNDATWLADLIAHGLIRPSFVPPMAVQALRQLTRTRKQLAREKAAHVQRIDKLLQAANLKLGSVLSDMMGPSGRTVLDALARGESDAQALAALIGPRVRAPRAQLVEALRGRFAPHQQLLLRLHLSQADAIDQAIAQIDQEVADRLEPFRDILTRLSRMPGLSDVSASVILSEIGFDMSRFPTPAHLVSWAGLCPRNDESAGKRRSTRVRHGAPWLKTLLVQSAWAAVRIKASYPQALFHRLRARRGPKKAIIAVAASMLTAIHVMLDRSLPYQDLGADHFERAHKDRLAARLTKKLHQLGFDVALTQRAAA

SEQ ID NO: 440635 - protein, 316 aa, unidentified
MKQGINSQMTRTNLTATASGLTVGLDLGDQWSQFCLLDTNGIICEEGRVRSTRSAFQARFGALAPARIALETGTHSLWASELLAELGHEVIVAHVREVRAITGSHSKSDKADARKLARYARVEPEILHPVRLRDSDQQRDLLLIRARAALVRARALLINAVRGLVKPFGYRVSSCDADCFAARCRQELPGDVRVSLSPMTEQIAQLTEQIQDYEKQIGAVMAEKYPDAAPLRSVFGVGPVTALTFVLTLADPQRFAHSRDVGCYLGLRPQRSQSGEQDPQLGITKAGNPYLRWLLVELRIVCYGSMRPIAPSNAGD

SEQ ID NO: 440636 - protein, 343 aa, unidentified
MPNYVGLDVSQKTTAICVVDEQGLRLWRGECPTDPGAISARVLKHAGVDAKVGVETGSMTPWLVHALRGAGLDVRCLDARQVKVALQMRLNKTDENDAEGLAQIMRTGWYRVVHVKSLNAHRARALLGARAQLVGMTTQLSNMIRGVLKTFGLLPGTGRGLRFDRKVETLLEGAPEIALIVRPLLATWRQLREQIAVFDKAVRQRVRTDPICRLLMTVPGIGALSSLMYVSTIEDPDRFSRSRSVGAHFGLTPRRYQSGETDRSGHISRCGDGLARTLMYEAAIVILHRVKRSLPLKDWAEAIERRAGSGKARVALARKLSVILHSVWRSGEPFRWAPQPEAA

SEQ ID NO: 440637 - protein, 363 aa, unidentified
MKIMVGIDLHSNNALCGLMDESGRRLVHKKLPCDLAAILQLLAPYKDRIATIAVESTFNWYWLVDGLQDHGYHVALANPARMKPYDGLKHTDDVSDAYFLAELLRLNILPTGHLYDRHTRPVRDLLRRRLLLVRQRTTLILSFKSLNERTLGQRVPLARVKTMSAEDAQARFTEPADQLLGGEQITLMSHLTGSIAKLEEHILGVAGQWPAYQRLQELPGIGKILGLTIALETGDAKRFAAAGNFASYCRCVKSLRQSNGKKKGENNRKCGNQYLAWAFVEAAHFACRYDAQCRRFYDRKKQQTNPVIATKSLACKLAKAAWHVMAEDVPYDATRVFGPGKKKDFGETGREPENGSGHPSQQN

SEQ ID NO: 440638 - protein, 342 aa, unidentified
MAIVAGFDVHRRQITFDALDTETGEVTRGRIDASPAAVMLWTERLAGREVHVAVEACTGWLFVCDALVAAGAVAHLAEPVETSALRGRKRRAKTDREDARWLRELLAEGRLPEAWIPPEHVRQWRSRSRMRHTLIGERTQWLQRIQATLFHHGVSGTPERLRTADGRAFLERLALPADARERIGIALRMVDAIDGQIVPLERELRQLARRQTGCRALMGLYGMGELTSLVTLCELGDVGRLSASRKAVRMAGIDIGVHRSDRRARVGKLTRQGSPQLRWALYEAALAACRPTSPDHADYLALKARGLSHTRASLTIARKLARRSFHILRELGPAALKPLAIP

SEQ ID NO: 440639 - protein, 426 aa, unidentified
MKYTQNEKILQIKETTLIVGIDVGSEKHYARAINFRGVEYGKLLIFDNNAEGFAKLEKWTAMIVESNGFTEIVLGMEPTGHYWFNLAENTMKKGMHIVLVNPHHVKKSKELDDNNPTKNDRKDPKTIAMLVKDGRYIEPYIPEGIYKELRLAMDSRWRIVKELSAIRNRISRWICIHFPEFTTVFGDWEGKAALLILHECPTPKKVVEKGIEGIVAIWKKNKIRAVGIKRAVRLVECANTSIGAREGLISAENELSMLLEDYESKMRHLERTMTLIEELANQIPGFEKLLEIKGVGLVVAAGFLAEVGDISRFSHPKQIQKLSGLSLKENSSGKHKGKTTICKRGRKRLRYYLTFGIMPLLSKNEEFRALHQYYTVSKERPLKKMQSLIALSNKLIRIFYAILTKDVTYDSQKMMSDIRRPEEKVA

SEQ ID NO: 440640 - protein, 412 aa, unidentified
MLFVGDDWAEDHHDIEVQDEGGRRLARARLPEGIAGLARLHELIAEHLTDDDVDPETGFVGQNVLIGTETDRGTWVSALAAAGYQVFALNPVQVARYRERHGASGAQSDRGDAHVLAEIVRLDRAHHRPIAGNSPAVEGLKLVARSHQVFIWDRTRHVQRLRSALREFFPAALEAFPDLLAAEALELLERAPDPARAARLSRSKITAALNRAHRRDPDAKAEAIQAALRAPTLRQNPAIEAAYAVIVASAVRLIAQLTTQIGELQAVVAEGFGRHPDAEIVTSQPGLGPILGARVLAEFGDDPTRYADAKARKNYAGTSPITRASGTRRVVLARYARNKHLADAAHQWAFCALTASPGARAYYDAIRARGVSHHAALRQLGNRLVGILHGCLKTRTGYDEDTAWPSPTAAAA

SEQ ID NO: 440641 - protein, 408 aa, unidentified
MTVVGIDVSKGKSMVAAMKPGGELVTTPYEVKHSDIELSRFALDVLCMEPDTRVVMEATGRYHEPVAALLHSEGIFVSVLNPLLIKQSGAGSLRKVKSDPKDALKIAKYGLDNWSTLREYTPMEAIRQQLKLCARQCDLYSKNIVMLTNNLISLSDKTFPGVNELFSSHEKADGHLKWVDFYRSFWHCDCINRMSPDAFEERYKKWCKRKGYHFSADAADALYAASCGLYTTLPRDNNAKLLVTVATDQLIALRENQSKLETEMLNLCKQLPEYETVMDMYGVGKSTGPHLMAELGDIRRFPHRSSIVAFAGVDPGVVGSGKMQLSSVATSKRGSPQLRKALFQVVFAYVKRKPENEAVYQFYAKKRDEGKPYYVCTTAAANKFLRIYYARVKECLNAAESATQAEEG

SEQ ID NO: 440642 - protein, 370 aa, unidentified
MKEDNIFFVGVDVSKSKHAIAIAEDGRDGEIRYFGEIEASPASVERFVHKLEKKHPRLHFCYEAGPTGYGLYRQVVALGHCCDVVAPSLIPKRPGERVKTNRRDAITLSRLLRAGELKGIWVPDDVHEAVRDLVRVRAIASEDLRKKRQQLLSFLLRHGRVFAGRKNWSRAHARWLAAQKFDHPAQQIAFQDLVDVITDAQERQERLDAQLAKLVPSWSMAPVVAAYQALRGVAFIVAVTFASEVGDVRRFDNPRQLMAFLGLVPSERSTGDTVKRGGLTLAGNRRARRVLVEGAWAYRYPARVTEPIRVRLEGLPKGVRDIAWKAQTRLCARYRRLTTAGKKTPVVAAAIAREMAAFLWAIGRQVEPER

SEQ ID NO: 440643 - protein, 327 aa, unidentified
MTIALPLTVAAGVDAGQRFLDVALAPSGQTFRMPNLAEGIAEIIARLERSGVRRVVLEAIGPYAEPLIKALSVAGFEVGIVNPRRIKAFREAEGGRAKTDRLDARLIARFALTMPETLRPLPTDTQLELKALSLRRRQLTEMIAMEKTRMKQVCGTLLLDSHRAAIAALSAQCQAIEAELARRIGDDAELRRVLHILKSIPGIGERVATLLITDLPELGQRDRKAIASLAGLAPTSANPAQRRLAPPSPADVPAFAPRSTWPPWSPPATTPSSATTTTPFACKENPERSRSSQSHENCSSQPTHSSKPTRHIKVRPLTHKTVAGFAR

SEQ ID NO: 440644 - protein, 389 aa, unidentified
MNLYYGIDVASEKHNCCIIDQKEHVLHEFSFSNDQYGFSQLLHYLNHPSIPDGVKRHIGLEATGVYGENLTEFLRRNGFEVTTFNPLSVKKQLTATTLRKTKTDKSDAKFLAVMLARGNYEPDAPTLYHISELKSLSRKRFLLVKKRSGAKNVAKALITKLFPEYSKVFTNTFGASSVAILMKYPSAKEIATCRPSTLAKILEGSSRGRFGLEKAKSIIELAKNSVGKYSSADALSLCMTLEEIEFFSRQIERVEQEIHLIFKEHPSPILTIPGIGEVIGAMIVSEIGNIERFSNPNKLLAFAGLEPSIYQSGKFTPESGSMVKRGSPYLRWALMWAARLVPRYSITFGDYFDKKSSEGKHFNVATSHVAKKLVRVIFSLEKNRSVFFE

SEQ ID NO: 440645 - protein, 421 aa, unidentified
MLILYQRCAAIDIGKDVIAVAVRLPGDGAEHRQTIKQTFKTFYGVLKHAARWLTEQQVTHVAMEATGIYSMPVYHALIEHGQFEKVLVCNAGHVRNVPGRKTDLSDAEWLVHLLECGLLRGSFIPPAQIKAARDVIRYRTKLTESRTSELQRLGNVLQDAGIKVDSVASTITTRSVRAMVEALIDGERRPVLLAELAKGRMRARIPDLQRALEGRFDDHHALMCRLHLDHLDHLEEMIARLDTQIQDMMQPFRAQRELLTTIAGIGPFAAAAIISEAGADIGETFPSAGHFASWIGVCPGNHESAGKRHSGKPRKGNQHLQHVLVECAWAASRTPGYLQSLYRWHVRKFGGSRNPTAKNKAIVAVAHKLAIIIWHVLATGKPYTDLGADYLDRRIDPAKETRRLIARLQALGHTVTIEPAA

SEQ ID NO: 440646 - protein, 378 aa, unidentified
MNRIIKIGMDVHTTNYTLCIFEPSFEHDGTVHCITQVKPEIKKIIHVIETFKKKHENEELNIVCGYEAGCLGYSLYHELKEKGVECVILAPTTMKTEKGGRKLKNDYRDAKMIAECLAYGGYSAVHVPTELDNSVKEFIRMRDDIKENLKSIKQQIIAFLTRNGKQFEGKSYWTRKHIDWINTISFSEPLLQDTLKEYMIEYNHLCDRVETLDRQIEEISLKEEYVEKVQQLQCLIGIKTHTALSLIVETSDFNRFKKGNMYSAYLGLIPGDDSSGGHEKKLGITKAGNNHLRRLLVEAAQGYTRGRVGFKSKDLKSRQEKCSSEVVAYADRANERLRRKYYRMTLRGKRYNVAKTAIARELACFVWGIMTDHIDLCS

SEQ ID NO: 440647 - protein, 410 aa, unidentified
MEVLYPACAGLDVHQKTVVACVRIHGPNGRAARETRTFATHTAALIELSDWLLEHGCTHVVMEATGVLWKPVWHILESQFELVLANARHVKNVPGRKSDVSDAAWLADLLAHGLVRGSYVPEQPIQELRDLTRTRKQLVRQRAQHVNRIQKVLEDANLKIGSFISDITGVSGRKILEALIAGETDPENLAALTKGRLKAPLDTLLLALSGRITKHHRFLLRTHLEQVDATDRSIALLDAEIDELCRPLAEAVSLLESMPGMSTLAARVVLAEIGPDMSRFPTPGHLVSFAGLCPGMDESAGKPRSTRLKKGSSWLKATLVSCAWAAARSKNTYARAQFHRIRARRGAKKAVVAVAASMLTAIFHMLKHAAPYRDLTATYFDRRNETKIVNRLRKRLESLGYTVQPAAAAA

SEQ ID NO: 440648 - protein, 358 aa, unidentified
MKYIGCDFHPSFQQITMLDLETGELVRRRLLHGNDEAKGFYEALQGPVVVGIEASGNTLWFERLLSRLGHELWMGDATRIRRQDPRRQKYDDRDASLILQLMVEKRFPKVWIPTMEERDLRQLLMHRHQLVRMRTRVKNQLQHIALNQGVQKKYKLWTQAGLKVLRELELEPWTRLRRDTLLEMLEELEQKIRPLEQAVEREAAARPAAQLLMTHPGVGPVIALATVLTMGEVQRFEDSRSWVSYLGLNPSERSSGEKRRMGGISKQGSPFLRFLLVQGAAGAARGDKSLARMYTRLKAKKHHGVAKVAVARKLAVRLYWMARTQKPYPEVVRMQGSQSHGVAEVMAERLNRPPASRP

SEQ ID NO: 440649 - protein, 363 aa, unidentified
MNTPWKYVGLDVHKESIAVAVFGPQGHEPEAEFEIPNDSGKIKKLFSKWPADRLKVCYEAGPCGFVLYRQLREMDIDVRVVAPGKIHRAPTDRIKTDKRDARLLGSMLRGDMLTAIHVPTEQDESIRDYLRARTDLRGELNRNRLRLLHFLLRKGHKFPGKAWTQKFNQWLNAIEWKDDLLKATADCYRFKIQTLQSDIHEMDQKIKELSLTGKHASTVARLRCLRGIDTLTAMNLVAEIGDFRRFSNAGSFMSFLGLVPGEHSSGNSRRQTGITKTGNSQLRRLMIEAAWHARFAGPASLRLRERRQNQPPELVAYAERAQKRLNKKYVKMLNRKKAPQIAATAVAREMAGFIWGIATSEAA

SEQ ID NO: 440650 - protein, 332 aa, unidentified
MMAQNDCVVVGIDVAKDKVDACIRSLSQRQTFPSSAEGRRALIRWLRKHKVGKAAMEASGGYERDWAKVLREAGIEVRIVDPKRVRSFARSAGRLAKHDAIDAAMIAWFAETFTDAPGQTCDAARDKLVQIVRARQSLLDLQTSLQNRGEHAAPEVVEKMQARLLKTIAREVAELEAAIAALVKATPHLAELAEIIESVPGLGKITSAGLVAAMPELGQVSNNVAAALLGVAPYDDDSGQRRGDRHIKGGRRKVRNLFYMACLGAATRHNPVLKTFYDRLIAKGKEPKVALTACMRKLICILNTMIARRQKWDADRYKMSDPARLPPSACTA

SEQ ID NO: 440651 - protein, 316 aa, unidentified
MKNYIGIDVSKSTIDVYDGKKSYKFENSELGFKEVVSLTEKIKETILIFEPTGIYSYALTNFCATHKIQVVMVGPKESRDFARSLKVRSKTDKIDAKVLYKYQSHVEPKMVQVPVVNHHAVKIQEMLNIYEGILSAKQKFKNQIESTSKEYKDLVRTLNRMIDNLDLEAQKLFNKIECLLLKDKQVKSKYDAISTIPSIGQKSALYLAAFFLKYPSANAKELTALMGLDPVMRDSGTYRGKQRISKHGGQQLRNLLYLPTLCAIQHNDRIKAFYGGLTSRAKTKKLAVIASMRKLILMAFSIFKSEEEYQPLLVKI

SEQ ID NO: 440652 - protein, 321 aa, unidentified
MTKSQDKIEFDQVIEKGCGIDIHKSILVPTVRGKGIKTETRSYDAFTESIEQLRDWLKSLGITHVAMESTGVYWKPVYNILEQDFEIVLVNARHLRNIPGNKTDKKDSQRIAKLLLAGLLKGNFIPPKTVREMRDLTRYKRRIIEQMASEKNRIHKFLEDANIKLSSVVSNMSGATATKIIDAMIEGEGKPEELAKLRHGKMKASEQELIVALTGNLTEHHKFMLKMVKQSIKDKELLIKELDKQIDNKLKENEMVLDAGLLSTIPGIDKEAAAYILSEIGNDMERFPDEQHLASWAGLSPGNNKSAGKKKVQEPRTETNG

SEQ ID NO: 440653 - protein, 363 aa, unidentified
MHESTTVAVGLDVHARSIRLAAVRADELLEEQTLPYDEEAVERALRRWPGVRCCYEAGPTGFGLHRYLVARGIDCAVVAPGLVPQRPGDRVKTDPRDARKLARLLAGGLLEPIHVPSRELEAARDLVRAREDARLDRMRDRHRLSKFCLRHGRGLPGLSWGVVRRTWLGEQRFEFAAQQQTFDTYVHALDLVDRRIEALERAIRETAEQGPWRALVARLRCLRGIDTLSALALAAEIGDFDRFQRAEELMAFVGLVPSEHSSGERRRQGSITKVGNSHVRRLLVESAWHARRRPKVGYELARRQRGQDALVVERAWRCQQRLYSRWQRMAARGKPPQKIVVACARELAGFVWAIATEQPLRSA

SEQ ID NO: 440654 - protein, 397 aa, unidentified
MYIVGIDIAKRKHEAAVIDGEGTVIIKPFSFTNNCSGYNRLLAMLTKAKLPLDEVSFAMEATGHYWLALFTRLQKEGFRVQVINPVQTNSIRSFYIRQAKTDPRDALLIAEVIRFGHFSESTLHPENIYELRELCRGRHAIVSMQADVKRKVVALLDQVFPEYETAFTNMFSDTSMAILQTCPTPKELSEMPLEELCHLIEVSSHKRFRMVKAQELQELARNSFGFAMAGDVFSTMIRLYAKHLVFLKQQVQEMDRKIAEIMDTLDTPITTITGIGPTLGAYILSEIGDISRFSSAAKLAAYAGIDPTMRQSGEYNGVRNRMSKRGSPYLRHAIWLAASSAVLHDPALKLYFQKKRDEGKPYMASVGHACRKMVSIIYAVMRDNKAYTPYIPNEISA

SEQ ID NO: 440655 - protein, 370 aa, unidentified
MPQSSTLYVGLDVHKESIAVAYIPEEHGAEVTSLGTIGTRQCDIDHLIRKMQSKAQHLVFVYEAGPCGYWLYRYLTKKGHVCWVIAPSLIPKKAGDRIKTDRRDAVQLARLMRSGDLTRVYVPTVEDEAIRDLTRAREDALRDLKSAKFRLKAFLLRQDIRYTGQATWGPAHLRWLSEVVCATPAQQSVFQEYVRAVHEHTERLQRLEQELREQVKAWRLQPVVEALEGLRGVQFTVAVTIVAELGDLTRFENPRQVMKYLGLIPSEYSSGERRRQGSITKAGNTHARRALVEGAWAYRYPAKVSRHLQLRLELLPKPIQDISWKAQVRLCKRYRRLMARGKHANQVVVAIARELAGFMWAIAKQVSVTP

SEQ ID NO: 440656 - protein, 350 aa, unidentified
MLIVGCDYHPGSQQIAYVDSETGEFQEQRLAHREEAEKFYRDLAAQGMKVRVGMEASGHARWFERLLAELNIELWMGDAAKIRAKRVRKKKTDREDARHILKLMLKDDFPKIWVPSWENRDLRQLLWHRHRMVQMRTRIMNQLQAVALNEGLRCKKRLWTKHGRAQLESIRLAPWASRRRRDLLELLDRLNPTISELTQRIEQQVEQFPVAQRLMTHPGVGALTALAFVLIIGEAERFECGKQIAAYLGLVPEEDSSGESRRLGHISKQGSGLMRFFLVEAAQVTVRSDAEWRNKFLHLAMRRGRKIAKVAMARRLAVRLYWMWRQQWDYAQLKKFGPHAGQPGTGGGVQ

SEQ ID NO: 440657 - protein, 347 aa, unidentified
MAAVMIGVDPHKGSHTAVAIGTGEEPLGELRVRASAAQAQRLLAWAAGWPERTWAIEGAAGLGHLLAQQLLAAGERVLDVQPKLGARVRLLAAGAVNKNDPNDARSVAVAALRSASRREVTADDHAAVLKVWSKRHRDLGRTRTQVACRLHAVLCELIPGGVSKRLTAAHAGGLLEAITPSGAVEAARCELAAAFLEDLRRIDAQMRDAKKKLTVAVAASGTTVTEVFGVGPVVAALVIGAVRDVSRFPSRDHFAAYNGTAPIEVSSGPRKIYRLSRRGNRRLNHAIHMAAVTQVSHRHSDGRAYYERKLAEGKTPKEALRALKRQVSDTIFARLQADAQRAAAGTR

SEQ ID NO: 440658 - protein, 342 aa, unidentified
MKSATTIGIDLAKNSFSLYGVDDKGKTVLSRTLTRAGVVRFFANLPSCLVGMEACASSDYWARTIESLGHEVRRIHPQYVKAYLLGAKNDTNDAAAICEAVQRPNMRFVPHKSPEQIDIQCIHRTRQGYIKSRTALVNQARGLLAEYGIIIRQGISAIRNQLPLIIADEENALSGLMRRNIASLYESICFFDSQILEQDKLLKTVAKENEACQQLMQVPGIGIMTATILLTVAGVASNFKNGREFAAFVGLVPRQNSTGGKTRLLSISKRGDYYIRTLFIHGARSAITRILAGQTPKYRPNPWVIELIARRGRNKACVAMANKTARIAWSMLAQGTEYRHAA

SEQ ID NO: 440659 - protein, 350 aa, unidentified
MRFYTGQHRYYCGIDLHAHTMAVCVLDAAGEIVLERNLATTPEAFLETIAPYREGLVVACECLFTWYWLADLCAKEQIPFVLGHALYMKAIHGGKAKNDRIDAHKIAVLLRGGMLPQAYVYPSGMRETRDLLRRGLHLVRKRGQLLAHLQNLRHTYNRGAFEKRIAYPSNRQGVVAHFAGEPMVQANAALDLSLLDHYDKLLVELERRLVRQAKKEAQNGFHLLLSIPGIGRVLAMTIVYELHDVKRFERVQQFASYARLVKCAKESAGKRKGTSGAKMGNVHLKWAFSEAAVLFVRHSAEAKLLLARLTKRHGKGKALSILAHKIGRAAYYVLAREKPFDAAKFFAHAS

SEQ ID NO: 440660 - protein, 433 aa, unidentified
MLKINYMSTLFVGIDVSSKTNAVYAMDFEENKYISSSFGNNQPGADQLVDMIAECMQKHQNLDTLLIVLESTSVYSVHISNFLSTSEVLMPYRPYVFCVNPKATSNYRKSYIGMEKTDPTDAYLIADFGRVGRTKKLEPWHGGQFIALKRLTRHRMHLSECITREKTYMVSNLYLKFSELQLLEGDDKPFGSLYGATSSAVLTEFLSPQEIIDMPEEDLLAFLAEKSRNRISDISKTSELLRKAARDSYRLDKCMYEPLNISLASSFNCIHAYQKEIRLIEQAIGKCINGMNPNALIILRSIPGIGPVWASGILSEIGDITAFHSSDALAKYAGLYWPKGDSGNFTSEDNNMSKAGNPYLRYYLGEAANSVRKHIPEYADFYARKYAEVTKHQHKRALALTSRKFVRLVFGLLVKNQLYTGEKLDTEYNTESN

SEQ ID NO: 440661 - protein, 463 aa, unidentified
MAARKPKRMGAQTVEDEDYQLRYERVAGIDVAKGSAMVCLRLPPGPGKVRRTCRTWEVMARVPDIEALAAELKAARVERVSMESTSDYWRIWVVVLEGAGLDVQLVNSSQARNLPGRPKTDKADAQWIARLTEMGLLRGSFVPPPEIRALRQYTRQLVHLSQDRTRYWQRLEKLLESALCKLTSVVSGLAGSASCLAMLEAMIAGERDPQVLAGYARGPMRSKHAALVKAFTGMQFGPEHVFSASSDLRMIKMLDAEITGLEQQVRDHLAAIPAAWGTDADGVTGPGAGTGPDAAVLPAVDRLTEIPGVGPAIAAGLIAEIGLDMSRFPTPHALVSWVGMAPVPNQSGPRTGRGRKGHGSSYARRLAGQAGNGAARTDTFLGQRHRRIRSRPAGGGWKKANVAVGRSIIIIVWHLLKDPAARFTDLGPDHYAKHTDTNRKARNHKRQLEALGYDVILTPREAA

SEQ ID NO: 440662 - protein, 335 aa, unidentified
MNFEKEIVCGADIHRDFLIATMISRSGLKLQERFNMNQDGLLAFRSWILTHRCQRLAVESTGGFWYPIFIILEGHVEFILANAYQIRNIEHKKTDKLDSERIAIYCLNNLITPSRIYPKDYRDLRSITRAREALVNARSKVKNQIHQSLSTCCIKLSSVISDSFGKSGRYIIDRLLEGKTIDQIISGIPSKRVRKKEDELREAIRNGIDPVQVFLIKANLDVIDDISKKIKILEAEIAVKVKPFEKDLEIVLSVPGVGFISAATIIAEMGDYRDFSSADKMAKYFGIVPSVYQSAGKLRTGKITKTGSKHMRRILVEVAKAISRTKKNSNLNSAI

SEQ ID NO: 440663 - protein, 324 aa, unidentified
MNVIGIDVSKAKLDCAWLKEDEKRKTKVVSNTFDGWKELVEWSLKNTGVAIEQLYFVMEATGIYHQRLATYLFDAGANVSIVNPAQVKFYGQSLGVRTKNDKKDSVVLARFGLKANPKLWQPEALEVRELKALVTRLEGIEKDLQREKNRQEKALCGETPQAVLDSIAQMIALFETEQQKLKKLIEEHIDKHKKFKEDKALLETIPGVGNVIATRMLMVISSRQFEKASQCAAYLGLVPVQHESGSSVKGRVRLSKAGNPAIRAKLYLGAVSAKNYNPDVKALYDRLLSKGKSKMSALGAAMRKLVQICFGVLKHHLPYQPQTT

SEQ ID NO: 440664 - protein, 355 aa, unidentified
MTFVGLDLHKRYITACALDAGGAVLAEAKRLPASLDALGAFLAALPAPVTVAMEATLYWAWLTERLEAAGFTVQVAHAYQAKLIGQARSKTDPIDARKLAELLRTNLLPTIWVADAATRARRQLLRGRAFLVRQRTQLKNRIHGHLTAENQVCSTTDLYGKAGRTWLTSVALSPALREQVDVLLRLVDSLSQEIHALDQLVKRAARGNVVATQLQSLPGVGPFGALMLEAEIGPIARFRSSHELAAYAGLVPSTHSSGGRTTHGGVGPAGNRWLKWILIEIVQTLKLAPGPVGAYYQRLLRAKGKAKATVAAARKLCCYLYWMLKEGWSYAEWLRQHDGSPSSEVRPVQRMGAVA

SEQ ID NO: 440665 - protein, 339 aa, unidentified
MKDQDVSDVVRTKKRTAMRYIGIDVSKATFVVAYSSDKGGEIRTFNNTTAGIRQFIGTLPKDGSIHCVMEATGNYSALLLYMLNVAGITVSMENPLKVKNFAKAMLSTVKTDKSDARLITLYGEKMNPRPFKVQGEAILRLRQKRTVIRQLTKQITAMSNLRGSLACLPVPDKGATHTVDETIKFLEKKRDRLQSELTDLVEVEFSRQLALLTTIKGIGITLATALIITTGGFTYFQNAKQVSRYLGICPTYEQSGTSVNIRGHINRNGDAYTRGLLYVAAWTASRFNTKCGETYTRLRQNGKPGKLAMIAVANKLVRQAFAVVTHDKEYVDGFVSNRP

SEQ ID NO: 440666 - protein, 311 aa, unidentified
MAMQTKTDGLGIDVGKDWLDIFNGDTVERVENTQKAIRAYLKLLPTPVPIAIEATNVYHELFIQLALAADHVVYLVDACRVARYREAVGIRVKTDGVDARLLYRYLNAERTHLRPYEPPSKAVKRLMRLLKARAKLAHSKASLKLSLAGIGELVQTKKALMARFDKAIAVIDKKLIDCINESGYTADYKRCQTIKGVGPINAAALVAFYHRGDFRKADSFVSFMGLDVRVRESGRYRGQRKLTKKGNPEIRRLLFNAARAGAKTTQWKPYYESLRERGLTTTAAAVAISRKIAKLAFALMRDQTEYQVKVA

SEQ ID NO: 440667 - protein, 417 aa, unidentified
MALKIVYPVCCGIDVHKTFVVACIASTNSKGVTTYKSHRFSTFTKGLNELSQWLCEHHCKDVCMESTGKYWIPVFNMLEHASNITLAHPKYVKAIRGKKTDKKDAKWIADLFKHDLVAGSFMPPLPIRQLRDLMRYRFKLTNFTSSEKNRLQNSLTVSNIQIGSVVSDTFGKSAMNIINKLLDDPSETSFDLEPLIHGSLKGKLPELALAIDGFITPEQAGKIKVIKQHYDNLESCKAELESIVLSLANAYTEELNLILTVPSFKNIFSAIAVVSEIGVNMDVFLTAKHLCSWAGLTPSNDQSAGKRKSVRISRAGVYIKPLLVQCATAVVKSEKHPEIRNRYLQLKRRRGHKRAVIAIARMLLTAIYHILKNKQPYNPDLYKRSDVRPVDREITVEQAILLAQRQGYQVMDLPLSV

SEQ ID NO: 440668 - protein, 342 aa, unidentified
MAGVADQVGWIPGTREFPATAEGYAAALAWMRSHGELVKVGVEGTGSYGAGLARYLAAEGVEVAEVMRPNRQAWRRRGKSDAADAVAAALAALNGEASGKPKSGDGAVESIRALHVARRGAGKARTQAGNQLRDLIITAPQALREKLAGLPAPERIRVAARFRPAGLTSPAEAVKAAMATVARRHQALAAEIAQLDTALEALVEHAAPAGFRDRTGVGTRVAATLLVTVGDNPARVRTEASFAALCGVSPVDASSGKQRRHRLNRGGDRQANSVLWRIVFTRMATDPRTQAYVTRRTSEGKTTREIMRCLKRYVAREVYKTLAAHARQPTQDSMTQIYSMIP

SEQ ID NO: 440669 - protein, 432 aa, unidentified
MPESIPYLSVGFDVGADFTWMSIMLPNGILIGKPFKIIHSDPQSRELAISKIKEAQEMYSLESRCFLESTGIYHIPLLCFLRDKGFDCAVINPIITKNSTNMNVRKLHNDKFDSKKAALVGLKPDLKVSLMPSDLALNCRNLCREYYDLMDNRSAYVNKLQGELRMAFPQYLGIFSKVTINTSLTLLETYTSPSAFLEADKQEIIDIIKSTARFGLTYAQNKYNAIIQAATDANQFGYIIESNIKRIRLYISFIRKYDEEINDILESLHKLVDSNEDTKFVKQVHLIETFKGAGFLSAATIMGEIGDFSAFSKPKQLFAYFGLDPAVKQSGKFEGTKVQMSKRGSSIARRVIHTLSLQSISISRNGKAKNPVLREYYLQKCDSKPKLVAMGAVSHKVCNMIFAILRDNKPFEIITPQEHIKQYNAAKCDIAA

SEQ ID NO: 440670 - protein, 455 aa, unidentified
MVQTKRPRSRREMPAVHPDAAAIDVGATMHVVAVPPDRDPEPVRTFGTFTADLHRLADWLRACRIKTVVMESTGVYWIPIFEILEQKGFDVQLVNARDAKHVPGRKTDVSDAEWLQRLHEHGLLRGSFQPKGEVKALRSYLRQRERLLDSAATYIQHMQKALTQMNVQLHHVVSDITGVTGMRIVRAIVAGERDAATLAAFRDSRCKEPVETIREALIGNYREEHVFALAQALELYDIHQKKVAECDKRIETVLEQLKATRPTPAKPLPAPRHKTKQSNAPNFAARDALYAVLGIDLTQIHGLGPYLALKLVGECGTDLSAWPSAKHFTSWLSLAPRNKISGGKILSSATRRSNNRAASLLRLAAVTVGRTETALGAFFRRLSARIGKAKAITATARKIAVLFYNALRHGMKYTDPGAAYYEERYRQRVLSNLQRRAKAFGYVLQAAAPQAVGVS

SEQ ID NO: 440671 - protein, 323 aa, unidentified
MNKGIKYFGLDISHLVFDVTDSDGNYYQFKNNEFGFKKFTKLLNTESHCVMEATGYYHYQLAYHLLESGIKVSVENPLAVKRFIQMKLSKIKTDKSDSKLICEYAEQVELKLWQGNSMTEIECLQIVRALSVYTKQSTMLKNKLHGEAVLGNPSKAVISSLNRSLKQVKKELETLESKLLTLVKQLHQDLLTRLKTIPGIGPKTAIMLVVLTGGFDRFSSASELCSYAGLTPVIRQSGSSVSGRPRISKIGNQKLRNLLFMCSFNACKYNKACRDLYERLVAKGKSKKLALIAVCNKLLKQAFAIAKSGLIYDDTYQSVLVKN

SEQ ID NO: 440672 - protein, 429 aa, unidentified
MNFRPIAGIDVGKFFSEMAILSPSNEVIARMKIRHDSSTDVERAVELLKKTEKDFDSRPFVVMESTGHYHKILFHSLYKAGFEVSVINPIQTDSIKNIGIRKVKNDKVDARKIALLYRFQELKTTNIPDEDIECLRSLCRQYYKLSDELTAYKNRLMGIVDQLMLNFKDVFPNIFSKAALAVLEKYPAPVHILKANRNKLIALIKKNSRRSLKWATAKYELLNSKAKEFAPLSISNSSNVAMLGVYISMIKTLEENLEKVLKAIRSLIIEDMAKDMPMLALTLELLQSIPGIGLISAVTILAEIGDFSAFSKPGKLVAYFGIDPSVMQSGEFTGTQNKMSKRGSRLLRRVLFTIALANIRTKRDKTAYNPVLMEYYKNKCQSKPKKVALGAVMRKLVNYIFAVLRDRKPYELRSPQEHAQMLAAKHTAA

SEQ ID NO: 440673 - protein, 418 aa, unidentified
MNSHPKSIPIQRYIAIDIHKHYVVLGGMDPQKEWVLRTRKVRMSRFPEWVLKNLNPTDAVVIESTSNAWEIYDLIAPLVRKIVVANPLKVGQIAGAKVKTDRLDVERLLTLLIADIVPEVWVPPDHVRDLRSLISHRWRIQKQITMTKNRLQSFIHRFNLLPPEGKLFSEDNRSWWEEQEFSTMVRLQIEQDLLLMEHLTDHKEVIHQELACLSNRTPWAEDVVFLMQVPGLGIVLSMTVLSAIGDISRFEHAKNLVGYAGLGAGVHDSGLKHQGKGITKAGRKELRWAMVEAAWGAVRSDPYWKAQFEALKKRGKHANQAVVAIARKMLVAIWHVLSKGEPRRHSTDEDLAYKMLIWSQRMDEDARQGLSRQQFIKYGLLRLGAGQDLTRIVRNGYPRRIATSEEVLALKPELNLLE

SEQ ID NO: 440674 - protein, 485 aa, unidentified
MKKNSLSAFDRLRTGARLSHKERKEVQQRLSAADPGLEIVNRDAAGIDVGNESHYVAVPRGRDAQPVREFGSWTAALIEMAQWLIGCGIRTVVMQSTGVYWIAVHDVLRKHGLEVNLVDARGTKNVPGRKSDVQECQWLMRLHTYGLLRACFLPAPEIHGVRTMWRLRDQHVKDAGRCIQHMQKTLIEMNVQLHIAISDISGTSGQAIIRALLAGQRDPVALAALRHPRCMASEVEIVHSLQGDWKPDVLFELQQAVEAYDFYRQQMAKCDEQLKEYMALLPARKVETVISSPGPSAVPDISKTSSSRKPRKPKGNQPAFDLEAELERILGVNATTIDGINVITVQTVLAEVGADLKAWKTEAHWASWLNLAPKRDVSGGRVIRHVREHRTNRVGNAFRMAAQTLLQTNSYLGARCRYLRAKLGGLKAVKAMARVLACLYYRLVTKGQRWVDRGIDEFNRRSEQREIAVLQRKAQKHGMQLVPTA

SEQ ID NO: 440675 - protein, 412 aa, unidentified
MLKIAYPVCCGMDVHKSFLVACIASTNEKGITTYKSKRFSTFTGDLRRCAVWLFENNCKDVCMESTGKYWIPIYNILEPTCKIVLAHPKYVKAIRGKKTDKKDAKWIADIFKHDLVTGSFIPPADIRQLRDLVRYRWKLTNFTTGEKNRAQNCLTVSNIKLDDVFSDVFGKAASAITGRLLENNKPFDVTPYLTKGIKASAEDIQSAVDGEMCDEQAEKLRIIRSHMDSLELCKLNLESLILSVAEKYLPQLNLVSTVPGIQSFSAIAVISEIGVDMSVFPTSKHLCSWAGLTPQNNESAGKKKTTRINRAGAYIKPLLVQCANAVVTSKKHPEIRNRYLALKKRRGHKKAIIAIARMLLTAIYNILKKNEPYNPELYRKSDLPPAHREVSVAEAVFILQRQGYIVSPAPAP

SEQ ID NO: 440676 - protein, 442 aa, unidentified
MDTDCFSLYVGIDWGDAQHQVCMLSDPNHPKELQVKHGGRALADLAMALAHDVWGQNHRVAVAIEVDSGPVVESLLLQGFAVYSINPRQLDRLRDRYFPSGAKDDRRDALVLAQSLRTDRQLFKRVEVDDPDTITLRHVTRARDELQRSLQRTTNRLRNHLAQYFPALLQLSPDASDPLVWALIERAPDPEAAAKLSIVTIAKIVKDLRIRRVSPQQIRDVLREPPVQLLPGARQALAQRALTLIPQIRLFHEQFVEHTRAMERQIADRCQPVQEPVSEPAGEPALEAPAPDQSSKPSDAPTSPAPRLSDAAILRSMVGIGAYVLAVLLTEATRAIARRDLAALRAQTGIAPVTRQSGHSLHVSMRRACSWRLQKAAYCWGMAAIQNDPLSKAHYQRLRASGHTHARALRGVVDRLLDVLITMLRDGTLYHPERRRELHNAA

SEQ ID NO: 440677 - protein, 347 aa, unidentified
MTLYIGVDFHPHQQTVSYCDTGQGEVHQASLAHNPEQVRRFYGQLPKAVVGIEASCTAAWFEQMLSELGHELKVGNPSQIRARARSRHKSDKRDADLILELLLKDEFPELWRRSIKSQSVLEQLRFRHHLVKQRTQVCNRLQALAHAAGLPKKGIQTKRARASLMEACLSETQSFERDQLFELLDDLTQRIKVLESWLEEKAAGDTKVQLLLTHKGVGLLSALAVVHTLGEISRFPSSKEAVAYTGLDPLEQSSAGKVRFGSISKAGSAVLRHLLGQAMHVAARYDGELKAFYKRLANRRSKSIAKVATTRKLLIRLFIMLRDEIDYNEFKRRGSAVGMPVLSHGLQ

SEQ ID NO: 440678 - protein, 399 aa, unidentified
MDDDTFWVGLDLGLTRTSVCIMNGQGFPLNEFECDSEVATLTEALAAVAIDRIGGIAVEAGTGTYIVRKLRGAGFPVVVFEARKAHKFLALRRNKSDASDARGLADLVRIGQNSVSQVHLKTDECQRLRSFLVVRQRFVLMKLAVEGVLRCNFALHGRRLESSHTRKALLRRTETIFASLRSEEGIDLEPDLAPLVMVCDSVRAYLEKSDRDLQAIASSHPVCRLLMEVPGVGPICALSFYSAIGDPNRFRVASHVGAYLGLVPRRYQSGAVSRTLGITKNGNRLTRSHLVMAAAVFARRAPDCPLKDWYLALRGRAGPKRARIALARKLAVILLAMWKQGTHFELDRTGPSGVLSERGPTETVPVAPVGGDWRRQSGAEKVTSRSHLRQGSGDNTPGA

SEQ ID NO: 440679 - protein, 415 aa, unidentified
MEVLYPRCCGLDVHKETVAACLRIVVNGKVVKDVRTFATTTADLISLSEWLAENKCTHIAMEATGVYWKPVWHILSDGDFELVLANAAHVKNLPGRKTDVKDADWISDLLAHGLIRPSFVPDGPTQDMRTLLRTRKQLSREKSSHILRIQKTLEDANIKLDSVVTDIMGLSGRKMIEAMISGQTNPVKLARLADPRVKASQETLREALRGRVTRHHRFLLRLHLQQIDALDDAIVKIDREVEAGIAPFRTAVEQLSTIPGIKALGARAILSEIGIDMSRFATDANLVSWACICPRNDESAGKRRSSRIRKGSPWLKTTLVQCAWAAARTKGSYLQAQFQRIRARRGPKKAIVAVAASILTAIYHMLKDGTMYQDLGPNHFHRRDKERQKKRLVQRLADLGYAVELAPLTPAHVSP

SEQ ID NO: 440680 - protein, 391 aa, unidentified
MPQSNDLSRSLTALDQDSTLIAVVEMSQSSWLVGAIIPGVERRPAKKLEASEGMLLALLHRWRDEAAKAGCTIDRITVAFEAGRDGFWLARWLRQRGIEAHVIHATSIAVSREHRRAKTDRLDAALLQRAFLGWLRGERGHCTMVAIASLAEEDAKRPSREREALVSERTRIGNRMKSTLARLGIRGIRPGLRKAAERLEQLRTPEGAPLPPNTLAELRRDLARLRLINDQIGEIEAARLERLRQQPDEARHPMILLLARVVGIGIETADMLVQEVLSRKLRDRRAVARYGGLTGSPEESGARRREKGLARAGNARVRRGMLQLAWRFLMFQKDSALAQWYRARTADARGATRKTMIVALARKLLVALWKLVTTGELPNGVVLRPAIQAAL

SEQ ID NO: 440681 - protein, 385 aa, unidentified
MAKAHNSSSKPRAKQNHRAKLKPQDATQGLQMVHPRAAGIDVGNEEHWVAVAPDLDPHPVQSFGCFTRDLREMAEWLVRCGIETVAMQSTGVYWIGLYDVLSEHGIRVFVVNARDTKNLPGRKTDIQECQWVQRLHAYGLLRNSFRPEEEILVMRTYWRQRQQHIADSSRCIQHMQKALTQMNVQLANVVSDISGETGLAILKAIVGGERDPQALARLRDPRLKASEVTVARSLEGNWRPELVFVLSQELDSYEGYQHKIAECDEQSATAHRTLQEKADPGQLAPVRRDKRARGNVPGGFDLRKELYRASGVDLTAIDGINVLTAQTVIAEVGCDMSRFSTEAHFVSFLDLSPRNKISGGKIVGREKRKASNRAGLALRLAAARY

SEQ ID NO: 440682 - protein, 353 aa, unidentified
MRRPKDKLIAGLDLHSNNVMIGVINQDGKRVAHRKLGCDLSEVVGFLKPLKPQLQSMAVESTFNWYWLVDGLRAQGYSIDLANPAKIAQYSGMKHVDDKDDAFHLADLQRLNILPKAHVYDPELRPVRDLLRRRTNLVHQHTALLLSFSSLYTRTTGQKLDLGEAKKMEPKEAPKLYEHPANQLIAQVQAEHIQALAKSIRRVEKAVLACAREIPLYERLLTIPGIGRILGMTITMEVGDVKRFQTDGDFASYCRMVDAKRLSNGKCKGANNQKCGNKYLAWSFVEAANFARRYDEQCRRWYDRKAAKTSKVIATKALGCKLAKAAWHVMAGPCDYDEKRLFPELANQPMKTS

SEQ ID NO: 440683 - protein, 384 aa, unidentified
MNKHSMIFIGLDTHKEFHEVAYCEEQRGATPVHYGRIPSSKVSVKKLLRQFESKYPGATLHVVYEAGPCGYWIYRLITSLGHCCYVVAPSLIPKKPGERIKTDRRDALKLVRSLKSEDLTPIYVPEPEDEAVRDLSRAREAAMKDLKEAKYQLKALLLRNNIRYEGTANWSKKHLRWLTELILPHPAQQIVLQEQLQTIEERIRRLERLDNELTHHVHQWRYYPVVKAVQAMRGVRLLVAVGVVAELGDLHRFDHPRKLMAYLGLVPSEQSSGGKRHLGAITKAGNGRARRLLIEGAHSYRYPANVSTELQLRQEGLPKDIVDIAWKAQLRLCKRYQRMSKKGKHYNLIITAIAREMAAYIWAIAKEVVLTPVNPKLRLSRVPA

SEQ ID NO: 440684 - protein, 424 aa, unidentified
MKVTYQTCCGVDVHKSFLVATIVKTTGGVEPSYQKKRFSTFNNSILEFKQWLLDNHCHDVCMESTGKYWVPVFNLLEDEINVVIANPKWVKAVKGNKDDTKDSKWIGDLFRLGLVKGSYIPCKIVRILREYTRYRYKLVSCRSSEKNRYQNTLTVCNVALDSVVSDIFGKSSTSIIDYLLDQSGTSINHEEIASKLLRNLKSKEDAVIESVEGYQMTDTQKYRMRLVRAHMDYITAEINDVDKMIENMISSNPDFENAVRFLCTIPGVKRDSAITIISEIGTDMSQFSGSKRLCCWAGLTPDSNESAGKKKSVWITRAGVYLKPALVQCAHAAVKSDKSPYYKKKYESLVKRRGKKRAIIAIARMILTAIYQMLSTGEEWNPSNLYKIDMPVALVEKQKAKAIRQAKKLLQRKGTLPPDKPLAS

SEQ ID NO: 440685 - protein, 482 aa, unidentified
MAKRRKSTFERLQSSSPNRQQRKKLQRQFDADSAELVVVHPNAAGVDVGNPSHFVSVPPERDQTPVREFGSWTADLRRMVEWLKSCGITTVVMQSTGVYWIAIYDLLEQAGFEVYLVNARGTKNLPGRKSDVQECQWLRKLHTYGLLRKSFRPPEEIREVRTLWRLRGRVLEDSSRAVQHIQKALTTMNVQLANAISDVSGVTGMAIVRAILQGQRDPHELAKLRDPHIQASEEEIAHSLEGNWQRDVLFELQQVVDAYDFHRQQLTTIDTELQKYMTALPTREPVGEVSADVSKLSAKLRKKLKANRKSKDNRPAFDLGAELARLMGVDLRLIDGIDVMTAQTIYSEVGADLSDWPTEDHFASWLELAPRNNITGGKVIKKEKRPSNNRVTTALRNAAESLVRSDSYLGARYRHFTGRLVGLKGVKAMARYLACLVYRLLTKGPAWVDRGAAYYENKRRNRELVGLHRKAAAAGMKLVPIT

SEQ ID NO: 440686 - protein, 412 aa, unidentified
MEVLYPHCAGLDVHKNTVVACVRHTVDGTIKREVRTFKTTTKELLALSEWLAAEGCTHIAMEATGVYWKPVWHILSDGDFALVLANAAHVKNVPGRKTDVNDATWLADLLAHGLIRGSFVPDQQTQEMRDLLRTRKQLVRERSRHVQRLQKTLEDANIKLDSVISDVMGLSGRKMIEALIAGESDPEQLAQLAHRRIKATPEELCEALRGRVTRHHRFLLSVHLQQIDAIDQVTRDIDQEIDAHVEPFRDTVLLLTTIPGVDELGACVILAEIGRDMSRFPTAGHLISWAGLCPRNDESAGKRRSTRMRKAAAWLKTTLVQCAWAAARKKASYLQAQFHRLRARRGAKKAIGAVAASILTAVYEMLKTGALYEDLGSHHFDRCGKRRQIHRLVSRLHNLGYAVQITPLPADA

SEQ ID NO: 440687 - protein, 340 aa, unidentified
MKEVSTIGIDIAKSVFQVHGINQAGDVVIRRKLRRGEVGEFFKRLPVCLIGIEACASGHYWARTLIDMGHDVKLMPAAYVKPYVKRQKNDAADAEAICEAVQRPTMRFVPVKNEEQQGVLMLHRARELLVRQKTMLINALRAHLAELGIVARLGVMGVRDLVALVEETNQCEVPEIVRRALLPLCDQLRHVQEKIGEMDRQILEWHRSNALSQRLETIPGIGPVTASAIAATITDVSRFHSGRQLAAWIGLVPRQSSSGGKERLGRITRQGDPYLRRLLVIGATAVLRFSRKSKTASTQWATGLLERKPAKVAAVALANKMARIAWALMTKETSFRTVTG

SEQ ID NO: 440688 - protein, 361 aa, unidentified
MVYCGMDMASVSSYVYVADKVGRKLAAGEIDTSKEGIEGRLRPFVRKGLSIAIEAGNQTAWIYDVLVEMGAIVTVVNPAKVKPIAQSRRKTDKIDAKLLCDLLRVDALPHPVHMPSDPARAMRGVLRARKQLISARTKLCNVVRGMLRQEGIQLPLRALSSYVGWQRVMAREFDRPHLPLIVSAYYESFVTLTRSIRQLERELNAQKRADARAARVETMPKVGQITALTTIGALDDARRFPSSRKAVAYSGLAPTVRSSGERTEYGSISREGRSELRAVWVQVAHLVVRERYLLSGRGESQAGNGCVSGELQDVWYGRKGYVKVETQPEVDVNGVVGSCWRQPAVRGWPSRPESENGRASD

SEQ ID NO: 440689 - protein, 347 aa, unidentified
MSGGYEGKQFVGMDLHRRRSVLVRMTETGERLETVRISNDPEYLRAVMARAGEAPEVVLEATYGWYWAADTLAELGAHVHLAHPLGVKMFSYRRVKNDERDAADLADLLRMGRLPEAWIAPPATRELRELVRHRAKLVGLRSNLKCQIHGVLAGAGVHVPVSDLFGVDGHTLLAQVELAPAARARVNSALRLIETLDFEVELFAKLTAGRLRTHEGYQAIQRIPGVGPVLAAVFVAEIGDITRFDRPARLASWAGLTPKHHESDTTVHRGRITKQGSRLVRWAAVEAVQRVGAHTALGQVREQVGARRGRNIGVVAAARQLTELVFYGLRDGQIRRLAPLSPCTPAA

SEQ ID NO: 440690 - protein, 343 aa, unidentified
MGEVSTIGLDIAKSVFQIHGVDAGGAVVIRKRISRAKLLEFFATLPTCLVGIEACPSAHYWSRRLQGLGHTVRLMPPSYVKAYVKRGKNDANDAAAICEAVTRPSMRFVATKSEEQQSGLMLHRSRQLLVCQRTMLSNAIRGHMAELGIISAKGRNGTAELLKIIADEQDDRIPAAARFSLNVLARQYAAIRAETVAIERRIHAWHRSSEESRRLEEIPGVGPIVATALMAEVGDWKTFSSGRSLAAWIGLVPRQHSTGGKERLGRISKQGNRHLRWLLVAGAMAVIRYARQHGTKRPWLARLMDRRPLKVAAVALANKIARMAWAMMVRGERFKEPKLLPAA

SEQ ID NO: 440691 - protein, 356 aa, unidentified
MRLYVGDDWAEDHHDIEVMNASGKVLAKKRLPEGVAGITQLHELIGRHLGEDEVDAEVVVGIETDRGPWVAALVAAGYAVFPVNPLQASRYRVRHGVSGAKSDGGDAHMLADMVRTDSHQLRPAAGDSAEAEGIKVVARMHKTMIWERTRGVQRLRHQLREYFPAALEAFEDLDAPDTLELLGKAPDPARAAKLTRAQVSAALKRARRRGITGKADAILAALRGEQLGQLPALTAAYAATARSLIAVIVTLNEQVRVLEEQVRQHFGRHPDAEIYLSQPGMGAILGARVLGEFGDDPHRYADGKARKNYAATSPITRASGKKKVVAARFVHNDRLVDALNAQAFAALNASPGARAF

SEQ ID NO: 440692 - protein, 341 aa, unidentified
MKNSTTISIDLAKTVFQVALFNKYGVLKSNNKMSQAKMVQFIAQHPEAVICMEACGTAHYWGRRFQQIGHKVLLVPAHIAAKYRTGNKNDANDALAIYESIKRPKTYFVQVKNLDQQDLASLLKLRQGYVKQRTQTANRVRGLGLEYGVKIPQGIAKIRKHLPYFLEDAENELTTSSRFILRNLLDQLLLLDSQVEEATNRLVARAKEVPVCTRLIALPGVAWIIASALYARLGNGSAYKCGRDASASVGVVPAHSGTGGNNKLLGITKRGDRCLRSLLVHGARSVVSRIKDKQDGLSCWIREQLLKNHLNKTAVAYANKLVRMAWAILKSGEDYRTPLAQ

SEQ ID NO: 440693 - protein, 493 aa, unidentified
MGACGLESGDVVLAAIPIRKMTIGIAQTLLLVIERRIAMPKRTTGDRPELKTVSVGAAAIDIGSKMHMAAVNPACTDVPVRSFGTFTQDLHDLADWFKACGVTSVAMESTGIYWIPVYEILEQRGFDVILVNARYAKNVPGRKTDVSDAAWLRQLHSYGLLRGSFRPDAEIATLRAYLRQRERLVEYAAAHIQHMQKALMEMNLQLHHVVSDITGATGMRIIRAIVAGERSPDVLATYRDVRCHSSPETIRAALVGNDRDEHIFALTQSLELYDIYQAKMLDCDRKLEVLIAALSNKGGKPVGKLSKPRIKTKQVNTPTFDVRTALYGVLGVDLTEIHGLGPSLALKLVGECGTDLRAWPSAKHFTSWLCLAPGNKISGGKVLSSRTRRSSSRAAALLRLAATTVGRTDTALGAFYRRLSSRAGKSKAVTATARKIAVLFYNTLRHGMSYRDPGADHYEQQYRSRVLANLQRRAKSLGFVLQAVPGDADPAVS

SEQ ID NO: 440694 - protein, 334 aa, unidentified
MYTLNFAGIDTSHKTLDVVVRKKGKSLKCLKVKNTTAGHLELIRYLRKHKVGRVGLEATGYYHLDIAIELDSATNIDVMIINPRASKNFSKALMTKIKNDAIDAEVLAKFVERMDFITWRSPDHEVFALRACGRRLVSLTKEKTKAKNQLHAFSLTKRTPAFIIRDIELTIEQLESQIDNIIKHALRIIKESDKLAQRYKRLISIKGVANRTAIKLLGELGVLESNMSAKQWVSHAGLFPREFQSGSSVNKRTSIGKVGNRYIREALYMGAMSAARHDPNIRGFYQHLINDNGLKKIQATCAVMRKLLVAMHSMLKTDKPFNGKLFYVLNNTST

SEQ ID NO: 440695 - protein, 340 aa, unidentified
MSDIYTIGIDLAKSVFQLCAFDKAGKKLVNRALRRNQVIKFLSNIAPCLIGMEACASSHYWAREIRKLGHEVRLMPPQYVKPYVKTNKNDMADAEAICEAVRRPTMRFVSVKSEEQQALLLLHREREGVIRDRTALINRIRASLQEFGVSVPAGRFQLRKWFREGFSLVEYQLPKLLVGHIKLMQTRLRELEQYAEYLDKQIDLASEVSDECQKVRGIPGVGRLTSSALVASIGDAKAFSSGRQLSAWMGLVPSQHSSGGKSLLLGISKRGDTYLRRMFIHGARAVMRHLKEGKPFFGWVTSLLKRMHKNKVIVALANKLVRISWAVLAKEENFSVERTY

SEQ ID NO: 440696 - protein, 383 aa, unidentified
MKSWQEITHYAGFDWAKDHHVVVVVNPQGQMVADFEFEHSLEGWQSFADKTSAWPNLAVAIETSQGAAVDQLLQRQSIIYPVNPVAAQSYRERKAPSGTKTDHIDAWALADALRADGHGWKALQPLDPLTQQLRLLCRDEVSLIEQRTALVNQLQQALLEYYPAALAAFDDWTDRFTWNFILQFPTPDALVKAGKRRWEKFLHTHKLWRPETAQKRLELFAKADQFKASDPIVRAKSQLAVSLCKLLRTLGQQLDLYRKQIAALFEEHPDHDLFGSLPGAKKVLAPRLLAAIGGDPTRYGSQEVLQCLAGTAPVSYQSGKISKVHVRWSCDKFLRHTIHLWADCFRRASAWGQTYYQKKRDEGMSHACALSAWAKDCSKSSFG

SEQ ID NO: 440697 - protein, 338 aa, unidentified
MNKKNFVGIDVSKHTLDIAFVIRNDYGLTNPQWKQFENSGNGIKQIEKWLVQMNVPLDEQTIFVMENTGIYHRLMWRSFMALGVDVCIENAAQVKWSLGIARGKNDKTDSRRIALYAARNADKLKPATAMYQNVLHLKDLLSMRTNMIVHLRALCTAFNELQRISDKTFAKITTKISGDAIKGLEKSIKRIEEQIKLTIKEDEKIKHLHKLLLTVPGIGHITAAHIICSTNLFTMCSSGKQLACYCGVVPFGHQSGTSIKGKYRVHKMANKELKRLLHMCALSAIQHYEEFKTYFERKKKEGKHVMSVLNAIKNKLVLRIFAVVKNNEPYVNKCLAAA

SEQ ID NO: 440698 - protein, 347 aa, unidentified
MRFYTRQHRHYCGVDLHARSMYVCVLDRDGNVLVSKNIASAPEPFLELIAPYREDLAVAAECMFTWYWLADLCAREGLAFVLGHALYMRAIHGGKAKNDRIDAHKIAALLRGGMMPQAYVYPQAMRATRDLMRRRNYLMRQRAELLAHITNTNHQYNLPALGVRPARPAERSGLTEHFAEVPVRKSVEVDLSLVEHYDRQLLPLERYLESNAQAQDPVALAIVRSVHGMGKVLGLSILYEIHDIGRFSRVQQFLSYCRLVKPTKESGGKILGHSGKKIGNAHLKWAFSEAAVCFLRANKPAQALRARLMAKHGKGKSLAIIAAKLARAVYFMLRRSEAFDAERFFAH

SEQ ID NO: 440699 - protein, 373 aa, unidentified
MEWTPPFTAVRLLPQSKRAILPTCTTEAAMKITTIGLDLAKNVFQVHGVDGRGAAVLRKQLRRDQVAPFFARLEPCLIGIEACGGAHYWATKLSMLGHHVKMMAPQFVKPYVKTNKNDSLDAEAICEAVARPNMRFVPIKSPEQQSVLSLHTARESFVRARTAQANQIRGLLIEFGLIVPQGIRHIYQRVPELIEDASNELPGNFRILIDRLLQHLKELDRQVRELEREIEQWHRSSDISRRLETIPGIGPMTASALVASAGDPTNFKNARQFAAWIGLVPHQNSSGGKTQLLGISKRGNVYLRTLLIHGGRTMVELARRRADQADSWLAKLVGRRHHNIAAVAMANKNARTAWALLSSGKAYEPMRIPDQAA

SEQ ID NO: 440700 - protein, 337 aa, unidentified
MKYSGIDLHSNNSVVSVTDGEDRVVAEKRLPNDLAKIVTFLGPWKQDLAGVVVESTYNWYWLVDGLQEAGFVVHLANTTAIKKYDGLKHSGDETDARHLAHLLRLGILPTGTILPKEDRAVRDLARKRLQLVRSRTAHILAVENLTAREYGTKLSSNQIKRLSAEAVDRMALLPEVRLAIKANVAVIETLSTQIEELAKCLRDRVQPRDGYRLLTSVPGIGQALATTILLETGPIDRFANVGNFASYARCVDSEHRSNNKKKGEGNRKNGNKYLAWAFVEAANFAVRFCPQARKFYERKKARTNTIIATKAVAHKLARACYHMLKEQKPFDVTRCFA

SEQ ID NO: 440701 - protein, 318 aa, unidentified
MNVIGLDVSKDTIDATLITTKGSKDYIKISNNTEGFENLINWIKTKRIRKIAISMEATGIYYEQAAEYLSALYTIFVINPLKIKEYAKSQFSNTKTDKADSKLIAEFANRHLDKLTPFRPSENPILYKLVNLLQQIKEQQKETQNRLHTAKDIYIKSTHEAIIELLEEKIDQTSKRIEGMIKQKESLNIEYQNLQTIPAIGKETAVILLRHLTDKNFETANKFVAFAGLSPKIEQSGTSVNKKGRLSRYGHRQLKRALFMPALVAYRMNAFPQLVRNLEAAKKPKMIIIVALMQKLAKIAFYIHKSKKPFDKARHQTV

SEQ ID NO: 440702 - protein, 347 aa, unidentified
MKHYVGLDVSLKEVSICVVDADGTVIAEGKVATEPALILSWIEKRAGTVERIVHESGPLSIWLTRELARLGAPVVCIDARAAHKALSARMNKSDRADAEGLAQLARTGWYREVHIKSEASDRLRLLLGARERMNRIRRDIEGHARGVLKTFGIRLGTVTQSRNRASFRDQLRAAASGDPILETVAASLIAVHDVACAEAAAIDDELLAIARDSDLARRLMTVPGVGPIVALGFIATVDDVGRFAKATDVGAYLGLTPRRYQSGEMDYSGRISKRGDSAMRALLYEAASALITRVRRFSPLKSWAVRLAARKGFKKAAVATARKIAVVMLRLWRDGTTFAWTKEEMPA

SEQ ID NO: 440703 - protein, 352 aa, unidentified
MERYVGLDSHARSCTLGVMSAGGRRLKSLVVETNGKALVEAVRGVGGRVHVCLEEGTQSAWLYELLKPHVAEVVVAVAPERKGSKDDQRDAWARANELRTGAIETRVFKAPEHLAGLRNAVRAYGFAVTDVVRAKNRLKSVFLSRGIGTDASVYDAAKRMAWLKQLSSPHRELAEWLGRQLDQLEPLREEAEGLLLRESKKHPIIRKLSTAPGMGPIRTAQVVAFVATPERCRGRRQWWSYSGLGSVTRSSADWVQDRTGKWVRGHHAQTRGLNRKRHPRLKAVFKGAATTVIAQLAEDPLHADYERMLKSGIKPTLAKLTLARKIAATVLSMWKHQEVYDPKRHRPTPEQK

SEQ ID NO: 440704 - protein, 420 aa, unidentified
MTTAETSHSSFAAWIGLDWADQFHLLCLQPASGGPRETVRLSQTPEALDQWAQQLRQRWEGRPVAIALEQSKGAVVYALLKYDFFVLYPVNPLAFSQYRKSFKPSGAKTDATDAALLLNFLLERQGQLRPLQPDNPKTRSLQLLTEGRRQLVDQSTALTNQLTSQLKQCFPQALDWLKKLDSFSACDFLQQWPTLQDLQKAKPKTLTKFFQQHPRRRWGQLEEWQKQIQQAQPLTTDPALLLSATMMIKALEGQLRPLLLALQAYDQKIKELYEQHEDHDIFQSLPGAGPALGPRLLSAFGSDRGRFQCATELQSFSGIAPVTEASGKTCHIHWRTSCPKFLRQTFHEFSAQSIHFSGWAKTYYLQQKANGAGYHAAIRALAYKWIRIIFRCWKDRKPYAEAIYLQSLRIRGSQLIEKLV

SEQ ID NO: 440705 - protein, 344 aa, unidentified
MQITTIGLDLAKHVFQVHGIDAAGQAVVRKSLRRAQILPFFAKLPPCLVGIEACGTSHHWARELMKLGHEVRLMPPAYVKPYVKRGKTDAADAEAVCEAVTRPTMRFVPVKSPEQQAALSMHRTRDLLVKQRTQLINMIRGLLAEFGVDIPKGLERALLMARQIVDGKAPEVPIEAAKIVTTMSQQALDIHVRLREIDRDLAVCLRGNDVARRLMTIPGIGPVGATALAASVTDPRQFRSGRQFAAWLGLTPLQKSSGGKERLGRISKMGDKYLRKLLIVGMTSLVRRAKYTPGKMDPRLADLLARKPTRVATVAMANKTARIIWAIMARGETYRTSHQPALAA

SEQ ID NO: 440706 - protein, 457 aa, unidentified
MAYSTNAPPSAKQGRLITTPTSQVVINALYPSAIGVDVHHDLLVCAYQHLDIEKAEISTELHEFRCTSPRSFVDFAQWCYERTPNVILMESTGVLWRAPYESLEDVGFESEQLALVNARDIKAMVGRKTDKQDAIRLAEYARLGKFRKSFVPPRDIRDQRLIARDFRKCKSDESRHRNRVQKTFNALGLRLSAIFSNFTGKAATTILDAWCDGVDNLKEIVETKGSRLKAGTDAILDMLCKAIPEKVMSHLRKQREHLTYLQKRTDDVMATLREAQQPYQESIDLLTTIPGIKETAARLIFAEIGDDLSSFPDAEHFASWIGVCPGNNESAGHAHRSGTPKGNKYLRTVLIECAQAIGLMRKGVLFQRFQAFAIKKGRLRGVMAMAHLLARIIFSILKSRTPYREVSSTTLRDVNVKKVTAAMTTAIRTAGLTLRDGLLVVEKTGEILVDVEDCARA

SEQ ID NO: 440707 - protein, 426 aa, unidentified
MSERDYSKQVARRQRIGSTTLVVGVDIGCASNAVGFMNKEGKVLGSYPKMLNSREGFEEFVKITEGLKAKHGLTDVIIGLEPTGHYWRKFAYFAKEKGYEVRFVRTTALKHHRELDESCSAKSDKRDALTLTNITREGKYIDTVIEDGRMRHLRILVKVREKIQKRNVSAKNSLHAALDDYFPELKKIFWSMNSRGLWALLERCPFPEDVLTLKVSVLKEMIGRASRRRAEASQKATALYQAAKESIGLRQIGSADRYRLKMCLEEVKRTGLIIKDIEREIKRALKEIPEVEYLLSIPGIGPISAAVFLGELGNLSYFKGARQVVKYAGYDPQESDSGYRISRKFISKKGRWLLRKHLFLMSMRVVVLSRYFQEYYQRKLQTKNRFGQLPRKKEVLCAVAIKLIKVIFALLRDKRNFEDTVACSVE

SEQ ID NO: 440708 - protein, 405 aa, unidentified
MDQNATLNPRVIGLDSHPDTFTAALLRGPTPAAAITEKIFNHLPLAQLAKWAKKNTDAADLFVLEASGNSFQVVRTLAAVDRKALVLESCQMGKLKEAHANNDKISAVRIGKAYLAGTAKTVWVPDPKTQERRDWFHSHRKAVKRTTQVRNRLLSYLSDNGVRLKKGTPLAQAKTAEAQLRQARDWSVRQWQVIEGLLMELRHADEQRTHWRGLIAQEVLADPQLLSLVQLCGIRELVAFALGALIGDIHRFAEPRKLVKYLGLNPAFDESGENKWTGGIQGHGRKDLRSLLIESAQAILRSQSPLAKWGKKLLARKGALNLAVGAVARKLAVAVWYLLMGRWTPLEEIDEKLALKVGKLITSVEAKGLRQLGKTRKAFREEIYESLKAGRVYKLDPNKKFAPAG

SEQ ID NO: 440709 - protein, 428 aa, unidentified
MDQVNHNRLEEFRQLRQEVRHSGEYLIVGIDIAKDRHYAFFGTATGKTLLRRLVFSNDHEGFRKLLDQAEALRVQHGLKKVVYGMEPTANYHKPLGEYLIGLGRTVVLVSGVTVKRNRETLDGRWDKHDVKDSANVADLISQGKCLYYEHPSAELRGLRGLLSLKRRLKKQEHGYKVRIRNHLIAQYFPEMDRDYAQLGAEGLSIVRWCFPASQIVQLDVDPFIERVTSRRIRVEKRRRLEVIWEKAGESIGCDGVPGVEHEAKVMVEGLRQIREMIKETEEKILGLCKQFPAYPYILTIPGFGPDVSAKVLGAIGDPDRFQNGKQVLKMGGLDLSADRSGKDSDKATPVISKRGKADLRYALYQAAFIASTKNRDFMLYYTNKLRGREKEKGIHTKMLVKLSAKMLLIAWTLMKKKEAFDPAYLITE

SEQ ID NO: 440710 - protein, 361 aa, unidentified
MIVIGTDTHKASHTAAALDEGTGRVVAERTVSARRRSFEDLLLWGRGLEADRVWAIEDCRHVSGALERFLIARGERIVRVAPKLTAGARDSARERGKSDSIDAVSIARAAIREGIDKLPVAVLAGPELDIRLLVDHRERLVATRTRLINDLRWNLHDLWPELEIPPRGLIAVHWPQRVAGRLARAEQTTRVRIARDELRRIRELTKTIDELERELALLVAKVAPRLLAERGCGVLIAAKLVGEIAGVNRFATDAKLARIAGSAPIPASSGNANRHRLDRGGNRQINCALHRLAITKGLHDPDTAAYLARKQAEGKSRREALRCLKRYLARRVWQLLQTADTTTPPVITIHCNTPYNNFSLT

SEQ ID NO: 440711 - protein, 335 aa, unidentified
MIVIGVDVHKHELTAVAVDGLGRELSGWSGPLEQALLDWAPAGERLWALEDCRHVSRGLERLLHETGERLVRVPPRLTAPQRGRGRVRGKSDRIDALAVARAALQEPKLDRPRPGEERLRELKLLVDHRDDLVAERRRAQQRLRWHLHELDPTLAVPLGALDRALWLDRLGRRLARYEQTIQVRIARELVARCRALTRSILELERELAQRTQVLAPRLLELAGCGPLGAAKLLCEIGPVERFGSDAQLARHAGVAPLEASSGKQRRHRLDRGGNRQLNCALHRIAVTQGRVHPPARAYLERKQGEGKSRREALRCLKRQLARTVYTTLKSEPSLT

SEQ ID NO: 440712 - protein, 397 aa, unidentified
MIAVGIDVSKSKSTVAILNGDGSIRAKPFDVHHVADELQALVDYIKRTSEPPTILMEPTSHYHYPLLKAFTEAELPVCLINPYQMKKYGDTELRKAKTDKRDSLRIAQYALEKSYSLIPYTPQDQKYEDLRFLSRQYSQRISTLTVAKVQLLSLLDETMPGITTILPLKSRDPDNCVLLRFIKRFKSFDVIRKMGKTRFLDSYQVLVKKTKDRFAGSKGLAIYELVLSSVTTRGENPLSAMTQDQCVDLVSTSQKATDEINLQMRIIAETMPEYKVLRSMAGVGDRLGPIILGEIGDIRRFHSGKALNAYAGNDAPPYQSGQFESRNRHISKRGNPALRKACFEVMQALKLTKPQDDPVYLFLLKKEQEGKPYNVAKMAAVNKFLRIYYARAMELYK

SEQ ID NO: 440713 - protein, 523 aa, unidentified
MALKFKPRNSRKTRSHAIHKPRGVVHPRVQAVGPEHFAFLCVDCAKDRSKMMLADFYGRVLVEPTTVEHDQPGFEAALQLVRDAMTRHGVKDLIVVVERTGRYHGPIQRAFAKAGFEVRVIHPYTTKQYRQPADPDNKTDDTDLSAIHRAAVNGFGVLEHEPNPIFVHLQLLARHRRRFVLKQVVLRQQQLEHLQSYMPGYSRYFTDVFDSEILLWVAKNLGSAAEIVQAGVDGLTQLIRIAKISTHKPTFQKIVAWARSAPSAEEPAALHRRFFIDLDADRSAKVQSIRAIESELAETLSQTPYILLLGVPGINVASAAEFAGEMGPIEHYVKARAITGRAGLRPSRHQSDQVDHHDGPLPQRANHDLRRAALMIADNLVRCNEHFGVLAQGWRAKNADARDIRVRVAGRFCRIAFQMIAGRMTYRHPCSKQRDYILKKLVGFALDHEIDPDQLLRSLDAATVQIPPTDHREEADSLAGELARVQKMRGAGPKAIGQILPAVLAKRGVSLIPSTTSGEADLA

SEQ ID NO: 440714 - protein, 381 aa, unidentified
MQGKVHDDAMAAVYVGIDVCKERLEVYLHPVGERFSVANDAGGWRGLRRRLAKLPVALVVMEPTSKYHRAVHRRLDGAGINVALADPLRARLFAEASGSLAKTDAIDARMLALMGARLALAASPPPPEEIEMLQELVRARASAVTERVALANRLDACTHAVLRRELSRRLRSLDGHLGRIEHLLEQHVASHPGLAARFAILRSIPGIGPVTALELLANEALGRASDKQVTALAGLAPVARDSGAQHSARHIRGGRPDLRKALYMAALAAIRCNPISDASTNASRITASHPRSPSPPSCESCSSSPTASSKTTATGHLGQLDSQHRCSPARGRWHETVFLHAPECIMRCGSCAPYETRRQTCVHHPEAEPRRLDLDAKAAIS

SEQ ID NO: 440715 - protein, 339 aa, unidentified
MQQDVVTVGVDLAKNVFQVHAIGADGKVLVRRQLRRGEVLKLFSSLPPCLVGMEACASAHHWGRELLALGHDVRLMPPAYVKPYVKRGKTDAADAEAICEAVTRPTMRFVAVKSVDQQAVLMLHKTRDLLVRQRTALINALRAHLSEYGIVTSKGPGGVTALMKLLHEGQEKLPVYARSALHTIGAQLRSLASEVDRLETQILAWHRADDTSRRLATIPGIGPITASAIAAAVPDASLFRSGRQFAAWLGLTPRPHSSGGKERLGGISKQGDGYLRKLLVVGATAVMRMARKDASRQPWLARLLERKPVKIATVGLANKTARIAWAVMARKEVYAAAAA

SEQ ID NO: 440716 - protein, 314 aa, unidentified
MAEESEYVGIDVSKAWLDIAVEPVGQYWRTENNLKGISQLVSQLGGLAAKCIVVEATGGYEANLVEHLCQARLPVARVNPGRVRKFAQGLNWLAKTDKLDARLLARFGEQANPRLTELPSGSEKRLAGLVKRRKQVLEMLVSEHNRLENADADVSSYIQASLSMLQKQLDELDQAIGSLIDNSPDLKGKHDLLVTVPGVGQVTASTLTSQLPELGSCDRQEIAALVGLAPFSQDSGKKRGRREIKGGRPAIRSVLYMATLASIRFNPVIRKFYDRLRGYGKEFKVAIVACMRKLLTILNAMIRQHQPWNPELAS

SEQ ID NO: 440717 - protein, 355 aa, unidentified
MFHVGLDIHTKRLSICALDEKGQVVLRSQVRNIQDLVRVLADLPDRFEVCYEASCGYGHFHDLLRPLATRVVVAHPGQLRLIFRSRNKNDRNDAERLAKLLYLGEAPAVHVPSADVRTWRELINCSSQVIAKRTRAKNAARALLRGAGVTPPKHPGLWTKEGLAWLRRLELPTASQQLRRDLLLEEMETLLRQVQRIERQLTQQAQRTPAVVRLRSIPGVGLRTAEAVAAFIDDPHRFPNAKAVGSYFGLVPCQDQSGDRNRLGHITRQGAPVVRQLVAEAAWQARRRSPTVRAYFERAQRDDPQRKKIALVATAHYLVRVMWAMLKRGTDWQEGPALATASGAAAGGDPAPEVD

SEQ ID NO: 440718 - protein, 460 aa, unidentified
MKGKRKRRAQRERAQLQQINLYAAGIDVGSRSHFVAVPADLTSEPVREFASFTGDLHRLADWLVELGIETVAMESTGVYWIPLYEILEVRGLAVVLVDARHVRHVPGRKSDVLDCQWLQQLHSYGLLRGAFRPPEEMVVLRAYLRQRESLIADASDGIRHMQKALRQMNLLLDNVVSDITGVTGLAIIRAILAGERDAQALARLRDRRCRADERTIAGSLEGHYREEHLFALGQAVERYDFCQQQILACEAAIERHLRRLDQAAGDAPPPPAPKKPKGHSKNGLTFDARSILVRLGSVDLTEINGMSESSVLTVLAETSLDLGAWSNEKRFASWLGLSPGSKVSGGKRLSGKTKPSANRAAAAFRMAAYSLANSKCALGAFYRRLKARLGAPKAITATAHKLARIFYQVLKTKTPFVDAGQGHYERQYRDRVTRSLRKRAATLGYQLIPLPLDTSQKATG

SEQ ID NO: 440719 - protein, 342 aa, unidentified
MNEYDGRQFVGIDLHRQRSVIVRQSESGEQLSAVRIVNDPVALGLQLEDAGADPEVVLEATYGWYWAVDVLQAQGAQVHLAHPLGVKGFRYRRVKNDVRDAGDLADLLRMGRLPEAWIAPPATRELRELVRYRAKLVAIRSGLKAQVHAVLAKAGVLIAVSDLFGVGGRQRLAKVPLATAYAQRVRSLLELIDILDGHEARFAALIAKRLDADRGYQAIQQVPGIGPTLAAVFVAEIGDAGRFADPAHLCSWAGLTPRHRESDTVVHRGHITKQGSKLVRWAAIEAVQRHPTTAKIAADKDRIEARRGKNIAKVAAARKLLTLVYYGLRDGHIRALDRDRAA

SEQ ID NO: 440720 - protein, 405 aa, unidentified
MNAVGIDVSKGKSTVTIRRPGDVVIMPPCDIPHTQSAINCLIEQLQNLDGDTKVCMEHTGRYYEPVATWLSDAGIFVSAVNPILIRDFGDDSLRTPKTDKADSKKIARYALDRWAKLKQYGSMDKTRNQLKTMNRQFGFYMDQKTAMKNNLISLLDQAYPGANDFFDSPARSDGSQKWVDFVYTYWHVDCVRGKSLQAFTEHYQKWCKRNGYNFSASKAEKIYQNSSDLIAVFLKDDSTKTLIRQAVTMLNTASQTVEALRLKMDQTASSLPEYPVVMAMNGVGPSLGPQLMAEIGDVTRFTHREALTAFAGVDPGKNDSGKHNQKSVRTSKKGSPSLRKTLFQIMDGLIKRSPIDDPVYAFMDKKRSEGKPYYVYMTAGANKFLRIYYGRVREYLASLGESKES

SEQ ID NO: 440721 - protein, 339 aa, unidentified
MGRFIGVDLHKNMFMVSFFEPGTGEHHLKSYYIKDIVSFKKVLRKDDVVGVESTNNTRYFVDQIRGNVGDVKVINPSQFKVISRSVKKTDENDAKVIAEFLSKDMVPEVRMKDKKTAQINSLANTRDKLVKLRTALKNKIHNILSSHGILLKQESLSSEKALARVLEYPVDSTAHVELEVIVTQIRSLNEGIKKLDKELEDKGRELPGHENITSIKGIGKRSGSILLSVIGDINDFESEKKLDAYFGIVPRVSNSNETERQGHITKHGSKLGRTTLVQCTLIAIKYSPYLRTFYERIKAKKGSGKAIIATSKKLLGIIYMTLKENIIYEDFPNFVIKTT

SEQ ID NO: 440722 - protein, 356 aa, unidentified
MMRRLRKLTQEEPMTVTHYIGFDVHKKHINFCAKTATGEIIDEGRLTAERATLRQWAANQCQPWRGAMEATLFSAWIYDTLKPYGEWLEMAHPAMLKAITAGKKKSDHIDARTIADLVRCNLLPTCYVASSEIRELRRLLRYRNLVVRESVGMQNQIAGLLMETGTPFQKEKLHGKKYFANLLRHLEEVPESVKDRGAMKMFQATQKQLIHRLLANPSLGQRVERLASISGVGEITALTWALEIGDPYRFSSWSKVMSYCGLTAALRSSADKQQRRPISKQGNQWLQTALIEAAKLAPRWNPQLAALHARDLERGHRNRATLAVARKLAAYLLAVDKSGRQFQIHAQETVPLLKTG

SEQ ID NO: 440723 - protein, 342 aa, unidentified
MKITTVGFDLAKNVFQVHGADAHGKAVLRKQLKRKDVRAFFAQLPPCKVGMEACGSAHYWARELQQCGHEVRLIAPQFVKPYVKANKNDAADAAAICEAVSRPDMRFVSVKTPEAQSLLAVHRARQGLVKQRTAQANQIRGLLAEFGIVVGQGLSSLVRRLPEILEDADNGLPGQMRQLLARLSAHLRQLELQVVELDHEIQRWHRTDAASQRLAAIPGVGPLTATALVASFGNARVFHNGRQFAAALGLVPRQHSSGGKPILLGISKRGDVYLRTLLIHGARAVLAKLAAQTRPDPWLTRLCARRHPNIAAVALANKNARIAWALLAHGRIFVPDYRSAAS

SEQ ID NO: 440724 - protein, 290 aa, unidentified
MPSYAALDVSQETTAICVVDDAGRIRAEKKVATCPEAIATYLNRKAPDLVRVGLETGPLAVWLWNELAARRLPILCIDARHANAALKMRPVKTDRNDAAGLAQIMRTGWFKQVRIKSRDSYQVRSLLVAREMLVRIRVKIENEIRGLLRTFGVLFGKRVGGFTGRADEIIAGELDASPEMRLIAETLMKARASILDQIKVLDRRLMAIAKANPTARLFMTVPGVGVITALSVASSFDDASRFSRSSSAGAYLGLTPRRYESGETSRNGRISKQGSVMTRKHLYEKQPQRF

SEQ ID NO: 440725 - protein, 347 aa, unidentified
MEQIIRIGMDTSKHVFQLHGVNAAEQPILRKKMRRKEMVDFFAACPPTVIAIEACGASHHWARLLTTLGHEVKLIAPQFVKPYVKRGKNDAADAEALCEAMSRPTMRFVPAKSTDHQAALMLVGMRERAVAAQTQLANTIRGYAAEFGLTAAQGMSHIPLLLERIMVDESVPDLARDLFASLAKEFAQSGEHLKEVDARLMAWYRNNECCRRLAKIPGVGPIGSVLLVMKAPAPEQFASGRRFAAWMGLTPKDHSTAGKVRLGIITRAGDETLRKTLVVGATSLLRQVRSGRGRNASAWLIELLKRKAPKLVAVALANKIARIAWKMMVTGETYKGNTTRSAQACAV

SEQ ID NO: 440726 - protein, 386 aa, unidentified
MKKNITKKKSAKKAQGKTQEKQIRQLAAKQRLTVGLDLGDRSTRYCILDESGEVVSEGAVPTSKTGLASMFGKMAASRVALEVGTHSPWISRYLVGFGHEVIVANAHKVKLITQSVRKNDRIDARQLARLARVDPQLLSPIRHRGEQVQVDLAMIRARAEMMEARTQLINNARGLVKPMGERLANCDADQVGVKLAEGLPEAARKVVEPLLETVEAVSKQIGRYDEQIAKIAERYPEEKLLEQVYGVGRLIALTYVLTLENAERFAHSRDVGPYLGLTRKLRDSGDSEPELGISKTGDGLLRSLLVQGAHCILRKGAPDSDLREWGLGKAKGGKRAKKRAVVAVARKLAVLLHHLWVTGEVYDPRYNRKLAEAAAAKAQGKAKAAA

SEQ ID NO: 440727 - protein, 313 aa, unidentified
MMATHRIGVDVGKAELWISIDGETAQPCPNELPAIRRWVRGLEGPADFALEATNDYHLALALEAHHQGHRVYLVNGYRLNRYRESIGGRAKTDAGDARLLVRYLQREQDELRPWTPPPEGYRTLQKLLRRRATLVRARVMLEQSLRGVPELQSNLKQLLQEIGRLDAVLQRVLRETVGRAGWSDHARRCQQIEGVGPLTAAGLTMAFQRGAFRSGDAFVAFLGLDVRIRDSGTKRGQRKLTKQGDPELRRLLYLAAMQAKSKATWSDYYQRCLDRGLATTQALNALARKLARVAFALMKNQTDYQPKIPCGET

SEQ ID NO: 440728 - protein, 371 aa, unidentified
MKKSSMFVGLDIHKSSIEIAIADAGRNGEVRSYGGIDGTLDALDKVVRKLVSKGSDLHFVYEAGPCGYEVYRHLTAQGFDCVVVAPSKIPRQSGSRIKNDRRDAQMLARLHRSGELTAVYVPCIEDEAMRDLTRAREDAKAMERNAKQRILAFLLRHGHCYSGKSPWSRAHFRWISILKMPHPAQQIVLQESLDTLAECTRRVDRLTEQIQTLSPQWRLFPVTQALQAMRGVSLIVATTTIAEIGDLTRFKKPTELMSYLGLVPSEHSSGRTTRRGSITKTGNGHVRRVLVEAAWAYRLPARVSRKLLIRQEGVSQEVCAISWKAQLRLCARYKRFTTKGKPHQLVVTAIARELCAFMWAIANEVQGPVKV

SEQ ID NO: 440729 - protein, 377 aa, unidentified
MKRIIRIGMDVHSTNYTLCAMEPILGGEDRIFANIQVTPDYKNIILFIEDLKVKLGLDAKYDILCGYEAGCLGYSLYNQLTAAGIRCEILAPTTMLTPQGIRIKTDARDALMIAQCLAYGGYHAVYVPTEEDDSIKEYLRMRDDHKLALKKIKQQINAFTLRHGVHYSGTKWTATHWKWLKQLELAPMYREVLNEYMASYEEQTAKIERFDLRIEELANQEKYQKKVKKLTCFLGIKTHTALSLIVETGDFERFAKGNTYAAYLGLAPGENSSGEHIQRGGITKAGNSHLRLLLIEAAGGICKGAIGHKSKDLKARQNGNAAEVIAYADRANTRLRSRYYKFIRHGKKRNVAVAAIARELACFVWGMMTDNIEPRMA

SEQ ID NO: 440730 - protein, 395 aa, unidentified
MSKIVHYIGLDVHKETIAVSIAPQDSTEVRRYGIIGGTLDAVDKLLKKLAQEKVELRVVYEAGPCGFVLCRHLRSRGIHCEVIAPSLIPRKASDRVKTDRRDADQLARLYRAGELTAIHVPDQEDEAIRDLVRARTSAMTDQRQARNRLKGFLLRLGFRYSGKSSWNDAHKRYLSALVMPQGPQQIAFKEYIHAINDATDRLERLAQAVEDALPGWKWEPVVRALMSLRGVQVLTAMTLVAEVGDFSRFKDPRSLMHFFGLTPSEHSSSDKRVQGGITRCGNSHCRRVLTEAAWHYRLKPKVSAVIQKRQEGQSKPVRLIAWKAQERLHSRFRKLSAKKKSVVAASAVARELAAFVWAIACEVKPAAQPAAPEIIRTCRGKVYRLDPDKKFQKNK

SEQ ID NO: 440731 - protein, 420 aa, unidentified
MAPLSNQQFKAFVGLDWADTKHDICLQQAGDDRREFDCIPHQVTRIDEWAKALHQRFGGPIAVALELATGPIVSVLQKHAFVTLFPINPAMLAKYREAFKPSRAKDDPTDAELALDLLRRHPERFSPLRPQSAGMRSLLSLIEQRRELVGDKTRFTNRLTNALKQYYPQTLEWFEDIDTVLFCDFLTRWPTLPAVRRASRKTLETFFHVHNCRRAKLVEGRLESIRRAVPLTDDPGIVAPHRLLALMLVAQLRTALAAIDVFDREIAAVARTLPDFDLFDSLPGAGPHLTPRLLAAFGEQRDRFKGADELQKYSGIAPVTERSGKKCWVHWRWQCPTFLRQTFVEWAGQTINKSFWAGAYYRQQRAKGSSYQAAVRALAFKWIRIIYRCWQTGTRYDESIYLNALRKRGSPLLGNLGLPG

SEQ ID NO: 440732 - protein, 388 aa, unidentified
MQTVADRPEAPTAIRTDLGAIFVSLELSRSTWLITSLSPGGGEKMSKQVVRGGDVAELLERFARLREKARARTGKVFPFVVIQEAGLDGFWIDRALQNEGIESHVVDPASIATSRRRRRAKTDGIDGEALVRALLAYKRGEPRVCAMVKAPTPEEEDRRRLCRERKVLIGERVQHVNRVKGLLFSQGISGYEPLRRDRRERLDTLQTGDGRLLPDHLKAQVCRELDRLELLLEQIKAVEAERDALLAAQQVAAPAPAAMLLDIKGIGPEFAAILWSEGLFRHFDNRRQVASYAGLAPTPWQSGSVDREQGVSKTGNPRLRTTLIQLAWLWLRHQPQSALTLWFEERVRRNGGRLKKTTIVALARKLLVALWKYVTAGVVIEGAVMKRT

SEQ ID NO: 440733 - protein, 448 aa, unidentified
MSKGKTKNEKVKRISQLAVINPTAAGIDVSDTEMMVAYPINSEQLEIRVFGCFTRDLHSIAKCLKENGTTTIAMESTGVYWVPLFLLLQEYGFEVYLVNAKHVKNVTGRKDDESDAEWIQKLHSCGLLSASFQPDNMERTLRSMVRHRKNLVRTSSTYINRMQKALELMNIKLHTIISDIDGKTGLLILEAILAGERDPEVLADLRDKRIKASREDIIKSLEGHWTTEHLFELRQCYQLYCQHRKMIDECDKEIEKQLIVQIASKNEGIIPDIPKVKRKASGKHKVQFNLTADLKEILGVDVTEVFGISELSALTILSEVGKDLSKWKTEHHFTSWLGLAPNTKISGGKVISSSIKKKKHHAGQAFRIAANSLYNSKSPLGDYYRRIRAKAGAAKAVVATARKLAIIYYKMVANKEAFNAKALEDYQQKYKEKKINQLKKKLALLEAA

SEQ ID NO: 440734 - protein, 322 aa, unidentified
MSLTVLGIDIAKQKFDVALLADGKIKNKTCKNSVEGFETLSLWLEKQGVQKVRACMEATGNYGEDLAIYLHEAGHAVSMVNPARIKGFAQSELIRTKTDKLDAGLIARFCLAMKPETWIPPAPEIRSLRALVRRVDSLIDMRSQEKNRMGTAHESVIVLIKEHIAYLDQEIEKIRKQIDDLIKRNPQLKQRKDLLDSIPGLGKATIPHLLAELDNLDKFTHVREMVAFIGLAPRETISGSSIKGKPRLCKIGHARLRKALYMPALVSIQCNPVMIAFYNRLKERGKNGKVIVCAIMRKLVHVIFGVLKSGKMYDPNYKTVLA

SEQ ID NO: 440735 - protein, 402 aa, unidentified
MNAVGIDVSKGKSMVAIMRPFGEIVSAPFEIKHTASDIHSLVELINSVEGESRIVMEHTGRYYEVLAHQLSKANLFVSAINPKLIKDFDNDSLRKVKSDKADAVKIARYALDKWQNLKQYNVMDELRNQLKTMNRQFGFYMKHKTAMKNNLIGILDQTYPGVNTYFDSPARSDGSQKWVDFASTYWHVDCVRKMSLNAFIDHYQNWCKRKKYNFSQSKAEEIYGKAKELVPVLPKDAITKLIIKQAVDQLNSASTTVESLRTLMNETASKLPEYPVVMAMKGVGTSLGSQLMAEIGDVSRFTHKGAITAFAGVDPGVNESGSYEQKSVPTSKRGSSDLRKTLFQVMDVLIKTHPQDDPVYQFIDKKRAQGKPYYVYMTAGANKFLRIYYGRVKEYLSSLPES

SEQ ID NO: 440736 - protein, 343 aa, unidentified
MTRVLYVGLDVSLEMTSICVVDAEGGMILEAKAVSDPADIGEVLAGIDGTFERVGFEAGPLSQWLYNGLTSAGLPAVCIEARHAKAAMVAMNRNKNDRNDARSLAQLIRSGWFKAVHVKSTESQEMRTLLMSREFFVNKLRDHENEIRGLLRPFGLKVGRVAARDFEARVRELVEGHPNLELCMSALLRGRAEMQTQLAELHRALLRLTANDELCRRFMTIPGVGPVTALAFKATIDDPGRFRRSSDVGAHLGLTPRQYQSGETDVRGRISRSGDAFTRTALFTAAHVMLTRSRQWTSIRAWGLRIAKRSSLKKAKIAVARKLAVVMHSMWRDDAPFHWGAAA

SEQ ID NO: 440737 - protein, 355 aa, unidentified
MTSTKYIGLDVHKESISIAVLNSAGKVVMECVIETKASTILQFIHGLGGDVHLTFEEGTWAGWLYDLLKPHVTELVVCNPRKNALLKQGSKSDRIDAHKLAELLYMSKLSSVYHGEHGLRMLKELSRSYLTITKDLGRVMNRLKALYRGWAIPCAGTQVYAPHYRSEWLAKIHEAGVRRRAELYYQQLDALRLVRQQARKELLAEARKHRATKLLRQIPGIGPLRAAHLVALMQTPHRFRTKRQLWTYSGLGLETHDSAQYRVVEGQLQRSKKPVTLRGLNDNHNHDLKDIFKGAAMRASTAAGPLRDFYEALLAKGRKPTMARLTLARKIAAITLIVWKKEVRFDANYLKQQAA

SEQ ID NO: 440738 - protein, 362 aa, unidentified
MNQAMNYVGIDVHKQSFQAAIIDETGKLLDEFRLRNNREGIQRFIDMARCHDDFKAVVESSANYWTKLFDVLEENGISVKLSNPYKTKAIAEAKVKTDKVDARTLAQLLRADLVAECYVPSKENREKRGLIRERASLTKIRTEHRNKIHDLLAKYEYRHGFSDLFGKEGMAWLKTLKLSQYDQVILDTNLRLLESFDTEIETLSIEIAKLAINHTDEHQQNQVRLLLGLKGIDYYGAMILLSEIGDIKRFPSPEKLVSWAGLAPRTHQSGETSYNGHITKKGSSRVRWILGQAAQTARLYDPKFKTFYERIASRKGHNKALVATMRKMLVIIWTILTRNEPYSGEDRELTERKIKRLIRISL

SEQ ID NO: 440739 - protein, 376 aa, unidentified
MERGSLMLNTTTFVGLDVHARSIKAVALDAMTGEVRSATFAYDAAAVAEWVRSLDPAAKCVYESGVTGFDLQKRLAALGVDCVVGAVSKMIKPSADRKRKNDRNDAEFLARMLSVGNVVEVWVPDDECEAARDLVRALDDAREDLKRCKQRLSKFLMRHGYAFSETAPTGRRKGNWTAAHWTWIRSISFPEKADGDALAYYVDAVRQAMEDKARLEKLVEAEASKPRWKRRVDSVRCLKGIDVTSAADLVFEAGEFSRFKNARSFAAWLGLTPSEHSSGESVRQGGITKAGNKHLRRVLVESAWHYLGCSPHSKDLAKGQVPDPAARRHAAKGVRRLVERRRAMLERGVHKNKANVATARELACWCWAVGCMVEGA

SEQ ID NO: 440740 - protein, 330 aa, unidentified
MSDPIEVQSAPIKKLQMIGVDVAKQKLDVSVDDNTALTIDNHEESFKNLLKIIPENGSACFVMEATGGYERKLVAFLQAREIAVAVVNPKRVRDYANAMGAYAKNDRIDANMIRHYAQTAYDKKRLQLRESLTEAARRRESLLRRRNQLVGQRSMEKQHLESATDKDTVRSIKRIMKQLDKEIEKIEAMIQTDINADEHLKKSMKQLLQVPGLGDVTVLTLLTQLPELGKLSNKEISALVGLAPYARDSGKKTGRRAIFGGRTQIRSTLYMATLSATRFNKPIRLFYQRLLAQGKLKKVALVACMRKLLTILNSMAKTGSEWNPDFANQA

SEQ ID NO: 440741 - protein, 433 aa, unidentified
MSKRNHLKERLNEKLQAITFSTLVVGIDIAKKNQWARFVDCRGIEHGKALKFGNNKNGFEKILTTIFELCKKDDFTNVVIGMEPTGHYWKPLANYLLKQGLIVVLVNPYHTKKSKELDDNSQTKSDIKDALTIAKLVKDGRYFETYLPHDIYAELRGLTATRTSMLKRLKSIKNTIIAVLDEYFPEYESVFKCIFTGKASRQILKSCPIPSLILELGEDGVLTEIKSAVKKTVGRKKAKQLLEAAQNSIGVDYGESSAVFRIKQYMTELEMIENQLVEVEEEMNVALEKTGLSEYLLSIPGAGVVSMASVLGEMGDPLRFENPRQMSRMAGYNLIEDSSGKNKSGTCISKRGRKNLRCVLYKMALTMVAVNPEMKQLYSYLKTRENNPLKKMPALVVVSKKILTMIFTLSKKKEYYNSEKVFGNVRKEQLRVA

SEQ ID NO: 440742 - protein, 350 aa, unidentified
MVMVGIDAHKETFTAVAVDEVGRRVAERTFKSTSDGCYELVRWASRWPERRFAVEDCRHLTRRLESDLLTAGETLVRVYPRLMAGERRGDRERGKSDPIDALAVARVALREPDLPVARLDGPARELRLLADHRETLVRERTRLQNRLRWHLHELDPEFHIRRRGLRAMSQLDRVAALLATMDGLVAELASDLVERCRELNRKINDLERRLRPLVRQLGPSLLSIPGCGILSAAKILGETAGVDRFPTPAAFARFNGTAPIPVWSSNTERFRLNRGGNRQINHALHMIAVTQLRGVGPGKAYVEKRIASGNTRTEAVRLLRRRLSDAVFAAMRTDHNRSIETVNTSIGQAA

SEQ ID NO: 440743 - protein, 354 aa, unidentified
MMIIGADYHPGFQQIAYVDTETGELQERRLEHPEGAERFYRELAAQGKRVRVGMEASGHARWFERLLAELNVEMWIGDAAEIHRKRERKQKTDRQDAQHILRLLRKDDFPRIWVPSWENRDLRQLMWHRHRMVQARTRMMNQLQAVALNEGLRCKKKLFREAGRKQLQAFRLAPWASRRRQDLLELFARLTPTIAELTQAIEQEVEKCPEAQRLLTHPGVGPLTALAFVLIIERADRFQCGKQIASYLGLVPLEDSSGNRRRLGHITKQGNSLLRFLLVEAGQVTVRSLPEWRSTYVHLTMRRGRKIAKVAMARKLAVRLYWVMRQGWDYEQLKKFGSYAGQPGNRHGVKSNTE

SEQ ID NO: 440744 - protein, 333 aa, unidentified
MVEGTKGSHHKEGSTKMSKHSMICAGIDTGKRKLDVALDERAEQLQVDNTADGHVALLAWLRKYRVERVGIEASGGYEQVVVSHLRRNGLVMIVFQPAQVRAYAKFHLQRAKNDKIDAALIAVCTAAAPKIHAPPDPRLAPFAEHLTLIEQTTEDIACFKTRRESCRDQRIRGVWKQEIGRLKGLLRSELKQLVAAIRQYPDLAERLELIASVDGVGLRTAVAILVRMPEIGRVTREQAAALVGLAPYDDDSGDQVGVRHIAGGRERLRKSLYSATLAAAFHWNAQLIAIYERLIAAGKSHKVALVACARKLLIFVNTVVARGTPWTPKPATI

SEQ ID NO: 440745 - protein, 410 aa, unidentified
MEVILGCCAGLDVHKDSVEACVRHMSAGGKVEHEVRHWGTTTRELVALAEWLGSMGVTHVAMESTGVYWKPIFNILESQFEILLANARHMKNVPGRKTDIRDCQWIAQLLQHGLLKGSFIPPRPQRELRDLTRQRTQLIDEGSRISNRIQKVLEDANVKLGSVASNVVGASGRLMLEAMVAGEDDPARLADLAQRRMRSKIPQLEQALYGKLTEHHRWMLKLLLDQLEATEQFIARLDERIAELARPQQPVLEKLDAIPGVDRRVAEVLMAEIGPDMTPFPSDAHLASWAGISPGNNESAGKKRSGRTTKGSRWLRQALVQAAWAASHKKDSYFQAHARNIMHRRGRKRGLVAVAHSLLTVIYHMLKEGTAYRDLGPQFLDRLRATHLIRFHVRRLRNLGMQVLLTPEAV

SEQ ID NO: 440746 - protein, 311 aa, unidentified
MTILTSQTVVGIDIAKAEVVAYRTDQQTIEVIKNERSTLKRWLKTLPAQSAIALEATNIYHLNTVELAHEMGHQVYVVDAYRVSHYRRGVGQRAKNDPCDARLLARYLTHEQTKLRVWSPPPKAYSSLKSLLHRRATLIRNHTGLMLSWANEPLLKKVRTAQQAAFKQADQAIQKLLRKVSKEAGIDEHIDRCKAIEGVGELTATGLATTFMRGDFANSDAFIAFLGMDLDVDDSGKKKGVRHLTKKGDPEIRRLAYNAAMAACRSSKWKPFYESYLARGFSKTQALVVLARKLCRVAFALMKNQSEYLSA

SEQ ID NO: 440747 - protein, 422 aa, unidentified
MLAESHDEEQIIARVAALDIGKAELVCCVRVPASAGGKRRLQEVTTYSTMTTSLTELANRLVEMRVERVVMEATSSYWKPVFYLLEAHGLDPWLVNARDVKHLPGRPKTDVLDAVWLCKVAERQMLRPSFVPPWPIRRLRDLTRYRTDLVAARTAEKNRVEKLLEDACIKLSVVASDIFGVSGRAMLAALVAGERDPKVLAQLARARMRGKIDRLEQAFDGHFADHHRFLLSRMLSRIEGLDADIAAVDAQIEAQLAPFAEAAARLDEIPGIGPVAAAAIIAEIGVDMSRFPTAGHLCSWAKFAPGVNSSAGKTKGSASSGYGNPYLARVLGEAAVCTTKTDTFLAARYRRIARRRGQPRAVVAVGRSILVVIWHVLHDPESRYQDLGSDHYARHVDPTAKKRNHIRQLEALGYTVTLTPAA

SEQ ID NO: 440748 - protein, 355 aa, unidentified
MNKITRVGVDLAKNVIQVHAVDAAGHVVTNRALKREKFLLWCNQLPAGCLIAMEACSGAHHWCRKLIERGFDARMIPAHSVTAYRIQGRSGKNDANDAAAVCEAASRPHMIYVPPKTLAQQGMLCVHRLREGLKEERTACINRIRGLLAEFGVVLPQSPEALRQHLSDVIEDGSNDIAGMARLVLQRAQEQWREMDAHIKWCDQRITDHQRGDEQVQRAAELMGVGTITASAVVATVGDFKQFKNGAQFGAWLGLTPKQNSSGGKSSLGGISKRGNDYLRTLLIQGAKAITLTRQYDNPIFLWVQKLRERVGWQKAVVALANKNARILWAVMTREKRYDAHHVSVYPLTPTLDPS

SEQ ID NO: 440749 - protein, 418 aa, unidentified
MNTFSSFEFKAIVGIDWSDTKHDICLQPAGSDEREFDRIAHQPKDIERWAHELHQRFGGPIAVVLELAKGPIVSALQQYDFLVLFPINPLMLARYRKAFKPAGAKDDPTDAELAVDLVVRHRDRFQPLRPQSVEMRTLAHLVEKRRRLVGDRRRFANRLISTLKAYYPQPLEWFSHRETLVFSAFITRWPTLKQLKRARRSTLERFFHEHRVRRPRLIEARIQAIREASALTEDPAVIEPHRLEALALAEQLRITIELIRRFDDAIEELAPTLPDYALFASLPAAGVVFTPRLVTAFGEDRDRFHAAAEVQQYAGIAPVTERSGQKCWVHWRWQCPSFVRQTFVEWAAKTIHRSFWAGVYYQQQRQRGATHQKAVRALAFKWIRILYRCWKSRTPYNETIYLQALQRRGSNLVPQQIT

SEQ ID NO: 440750 - protein, 360 aa, unidentified
MPTTMTFAGLDVHARSTHVAALEVASGELKRIRFGPGSEEVIAWLAALPQPVHGCYEAGPTGFALYRAAEQAGLRLDVVAPSKTPRAAGDRIKSDRKDAELLCRLLMAGQLKPVTVPAPAVEAARHLARAREQVRVDLMRCRHRVSKLLLLHGRVYPERSTWTQAHRRWLSRQRFEQPASELAYLDCLAAVDGLVARKQELDERLSRLALEGEWWPTVARLRCFRGIDTLSALVLCLEIGDWQRFARPAQLASWLGLVPSLDQSGESRLQGSITKTGSSYARRLLVEAAWHYLREPRIGVTLRNRQQGQPAHVLQIAWRAQHRLYRLQRRLRERRKPSNVATVAVARELACFLWAAAVAP

SEQ ID NO: 440751 - protein, 352 aa, unidentified
MKYYIGCDAHKKYSVFTAINESGEISPAKRVEHDRNSFRSFLKTLPPASQIAVESTGNWYWLIDEMEKAGHAPSLVHAAKAKLIMGHINKTDKLDAQGLAILARNGTLPAVWIPPGELRDQRELPRMRMALSQVRTKFKNRIHSTFAKYGITFDEVSDLFGKKGRILIEKSLDELPPETRNSVQEQLWLLDQLEQSINKAEKRIREVIKIDHDMQLLLTLPGVGPILTIVIALEIGIVDRFPTGERLSSYAGKVPRVKSSGGKTYYGKVRPDVNRYLKWAFTEAANAVVLQQHRLPDCHVLRLYWRVRKHKGHAKAITAMGRHLAEATYWMLKKNEPYHEPKVKTLVSYNQV

SEQ ID NO: 440752 - protein, 451 aa, unidentified
MSKPQVIDDEEHERVHERVAAIDVAKDSGVVCTRLPHPSRPGARQSTVWTVRARMGAVGKLARQLKNSGIELVTLESTSDYWRIWFFVLEGCGLAVQLVNAAQAKNLPGRPKTDKLDAMWLARLTEMGLLRPSFVPPAAIRDLRDYTRARTRLVQERTRCYQRLEKLLEGALVKLSSVASKLTTESAKDMIKAMIAGQRDPKVLAGLARTRMKAKHDDLVEALDGMFDDHHGELARMLLDQIAFLDERATQLTTRITAAVAAMPAAWGVDGDGTTGPDAGTGPDAAVLPAAARLAEIPGISENLARAIIAETGLDMSRFPTAAHLVSWAGLCPSARQSGPRTRAGKKGQGNGYLRGSLGQAATGAARTDTFLGERYWRIARRRGKAKAQVAVARSILVIIWHLLADPAARFTDLGSGYYQARTDKDRKIKNHIRQIEALLGHPITITPKAA

SEQ ID NO: 440753 - protein, 346 aa, unidentified
MKIMRIGVDLAKNVYQVHGVDRKEKPVWRRQLSRGKWLAAIFEKVEPGSEIGMEACAGAHHWARELQARGYTVKLIAPQFVKPYVKSNKSDRNDAEAICEAMSRPTMRFVSVKSVEQQDIQAMHRIREELVGARTAKSNQIRGLVAEYGVVAPQGLAKLRAAIPQWLEDAENGLTDRFRGLLAGVWADLVELDRRVKELDDEIGALAKSHPVAQRLQQLRGVGPITATALVATLGSGEQFTKGRDFSVSLGLTPKQHSTGGKERLLGISKRGDPYLRKLLVHGARAVISAAKDKDDRLSQWVMRLTSRRHMNVATVALANKTARMAWSMIRNDTDYEPERAASLLG

SEQ ID NO: 440754 - protein, 466 aa, unidentified
MARKQKSNKSKKHKRPIQSLETIQPNAAGIDLGSREHWVAGPPQEDKVPNVERFGTTTPELLRLADWLTQQGVKSVAMESTGVYWIPLFEILDSKGFEVLLANARQVTHVPGRKTDMLDCQWLQLLHACGLLRGSFRPSDDICRLRALFRERNTMVDQRSDWVRRMQKSLDQMNICVHHAVSDITGVTGMRIIRAIVDGERDPQALARMRDRRCRKSEQQIAAELTGNWRSEHLFNLHQALKMYDQLCTVVADYDSEILSYIQTLQPEDNNDTAVPPPSTKAKARGIAKRGQEPLRQALYRFSGFDMTTIDGIGVDTASVVISELGLDYTMFPEEGNFVSYLRLAPNLSISAGKKVPSKSKASTCTRVASALRMAALTLRNSKTALGASYRRVAWRKGASVAVFATARKLAQLIYRLVRYGQAYVDAGAKAYETRFNQRRLKFYTKALNDMGYNVEPLAAAEANSG

SEQ ID NO: 440755 - protein, 340 aa, unidentified
MQAIRFGIDLAKNVFQVHGVDAAGRVVVQRQLRRAQVEKFFAAQPPALIGMEACGSAHHWARTLSALGHDVKLMPPAYVKPYVPRNKNDARDAHGCCEAVSRPDMRFVPIKSVEQQWARALHRTRDLLVRQRTQLANAMRGLLYEMGQTSAKGAAGIETLLRRVEAADEAIPAALLICLVPLAGQWRALDGEIGKLDKQILAQVRQQRAALRLTTIPSVGPIIAHATVAAIGDGRQFASARDFAAWLGLTRKTHDTGGKHRPTGHISRAGDRDLRRLLILGASSWLRQVRAKPDRGSPWIRGLLARRPVKVAVVAQAAKTARIIWAMLQSGQQYRAPAVA

SEQ ID NO: 440756 - protein, 485 aa, unidentified
MAKRNSAPAEPKQSPQRFRQRRARGKAKVQAHQAAEVRRVEGLGIVNAHAAGIDIGSWSHWVCVGEGATQEFPAHTDGLHAIVAHLREQHVTTVAMESTGVYWIPLYELLETEGFEVLLVDPGYTRQVKGRPKTDRLDCQWIYRLHSVGLLAAAFRPDEKTCQLRSYLRQRANLIRYGGQHIQHMQKALEQMNLKLTEIISDITGLTGTQIIRAILRGVRDPHKLAKYRNSHCKASEAEIAQALTGTYRDEHLFALRQAYEAWQFYRKQRDQIDVQIQQQLTRMKPDRALPPLKPQKLAHGRKPNQPGFDVRTALYYVVGIDLTEIEGICETTALTIISEIGPEVSKFATVKHFCSWLGLCPQIKKTGGQIKSSRTRPGANRAAVAFRLAAYGLHASKGALGAFLRRKKAHLGAPKALTAAAHKLARLVYFALKNGMTYVRQTQEAYETKMRENQIKSLKRKARQLGFEMVDKASGEIAEFAKET

SEQ ID NO: 440757 - protein, 354 aa, unidentified
MSQHYALTAGIDLGDRYTHICLLNTENGEVIEESRIPTSQKAFEMRFSSTAPMRIAIETGTHSPWVSRLLEERGHEVLVANARKVHLIYGAGHKNDKIDAEKLARLARLDPKLLSPIKHRGEDSQAHLALLRSRDALVGARTKLVNHVRGAVKSFGGRLPKCTAENFHNKVGEHLPWELASALEPILGTIASLTERIREYDRRLENVAEEVYPETKLLRQVHGVGVLTALAFVLTLEDPSRFAKSREVGAYLGLVPATDQSGGSDPEKRISKHGNKMMRRLLVGSAHYILGPFGEDSDLRRHGEKIAGRGGKNAKKRAVVAVARKLSVLLHRLWVTAEVYEPLYNGSRREGQAA

SEQ ID NO: 440758 - protein, 336 aa, unidentified
MRYIGVDLHTTQITVCYLTAKDDISIKKYQLCEIEKFVSSLCSTDEIAVEATCNTRWFREQVEEKVRRVCLVNPREFEVVKNSVKKTDERDAINLARFLRADLLPEVRAKGKEAERVQSLVNTRTKLVRLKTSLINKIHALYISNGWKLKKASLASEKGLKKVWSESWSEMERLELEIIIEQIRSLKVSIKKLEKAIDGEAEKLAGFENLQTISGIGSLSAGILLAVIGNIKDFETADKLASYFGIVPRVSNSNETVHHGRITKKGNKTGRTTLVQCSLSAIKKNEYLKKYYDGVKARRGHGKAKIALARKYLGIIYNTLTNNWVFADFNNFELAE

SEQ ID NO: 440759 - protein, 427 aa, unidentified
MNKNEVIRYENFCQFKAKIRLSRDYLIVGIDVAKDRHHAFFGTAAGRTLLRRLIFDNNQAGFKQLMTRASQLQIAHGLSKVVYGLEPTGNYHKPLSSWLLEQDQMLILVSSKAISDNRQTLDGRWDKNDTKDSANVADLLAQGKCQFFEMPETRLVQLRNLLSLRRRLKKDEHAVRMQIRNGLVTKYFPELDRHWGSSLAENLAIVRWCLDPRKITAMGFEEFVRQVTRRDRGIRQQNRLRRIFEAAAVSIGCPMDEAAHFEARLLSERFEKISEKIDQTEAEIKNHCDSFPAYRRLLTIPGFGPYVSSIVLARIGDPHRFIGRRQVIRLGGLDLNANRSGKRSNAAVPVISKRGNSELRYALYQAAQIATYHNDRFRALFTRHLKGRENERGIKTKMRVKLAAKMLVIAWTMMKTDTDFDPLLIKA

SEQ ID NO: 440760 - protein, 337 aa, unidentified
MDYFAGLDISMDETHVCVLDREGAVVHQSKTASTAAAIAVELAKAPTCRRIVFETGRMAPILFHGLSQLGLPVVCVESRQAYQALKSLATHKTDRNDARGLAHLARTGFFKPVHVKSLSAHALRSLIIARKKLVGQRVTLENQIRGLAVVFGIRLPRALTAAFVDQALKASEGVAGLSAAMRGLIAARTAVMTAVAAIDADMRRMTRASAACRRLMTIPGVGQLTALAFVAAIDDPSRIRRSRDVGAYLGLVPRRYQSGEVDYVGSISKCGDRRVRTLLYEAANVMLTRYKGQLKLKDWAFAIAMRSTMRKAKVALARRLAIIMHAMLRDGTEFAST

SEQ ID NO: 440761 - protein, 349 aa, unidentified
MGKNRCAVCVADEKGEILRKLIYMNTRGGIEELAENLSRYGECRAVLESTGNLWLKTYEILEAHSVPVKLANPLQTKVIAQARIKTDKLSARILTHLLRTSLIPECYIPPKETRERRSLLRYRSELVKDRTRIRNEVHSLLDKYDLRCEHKDLFCVGGMRWLEEVELPSEDQAILESQIRRLRGLQREVEAVDSRIASKASMDEEVRLLMTMTGVSHYGALLIASEIGDVTRFQSPEKLVSWAGLCPSLHQSGESTHYCKIKSGGNKHVRWLMVEAAKSASSHDPEMRTLYERTRQRHGSQNAVVRVANKMLRVVWYMLTRREPYRQGKEVLYKNKLMRMEKLASSRLA

SEQ ID NO: 440762 - protein, 356 aa, unidentified
MSTIVSQTHSFVIGVDTHARTHTYAVLTAAGQHLGTETFPNTAAGRSRAIAWAGRRTGGVADALWVIEGAGSYGAQLAGNVADTGSRVVEAARMGRRGIGKSDPLDARRIAAAVLSLPVNQLRTPRQDEGVREAAQILLTARDGLAGERTRAVNALTALLRIINLGIDARRPLGARKIAEVARLHTREEALAATTARTEAMRQAKRILVLDTELGQNMTRISDLVAASPAAELPDKTGIGPVTAARTLVAWSHPGRVKSEAAFAAIAGVNPIPASSGNTTRHRLNRGGDRQLNRASNIIAMVRMVHDPGTHDYVERRRSEGKTDREIRRILKRYLARSIYRHLNTKSNTKLGVDEI

SEQ ID NO: 440763 - protein, 382 aa, unidentified
MQASTVDTPTAGHCGTIFVAIELSQKTWLVTLHSPDRDRISRRTLEGGDDAGLLALLEGVRTRVAGKLGTAPKVVTCYEAGYDGFWLHRLLTAAGITNLVFDPASIAVEQRSRRAKTDRIDGELLLRTLMAHLRGEPRVVRIVRVPSVEQEDVRRASRERDRLVKEQTGHTNRIKALLRLMGMAVNNPRRSDWLSWLAQQRDRQSRPVPPHLMFEVAREHARLMLVREQLAALEQAPTAAVAAAPAPMAERRNLLLRLKGLGAVFAATLTNEVFYKDFHNRREVASYCGLTPSPWRSGGIDREQGISKAGNPRARLKAVELAWLWLRHQPDSALSRWFAARTANAGKRARRIAIIALARKLIVALWRYLTTGLVPEQAVMKA

SEQ ID NO: 440764 - protein, 468 aa, unidentified
MRKSDPSSKRDAGASSQRRRASLPRSLKAVNLDAAGIDIGSTFHFVAVPEGRADPAVRQFGCLTPDLHEMGKWLKHCGIVSVALESTGVYWIPVLQILEQYGIEAKLVDAYHVKNVPGRKSDVQDCQWLQRLHMYGLLRAAFVPEQPIAVLRSYWRHRVGLVEAAARQIQLMQKSLEMMNLQLHKVLSDISGLSGMKIIRAILVGERDPAVLARMKHRMVKSSEETIAKALTGDWREEHLFTLRQALELYDVYQDKIVQCDWQIEQYMTRFAIKADPADLAAKPTKKNKRGKNEPRFDLRSHLYQISGVDLTLIDGIDVMTAQTLISECGFDMSRFPSERHFSSWMGLCPNNKITGGKVFGRRSRKVHNRVATALRVAAQSLHRSSTALGAFYRRMRARLGAPKAITATAHKLATLVYRMLKFGENYVDKGQEYYERQYQERVVRSLQRRAKEMGFTLAPLATTTEVS

SEQ ID NO: 440765 - protein, 339 aa, unidentified
MKKFYVGIDISKSKLDVAVYDAEKKKIANKFVIKNEADGIQSLFSTLKKEKINLEDCWFCFEHTGHYGFSLCYELEQICCVYSIIPALQIKLSLGMTRGKNDQVDAERIAMFAYTFRDKLQPSKMSSGCFQKIKQLLTYRNQMVRISTQLQNSLKSHQAVCQLTHFDYVVDEIKKQIIEVKVKIESIDELLMSEIKRDKTLENNFNLLKTIKGIGPIISIYLLVLTQNFESFTDARKFNCYAGIAPFEHSSGSSIRGKTKTSSLRNKTIKSLLFNGANAAALHDKEIKNYYKRKKEEGKHHQSVMNAIACKLVYRAFSVIKRQSPYVTLYAQNFKKNLV

SEQ ID NO: 440766 - protein, 349 aa, unidentified
MRLYQPQPQTRFYCGVDLHARSMYTHVLDHTGKTLLDRDLPADPHAFLDAVKPYRDGLVVGAECMFAWYWLADLCEDQHIAFVLGHALYMKMIHGGKAKTDKIDAAKLAALLKGGLFPLAYVYPRAKRQTRDLLRRRSHFVRQRGQLIAHIQNTNSQFNLPPFAKKLTYKGNRTDDLADRFADPSTKLSVSANLALIGNYDEQIRTIETHLVKSAKVDDAVTFQLLRTIPGIGPILGLVLLYEVDRIDRFPEAGNFLSYSRLVRCTHESAGKKKGSGNPKIGNAHLKWAFSEAACLMVRSVPAVKMWLARREKKHGKRKALAVLEAKIGRCVYHLWRKQQPFDAKKFLA

SEQ ID NO: 440767 - protein, 315 aa, unidentified
MHEQFANDKAGYRKFLKWVKVNSHGVDMSLWLFCGENTGDYSKGLANFLYGKGCDMWLENAKCIKDSCGIRRLKSDRADAAMIAEYAMRNHDRMTLYEPLSGPLAQLRELFLFRQMNVRKRSGYIVRKGEKGRTLDSSPAKSFMARKCKHMIAELDKTIKECDKMIEALIASDRDLQETYEIVTSVPGIGAQNAVCMMVYTDNFKRFDCNPRKIACYYGIAPFGHDSGTSVHCDPHVHYMANKTIKGILTQAALCAINHCPPVAHYYARLIERGKKTMVALNNVKNKLVRIVTALVRTKQKFIPEYEFAKRYAMD

SEQ ID NO: 440768 - protein, 338 aa, unidentified
MKVTTVGLDLAKSVFTLQGVDEHGRAVLRKTVRRAKLLELFAQLPPCVVGMEACSGAQHWARELRKLGHEPRIMAAEFVEPYRHGGKNDTNDAAAICEAVSRPKMRFVALKSVEQQAVLAVHRLRQGLVEERTALANRLRGLLTEYGVVVGVGLDRLRRALPEILADGANGIPGIAREVFADAGQQLRELDARIAAYDRRLAALARASEPAQRLMKIEGVGPVTATALVASVGDARVFNNGRQFAAWLGLTPRQHSTGGKQRLGAMTKHGDVYLRTLLIHGARAVLRVTAHRSDAKSRWAESLRRRRPDNVAAVALAAKHARIIWALLARAQDYQPAA

SEQ ID NO: 440769 - protein, 346 aa, unidentified
MNNSLVAFNPCGIEVSHLILVVALRAHDHEEALREFPNTAEGHQAVLRFLDRSVRPVRVAMESTGLYGLDLALCLHHAGVAVMVANPRAVRHFAQAMMQRSKNDQLDAAVLREFAARMPFVAWRPPSLGALKLVAVARRLEALTDMMAAEKNRRHAASLSAALPAIIRRDVERSIQTQQRAIERLTRAAQEFVLDDPELARRYQLLLSIPGVGATSALHLLAELTLLPAGMDVRQWVAYAGLDPREYTSGTSVHKKVRISKAGNLHLRRALYMPALVAVRHDPHLRGFYEHLVARGKTKMQALVATMRKLLHAIFGMFKHDQPFDGTKVYALAPAPTFAALEVACA

SEQ ID NO: 440770 - protein, 351 aa, unidentified
MMIIGVDYHPSFQTIAFLMEETGECGEQELNHSGGEAEKFYRDLKERGICVRVGMEATGYSRWFERLLAELGFELWIGDPAQIKAKRVKKQKYDREDARLLLRLMRENNFPQIWVPSAENRDLRQLLWHRHRLVQMRTRMMNQLQALAMNENKCWKKKLWSERGRAEFEKLPLGFWASRRRQELLELLDRMNPKIDELTTAVEREAKKRPDAVRLMTHPGVGPLTALAYVLIIGTPERFPRGKQIGTYVGMIPSEESSAGKQRLGHISKQGSSLLRFLLVEAAQAAARIHPDWKRRYIHLAMRRHKNIAKVAMGRRMAIQLYWMWRNGCEYSQSVKCGSYVGQLGTGHGVK

SEQ ID NO: 440771 - protein, 356 aa, unidentified
MKSFEDIKNFVASKMVYCGIDIHKHHWNLCFFCDGIIVEKLTIDSDFHLLLRHTQRFYSSAQKIHFVYEAGFSGFHLQRQLAGRNYDCTITPPNRVPQSHDKVKTDKRDANKLAQFLASGLLKKVYVPPLSVEADRQILRLRKSCQQKLTRVKNQIKSYLNLHGCYSYPVNGSKWSKNYISWLESLEFELPTQRFVLQEYLKEFYYFQNRIAELTCRLREMAEQKAYQKNYKRLVACKGIGLITAMTFLLEVHDFHRFPSAEKFTSYLGLTPSQFSSGDHVRLGHITREGNSHVRCALVESTWTVIRHDPFLCDKYNRIRAKGTNGKKAIVATARSLAVRLRRCLLDDADYVVGVA

SEQ ID NO: 440772 - protein, 368 aa, unidentified
MDKDTVVAVDIAKTIFEVAVSREPGRVAERRRLSRGTFLIFFAQMPAATVVMEACGSAHSWARKLQELGHKVILLPPHQVRPYVTRNKTDRTDAKGILEAYRNADIRPVPVKSVSQQVLVTLHRFRSAWMAERTAQINTVRGLLRELGFVIPLGMEKVLPQVRALVEDADSEVPDALRGVLFEACEEIRTLGERIKKTERQLEALAEQTPVVERLRSVPGIGLLTSTAQVTFVGQILRFPSGRHYASHFGLTPREFSSGAKRRLGRISKRGDAYIRMLLIHGARSVLCHAKKEQEHDRLRAWALALERRVGHNKAAVALANKLARIAWAVWKNDPPSSRCPWPLRRRPPQEERRNQGFAHPGTAQSIA

SEQ ID NO: 440773 - protein, 346 aa, unidentified
MDQIIRIGMDTSKHFFQLHGVDGAERPVLRRKLRRNEVLAFFAKLPPTVIGMEACGAAHYWGRELRKLGHEVRLIAPQHVKAYIKRNKNDGRDAEGLCEAMSRPTMQFVPVKTEEQQAALMLAGVREQMIARRTQLSNAIRGYAAELGITAAQGLNQIEPLLARLAQDNNVPKLARDLFALQGRDYAQLQMELKAIEARLLAWHRANADSRRVAKIPGIGPVGATTLVMKTTNPRAFPSARHFAAWIGLTPKDHSTAGKTRLGKITRAGDERLRSVLVAGATAVIKQAKNGRGRPSPWLLALLARKPPKLAAVALANKNARIAWKLMVTGESYDGARMPDASALAA

SEQ ID NO: 440774 - protein, 332 aa, unidentified
MALTAWLGIDVAKQKFDVALNWNTRRRAKVFRNDAEGWQALLRWLKDLGIDQVHACLEATGRYGDDLALHLHDAGHRVSVVNPAQIKHFGRAKLGRNKTDRADAALICDYCRLFEPAAWTPPSAALRQLRDLVRTREALTASRVEWTNRRNSGQGSAAADAAMAGVIAQLEAEIVALDQAIEDAIGQNEDLRARHDLLISVPGIATHTAAVILSEMPGPEVLRTAREAAAYAGLNPSHRQSGSSLDGPSRISRIGNATLRAALYFPALAAIRWNPLVAALRQRLKDQGRLKPKQIVGAAMRKLLHLCFGVLKTGKPFDPNHASATDKTAATT

SEQ ID NO: 440775 - protein, 361 aa, unidentified
MDATTVAVDLAKSVFQLAVADSSWRVIENHRLTRIQFERWFANRNVSLVIIEACGSAHHWARWLNSLGIEVRLLPAAYIRAYVRRNKTDAADARALLEAARTADIDPVRVKSVEQQALQGLHRIRSLWMSTRTSRINALRGFCREFGLSIPQGARTGVEAISRVLADPRSPVPALIRETMRLLIEEIRLLEQRIAQLEREFTALVRQSPACTQLMSVPGIGLLTATAMVAATGGDVTHFRDARHFASWFGLTPKEYSSGSTRKLGRISKRGDRYLRMLLTHGARAVLRAAALARDASRPLDGLRTWATEVQRRSNHNKAACALANKLARICYAVLRDHAAYGNPQPRPNKKLERTAFAIAA

SEQ ID NO: 440776 - protein, 338 aa, unidentified
MVVIGIDPHKGSHTAVAIDEDEHKLDEVRVRADRRQLERLTSWALAFPERSWAIESANGLGALLSQQLVGVGEEVFDVPPTLSARVRVLASGRSQKNDPNDAFSVAVAALRSPRLRSVVTEDHVAVLRLLWNRHKNLTSLHTQAVCRLHALLAGIVPGGTRRRLSADKAAAVLSGFRAKTAVEKARRDQAQILVGDVRRLDAQLKASNRTIAEAVAHVPTTLEELSGVGPVSTCIILAHTGDIRRFANEDNYASYNGTAPIEASSGPKKRHRLNPRGNRQLNHAIHIIAFSQPSHAGPGRDYYERKLAEGKTQKEAVRSLKRRISDVVYRQLVRDAQR

SEQ ID NO: 440777 - protein, 344 aa, unidentified
MEAHVSVVGLDIAKSVFQVHGADAAGKAVIRRRLKREEVEAFFRKLPPALVALEACPGSHFWARLLRDIGHDVRLLPAQYVRPYVKTNKSDAADAEAICEAVTRPTMRFVPIKEEMQQEVLVLHRVREMLIRQRTQLINSIRGHLAEFGIIAPNRAHNIGLLTKLIEDEEFDELPAVARHALRYLVEQLREAKTKLFRIDQDLMRIVKGSDACRRLMTIPGVGVVTATALVSSMREPSDFKSGRHFAAWLGLVPRQHSTGGKENLVGISKRGDGYLRRLLIHGSRSIMRWRSRSWVWLSKLRDRRPANVAAVAIANKTARVVWALLMFGGTYGHPGKGATMRAA

SEQ ID NO: 440778 - protein, 418 aa, unidentified
MGIDWGSQQHQLCVLDDVGQVVRECAVPHRAAGLRQLVDWLRELTAGDLRRVAVAIETPRGAVVEALVDAGAHVYHLNPKQLDRFRDRHSVAGAKDDRRDAFVLACSLRTDLPCFRRIDPEDPLIVELREASRLDSRLLAQHTALANQLGAQLHRYWPQLLELAPGADEPWLWDLLARAAHPYSARRLTRAKLAKLLREHRIRRFDAEQLVAVLRQPPLPVAAGTLEAATMNIELLVPQLQLICRQRRQTAARLKRLLAQLSAAATADPEQPPQHRDAEILLSMPGVGKLVAATVLGEAAGPIARRDYQLLRALTGIAPVTRASGKSRHVAMRRACNQRLRNAVYHWALNSLQNDDASHLRYQALRHRGKTHGHALRMLADGHLRTLTAMLRDGTLHRSRNLVAPPSPTATQDEHVAA

SEQ ID NO: 440779 - protein, 376 aa, unidentified
MNYVGVDIHKKYSVLCALDGSGRKLREARVEGNEASGFARFFGSLDGPSKAVVEACWNWGLIHDELEEIDSVEEVVLAHPHKTRLIADAQIKTDRLDAHALGTLLRGNLVARAHVPSRATRARKNLLRQRLYWARLRTMLRNRIHALLDRQRDLELPQCSDIFGARGLSFLRALELSEPDATLLREQLALHDLIAQQMKAQEKRITAEFTQERMHRRLKSVPGIGVTLAAVIACEIDDISRFSRAEKLCAYAGVVPTTRSSGGKTMHGSLLYFCNKWLRWALIEASWVAIGCSPYFGTLYKQHRARGKKANTAILIVARRMCRIIWQLLREKRDFEKRSLSPKLYSFPGCSALALTVNSGLCAVTRVSGQDGEPGI

SEQ ID NO: 440780 - protein, 340 aa, unidentified
MTTSLYCGIDLHSNNSVVSIQDKSSKQVYEKRLPNDLQIIVSALKPYRQALQGCVVESTYNWYWLVDGLMDAGHQVHLANPAAIEQYNGIKYTNDFTDARFLAHLLSLDILPTGYIYPKETRGIRDVLRRRLLLVDQRASQRTSLQSLLARHTGKRLSEAQLKALDSKSLQHLLPIPGASLSAEISLSIIQSMTILIEQLERAVSTHCVTQNNYQLLTSIGGVGKILGATIALETGDIQRFPDAGHYLSYARCVNTQKISNGKNKGRGNRKNGNRYLALAFMQAAHLAAIWEPKIKRFYQKKQAKAHIMVAKKAVAGKLARAIYHMLNRQEPFDVERAFG

SEQ ID NO: 440781 - protein, 453 aa, unidentified
MSKGSGLSRGDRNRNARLARLRELVPLSNAIVGIDLADDTQAVVVADHDSRVIARRRVSARAWELGEVLDWALTWATGAGFASVTVACEPTGHRWRVLDQLAAGRGLALVCVQPLLVYRARESEDLTRDKSDPKDAVLIARLASELRCYEPERASAVWARLRHLGARRSQLTTGATAAVNQIRDLLECAWPAVLAASGSPFRSVSWCASLAVVLDRCAGDLSRVRRLGLNRFTAAVRRELPRWGGIRPCLRIIRAVFAALADPAGVTAHRPGALERAHLALGDWRDIRARLADTETRMCAVMEELGLADLVTTIAGLTVIGAAAILAETGDPARFATARALVKHAGLCPRDNASGAAQGKTSISGRGRPGLRLAAWRAVWAAMPNNPVMAARFGYLTTRQDNRLARQQARTACAAALLRWIHVVITRHVAWDPAIAAGASPARRTRPALSTNS

SEQ ID NO: 440782 - protein, 406 aa, unidentified
MDITPIHKRVIGLDIHQNKISACAIAEQAEGTVTVEHREFGGFKRDRKALAQWASAFAPDVVVMESTGIYWKSPYAALEQVGIAAWVVNARHVKTVPGRKTDVADAQWLATLARAGLVRASFIPPADVRHLRLIARQRQKLGGMLASEKNRLHKLLADAGVRLNVLVSDIHGQAGRAMVKALIAGRPMGEILDCAGRLRATRAELFEALQPEELSAKHLFVLAQVIAHIEFLEAMMARFEQTLLDGLQAWQPQLRLLQTIPGIDAMGAAMLLVEIGPEMASFGSAQRLASWVGICPGNNESAGKRKSGKTRKGNAWVRRLLCEFAQAAARSRCALKDKFAALAIRKGHKKSIVALAHKMLRIIYAMLTAGTPYHDRTVDYEALVVQRNAPRWIKMLAKHGYLPANA

SEQ ID NO: 440783 - protein, 399 aa, unidentified
MSALRRVVIGADTHLDTNHLAVLTDTGKPLADAEFPTSPAGYDDAVRWAQSFGVIAIAGVEGTSSYGAGLTRVLQAAGIEVAEVSRPDRAARGRRGKSDPLDAYAAARAALAGDRLAVPKDEHTTALRALLSARRSAVKAHTAATNQLHALLVTAPAELRERYRRHHITALVAALAQCRPATQGDPTSAAVLTAAKALAQRVKFLEQQRQDLTAQLDGLVGQINPALRAAYGVGPHTAAQLLVTAGTNPHRLRSEASFAALCGAAPVPASSGTITRHRLSRGGDRAANNALYRIALVRMSSHSQTRDYVERQVTKGRTKKEILRLLKRAIAREVFRLLTRPGPVDDYRDLRAARQAKNLTLAAVAQHFGVPIITISRLERGHQRNDTLANHYRQWLTAA

SEQ ID NO: 440784 - protein, 386 aa, unidentified
MQASTLCTPTKDHIGTIFVAIELSQRSWLVTIHAPDRDRMSRHKLAGGDHIGLLALIGKVRMRAEQKLGAAPAVVSCYEAGYDGFWLHRCLTAAGITNFVFDPASIAVDQRARRAKTDRIDGELAIRTLMAHWRGEPRVVRSVHVPSAEQEDARRQTRERQRLITEQTAHTNRMKALLRLIGMPVGNPRRRDWLIWLERQRDWQGQPVPPQLMAELKHEHARLMLLRDQIEVLSEAAAGVELSAAAAQMTQRCALLRRLKGVGPVFAATLTNEVFYKDFRNRREVAGYIGLAPSPWRSGGTDREQGISKSGNPRARHKAIELAWLWLQHQPESALSRWFLERTLNASKRFRRIAIVALARKLIVALWRYLTAGLVPQGAIFNMCNG

SEQ ID NO: 440785 - protein, 335 aa, unidentified
MKNYLFHLGIDISKLKLDVVVICSETPNLSDHFVVENTPKGVKEIIKYLLKKKIDIGATLFCCENTGVYAAPLSIYLNEKKYDYWVVPAIEIKRSKGISRGKNDKSDAKDIAFYSMRNITKIKLSTVAEVDIQQLKLLHSEREKVVKTISLFNSFSENNGHLPVVVCKTVAGINAKILKNTKLALKEIDLKIKEIICKDLLLKQKFDLAKSVPGVGEQTAIYLLITTKGFTAFADARKFACYSAVAPFEYSSGSSVRGRTKVNHMADKKMKSLLQMCALTAIKYDLQLKAYYQKKKAEGKNSMLVLNNIKNKIISRVFCEVNRKAPFVNTYSFAS

SEQ ID NO: 440786 - protein, 362 aa, unidentified
MTKNNRLGSGMTSKMTIGLDLGDRHSYFCTLDGAGENIESGRVQTTKSTLEKRFRNCEAARVVIEAGTHSPWVSRLLADCGHEVLVANPRKLALITQNDSKDDPVDAELLARLGRVDPQLLSPIEHRGRQAQADLAVIRARDAVVAARTQLVNHVRGAVKSLGSRMASCSTRSFAKKAASQLPEDLRLALEPLLEVIAAMTQQINGYDRQIEDTCREKYPETELLRQVTGVGAVTSLTFVLTLENPHRFARSRSVGSFLGLRPGKDKSGAQDPELHITKGGDRLLRRLLVGSAQYILGPFGPDCDLRRWGLKLASRGRKSAKKRAVVAVARKLAVLLHRLWAGSEVYEPLHLAQPTALSVQA

SEQ ID NO: 440787 - protein, 394 aa, unidentified
MPDSIFKTTGTNLRDVLGSHDLGEILYTSIDVAKYNHSAMVVNFFGDVIIPKFDFPYNHHGINFLKKKMQIAQKQTRAKKLFLGLESTGHYHENLVASLTASGYDVQVIRPIDSGPAPGCDRGNERDNVHAKSDAIDLAAIAKVIISNKGTRSHMPEPVYYNLQRASRTHGQLTHQETRTKNIITFVLDKTFTGLWNPKDSIFSDKWGKASLLFVENYSTPQQATRLGVKRLADFFRKHDTKLGIDTAKKIIQLANITPARPLEVMESDIMALKAHIQVLRTLTSTILDQKKQMVKFLIQTPGIYLLSVPGIGIVYASDFTAEVGDIHRFAHARQITSLAGTAPRKHQSGEVDKTNLSTSHKGKNYLRMTVYASPQSQDQKLAKLRWIINPLNL

SEQ ID NO: 440788 - protein, 357 aa, unidentified
MTLKHTQADFRGQHIFVGLDIGKKSWKTSIMTEELEHKTFTQVPHVEVLVNYLHRTFPGATYHCVYEAGFCGFWIYEQLTRYNIDCIVVNPADVPTKHRERAFKSNRVDARKLARSLRNGDLDPLYIPSRAAQEDRTLVRTRQSLVNEQTRCKNQIKSMLSYYGVALPEGITDKHWSKRYLTFLEQITMERASGDHALKLHLAKLSSVRLLLADVTTTIRRLAEDERYQSSVQYLISVPGVSTLTAMILLTELIDINRFHSLDDLACYCGLVPGEHSTGEEDTITTITSRRNPFLRRVLIESAWVAARKDPALLASFTLLSKRMPKNQAIVRIARKLLNRIRFVLKQQQYYHTSIAA

SEQ ID NO: 440789 - protein, 415 aa, unidentified
MKVVFPTCCGVDVHKTFVVATIITTPADSVQPHYQKKRFSTFNSDLNRFADWLLEHNCLDVCMESTGKYWVPVFNILEKRGIRVVIANPKWVKAVKGNKDDTKDSKWIGDLFRIGLVKSSFIPELNIRILREFLRYRYKLVSMKSSEKNRFQNAFTVCNVALDSVVSDMFGKSATAITDYLTSDESFDPDHCVSLLQRSLKKKAEKVLESIEGYSISDEQKARIKIIREHYDFVEKLIAKVDTCVNEMVEKYEGEINLLCTIPGIDRNSAITIISEIGADMSQFGSSKRLCCWAGLTPGNNESAGKKKSVRISRAGVYLKPALVQVAHAAVKDKANPYYALKYERIAKRRGKKRAIIAIARMILTAIYKMLCTGEVWNPVDLFKIDMPEHLKEQQLAKAIKQATRFLEKQGLTVA

SEQ ID NO: 440790 - protein, 366 aa, unidentified
MAITHVALDDSKRVIVAGILRPEATQPELREIPNDPRHIRRLFERLLHAGPVHACYEAGVSGYDLYRQLTALGVNCVVVAPALTPRRPGERVKTDRRDAAKLVRLFRAGELTTIHVPTEDQEGLRDLTRCRDDVRADVIRWRHRVLKLLARHGRVYHAGKNWSQAHWSWIRAQHFADAALARTLEASLEALDQALRRRAELDQAIETFAAEPAYRTAVGALRCFRGISTLSAMILVTEIVDFQRFHRPRALMGYLGLVPSEYSSGERQRRGALTKAGNAHARRVLVEAAWHYRHRPALSARLARHTVDQPPAVVSEAWRAQQRLHRRYRHLVGHGKRPTVAVVAVARELAGFVWAAMTHDAKLAAA

SEQ ID NO: 440791 - protein, 349 aa, unidentified
MILVGCDLHARDQQVAVLDTATGEIQEQRLTHDGPSVEQFYAALPGPVTVGIESTGYALWFHALLHRLGHEVIVGDAAKIRAMVVRKTKTDRRDAAHLLDLLRHDRFPIVWLPDPAVRDQRTLVAHRMRLVRMRTMVKNGVHAIALNYRLALGPSLFTRAGVAQLQALSLPPHTSCRRSESLELLRWLDTHIKGLDDQIEEAAHAHPEAQRLMTHPGVGPLSALATVLVLGSVIRFPTSKHVVSYVGLAPAIESSAGKHRLGRITKQGNALLRYVLGQAGQAAIKRDPDLRRLYYAVLHRRGRSRAKIAVARKLLVRLYVMLRDQIDYQTFLYRAPAAARRKELMPTTP

SEQ ID NO: 440792 - protein, 441 aa, unidentified
MAKIINPMAAGIDISSKDYYVAVPEEVSKNDVVVFGSFTEDLHKLAKWLKECKVDTVAMESTGIYWYELYTVLLDYEIEVYLVNAKHVKNVPGRKSDVSDARWLQKLHSYGMLNASFQPDNITRTLRNHVRVRKQITQQISTEIQRMQKALEQMNIKLNNVIRDITGKTGFAIIESIIQGERDPKKLAQHRDRRIKASIQTIEKSLTGHWRDEQLFNLKLAYEHYMFLRGQMVKCDVEIEKILKEMSQDNIPPKRTKRTIIRKNTPTFDVAQYLYKATGVELTKIYGIKGTTALIIFSETGVNVKEKFPTEKQFVKWLNLVPDNKVTGGKVISSKVKRRKNKAGQAFRNAANTLWKANNPLGDDLRRRKAKNGAGNALVAIAKKLAVIYYKMITEKVCFKPEILEQNSKKYLENKVKYLEKTLTKIKMQVAMADNVTSCVI

SEQ ID NO: 440793 - protein, 389 aa, unidentified
MSALTPLLGAKRTPAAPLIYDGVDAPPTASMCQSGGVEHHLREASVSDVITIGLDIAKHVFHVYGADERGRAMFSKKISRGKLLDFFTEQPKCMVALEACGGAHHWARQLTQLGYKVRLIPPAYVKPFAKRQKNDAIDAEAICEAAQRPNMRFVAVKSEQQQAAGLLFRTRDLLVRQRTQLINAIRGHLTEYGWIAPKGPSHVAMLADLIEEEEMARSLPEAAHAMFRVMLDLLTGLNGKIADLDKEIARRAREDEVSRRLMTVPGIGPISATAIAALAPPVETFAKGRDFAAWLGLTPLQRSTGGKQKLGATSKMGERTLRRLLIIGSSAVVKQASKRGAPRGSWLEQMLARKPRLLVTVALANKMARIVWALLVKQENYRAPVAAKA

SEQ ID NO: 440794 - protein, 365 aa, unidentified
MARAVSIGVIMAVATQPSAKGEVMERITRVGVDLAKNVMQVHAVDGADRVVARKAISRERFVSWFANLEPCLVAMEACGGAHYWVRKLRALGHDVRLIPPQFAAPYRRGGPHVKNDAQDAEAICEAASRPQMRFVPIKSPAQQSVLVLHRMRTGFVEERTALVNRLRGLLAEFGVFLPQGIRSLHKHLVDRLEDGSNELGGPARQALMRGWAQCQVLDQEIACLDKQIAEHAVHDEQAQRCMEVCGVGPLTASAAVATVVNARQFKNGRQMAAWIGTVPRQNSSGGKQRLGRITRQGNDYLRTLLYQGARSAILLHRDASIGSRAGSFSCRPASAITRPWSPSPTSMRAFFGPCSRRARNSIHHM

SEQ ID NO: 440795 - protein, 367 aa, unidentified
MKNTIVHHEGAASLKVAVNKIGLCGSVIKIGLDVHARLYVAVAQYDQLLPKPARRLAPSEFVPWVRQLLQAGHTVHVVYEACGFGFGLYRELKALGVHCYVIVPRKLDEGCTRVKTDPRDATTLCQRLSRYVEGNTRELAVIRVPSEAEEQARHVSRQREQLVRHRQKLEAQGRSLLINHALPAPAHWWKNQTWSRLTKLLPAWICLRLEVHRPALLILEQQISALSVELEAAAPALVPTGVGKLTTVVMTREICSWERFSNRRAISSYTGLCPGEYSSGTKRIPGSVTKHGNPRLRAALVECAWRMVRFQPQYPPVKKRLSVLAKGARATGGQRKKAIVAVARHLAVDLWRLHTGRNTAAQLGLTI

SEQ ID NO: 440796 - protein, 394 aa, unidentified
MKLVGIDVGKNSHHFCVMDKETGEFNVTPTSFSNNKEGFDFLINSLKPYSKKSILIGMEDTGHYHVALLKFLLSNGYTVALINPKTTDLTRKMEGGITKNDKLDTITICDVLDTPERKKQYRITKVDRFDLYEQRQLTRHHHNLKEELNVYCNRLQKSIDLVFPEFNTLFSSKYSIVYMNLLKTFGSAEAIASTDIRTIRKCFEIKGRGNRISLTPEKLKECAKNSIGISSEVETIQIKHLVSQITLIKEQIAEIDKKIEEFSITNNSPILSIPGISHFSGTSILAELGDIGNYSKPSQIIKFAGVAPYHYESSQYNAQHTGITKKGSKYLRKTLYQIILTVINNNPVFKKYYLLKISQGKGHRCAQGHCIRKLLRIIYHLLETGQPFDPALLR

SEQ ID NO: 440797 - protein, 390 aa, unidentified
MNETEAKRIIGLDMHPDVFAAAALDADPRRQAADWVQDRLPTARLEAWAKKQLRKEDVVVLEASGNSFEVAARLHAIGHTAVVLESAQAGKLRDNFCNDDRHSAVKLAKIYRSGLAKEVWQPDAKTRAHREVFFAHRNAVKDATRARNRIRSFLNEHCVRLAVGVRLNQPSGEAVARAAKAWTPLQLELLADAFAQLRQAENRRRKLERVIVQALIAEPRWASLWRMMGIRHRVAFALMAMLGNVHRFPTAKQLVGYLGLAPRKTQSGNNAVGRDHGVGRFGRSDVRGLLIQSAQNALNQRDSPWHKWGWKLLVRKHRNEAAAAIARKITVAVWHLLMGHFTPLVEATDHLRAKLLRLATVIGKDSLKALGFADREAFVTAQIKTIQLSP

SEQ ID NO: 440798 - protein, 339 aa, unidentified
MQKIHTIGLDVAKNIFQVHGVDEAGVTILRRKLARKQVAEFFQNIEPCVIGIEATGGVHYWGRLLTKMGHTVKQMPAGYVKAYVKTNKNDEIDAEAICEAVRRPNMRFVPIKDENQQAILMLHRARALLINQRLKLTNAMRGLLLEFDVAVRRGVLGTKEVVQIVDRKIVRNLPKCAVEALMSLADQFRSALAQIARLDEAILTWHRECPQSMSLDSIPGIGPLTATALVATIGDGSNFRSGRHLAAWIGLVPRQHSSGGKTKLGRISKRGDRYLRRLLYAGAMVLISGNSKQPLAKWGKSLRRRKPFKVAAVALANKLARVAWALLAHNDEYRAMAKS

SEQ ID NO: 440799 - protein, 340 aa, unidentified
MGSVTTIGLDLAKNVFQVHGVDAEGVTVVCQRLTRGRMLKFFAKLPPCLVGIEACATSHYWARELMALGHDVKLMPAQYVKPYVKRGKNDAADAEAICEAVTRPTMRFVGIKSPEQQSAMMLHRVRLILNRQRTQLSNAMRAHLAEFGIAAPIGRNGIEQLLDVIADPTDARVPADARFCLEMLAAQLRIVKEQILENDRRILASARETELGRRLMEIPGVGPLLASAIVATVPDPAIFRSGRNLAAWIGLVPRQNSSGGKERLGGITKAGHQYLRQMLIVGAMAVVRYAERNGAKRPWLVQLLARRKTKVAAVALANKNARTIWAMMASGERYREPQVA

SEQ ID NO: 440800 - protein, 423 aa, unidentified
MKFKAQAKQNQLLEHISTQHLVVGIDIAQQSHVARAVNFRGILLGTSLHFSNDDAGFSLLLQWMKDLQETHQLNDAIIGMEPTGHYWLSLAAWLKDRSLEVVLVNPHLVKKNKENRDNTPSKSDVKDALVIADMVKNGYYTFIKETSEVFMELRVLMANRETIVHRLVSVKNQIHRWVDIVFPELGQVYKHLLGSGSLATLRLFPTPAELQKLTVRQVVDGWKTVMKRHSGERRAGELLMLAARSVGAKHAEKAYKLHLQQLLAEYDLALEQLQVIEDEVAVALARIPLAKPLLAMKGMSTLSVAGILGEAGDLSGYAHGNALLRHAGLNLAEASSGKWKGQMSISKRGRPRLRHALFMATMALIMNDESFKRQHEVNVKTRSMKPMRSVMKLCGKLARLLVAMAQSGEAYEPDRALPMKQAA

SEQ ID NO: 440801 - protein, 489 aa, unidentified
MSQRKRPAAKARSCKRKSAKTKTPGSAAQAPKEKPTALTVLNPHAAGIDVHSDMHMVCVPAEHVAPHREGTAEGMPGNVRRFAANSCDLHAIADWLAACGVTTVAMESTGVYWIPLFELLEARGFEVYLVEPGQLAHCGARPKTDVLDVQWIQRLHTYGLLRPSFRPPDSIMALRGYHRQRQMQVRYAASHVQHMQKALEQMNVKLSEVLADITGLTGRRIIEAILSGERDPRNLAALRDIQCHNDTTTIAKALEGTWRPEHLLALQQAYDLYQFHHKQMAECDQRIEAELAKLPNRAEDKAFVSKPRQGGRKQNNLTFAAGEPLFRALGVDLTEIEGIDVATALVILAEIGVDVSRFPTEKHFASWLGVCPRQYESNKSKKKRSPRKGKNRIAMALRMAAQGLVKTKSPLALFYKRIKSRIGGKGAITATAHKLACLVYRMLKYGKEYVKQSIEEYERKIKAQLERSLRRKAAALGYELVAKPAPQLA

SEQ ID NO: 440802 - protein, 342 aa, unidentified
MSTIKTIGVDLAKNVFSIHGADAYGKCVLRKTVKRNKLLDTFAKLSPCLIGMEACSGAHHWARELLKLGHNPKIMASKFVIPYRQNEKNDANDAEAICEAVSRPKTRFVTIKSEEQQAVLCLHRIRQGLIKTRTATINQLRGLLSEFGIVMPQGRYSAQNTIGSVLEDAENGLPILARELLQDLSSKIQNLNLEVLHYDRRVSALVREMASAKALMDIPGVGEHSASAIVATVNDAKQFGSSRQFAAWIGLVPRQYSTGGHVHLGRISKRGEKHIRTLLIHGARAVIARCKEKTDRNSIWLNQLVERRGYKRAAVALAAKNARIIWALLTTGKEYKINYVNG

SEQ ID NO: 440803 - protein, 581 aa, unidentified
MDNKTIAIVAIAVIAMVSVGALLILNPWGSEQKDPDPEPEKEFPDLNEKVIVIYFSATETTAGVAEKIMDYLNADAYRIIPEVPYTNEDLQRDVEGSRVNNEHADHSIRPAIEGAPIDLSSYSTIVLGFPIWYHQEPNIIDTFLDIYDLSGKNVAIFATSWSAGVAAARLSVWNAEPDCNMLKGACFSTGFSESEIYDWLDSLGFENDQQQKRAVNSSGMSARTEKVRHSFLIANRSECRMRYIGLDVHKDNITACVLTSTGKPKFEKNFIKDSESWNLSELMEYGDKDGFCVMMESGTYAYQPFRFFSDQGVETHVVHAQALKVITQSDKKTDKKDAQTIARMLRLWKKGDIDLQMAFMPTREQCELKDICRYREEISKKIGDETRRIKSHMSRNCEHLPEAYDNFQTQRARNYVKFNFSSDITLMSRMAELERLFNERDSVKTEVESRLPDSKEVEILMSIPGVARQTAVQIMSMIVDIDRFDDAEKLCAYFGLVPRVRDSGGKEHHGRMTKNGDRMMRAIMERVTESHVRNCDSSVTQYYKRKCSEMGTKKALITASRKMQSVIFAMLKSGSDFRLAA

SEQ ID NO: 440804 - protein, 438 aa, unidentified
MVAVMIGIDPHKASHTAVAIDPAEVPLGQLRVRACAAQAERLLGWAQAWPQRTWAVEGAGGLGHLLAQQLVAAGERVLDVPPKLAARVRLLATGNINKNDPNDARSVAVAALRSAGVREVCRDDHAAVLKVWSKRYRDLGRARTQVACRLHQVLCELIPGGVPGEITAAQAERILASITPAEAVQATRWELAAELTEDLRAVDARIRETRKKTAAAVRAAATCLTGLFGVGPVIAAAVIGDVRQVARFPGRDHFAAYNGTAPIEVSSGGRKVWRLSRRGNRRLNHAIHMAAVTQIRYRHSPGRAYYDKKLAEGKTGKEALRCLKRQISDAIFACLQADAKRAAAAAAKSPGGQPGNHSASRAAGSHPDHRLFGQATPGPATHPTTPTPRLFPLRCHPARAGGRVQDRAKPGRAAAPPGVLDAATREPIIPAAGKDHLT

SEQ ID NO: 440805 - protein, 431 aa, unidentified
MKPIVKQNTEPNPAEDFAAFLALDWADEKHAFRLQVVGQSKIETGTLEQKPEVLGPWLAQLRERFGGRPIAVGLEQSRGALIHALMAYDFLVLYPIHPTTVAKYREAFKSSGAKNDPLDAGQILEILTKHQDRLHRLNPDTVETRLLGRLVEDRRKAVALRTTHIQALGANLKEYYPQALELTNDNLKSRLACDLLMKWPTLADFQQAKPSTLKRFYYGHNVRSPEVIERVLALADKSQALTTDPALVESGRRLTQMYARLIQALNPAIEDYEQRIQRVFDAHPEAQLFSNLPGAGPALAPRLLAFFGTDRSRFATALNVQSFTGIAPVTKSSGKSKVVYARAACPKFDRQTFHEFSRLSVTKCQWARNYVQYYTDQGKKYHTIIRALAYKWIRILFKCWQERTPYNEDKYMQTLKIRGSIFATRHLQKTS

SEQ ID NO: 440806 - protein, 310 aa, unidentified
MDIIAVGIDVSKDRLDVAVHPGGEAFVVERNGAGLEQLTVRLKQLAPSIVALEATGGFETIAAAAVGGAGLPIVVVNPAQVRAFAKALGQRAKTDPIDASVIAHFAAATRPEPRPLPDEATRFLSDLVTRRRQIVDMIGAERQREKRATSQHLRKSITRLIKALEKELVSVDTDIDDAVRSSPAWREAEDLLASVPGVGPIIARTLMAELPELGRLNRKQIAALAGLAPYTRQSGQWRGKSFIGGGRQAVRTVLFMGAMTARRHNPVLKAFFGRLVANGKPKLVALIAVARKLLTILNVMIRTKTPWQPA

SEQ ID NO: 440807 - protein, 422 aa, unidentified
MRLIYPICCGLDVHKNVIVATIVTTDKNGISVYNQKSFSTINSDIQNFHDWLIENDCKHVCMESTGKYWIPIFNYLEADIDICLTHPKYVRAIKGKKTDKKDSKWIAELYKFDLVRCSFIPPKDFRQLRELARYRFKLVCMKSSEKNRIQNCMTVSNIGIASILTDPFGKTATEIMTYLLSHTSETIEETAVRKLIKKGAKAKSDTIIEAIKGYNIGTDQAKKLELARGHLDYLDDMISQTEVELYVRIKPYYEFVDYISSLPGVSELSATIILAEIGVDMKIFDDDKHLCSWCGLTPSNNESAGKKKSVRIAKAGAYLKPMMVQCALAAIKSKKQPYFAIKYGRIRKRRGHKKAIIAIARMMMMCMYHMISEKQTFNPTDYTELMDPHFQESKVVLNDLNVFAYLESQGYDTSLLVNCNDN

SEQ ID NO: 440808 - protein, 369 aa, unidentified
MGKYSEIFVAFDVAKLKHAVAIAEGGRTGEVRFLGDVENSPVSIERTIKRLADRYDRLHVCFEAGPTGYGLYRQIQALGHDCMVVAPALIPKRSGERVKTNRRDAVTLARLHRAGELTGVWAPDAAHEAVRDLARAREAAADDLRRKRQQLLSFLLRHGRIYSGGGHWTLAHRRWLAAQKFDHSAQQIVFQEGIDAIDDAVQRLRRLEKQLALIVPEWSMAPVVEAYQAMRGASFLVAVTFAAEIGDVRRFDTPRQLMSFLGLIPAESSTGDKVRRKGLTLAGNRRARRALVEAAWTYRYPARVSQTLRARLEGLPKAVRAIAWKAQVRLCARYRRLSALGKKLPVVVAAIAREMAAFLWAIGREVAPV

SEQ ID NO: 440809 - protein, 346 aa, unidentified
MKITTIGIDLAKNVFQIHGVGERGKVAVRKQIKRADMSKYFSNLEPCLIGMEACGSAHHWARKLEGFGHTVKLMAPQFVKPYVKTNKNDMADAEAICEAVGRPNMRFVALKNIEQQAILSVHRARQGFVKARTAQGNQIRGLLSEFGIAIPQGIGQVMKQVPEILEDGENGLPGTMRHLIARLADNLKEMDRQVKELEAQIQLWHRENEASRKLAKIPGLGPITASAIVATVGDAREFKNGRQLAAWMGLVPRQNSSGGKQNLLGISKRGDAYLRTLMIHGARSVVRVAEKKAEPGSWMRNLMDRRNKNVAAVALANKNARIVWALLAHDRMFRPDYTSAAVVAAM

SEQ ID NO: 440810 - protein, 465 aa, unidentified
MSKLSRRNRTRSSHGETRPFEGMRTVNPHAAGVDIGAPEIMACVPDGDDQQIVRAFGTYTADLEALADWFIDRGIQTVAMESTGVYWIPLFETLEARGIQGCLISAQSLQHVPGRKSAVLDCQWIQTLHSYGLLSASFRPEADFVALRTLLRQRAQLLEHRAPHILHMQKALLQMNIQLSQALSDVTGVTGQCIIRAIVAGERDPRRLAALRNYRCTKDADEIALALTGTWRAEHRFILTPALALFAFYTAQISACDAQIEHTFAVIKPRFEPAPPVPAPTEATTSPRRKPHSPSKNAPEVNTRAHILRITGVDLVAVHGISDALAQTILAEIGTNMDKWPDDKHCCSWLGLAPKHDLSGGKVLKSRTMKNRTRAAQAFRMAAHAVIRADCAFGAFYRRLKGRLGPTQALVATAHKIARTVYHMLKDQVSYHDIGAAEYNKRFRERELKYLQKKATKLGYTLSPV

SEQ ID NO: 440811 - protein, 325 aa, unidentified
MQGKEASEQETRKCTAGIDVSKNWLDAHVLPSSESLRVANTGEGIRQLKRWLLRCKVELLAVEATGKWHREVCRSLSASRIAIAVVNPYRVRMFAKAHGILAKTDRLDARVLAMFAAMMSPTCRPPAPQALEAMQELVTARSSAVDEAVALKNQLAAATGDFLRRQLVRRIKQLDAHIEAIGKECIRRIKADEALARRFTILTSIPSFGDVVAITLIACLTELGSLSDKHIGALGGLAPVADDSGERRGVRVVWGGRGPIRRILYLAAITAKTCNKDMSVFYRRLIDNGKKPKAALIAVARKLLVLANVLIAQDRLWMTTAPQSA

SEQ ID NO: 440812 - protein, 369 aa, unidentified
MGEYSELFVAFDVAKKKHAVAIAEGGRRGEIRFVGDIENSPATIERMIKKLADRYKRLHVCFEAGPTGYELYRQILALGHDCMVVAPALIPKRAGDRVKTNRRDAITLARLHRAGELTAVWVPDATHEAIRDLVRAREAAADDLRRKRQQLLSFLLRCGRIYSGGGHWTLAHRRWLARQAFEHAAQQIVFQEGIDTIEDAAQRRHRLEQQLTLIVPGWSMAPVVAAYQAMRGASFLVAVTFAAEIGDVRRFDTPRQLMSFLGLVPAESSTGDMVRRKGLTLAGNRRARRALVEAAWTYRHPARVSETLRARIEGLPKPVRDIAWKAQLRLCARYRRLSAAGKKLPVVVAAIAREMAAFLWAIGREVVPV

SEQ ID NO: 440813 - protein, 364 aa, unidentified
MVIGTDTHKRSHTAAAVDEATGRMLADRTVKVGRRSFDDLLGWARALAGDRAWAIEDCRHVSGALERFLLARGERVVRVAPKLMAGARTSTRERGKSDRIDAVAIARAAIREGLDALPVAQLEGPALEVRLLVDHRERLIAQRTALINDLRWQLHDLWPELEIPPRSLSGGGWQDRVAGRLARAEQGPRVRIARDELRRVRELTRAIDALQRELAVLVTGIAPRLLAEPGCGVLIAAKLIGEIAGIGRFASDAKLARLAGSAPIPASSGRTDRHRLDRGGNRQLNCALHRLAVTKGRLDPETAAYLARKQAEGKSRREALRCLKRHLARRVWRLLRIPVHAAVPNPLRAATIYCNTPTDGWVLT

SEQ ID NO: 440814 - protein, 424 aa, unidentified
MNGGSVVGQVVIGTDPHKRSATIEVRDEREILLATGRFGMDTSGYRQLLSYVRQWPARMWAVEGAHGTGRPLAARLLADGEMVVDVPAKLAARVRVFDVGHGRKTDATDAHSIAMAALRTKGLRQLGNDEDLAVLRLLADRRDELSRARAQTLNRLHRLLTELIPGGAPRHLSALQAKALLAGQRPRDAAGRTRRALAAELIGEIEVLDGKLKQLVRRLRQDVTATGSRLLDLFGIGPAGAARILADVGDIARFADRNRFASWTGTAPIDASSGEQIRHRLSRAGNRRLNHVLYIAAIVQIRHNTPGRAYYRRKLAEGKTPLEALRCLKRRLSDLVYRQLVTDAAAAAAHTTGADQAGPGGHPGTATDHSSVADPTPTAGSSDRPQPGPAPVTLPPTTPASPAAALRVGAPEASTWSAPPDERR

SEQ ID NO: 440815 - protein, 356 aa, unidentified
MTLVGCDLHSRKQQVAVLDTDTGEVLEQELLHEGDAVERFYRGLPRPVTVGIEATGYTLWFHALMQKLEYTLLVGEAAKIRAMVVRKIKTDRRDAQHLLDLLKHDRFPTVWMPDPATRDLRALIAHRVRFVRMRTMVKNGLHAIALNHRVALGPALWTKRGLAPLQALALPPHTAQRCGENLELLTWLTTRIAQLDAQIAAAAAADARAQLLLTHPGVGPLTALITVLVLGPANRFPTSKHVVSYVGLAPAINASADTYHLGKITKQGNALLRWILGQAAPLAARADGELKRSYFTVLHRRGRPKAKVALARKLLVRLSIMLRDQIDYDEFRRRGGARRSQPAWHPVAAPTMSPAR

SEQ ID NO: 440816 - protein, 379 aa, unidentified
MKNKTVVVSEKVEPPSRAEEGNKGIVKLGLDLHYRQVTVAMQEEGAGIKAVGKFSHDRFGAWIDKKLREGWEIHSCYEAGASGYWLHRDLVGLGIKNLVVAPKAMGRDKRQKTDRRDSAELVDSLDRYLRSKEKRALNPVAVPTLEQEQDRALVRYHRQLMADRNRCEARGKGLLCAQGIEVKGKWWAADSWAELQTHPRLKGWMEGQLRDWRSKLLGLQAQQAQVRQQIEAMAPAQLPKGLGAYSAVALACEMKGLGHFSSARAVSSYTGLCPGIHSSNGHGKEGSINRCGNAAVRWNLVETVWRMLKWQPDYEPVRQLRHDLVRSKRARKRLVVKAARQLAVDLWRLERGKVTAQELNLVMHQPAPQAKKSAPKNGR

SEQ ID NO: 440817 - protein, 339 aa, unidentified
MQVTTIGVDLAKNVFQVHGITEADEVAFNRPLRRAQVLPFFAGLEPCLIGMEACSTSHYWARELTRLGHEVRLIPPMYVKPYVKRGKSDAIDAEAICEAVTRPTMRFVETKSVEQQALLSLHRARNLMVRQRTQLVNALRSMLAEFGVYIARGLARAISFSQGVLAGTDLELPKIAQDVVQNLCGQLDVLHRQVRWYEVHLRLEAKRDPRVRLLQTIPGVGPVTASAIAASIGSGHQFKTGREFAAWLGLTPTNRSSGGKERLGRITKMGDQYLRQLLVVGMTSLVRQTKSHPERANKWLTALLERKPARLATVAMANKTARIVWAVLTKNEPYMPRRA

SEQ ID NO: 440818 - protein, 356 aa, unidentified
MQQVSTGVVGRRGMSEGLTLGLDLGDRTTHFAVLDVQGQIVERGTVATTREAFCQRFAKLPPSRVVLEVSTHSPWVSALFGQLKHAVIVANARAVKAVTSNPRKSDRVDAELLARLGRVDPELLHPIEHRGEEARRDLAMLRARDTLVRARSMLINSARGLVKAGGARLPKCEAEAFHRRAAEAVPAELRLALAPMLEVSASLTQQIRVYDRQIKAMLVRHPVTQVLRQLRGVGPLTSLAYVLTIDDPQRFARSRMVGPYLGLVPRRRQSGDRDPELHITKTGDTFVRKLLVECAQYMLGPFGEDCDLRSWGLRLAGEGSTARKRRAVVAVARKLAVLLHHLWVNGEAYEPLRQAA

SEQ ID NO: 440819 - protein, 357 aa, unidentified
MKIVGCDLHARQQTIAMVDMETGEITEKTLSHEGNAVGGFYASLEGPVVVGIEATGAMQWFLELLEELGIEYRVGHPAKIRAQETRKQKHDRRDAGLLLTLLSEDRFPEIWMPSIEQRDLRTLLRDRDQWVRMRSRVQHPLQAIALNHALRKGRALWSVAGQSALQALSLPAYTAQRRNELLAMYGQLPRRIQELDKEVEHQASQRPHSRRLMTHPGVGAVTALATEVFLGDASRFRKGNQVASYIGMIPCEHSSGKRQRLGKLTKEGNKLLRYLWTEATLHAVEKDEELKRFYRRKLVHKGMGKARIAVARKLGIRLWIMLRDQIDYAEFCRRGQLRQKGKAHAGMPELQHGPAMQ

SEQ ID NO: 440820 - protein, 340 aa, unidentified
MHTTYVGMDIHKNFIQAAAMDEQGNILREQKFKTTRDNIKQFINSLDTKHIHAAIEATCTWYHIYETLNSLNVETTLVNVRRTKVIAESKIKTDPLDAKNIAHCLRTGFIATAYIPPKQIMEQRNILRHRMSLRKELTRYKNKIHAILLRNGIHHNFSDLFGIGGKQFLKTVKLPDSEQYNLNSYLKIVETLTYEKAHITKKIESLCRNNQQATLLISIIGINYYSAMAILSEIGEITRFPNPKKLCSYAGLVPRTIQSGSHVYHGRILKECNQHLKWILNQCVHSHIRFCPNSNITKLYYRVKKKKGANKATVAACRKLLTCIWYMLMKHEMFKYNEDN

SEQ ID NO: 440821 - protein, 336 aa, unidentified
MTHYCGIDLHSNNHVVVIIDEQDKRVFERRLSNNLELTLEMLAPYRETLHGIAVESTFNWYWLVDGLQEHAYHVQLVNTAAVKQYDGLKYSGDHHDAFHLAHLMRLDILPTGYIYPKEQRAVRDLLRRRLSLVRTASTQLISVQSQIWRSTGIRVKSAELRRSDFTPPFVDDYTLQAVHAGLSVYQSIQHEIDALEKTALQAVKLADAYKILQTITGIGKILGLTIMLETGDINRFAGAGNFASYCRCVDSKRTSNGKKKGEGNAKAGNKYLSWAYSEAAHFAVRFEPLAQRFYERKKAKTNGIIAIRAVARKLARATWMMLKHQTPYDAKLMFPG

SEQ ID NO: 440822 - protein, 366 aa, unidentified
MKKISTMAKRGNEIFEEPKLTIGLDLGDRTSHYCILDEAGNVILEHSLPTTPKGIHQVLCRIPRSRIALETGTHSPWVSRQLTQLGHEVIVAHARNVRLIGESSRKDDRLDARTLARLARIDPGLLGPVRHRSAKAQIHLTVIRARAGLVSARTALVNTARGLTKSYGERLRKCGSGQVNRETAKELSQELRDALDPLLGEIESLNERIAEYDRRIEQIAKEVYPEVALLKQVKGVGTLIALTYVLTLDDPHRFRRSRDTGCFLGLRPGRRNSGMSEPQMHISKEGDGYLRTLMVQGAHYILGPFGEDSDLRRWGLKLAERGGKNAKKRAVVAVARKLAVLLHKLWVSGEVYEPLRNNHKVVSAVA

SEQ ID NO: 440823 - protein, 423 aa, unidentified
MPYRITGIDVHKKKLAVVVADVEVDDEYQFERRWYGSNTEQLQLLSDWLVEQQVEEAVMESTAQYWKPVWEALERYWKPARQKREGAGRMSGTLHLAQALSNRGRRGRKKDFRDAERLVKRLVSQELVLSFVPDVAQRLWRTLTRTKYQRTRDKVRLQNQLEALLEEAHIKLSSLVSDLLGLSARRMLKALADGETDPVALAALADQRLHATPAQLRDALGACTELNPVYRRLLKMTLEDLHLIEQQVGQLDQEIASLLRQHQDAVERLAEVPGLGVDSAQQIIAEVGAKAATFASAKNLVSWVGACPGDEESAGRNYNPRSPKGNRHMRRILNQAANAAVKHKGSIFEIVYRRLVPRLGHNKTIGAIAHRLCQLIWIILHNGVRYEERGPAVSEKSRRARTSRMIRTLRTLGYRVEPLGNPV

SEQ ID NO: 440824 - protein, 385 aa, unidentified
MGSQAFIPRDYDVFAGLDVDKKSISATFSDHQGIQKSVRMPYSVEHLVNHARKHYGDKKIAFAYEAGPTGYGLYDGLVTQQYTCLIAPPSMIPKAPGQRVKTNRLDSRTLSENLRGGQLKSIHVPTTLYRELRHLTQLRDALVSEAVAMKQRIKSLLLMEGLEFPPAPAGSQWSLIVKNKLRELPCSAAVRFKLDRLLDSLEFSEKQIVKTTAEIRRFCHNDPELSRCIGYLQSLPGIGWIVASQLMARIGDWRQIQNIRQLPAFLGLVPTENSTEERTERGSITRSGDPRLRSKLIQASWSAIRQDAELREFFRSVCQKHPRPVASRVAIVAVAHKLSVRASVVLMKQRPYEVRQTVQSAPLTQEETVSQGTTRRQAVPGDKNS

SEQ ID NO: 440825 - protein, 458 aa, unidentified
MAKHKRKKSPAEPQLPAQLDAVNLHAAGMDVGAEAHWVAVPVDADLHPVRAFEAHTASLHALAAWLTVCGITTVALESTGVYWIPLFELLETQGFEVILVDPGTMPKNGRPKTDVHDCQWLQRLHTLGLLSAAFRPDDPVVVLRSYLRQRLTLLADAARYIQHMQKALTQMNIKLQHVVSDITGVTGLRIIKAMLAGERDPLRLATLRDWRCKENEATIAQALHGTWREEHLFALHQAVAAYEFCHQQIAACDAKIATQLQTFEDRSKGESLPPKPRKRHRNRLSFETRPLLYRMTGVDLTKIEGIDETTALIVLGEIGLDMSRWPSEKHFTSWLGVCPRVRVSGGRVLSSRTRPTANRAAAALRLAAASLHHSKSALGAFFRRMKARLGTPKAITATAHKLARLIYAMLKHGTAYVAGSMAEYEQKYRQRVVSNLSRRARELGYNLVAKEEVVTPGL

SEQ ID NO: 440826 - protein, 411 aa, unidentified
MRLFVGDDWAEDHHDVELMDQAGRVLAKRRLPEGVAGMARLHELVGQQLGEDADDAEVVIGIETDRGPWVAALIAAGYTVYAVNPLQASRYRERHGVSGAKSDAGDAHMLTDMVRTDSHQLRAVAGDSADAEGIKVLARTHKTLIWERTRHVQRLRHQLREYFPAALEAFDDLDAADTLELLAKAPDPGRAARLTRAQVSAALKRARRRGIPDKATAILAALRGEQLGRPPAVTAAYAATARSLIAVITTLNEQVKTLQGQVEEHFGQHPDAEIYRSQPGMGAILGARVLGEFGDDPHRYADGKARKNYAATSPITRASGKKKVVAARFIHNDRLVDALNAQAFAALNASPGARAFYDALRGRGIEHNDALRRLANRLVGILHGCLKTRTVYDEATAWSHRENLPQSSVAA

SEQ ID NO: 440827 - protein, 378 aa, unidentified
MKLVGIDVGKNSHHFCVMDKETGEFNVTPSSFPNNKEGFDFLINSLKPYSKKSILIGMEDTGHYHVALLKFLLSNGYTVALINPKTTDLTRKMEGGITKNDKLDTITICDVLDTPERKKQYRITKVDRFDLYEQRQLTRHHHNLKEELNVYCNRLQKSIDLVFPEFNTLFSSKYGIVYMNLLKTFGSAEAIASTDIRTIRKFFEIKGKGNRISLTPEKLKECAKNSIGISSEVETIQIKHLVSQITLIKEQIAEIDKKIEEFSITNNSPILSIPGISHFSGTSILAELGDIGNYSKPSQIIKFAGVAPYHYESSQYNAQHTAITKKGSKYLRKTLYQIILPVINNNPVFKKYYLLKISQGKGHRCCLLYTSPSPRDTR

SEQ ID NO: 440828 - protein, 359 aa, unidentified
MSNKKLNEKSSKGNTTIAKQNVLQSYDHYIALDWSIKNMAIARLKPKTNEPKIIDVPSDIKELKLYLKNLQGTKIITIEETTTSHWLYVELYDYADKIIICDPYRNRLLSDGPKNDKIDAGKLCLLLKNGMLKEVFHSNDRLYELRKLVSYYDDEVKAGVRLMNQKSALYRAENKSYKKKETIKDDSINKFIVSQLDEKINLYIDKKENYEKEFYKITKGNKVIKSLMSIPGIGIISGVTILSMVIDARRFKSSNHYLSYCGLANHKKISGGRNYGKRLPRYSRKLKSVYKSAAVRVISTNNPIREYYDYLVKEKSLTEQNANNAVARYIARVSLGIIKSGKKYKPYNWRENKKRNDAA

SEQ ID NO: 440829 - protein, 363 aa, unidentified
MKIVGCDLHARQQSIAMVDTETGEFTEKTLCHEGNAVRAFYAALQGPVVVGIEATGAMQWFLELLDELGIEGRVGHPAKIRAQETRKQKHDRRDARLLLQLLSEDRFPEMWIPSTEQRDLRTLLRDRDQWVRMRTRAQHTLQAIALNHALRQGRALWSATGQTALEALPLPPYTRQRRDELLALYAQLQKRIQELNKEVEAQARQRPQARRLLTHPGVGPVTALATDVFLGDPSRFATGNQVASYIGMIPSERTSGKQQRLGKMSKQGNALLRYLWTEAAMSTVRKDPELQRFYRRKLIQKGMGKARIAAARKLGIRLWIMMRDQIDYQEFCRRGKLRQTGEPMRGCLINNSGPAQAVTGSTE

SEQ ID NO: 440830 - protein, 409 aa, unidentified
MERQLERCCGLDVHKETVAACVRVGGRTGQAEQHVQTFGTTVGDLLVLRDWLAAHGVTHVAMESTGVYWKPVFYALESDFTGLLVNAAHIKQVPGRKTDVKDCVWIAQLLEHGLLRGSFVPPAPIRDLRDLTRYRKALIHDRTRVANRLHKALEEAGMKLASVASDILGVSGRAMLAALVQGTTDPAVLADLARGRLRGKLPALRQALASRFRPHHAFVIGQLLAHLDYLEEAITTLSAEIERVMAPWAEPLRRLDTIPGINQRTAEVILAEVGADMSAFPSARHLASWAALCPGHHESAGKHKSGKTRKGNRWLRTALIEAAAGASRAKHSALQARFRRVLRRRGPKKAVVAVAHALLRVVYHVLADGTVYREAGANSYDRHQSQRVTRRALQTLERQGYRVTLEPAA

SEQ ID NO: 440831 - protein, 281 aa, unidentified
MSMVRSVVGGVDTHADSHVAAVIDVNGGVLGIESFPADHGGFGALVRWIASHGEIVRVGVEGTGSWGVGLSRFLHNHGISVVEVDRQNRQNRRRVGKSDSTDAVSAARAALSGSALVMPKTRNGPVEQIRILLVARRSARSQRIETLNQLRHLVFTGPDEIRSRFKDRPKTGLVTDVARLRPRKGSDPVLYTTMVTMRGLARRIQHLNDETKHLDTRLTELVADTAPSLVGLYGVGTETAASLLVAAGDNPDRLHSERSWAHLCGVCPIPAGSGKQTVGTG

SEQ ID NO: 440832 - protein, 350 aa, unidentified
MVVVGADVHKRTHTFVAVDQVGRKLGEKVVAATSYGHAEAVMWARERFGVEVVWGIEDCRHLSARLERDLLTAGQHVVRVPPKLMAQTRASARTRGKSDPIDALAVARAVLREPDLPVASHDETSRELKLLVDRREVLVAQRTATINRLRWRVHELDPERAPKPGSLDRAKHREMLRAWLDTVSGLVAELARDELADITRLTEVIDAVAKRISERIRQTAPTLLALAGCGELTAAKLVGEVAGVRRFKSEAAFARHSGVAPIPVWSGNTAGRVRMTRSGNRQLNAALHRIAVTQIRLDGPGRTYYRTRLAAGDSSTEALRCLKRRIARTVFGHLHTDQQTHNRPCQPAAA

SEQ ID NO: 440833 - protein, 441 aa, unidentified
MLILGPAGPRICYREGAVIKVKEIAYAALEAVLERCCGLDVHKKTVTACLLIGPLNQPPREMVATFATTTKGLLELRDWLEDHGCTHVAMESTGIYWRPVYNILEGAVTILLVNARHMQNLPGRKTDINDAQWIARLLRWGLLKPSLIPPRPIQQLRDLCRYRKKLGEMAASEKNRVHKVLEDANIKLASVATDIFGVSGQAMLEALIAGDFSPEQMAEMARGKLRQKLPQLIEALDGRMEEHHRFLVATSLEVMACLYQAMANVHMRIEEKIRPYQEQVELVKSLPGVDTITAQHAFVEMGGDIRVFPSDGHFASWIGICPGNHESGGKQKSGRTRKGNRYLAGLLVRAGRAAGRSKGTYANAFYHRLARRRGKQRAAVATGHHLGRAMYHVLDKGKPYQDLGADYFDRRNHDSLKDQLIRRLQELGYQCDLTPVAAFAN

SEQ ID NO: 440834 - protein, 363 aa, unidentified
MGFEYLALKRQKEITVYSKNDMVLAVDYHDEILVIRRFNCHTGEERLLKIPTIRKDITRFVDEAVAEANLVGGRVHWIMESTNGWVRVKALLGDKAQMVVSNVLQMPLPPKAHRKKTDKIDTKRLLREFLCGMLPEAFQPSGQLRQVRRVTAARESLVSRRTALRNWINRYLSHETWISRKGLWSETGMSRLEKFASSIENSDRVVLLSKLSELKNIDALLEDIISEIIRIYKQWPQAQWVDEIYGIAEISAVSILSRIGPVERFSNAEKLISFAGLAPGVHQSAKTCRSSKIGGGGTDKHLRHYIIEATIWARKIPRYQPAYERVKAKRGNKIARIVVGRLLLRSIYKMLKDGVRFDRLPAA

SEQ ID NO: 440835 - protein, 348 aa, unidentified
MGKSNRVFVGCDLGDKQSDYCVLDEGGRVLEEGRVRSTPAAFSKKFTRLQRGRVVIEVGTHSRWAEEVLRKLGHEVVVANARQVHLIWKRKNKTDRSDAQMLARLGRLDVTLLAPVQHRSRAAQRDLAYLKARDVLVRSRTKLVNFVRGTMKPFGVRFPSCSPEALPKHADSAIPAELAPVLIPVVETIAALNERIAAQDEQIEQLAKAHPEATRLTQVNGVGSITALAFLLTLEDPARFRKSRSVGAFVGLTEGKDQSGAHDPQKHITKAGDPFLRRLLVQCAHHVLGRYGAASDLRTWGHSIGERGGNNGTKRAVVAVARKLAVLLHRLWVSGEQYQPVGYRRVAA

SEQ ID NO: 440836 - protein, 422 aa, unidentified
MSRSRRKSGLPIVNETAAGIDIGSRFHVVAVPPDLCDEPVRTFQAFTADLECMADWLKCLGITTVAMESTGVYWIPAYEILESRGIAVVVANARASRAVPGRKSDVNDAQWLQRLHACGLLHASFRPSGDIAALRAYLRLRERHLDYAAAHIQHMQKALTFMNLQLHHVVTDVTGATGMRIIRAIVGGERDPLTLAAMRDRNCKSSVETIRSALVGHYQPEHVFALQQALALYDFYHSRIEECDIEIERTLSALTADRIPPEAPLLKTRRRAAQSNGLNFDVRSALYQLAGVDLTQIHGIGPYLALRLVGECGTDLSRWPTVKHFTSWLTLAPGCKISGGKVLSSRTRKTTNRLAALLRLAAVTVGKTSTALGAFYRRLAARIGKAKAATATARKIAVLFYNADALRNEVFRSGSRSLRAAI

SEQ ID NO: 440837 - protein, 355 aa, unidentified
MNQEKYIGMDVHAATISVAVMNAQGKVLMECVLESKAVTILEFIQGSRGTLALTFEEGTMAAWLHDLLKPHVSRLLVCDPRKNALLRDGNQNDRADARNLAELLRTNQAHAVYHGQPGTRALKELGRSYLTLTKDTTRVMNRIKSVYRSWAIPCAGTSVYSCHHRAEWLAQLVEPGVRIRAEHLYQQLDSLEPVRQAARRELLRESRKHAAVKLLGQIPAIGPIRSALLVALLQTPHRFRTKRQLWAYSGFAVQTYDSGEYRIVRGKVQRNRERITVRGLNRNHNHDLKNLLKGTAISAIQRPGPLQDFYAALVEKGIRPSMARLTLARKIAAIILIMWKKGVSFDPKQLQRQAA

SEQ ID NO: 440838 - protein, 393 aa, unidentified
MQVVHEVCCGLDVHKKSVTACVLWAAGRRRQTREFGTFTQELLELADWLRDCGVTHVALESTGVYWKPVWNLLEGQFEVLLVNAQHIKAVPGRKTDQKDSEWIADLLQHGLLRASFVPPTPTRELRDLTRYRASLAQEINRIANRIQKVLEDANIKLASVATDTLGASGRAMLEAIVKGEQDSQRLAEMSRGLLRNKIPELQQALEGRVTGHHRFLLRELLDHLYFVESKMRRIEQEVEERLGPFQSEVARLCTIPGVDRVTAWGLLAEIGLDMSQFPDAQHLASWAGLCPGSHESAGKRKSGKIRKGSLWLRRCLCQGAWAVSTKKNNYLSALYRRLAARRGTKRATIAVAHNLLVIAYYILRDGTCYRDLGADYFDRLGFKVTLEPLAQVA

SEQ ID NO: 440839 - protein, 408 aa, unidentified
MELKPMHRRVIALDVHQAKISACAIVEHDDGRVEMIQREFGAFKRDRRELAQWALQIAPEVLVMESTGVYWKSPFAALEAVGIVAWVVNARHVKAVPGRKTDLCDAQWLATLARAGLLRASFIPCAQFRQLRLVARQRHKLVGACSAEKNRLHKVLVDAGVRLNVLVDDIHGQSARAMVKALIEDKPIDQVLDRKGRLRASREELFEALCTEQLSPTHRFVADQIMQHIEQLEQRIARMDQYLLEGLQPWQAQLNLLQTVPGIDQIGAAMLLVEIGADMAAFGSAERLASWVGICPGNNESAGKRKSGRTRRGNAWVRRLLCEFAQAAARTRCAFKDKFQALAIRKGHKKSVVALAHKILRTIYAMLASGTYYQDRVVDYEALTVARNAPRWIKMLRKHGYIASPAAA

SEQ ID NO: 440840 - protein, 359 aa, unidentified
MKKFLIGIDISKEKFDVTVIKSLGEGFECEQVHYDVYDNKVRGFSAMLKKLASIGVRCEDSLFCLETTGAYELHLCDYLYGKGYNVWRESALQIKCSMGVAKSKNDKADSERIAQYALRHQDAAVLYAPMNETLRTLKALSLYRERLVDEKRAKEVSIKEIQATQKMNEDLRWVRTNSEQSVKRLEQDIKKCEERIMAVIESDEELKRTYGHITSIKGIGAVNAVAMIVSTGNFKTIPTARKAASYYGIAPFFAQSGSSVHHRKNVSNLSNRRLKGTLTQAAMCAKRFNEDIKVYYERLLAAGKPRRVAINDVRNKLVRIMYALVLNDCDYEPKHEEHRTERMSDASGKKMVHVEPLSA

SEQ ID NO: 440841 - protein, 403 aa, unidentified
MEVTKEHLDIHQFLIVGIDVHKDNHALVAANGFNQIFFEKEISNQYSDFQQIVDQIQLIARKENLRPLIALEDSYGYGQALARFFFSKGLEVKTVNPVLTRRERGYMTHPEKSDISDAKGVVKATILEGIGRLPTFRITSESEFSKDLRILVYDRDFLIKEQTRLKNQLHRLLHQSYSGYYDKIFKDPFSKKALKLWQEFPSLLELKRTKRRITKPDWLKKINTLTLLSISNLQENQIKRKVRRLLQIREELKEMDQDLEQLLSNSNQYLETLPGCARILAARTLAEVKDVSRFNSKDAFAKYAGLSPRPWESGKKKRNKKSLSGNRRLNRIIHQIALSQIGNRGYQPAKDYFQKKIAEGKSKKQALRCLKRQISDVIYPVRSLLNSSLKLKLFSNFYNFWSF

SEQ ID NO: 440842 - protein, 390 aa, unidentified
MYYCGIDVAKRKHAVALLDEKGQLVQRPFTIENTRAGFDQLLQALKALGGPVLIGLEATGHYWWALYDDLTHHEYPVVVLNALQVHAFRKSGVRKVKSDRTDAVWIGEFLRFSQPEPAKPTTAVFLQLKDLSRFRYHLSDQMGDAKRKLLSVLDRIFPEYETLFSSVFLTTSRQLLAQAASAQELADFDLHELTDLLHTASRGRFDRAKAEALQTLAKQSVGVRFLADAAQLQVRCLLAQMDLLEEQRQRVDDALAQLMDQVPQHLTSLPGVGPTTGAALLAEIGDIQRFDAPEKLVAYAGIDATVYQTGQFEARQMHMSKRGSPYLRHALWQAASMAIMHDAELRAYYDRKRQEGKAHGTALGAVCRKLITRVYIVLKENRPYEVRTKH

SEQ ID NO: 440843 - protein, 339 aa, unidentified
MCILYVGIDLAKNVFAVHGVDEHGKAVLVRPSVARAKLHELIAALPPCIVGMEACSGAHHWARLFLQHGHTVRLMAPKFVAPYRLSGKQGKNDAADAMAICEAVQRPNMRFVPVKSQDEQARLCVHRVRQGLVEQRTATINRIRGLLGEFGIVLPQRAATVRREATVHLEDLPGWANTAIGDLLSDVHRLDERIAEYDHHVLQMARDDQRSRALMQLSGIGNTTASALVSTIGNAHDFKNGRQLAAWLGLVPGQYSSGGKTRLGSITKAGDRYLRTLLVLGARAVLAAARTKDDRLSRWAIALEERRGYGKAVVAIAAKNARMAWAVLAKGENFKLLEA

SEQ ID NO: 440844 - protein, 373 aa, unidentified
MPKYSTAFGMDVHLRSTTVCALDADTGEAVARRFPGNPWGEIAGWMDGFPGPSLAAYESGYLGFAPQRELAGLGVECVVAAVSKIPRSAADSASKNDRNDAARMAKAILAHDISPVWIPSPEVEGIRDLAGAYDGATARLATAKQRLLAFLARRGFVYGGTTPAGNPRKYWTYDFLRWLDKVRPEDDGGVRTLAALRNEVEAAAEARADLLSEYGAAVDASPIAAEVAALQSIKGCAFALAAAFSAEVGDFTRFRSGRQVTAYFGLAPSQRSSGDSVRLGGISGAGNALVRKLAVEGSWCYAAARHQPKLMPRDTGVPLEIRMHGRKGSERLLRRREEMLARGMPAAKANAATAAELVRWLWALGMMCREGAE

SEQ ID NO: 440845 - protein, 337 aa, unidentified
MTAYVGIDVSKKKLDVGFYSDKLGKNGQRKKKTKVFKNDRQAFSQLESWLKQQTQHKAQNIAIGIEATGIYHEALIYTLHEQGFKLFIANPGRAKKYFESLGVTHKTDKSDSLLLARFTEDKAHKGDITWWEPESPEARHLKLLLRRLNALQKDVLRERNRLEACANTDTSPRVVKSIEDMIAVLNEEIKALLKEIDDHIDGHPQLKKNRELLESIDGVGPTVSRELTSLFSVKRFSSAKEAAAYLGLIPRLQESGSHKGMTRLSKIGPSAIRALLYLPAVVASRCNPDIAYQKQRLLAQGKTKMQALGAAMRKLVQICFGVIKHQEEYRPQTSLSV

SEQ ID NO: 440846 - protein, 314 aa, unidentified
MQDTFIGVDVAKDKLDIAGSPGCEHLCLANQRRAIGAWLKKLPAGSTLAMESTGCYHQLLAAMAHEAGMRVFVLNPKRIWHYARSEGRRGKTDRLDAQVIRNYLRDHVQRLHPWCPGTALQTAIETLQRRRQTLERHLTAMRMSMSGVEALDAEVQAVQVSVNALLRAMDRRVRFLIGQDEQMRHKDALLRTIPSVGPQGAASWGSIFARLPFARADSVVAYMGVDVRPCDSGSKRGKRRLSKQGPSYLRKQVWLCGFSASHSKVFSPRYQALRARGFAPTEAFMILGRRILRIAWAVWRTDRPFDPRLIDQTP

SEQ ID NO: 440847 - protein, 334 aa, unidentified
MENVALIGIDLGKHSFHIHCQDKSGKAILRKKFTRTKLMQFLATCPPSIVVMESCAGAHFMARRINDIGHEAKLIAPQFVRPFVKSNKNDFVDAEAICEAASRPSMRFVQPRTEVQQAMRALHRVRESLIRDKVKTINQIHGFLLEFGISLPTGDAVIKRLSLVLAEHEIPEYLSRLLMRLHAHYLYLVEQITELELELNQSIKTDDTAQRIMTIPGVGPITASMLSSQLGDGKQFSCSRGFAASTGLIPRQYSTGGKATLLGISKRGDKNLRRLLVQCARAFMMRLEHQQGRLAEWVRGQLSSKHSNVVACALANKLARIAWAITTNHNEYQA

SEQ ID NO: 440848 - protein, 402 aa, unidentified
MNAVGIDVSKGKSMVAIMRPFGEIVSAPFEIKHTASDINSLVELINSVEGESRIVMEHTGRYYEVLAHQLSEANLFVSAINPKLIKDFDNDSLRKVKSDKADAVKIARYALDKWQNLKQYSVMDELRNQLKTMNRQFSFYMKHKTAMKNNLIGILDQTYPGVNTYFDSPARSDGSQKWVDFASTYWHVDCVRKMSQNAFIDHYQNWCKRKKYNFSQSKAEEIYGKAKELVPVLPKDNITKLIIKQAVNQLNIASATVESLRTLMNETASQLPEYPVVMAMKGVGTSLGPQLMAEIGDVSRFTHKGAITAFAGVDPGVNESGSYEQKNVPTSKRGSSNLRKTLFQVMDALIKTHPQDDPVYQFIDKKRAQGKPYYVYMTAGANKFLRIYYGRVKEYLSSLPES

SEQ ID NO: 440849 - protein, 356 aa, unidentified
MSRDIKYIGMDVHKEAIVIAVLNNSGKLVMESVVETKASSILQFIHGLQGELHVTWEEGTWAAWLYDLLKPHVHEVLVCNPRRNALLKEGSKNDKVDARKLADLLRTGMLRPVYHGEHGLRTLRELARTYQTLSKDLNRVMNRVKALYRGWSIPCAGTQVYAPRYREEWLGKIEHAGVRRRAELLYQQLDGLQALRRTLRPELLAESRKHKAAKLLRQIPCIGPIRAARLLALMQTPHRFRSKRQLWTYSGLGIETRDSAQYRFVRGQLQLAKKPQQIRGLNQNHNHEMKEIFKGAATRASCGVGPLRDFYVALLDKGMKPEMARLTLARKIAAIALTLWKKEEGFDAEQLKTQAA

SEQ ID NO: 440850 - protein, 343 aa, unidentified
MRGITTIGLDIAKSVFQVHGIDAEGNVIIRRQLKRRYVLAFFQKLPACVVGLEACASSHHWSRELQALGHTARLMPPAYVKPYVKRQKNDATDAEAICEAVRRPTMRFVETKTLEQQSCLVLHRTRHLFIRQQTSVINAIRAHLAEFGIVAPVGRRGVEELLDVIGEASDKRLPEVARACLATLGNQLRMLKAQILNFDRMITAWHRSNETSKRLDELPGVGPALATALVASAADPKAFRSGRDLSAWVGLVPKQSSSGGKQKLGSISKQGDRYLRSLFTAGALAVIRYAKIHGTKHRPWLTALLARRPTKVAAIALANKIARMAWAMMARGERYREPVALAA

SEQ ID NO: 440851 - protein, 394 aa, unidentified
MKLVGIDVGKNSHHFCVMDKETGEFNVTPTSFPNNKEGFDFLINSLKPYSKKSILIGMEDTGHYHVALLKFLLSNGYTVALINPKTTDLTRKMEGGITKNDKLDTITICDVLDTPERKKQYRITKVDRFDLYEQRQLTRHHHNLKEELNVYCNRLQKSIDLVFPEFNTLFSSKYSIVYMNLLKTFGSAEAIASTDIRTIRKCFEIKGRGNRISLTPEKLKECAKNSIGISSEVETIQIKHLVSQITLIKEQIAEIDKKIEEFSITNNSPILSIPGISHFSGTSILAELGDIGNYSKPSQIIKFAGVAPYHYESSQYNAQHTAITKKGSKYLRKTLYQIILTVINNNPVFKKYYRLKISQGKGHRCAQGHCIRKLLRIIYHLLETGQSFDPALLR

SEQ ID NO: 440852 - protein, 437 aa, unidentified
MICVGSAGGTPRVLRPREAVVEIVHSRVAGIDVHKKQVTVAVRTPGKRGRQQQVRRYATFYAALRELTAWLTELGVTHVAMEATGIYWRPVWHALAEAGSLEVLVCNAAHVKNVPGRKTDVGDAAWLAELLEVGLLRGSFTPPEQLVAMRDLTRYRASLVHERTREIQRLCKVLEDGGIKLDSVASEPLGVSARLMIEALIAGERDPQVLAAMARGRLRKKIPDLAQALGGRFNDHHGLMCQLHLDHIDHLAAAIERVEAEVEKMIVPFELPRRRLCTIPGIAGRVSAAIISEIGVDMSWFPSGAHLASWIGLCPGNHESAGKRKTGKTRKGNPYLKSVFVEAAWSAVRVDGRLKARYQRLVRRFGGHRNQVAIKKAIVAIAHTLCVIVWHILHRGTDYRDLGADFYLRRDNPDVRKNHLVRQLQELGYSVELTLAA

SEQ ID NO: 440853 - protein, 449 aa, unidentified
MSTTPTPTLPVLDPLAAFVDVGSEEMYVSIAGGPPEVFGTFTTELHRLRDWLKERGVKSVAMEATGVYWLPLYGVLETAGFEVVMVNGKYTRNLPGRKTDMKDCQWGATLHAHGLLGAGFVPPAAIRRLQDYLRLRADHVTSAGASVQHQQKALARMNVKLHDVISSLAGASGQNVIQAILAGERDPERLLALCDVQIQKKKAERVKESLRGTWAEEHLFALRQAVEDWQHFQRQIAACDRQLEAVLREISGPEEPPTGPKAKATGAKRPGVNAPEIEGLHGLLCRLCGGKDLTVLPAHTDYSLLQLLGEVGTDLTKWPTEKHFTAWLGLAPGSHQSGKRKKSVGRKRNRAGRLFCVMGRSLARSKHIALGGFYRRMAGRRGGLVANIALARKLAEWFWRVMVKGVSYVEQGLAQYEKQVLETKRRALQRLAKQLGQVVMPNPTARKNA

SEQ ID NO: 440854 - protein, 343 aa, unidentified
MVTIGIDTHKATLASCAVDELGRELAVTTFANDPQGHRRLLAWAVLLGPDRRFGIEGSGSFGAALARGLLTAGEMVIEVPATLTDRERRHLHRRGKSDPADALAIARVVLREPTLHRVMPAATADDLKLLVTARDELQVERTRVANRLHADLLVLAPGYGERIPNLVAARHLAAVGRLLGRSPAVRVQLARKRLLRLRTLDREIATLEAQLADLVVASRSSLPRLPGIGMLLAAKLLGEAGDVRRFRSEAAFAAVSGTAPIPASSGQTQRHRLNRGGNRQLNRALHYMAIVQARTHPPARAYVARRQAEGKTWREALRCLKRHLADVVYRTMLLDLQAAEIRA

SEQ ID NO: 440855 - protein, 364 aa, unidentified
MVVVGTDAHKYSHTFVATDEVGRQLGEKTVKATTAGHATAIMWAREQFGLELIWGIEDCRNMSARLERDLLAAGQQVVRVPTKLMAQTRKSARSRGKSDPIDALAVGRAVLRETDLPLATHDETSRELKLLTDRRDVLVAQRTSAINRLRWLLHELDPERAPAARSLDAAKHQQALRTWLDTQPGLVAELARAELTDIIRLTGEINTLAQRISARVHQVAPALLEIPACAELTAAKIVGEAAGVTRFKSEAAFACHAAVAPIPVWSGNTAGQMRLSRSGNRQLNAALHRIALTQIRMTDSRGQAYYQRLQDAGKTKRAALRCLKRRLARTVFQALRTVHQPSSEHTQPAAACHRSYCSRSCLSG

SEQ ID NO: 440856 - protein, 345 aa, unidentified
MKIIGCDFHPSFQQVAICDLETGEFQERKLSHADGQAERFYRELSEPALIGIEATGNSQWFLDLVQRLGHEIRVGDGAKIRASYVRRQSTDKRDAGHILTLLLEKRFPQLWRPSAAMRDQRQLLRHRDKLVEIRTKVKNSLQHLAMNRGMQKKSRLWTRLGMEQFQRLAMPGWAGVRREDLLHLLKELDRQIEQLDRAVEQAAEQHPQAQLLMTQPGVGPVTALAFVLTIGDVARFAGSKQLTSYLGLVPSEHSSGSKRRLGAITKQGNCFLRKLLVEAAQSAVRKDEGFRKEYQHRCHHRPKAVAKVAAARKLAVRLYWMLRSDVGYPEIAHIESNPRVPLGDV

SEQ ID NO: 440857 - protein, 345 aa, unidentified
MPVAEVDTFVGIDVSAHELSVALRRGQSHDKAAMAKFPNHPSGHKALVAYLLRGGGRVRVCLEASGNYSLDLALTLQAHRQVEISVINPRRARRFAESLGERSKTDPVDARVLCEYAARMPWVRWQPPSPVALHLRALTRAIADLGVIHTQQNNRAYAAAASQAVPVLVVKEMQRHKKYLEQRMTRLRREAVRLIACDPELERRFRLMLTTIGIAETSALQILGELAVLPDMLDARQWVAFSGLDPRLFKSGKSVEKRPRISRSGSRHLRRALYMPALVALRRDPYLRVFYQNLLARGKARLQAVVAVMRKLLHALFAMFRSNQPYDGSKLCAVELAVHAIAACA

SEQ ID NO: 440858 - protein, 363 aa, unidentified
MSDGTLMTTSAAITILALDLGKFKSVACRYDPATGEHAFETIATTPPAVHDMLIEASPAVLVIEACSVCGWISDLAESLSIKVRVANTMGEAWKWKRVKRKTDRDDALKLAKLAATDQLPVVHIPELSVRQHRSLIKYRHALIDRRTGIKNTIRSLLDAQGLSLPGRSRGWTIASLNDLKTMSRPLAECDGANLWRGQLASELTMFEQVTALIKEADKKLDAIAATDERVTRLRTIPQVGARLAELVVTTLDDAKRFKTAKQVSAYAGLVPKQYQSGQMNRLGRITGQGPGLLRRVLVQVAWGLQRRTETRGHAVFERLCHGQRTRRKQAAVALARKILIWCWAILRDQSVWDDTRDRRLTVT

SEQ ID NO: 440859 - protein, 346 aa, unidentified
MNCIGLDVHQTSTFGSVVREGREVFRFEVETQAESLQERIGQIKGAKRVAVEEGNLSDWCKRTLEGIVKEVIICDPRWNRLISEGDDKVDPVDAYRLGLLLWLGQLRPVYHANLELQQLKEAVISYWQSSADLTRAKNRLKSQFARRGLAIKDGSLYRAEGFERARQQLEESWGQTQIVDSLFEQLSFFRQQQAERLRHLRQQQRSHLPILKQLRSIPGVGPIVAVTFFSFIGDPWRFPNKRKLWKYCGLAVKQALSAGRRKGYPRRSQQYNRKLKHVLGIAAQAALRCQDGNLLTETGRILVQQGSDASCVRRTLSRKIAVIGWSIMKDPQPYREEVHEKTNSIS

SEQ ID NO: 440860 - protein, 352 aa, unidentified
MDATTVAVDLAKNVFQVALANRAGRIVDRRRLSRGQFERFLETVAADTEVIMEACGTAHYWGRRAQARGLRVRLLPVQYVRPYVRRDKTDRTDTEALLEAARCGEIRPVPVKTVEQQTVQALHRIRTQWQTTRVARINALRGLLLEQGHGLPVGARTVLRRVTALLEDSEVSLPDALRRMLAIMVDEIRTLEAQVLAIDHQLAEIAAAHPVAARLQTIPGVGVLTATALIGAVGQIHAFRRGREFASWLGLTPRESSTGARRHLGRISKRGDIHLRFLLAHGARAVLRSAECTARRAPQRLTRLHEWALRTASHRGRNKATIAVANKLARIIWAVWSHDDAFRVQAPATVAA

SEQ ID NO: 440861 - protein, 340 aa, unidentified
MDHIAIDLGSRTSQICVRDAKGQIVEERACTTRHLGAYLRRRPAGQVIVEASSEAFGVARMAQAAGHQISVVPSVLSRVLGVGYRGTKTDVRDARALSEASTRVALPSIHIPSEHSVHWRAMSTSRQALVRTRTLLINRVRGYLRTQLRTPVRGTSKTLPKAVRRAMESSEDGLPSHIEAVLLSIETLSVQIADIESEMATILDREPVAQLLMSMPGVGPITALRFMAAVDDISRFPSAQALTSYLGLHAGERSSGQTRRRTGIIKAGSSAVRHALGQAAWSLWRTRPEDPMVLWARRIAERRNRQIALTALSRKIAGVLYAMWRDGRPYQPQPTAQPTS

SEQ ID NO: 440862 - protein, 339 aa, unidentified
MKITTFGLDLAKRVLQLHWVNVESGEICRRQLKRGQVLEFFANREPSVIAMEACGSAHYWARKLAGLGHEVWLIAAQFVRPFVKGNKTDASDAQAIWEAAQRPGMKFVAVKSEGQQGVLMLHRMRAQLVKIRTMQINQLRGLLYEFGADLPPGRQKGVERIPSELDKLEAVLPAMVVQTLRSQLNRIQALDQEIAQIEKSLAAWKKEDQAAKRLMDIPGVGLLTATAAVATIGDARAFKSGREFAAFVGLVPRQSGTGGRVRLLGMSKRGDVYLRTLLIHGARSVLSHDKQREPWLEQLLSRRPFNAVAVALANKTARTIWALLAHERTYQKGYAGSAA

SEQ ID NO: 440863 - protein, 341 aa, unidentified
MNITTIGLDLAKSVSHVVCCNQAGKIVRKKMLRRTQILHFFSELSPCLVGVESCASAHYWAREIAKYGHQVKQIAPQHVKAYVRGNKTDFNDALAIAEAVVRPEMRFVRTKTQTQQDIQALHVMRKKCERDRTANSNEIRGLLNEYGIILPVGISHVYKSLPELFDRQVENGLSELFKELLERHYQKLVELDEHLDWYTKKIKQLSQHEACRRLQSIPGVGPIIASALYQHIGNGSEFKNGRAVSASLGLVPKQHSSGGKHNLQGISKRGDSYLRTLLIHGARAVMRVSKHKETPLSQWIKRIEQTRGRNKAAVALANKLARIAWALLAQGGDYQPELTTA

SEQ ID NO: 440864 - protein, 356 aa, unidentified
MSRDVKYIGMDVHKEAIVIAVLNDGGKLVMESIIETKASSILQFIHGLRGELHVTWEEGTWAAWLYDLLQPHVHQVLVCDPRRNALLKEGNKSDKIDARKLADLLRTGMLRPVYHGEHGLRTLRELARSYQTISQDLNRVMNRIKALYRGWGIACGGTQVYAARYREEWLHKIEHAGVRRRAELLYQQLDGLQVLRRTLRSELLAESRKHKAAKLLRQIPCIGPIRAARLLALMQTPHRFRSKRQLWTYSGLGIETRDSAQYCFVRGQLQRAKKPQQIRGLNRNHNHEMKDIFKGAATRASCGVGPLRDFYVALLDKGMKPEMARLTLARKMAAIALTLWKKEERFDAEQLKTQAA

SEQ ID NO: 440865 - protein, 362 aa, unidentified
MSESTTIIAFDQHAQSVMAAVLGPRDAEPALHALTSDLPAIGRFVRRVLEHGPVRCCYEAGPCGFALQRFLTAHDVPCEVIAPTLIPRRPGDRIKTDRRDARQLAVLYRAGALTPIHIPSEQEEAIRDLLRCREAMNADLLRARHRLKKFLLRHDRRYTHTKCAWGPRHTAWLRSLQWPLPALEQTFGAYLRAVEETATRLAILDETVRTYFACELFAEPVRRLRCFRGISDLGALTIAAELGDARRFPTASRVMGFVGLVPSEHSSGTRRGRGAITKTGNAHLRRILLEAAWHYRHPPQVGVKLRARQRGAAPEVLSRAWAAQHRLSRTYRRLTGRGRPPQIAVTAVARELVGFVWATLAS

SEQ ID NO: 440866 - protein, 372 aa, unidentified
MNYNTVYVGMDVHKESFTFCAYTIDAEKGSHFQRTEADYKNVLKYLEFLRTVYGNDANFICGYEAGCLGYTLYHQLTEHHVTCVILAPTTMLEQRSKRRIKTDRRDAEIIAKCLAQHNYSPVHIPTATDEETKEFLRMRDDHKLALKKVKQQILAFCLRHNYRYDGNSHWTAAHIKWLKSLKPEALYKEILDEYLLTYTTLSDKLERLDKRTEELASKDEYRESVKKLCCFIGIKTHTALSVLVEIGDFQRFASAQKFASCIGLVPDEDSSGDEQTRLGITKAGNRHIRMLLTEASQCYARGQIGFKSKELKSRQSGNSSQVIAYADKANERLRRRYYKMVLGKNKKHNVAKTAIARELACFMWGMMTDHIA

SEQ ID NO: 440867 - protein, 346 aa, unidentified
MEHYVGLDVSLKLTAICIVDRSGKIEREGVVTSDPETIAAFVKSHAPHVARIGLEAGATSTWLWTELNKMGLPVICIDARHAKAALKMQINKSDRNDAVGIARIMQCGWYKEVRVKDLDSHAIKALLVSRALLVKIKRDIENQIRGLLKNLGLVIGRAKMNVFAARAAELADARPAVAAAVEPLLKARDAVGRQIADLDRKVLRLARNNAQVRRFITVPGVGPITALCFLATIDDPTRFKRSRSVGAYAGLTTRRYASGEIDWTGRISKCGDKMLRTYLYEAANVLLTRIEKWSALKAWGIRLAKRSGLRKAKVAVARKLAVILHRMWIERTEFKWSSKEAANQPA

SEQ ID NO: 440868 - protein, 387 aa, unidentified
MPQLNDLSKSLVALEQDATLIAVIEMGQSSWLVAGIVPGVERQPLKKLTTDQDALLQLLHRWRKEANEAGHVIKRITVAYEAGRDGFWLARWLRAHEIEAYVIHPSSVPVSREHRRAKTDRLDTELLKRAFLGWLRGEPKHCSMAAVPTIADEDARRPSRERENLVKEVTRLVNRMKANLARLGIRGFRPHLAQAAGQLQTLQTPEGTAVPANTLAELRRDMDRLRFVKQQIKQIEAARVQRLESEPGERRHAMVYLLARVVGIGVESADMLVQEVFSRKLRDRRAVARYAGLTGAPDESGNKRRERGLAKAGNARVRRGMIQLAWTHLLHQKDSALAQWYRARTADARGRTRKIMIIALARKLLIALWRLVTTGEAPAGLLIRPAA

SEQ ID NO: 440869 - protein, 369 aa, unidentified
MGEYSGAFVAFDVAKMKHAVAVAEAGRAGEVRFLGEVENTPARIERMIKKLAGRYGRLQVCFEAGPTGYGLYRQIAELGHDCLVVAPTLIPKRPGERVKTNRRDAVTLARLHRAGELTGVWVPDPVHEAIRDLVRAREAAMDDLRRKRQQLLSFLLRHGRIYVGGGHWTAAHRRWLGRQGFGHPAQQIVFQEGVDAIDDAAQRRRRLEEQLAAIVPSWSLAPAVQAYQAMRGASFLVAVTFAAEIGDVRRFEAPRQLMSFLGLVPGERSTGDTVWRKGLTLAGNRRARRALIEAAWTYRYPARVSETLRARLEGLPKTVRDIAWKGQVRLCARYRRLSTTGKKLPVVVAAIAREMAAFLWAIGREVAPV

SEQ ID NO: 440870 - protein, 428 aa, unidentified
MKGLSERADRATLVLHIVPNLKPIHDMNSTPQAPTPGNPRIYVLRPFRPTVTLAVPEPLAAPKACVTPTPPAPAPLPPRQPLPRAVIDPNKPMLKLGLDVHLEFIMAVAQKDHANPQAPRKFTNDELVEQVRQWNAQGLQIFCVQESCGFGFVLHRRLVEAGAQSFLITPMALNGQRKTDKLDARALALRLSRWLDGNRDELAPIRIPSEAEQRRRETTRRRQFLARQIRCLANRGHGQVAEYCHLQLPHGWWGPRQWKKLAALDPWVLSLLADLRTLILALEQQVDALEAEIALRIQDQPRPKGLGELTLVTLDAEVCDWNRFGNRKHIGSYTGCCPGEHSSGGKRRVGAIDRMGNGRVRALLVEAVWRFLRWQPAWKAAQRMQVKLADGPSMRKKTVIALARQLAVDLWRWRTGRCTMADLGWVAA

SEQ ID NO: 440871 - protein, 410 aa, unidentified
MIPAAIGPAPLLVAPIGFMMTNGTACTRPEETVPNEMPGDTADHRPFMEWPAPLLHHVRVGEMEGEAMNVDVLGIDLGKNSCSVVGLDPTGRVMLRRRMRRESIVPLAAKLSGCVVAMEACCGAHHLGRLLAAQGHEVRLMSPEYVRPYVKAQKNDDRDAEAIAEAATRPTMRFVALKTEAQLDVQVLHRVRDRLVGQRTALMNQVRSILLERGIVVPQGRRSLLNALGELSAESDGDGVGPRVRLLLDDMLDQWRGLDRRIAALDDEFAGMARNDPAARRLATIPGVGVLNATALVAAIGDGRTFSRGRDLSAWLGLVPRQATTGGRPKLLGITKRGSKYLRKLIIQGARAALPSLSRTATPLGNWLRGLLSRAHGNTVVVALASKLVRIAWALLRNETAFAAGGLAAA

SEQ ID NO: 440872 - protein, 351 aa, unidentified
MLLIGVDYHPSFQTIAFFVEETGECGEQELNHSEGQAEKFYRDLKQQGICVRVGMEATGYSRWFERLLAELGFELWIGDPAEIKAKRVKKQKFDREDARLLLRLLRENNFPQIWVPDPENRDLRQLLWHRHRLVQMRTRIMNQLHALAMNEGYRWKKKLFSEQGRGQLEKLALGPWASRRRQELLELLDRMNPTIAELTAAVEREARKRPEAMRLMTHPGVGPLTALAFVLIIGTPTRFQRGKQIGTYVGMIPCEESSARKQRLGHITKQGSSLLRFLLVEAAQAAARIHPDWRRRYMHLAMRRHKSIAKIAMGRRLAVRLYWMWRNGCEYSPLLEFGSYAGQLGTRNGAK

SEQ ID NO: 440873 - protein, 351 aa, unidentified
MARSTTSTCVETYAGIDYHKKFSVVTLGDSDGQVLKTERVPNDRQSVTQFFRQFPGLICTVESCRGYEWFVELLQSLGLTVHLCHAYAVKLIAQSRCKTDKIDSKILMQLLAKGFLPTCYQPTPEERALRERLRWRMQLVRQATRIKIRIHCLLDKENQGVIETQLFRARGRKLLSQVVLASPTRQQLLSEHMQLLEYLEQMVKRADTEIQELAKQSGQAKLLMTIPGIGPLSALMILAELGDIKRFKRSAQVVSFAGLAPSVYSSAEVRHTGAITKQGSIWLRWILIQDAWQAIRCSVPLRYHFVSVSRRCGRHAAVISVARKLLEIAYRVLRDGKAFDPNLVGPNKQSA

SEQ ID NO: 440874 - protein, 331 aa, unidentified
MLIIGVDFHPEFQQIAWVDTDTGDFQERRLQHREEAETFYRALAAAGQKMRVGMEASGHARWFERLLGELQCELWIGDATQIQSKRGRKQKTDRQDAQHILRLMLKEDFPKIWVPSWENRDLRQLLWHRHRMVQARTRIMNQLQAVALNEGLRCKKRLWRAGGREQLESFRLAPWASRRRHDLLELLDRLNPTIAELSQAIEQEAEKCPEARRLMTHPGVGALTALAFVLIIGNAERFPRGKQVASYLGLVPLEKSSGNRRRLGHITKQGSSMVRFLLVEAAQVTVRSLPEWRSRYFRLMVRRGRKTAKVAMARRLAVRLYWMWRQGWDYL

SEQ ID NO: 440875 - protein, 457 aa, unidentified
MLICEGAVSDQDQEKPLSLFQSLAGKVVLLLKKTDLLSTLFVGIDISSRSNVVALLDFESQKPLQTFSVANNQPGAIELAQHLLEFLDSRPDLRKLVVALESTSFYGVHIANFLSSHETLASFRTAVYCLNPKTVANYKKSFIDLGKNDFVDAFVLADFARVGRITNKPWRGSQFLALQRLTRHRLHLAKSLTKEKAYMLSNIFLKFSEFSLLDGEQQPFSDRFGKAAASVLTDFLSTEEIVDMPLDALIRHICEKGRNRFQDPEATASLLQKAARDSYRLDKCLYEPLTISIASSFNLISTYTAEIKAVNKAIEKTLKGLDPAAYQCLLSIPGIGSVMAAGILSEIGWIDAFKSQESLAKYAGLVWRENQSGNYRADDTPMSKAGNAYLRYYLLEATSHVKNHCQEFAAFYQKKYAEVKTHQHKRALALTARKFIRLIFGLLAKHQLYSSNRVVQA

SEQ ID NO: 440876 - protein, 414 aa, unidentified
MMDVIHPRCAGIDCSKKDAKVCVRIQGEGRRKKSATVTTWGSTTAQILALREHLVAANVSCVVIESTSDYWKPFYYLLDDELNVVLVNAAQVRNVPGRKSDVSDAAWLADLGAHGLVKASFVPPAPIRALRDLTRTRTVITRERTREVQRLEKLLEDAGIKLSSVAAEITGVSGRAMLEALIGGQRDPAVLADLAQRRMRSKIPALTEALTGRFTDHHAFMTRLFLDRIDAHSADIARLDARIEEAMQPFRAARDLLTSIPGFSRIVAEVFIAETGADMSVFPTAGHLASWAGLSPGSNESAGRVKSTKTRPGNRYLKGALGIAALSVARSKNTYFSAKYHRIANRRGPMRAIVAVEHAMVIAAWNLLVNGDFYRDPGPNYYTARQPARTKARAISQLETLGYRVILEPLTQTA

SEQ ID NO: 440877 - protein, 426 aa, unidentified
MIKSTSNQGTVNTVKKRFSTFRADLEDLRDWLLQNDCHHVCMESTGKYWIPVYNVLESAMNEVRVCNPKWLSLVKGEKDDNKDAARICDLYRNGMTKSSYIPNKQIRTLRELTRLRQKYVQQRTSDHNRLINCLTVSNYKLDMVFSNVRGRSAFLIINLILSGEPYTDEDILKCVSSRCKAPREDILRACHGFELDKLQREKLRIIQDHIDGLTKEIEKLDQLIAEACEDHKDYIRLLMTMPGVSEISARKIIAELGTEMDQFVKGSRVAKWAGLAPGSDESAGKIHSRHITKGGKYLKPVLIEAAWAAVRSKNPYYRCKFEILSLRLGKKRAIVAIARKMIISIFHMFSDMKEWRPKDCDDCFVPRSLSVQKESRKLNKTVNTLKAMGLTEHQILKTIAAGLDDPEISDDEGNRYDLIIGEYRTA

SEQ ID NO: 440878 - protein, 408 aa, unidentified
MKTYILRDPQPVEPQKATRSPRPKAAVPAAAAVPVEGPILFVGLDVHNESIAVSLAPSDATEVRRYGIVGGEHDDVLKLIKKLQAAHPGTTLKVCYEAGPRGFALCRCLGLHGVDCILVCPSKVPRKPGERVKTDRRDADDLARLYRAGELTGIYVPEPEDEAMRDLLRARFQVGRQQHRARQQLKMYLLRHNLRYGGQTSWTPAHLRYLAKIKMPFPVQQIVFQEMLDVISEATARLERYDQEIERAVPGWRWAPAVRALMSLRGLALLHAATLVAELGDFNRFEHPGQLMGYLGLVPSEHTTGQDRQQGGITKMGNAPARRALVEAAWQYRVPARLSPHLKKRQEGLPKTITDIAWEAQRRLHHRYTHLTRVGKKKSQVAVTAVARELTGFVWAIARQVQPVAAKP

SEQ ID NO: 440879 - protein, 426 aa, unidentified
MEETDEAVELVERVAALDIGKATLTCCIRIPHEENPARRRQEVDEYPTTTRSLLGMADRLRSHGVTLVAMEATSDYWKPAFYLLEAEGFECWLLNARHVKNVPGRPKTDKLDAVWLAKVVERGMCRPSFVPPKPIRQLRDLTRYRRTLIREQTREKQRLEKILEDAQIKLSATVSDVFGVSGRQMIQAMIAGQRDPKVLAQMARGPMRAKISKLQEALTGHFEDHHAFICQMMLERIDELTTKIEELSRRIDLVIAPFAHQVTQLDEVSGIGQVAAQELIAEIGVDMTVFPSAAHLVSWAKFAPQARQSAGKAKSASTGQGNPWLGGTLGEIVAASSRTDTFLAERYRRLIKHRGKGRAIVAIGNSVLTIVWHLLADPQARYHDLGSDFYESRINQQRHQRNLIHQLERLTGQKVILQPRPEQPAA

SEQ ID NO: 440880 - protein, 339 aa, unidentified
MAYYAGLDVSLEQTSICVVDEAGTVVLERRVATEPAAIAAALAALAEPPARVLLETGGLTPWLWHELGARGLVVHCIDARRAKAQLALRPAKTDRNDARGLAEIARMGWYANIRVKSLDAHALRAKLAARAQLVASARDLGNQLRGLLRAFGLRVGQGQGQAFEARVLTLVAGCPALQPVADALLAARRAVRAEVERLDRVLLREARDNATCQRLMTVPGVGPITALAYQSTIEDPSRFGRAREVGAYVGLVPRRHQSGEVDRSGRISKQGDALLRGYLYEAATVLISRLQRPCALRDWARALAARIGTKKARVALARKLAVLLHHLWTHQEDFRWAPA

SEQ ID NO: 440881 - protein, 346 aa, unidentified
MLHAGLDLSRKRLDFHLLDERGETVEIGTAPPDADGLRGLATRVGRHGQPLRAAIESMTGARFVHDQLELHGWEVEIADAVKVKGLAPLACKTDRIDAWVLAELSRLHLVPAIWLPGPYVRAERERARFRLHLVRHRTMLKQRVHATLLTHGRPCPVSDLFGVRGRELLARLCLPEPWAGTVEASLRLIDELEHEIAGCEAELKALGAEHRYVPLLTTIPGIAWVLAYTIAAEVGDIARFASPAKLAGYTGLCPRVYQSGESDRRGRLSKMGPRYLRWALIEATTHASRHPAYRERYERTRQRLGKQRGPRVAQVDLARRLAEAIWHMLTCNRPFAPAGATAPMTA

SEQ ID NO: 440882 - protein, 338 aa, unidentified
MGLYCGIDLHSNNSRVVVVDESDRAVFSKRLPNDLGAILRELAPYRNEIVGIVVESTFNWYWLVDGLVESEYPVFMANPSAIQQYSGLKYTDDDSDARWLAHLLRLGVLPQGYIYPREQRPVRDLLRKRSQLVRQKVADILSIQNLFSRNLGLRLSADKIRKLTGEDVDGLIGDELLALAVKSTLSVLRGIESEIDHLETVVKRQVKQRPWYILLKSVPGIGEILALTIMLETGDIARFVKVGHFASYCRCVGSKKLTNGKVKGKGNTKNGNKYLAWAFIEAAHFAIRFDNQIQRYYQRKKAKTKGVIAIKAVAHKLARACYFIMKNQTPFNVARAFA

SEQ ID NO: 440883 - protein, 343 aa, unidentified
MESYVGLDVSLRRTSICVVDKAGKLLCEGTVNSTPEAIIEFVKSKAAGAVRIGLETGPTSTWLWTEIKALGLPVICIDARHAKAVLKMQINKSDRNDAFDIARIMQCGWFKEVRVKRIDSHVVRALVESRGLLVKMKRDLENQIRGLLKNLGLLIGTARGQAFHARVQELVEGKPYLAVAVLPLLETRNNIVRQITDLDRKVLMLARNDNRARSFMTVPGIGPVTALCYRATIDEPSRFKRSRSVGAYVGLTTRRYASGEVDWTGRISKCGDAMLRSYLFEAAGVLLTRVHKWCALKSWGTRLAKRVGLRKAKVAVARKLAVILHRMWMDGTDFQWSADKVAT

SEQ ID NO: 440884 - protein, 347 aa, unidentified
MNFYTTEHSHYCGIDLHARSMYVCILNQKGETLVHKNMRTEPDAFLKAIAPFREDIVVCVECMFTWYWLADLCAKENIRFVLAHALYMKAIHGGKTKNDKIDSRKIAGLLRSGMIPQAYVYPAEMRATRDLLRRRNYIMRRRADLLAHIQNTNSQYNLPEFGKKIAYKANRHGVPEHFTDPNVSISIKTDLELIDHYDQLLNKLELYILQNARHHDPNALYLLRTVPGIGKVLSLVILYEIHDINRFPRVQDFASYARLVKCPRESAGKRHGTSGNKIGNMHLKWAFSEAAVLFLRNNPEAMKFKKRLEKKHGKSKALSILAHKLGRAVYYVLKQQKAFDMKKFLAT

SEQ ID NO: 440885 - protein, 344 aa, unidentified
MKHYAGLDVSIKETSVCIVDSTGQVVREVKVTTEPEAILAILADEALTIERIGLEAGPLSQWLYSGLAEAGLPVICVETRHMKAALSAQVNKSDRNDARGIAHMMRVGLYRPVHVKTLASQKRRMLLASRKLLQAKALDIESDLRGTLRNFGLKVGMISTVKFETRIREIIAKYPDLAAIAEPLLIARRVLREQLGVLHRQLLAAVRHDEVCRRLMTMPGVGPVVALTFRATVDVPCRFTNSKAVGAAFGLTPRRHQSGEIDRMGSISKCGDAMMRNILFEAAQSMLTRTIKWSWLKAWGMKVARHRGMRRAIVAVARRMAVIMHRMWVDGTEFRWTNSTAAAA

SEQ ID NO: 440886 - protein, 457 aa, unidentified
MSDAKRSRRRREMSPVHPDAAAIDIGATMHVAAVGPGRDAEPVRTFKTFTEDLHRLADWFTGCGVRTVVMESTGVYWIPVYEILEQRGFEVVLVNARDARHVPGRKTDVSDAEWLQRLHEYGLLRGSFRPQGEIAALRAYLRQRERLLDDAAAHIQHMQKALTQMNLQIHHVVSDITGVTGMRIIRAIVAGERDPDRLAAYRDRRCHASVETVRQALAGNDREEHVFALAQAVELYDVYQTKVTACDTRIEAVLERLRPASAKPVGPLPAARHNTRQPNAPAFAVREALYAVLGIDLTQIHGLGPYLALKLVGECGTDLSAWPSAKHFTSWLCLAPSNKISGGKVLSSRTRRSGSRVAALLRLAAVTVGRTETALGAFYRRLSARVGKAKAVTATARKIAVLFYNALRHGMDYADPGASYYEDRYRRRVLGNLQRRAKSLGYVLQEAAPGPTGRSVS

SEQ ID NO: 440887 - protein, 388 aa, unidentified
MHVYVGVDIAKELHYAAIMDSDGVVTKPFSFENNDKGFNLLLSHLAPYNKESILIGYESTAHYQENLAYFLKSLGYRTAEINPLQTTALRKANIRNTKTDSVDARLICLALMNHHIQGDQRDSVRLDDLYQLCKMRMDTMKKRTTCKIQFVAIMDRIFPELASFFDNNLHTNTIYRLIDSFPLPSQIKKTRIDILTKLLHKASRGHFKKEKAQKLKNLADISVGIPSDIFAFQAQQLVHQIEFYTDQIQTIEERINTNPDVMSSPLMTIPGIGTFCVACILSAIKNINDFDAPCKILAYAGLDPVIRQSGKFTASHTRMSKRGNSLLRYALVWSAGNVVKNNHTFAEYYRHKTEDQGKSHYQALGHCAKKLVKSIYHMLKYNESFNLD

SEQ ID NO: 440888 - protein, 369 aa, unidentified
MDNQSTVYIGLDVHKDSITVARVGAAVTDPVVDVGTIGTQQYAIDRLIGKLSGHGPLLLVYEAGPCGFWLQRYLSGKGQRCVVAAPSLIPRRPGDRIKTDRRDARHLALGLRAGTLTAVHIPTPDQEAFRDVVRAWQQAKRDISKARQRLKAFLLRNDIRYTGRATWSEAHRRWLARLVLPSAAQQIVLQELIDTIGEREARRQRLEAHLEQLAPSWSGRPLAEALLAFRGVQRTVAYTLVAEAGDLARFAHPRRFMAWLGLVPGEHSSGATRRQGGITKTGNRWARTLLVEAAWAYRYTPKVSPIIERRAQHIDPALRALAWKAQLRLTHKYRRMRARGKQHNLIVTAVARELAGFLWEAARLVATPA

SEQ ID NO: 440889 - protein, 346 aa, unidentified
MTILDCTRPVTGGVDTHLDLNVAAALDPIGGLLGVAEFRTTRSGHGLLVDWLGGFGPVAGVGVEGTGSYGAGLARFLRGAGIEVVEVDRPNRQARRRTGKSDPADAIEAARAALSGRAQGAGKTRDGNVEAIRALVVAKRSARSSKIKALNQIRHLGFTASDELRERLSGISRQHLGAAAARLRPRAGSDAITFATKTALSTLGRRVLALDEEKERLNVLLAELVGKTAPSLLELHGVGVDTAATLLVAAGDNPGRLRCEAAWAHLCGVAPIQASSGKVTRYRLNRGGDRQANSALWGIVITRLRSDPRTQMYMERRLKEGRSKPEIIRVLKRYVAREVYPHLPRG

SEQ ID NO: 440890 - protein, 364 aa, unidentified
MTEHITHVAFDMHQDSITAAWLRPGATTPEVRKIPNEAKPLRRLVEQVLKAGPARACYEAGPLGYEPQRQLAAWGLPCEVIAPSLIPRRPGVRIKTDKRDAKKLVGLYRAGELTAIRVPTPAEENARELVRCREVAGEDALRAQHRLRKFLLRHGLRCPAGRAGSQAWWRWVQALRLSDPPAQRTLDEYLLAATTGRARWKALDPEVAALAAGEPWVRPVGWLRCFRGIDTLTAATLVLEVFDFRRFGTPRPFMSFVGLVPSEASSGVRLRRGSITKTGNAHLRRVLVEAAWHYQHRPGPSALIRARRAGQPPAVVAVGEQAEVRLHRRFARLVARGKLRTVAATAVARELCGFLWAAMLAAPA

SEQ ID NO: 440891 - protein, 412 aa, unidentified
MKDLLEISCGLDVHKEKIVACILTGPLGKPTRSEIREFTTLIPDMIALRDWIVSQNCHHVAMESTGIYWMPIYEILEDAFSGDITLLVVNARHMKNVPGKKTDMRDSEWISTLLRAGLLNGSFIPEKRIREFRDLNRYRKSVIRDITSQKNRIEKFLQSSGFRLSSFISDIFGASGRNIILHLIEHGQIDKTALDSCLKTKTRNRIDEILMSVNGTLSEHQKAFLRILMTHYDSLKKHLAEIETSLEEDMAPFALQVEQLNSIYGISTTASCAIIAEIGIDMKPFKTAEHICSWAGLCPGNNESAGKRKSTSVTKGNPYIKSMLCEIAWVIAGKRNTYLSAWYWRIKQKKGAKKAIVALARKLLVIIYTMLKQGTVFDESCFETRRKHCEQKQLSRYIRELEKHGYHVEAQS

SEQ ID NO: 440892 - protein, 340 aa, unidentified
MGVFVGIDVSLENCAVCAVDEHGKLVKETKVASDPGALDACIRGIPGVVEAIGIEAGPLSQWLHKSLTDLGLPVVLMETRQVKAALKAAPVKTDRRDAAGLARLLQMGWFRPVHCKSLSAQELRVLLGARRSVQDAAINIEMSIRGMLRNFGLRLGRIGKVSFEDRVRELTEGNKLIQLSIEPMLRARAALRSELVRLERMARDITREDPVCRLMMTMPGIGPVVALTVRSTIDDPGRFRRSKDVGPSIGLTPRRYQSGETDIIGGVTKAGDLDMRTALYQAATVVIHRSKKQTWLRAWAERVVRRRGAKRAAVALARRMGVILHRMWVDNTEFQAARQV

SEQ ID NO: 440893 - protein, 322 aa, unidentified
MEMLSFGGIDVSKDRLDITVLPDEQCSSVSNDAAGWAELIEQLRGSSITAIGVEASGGYERGVVRALLAAGMSVRQINPFKLRQFAKASGILAKNDRLDARMIASFVAIMPTRPAQRQTPMIEQLAAMLTVRRQLSDHKVATENASRLLEDAMLQRLSRRRVARLTADIDLLDQRLVEIVTADPALAHRFRLLTSMPGVGAVLACTLIALLPELGQMSRKQVAALVGLAPYDFDSGKLKGRRCIWGGRARVRHVLYMAALSASNWNPALKAFHDRLEATGKKPKVVIVAVMRKMITTLNAMLRDGAAWVDRYSGRRSASTAR

SEQ ID NO: 440894 - protein, 376 aa, unidentified
MREKLRFLGLDVHAETIAVAVAEPDGEVRSLGTIANREDSIRKFIKKLGPAEQLRACYEAGPTGFVLYWQLAQLGVECAVVAPSLVPKKPGDRVKTDRRDALKLARSHRSGDLTAVWVPDEASEALRDLVRQREAAKQDQLRARHRLTKFLLRTGRRQPLGLKAWTEHYMRWLAQIRYSQPAQEVTLRDCLNEFEHMSARVKRLEEAILEVVKLAPQAMQEVIRGLQALRGVAHISAVTIAAELGNISSRFESARQLMGYSGVFPSEDSSGKRIRKGGITKAGNAHLRRIVVESAWSYRHLPRVGEKLRKRHEGIPAEIIEIAWKAQNRLHKRYMKLTMAGKDQRKTMTAVARELLGFIWAIGIKAEAACTLQMAA

SEQ ID NO: 440895 - protein, 463 aa, unidentified
MRKKVENKNSGRRDKPKVDWKALDIVHPNAAGVDIGGSEHWVAINPELDEKPVRCFQCFTEDLQQMADWLIERGVRSVAMQSTGVYWIPVFEILQQRGLEVYLVNARHTKNLPGRKSDIAECQWLLKLHTFGLLNNSFQPSDEVRRARTLWRHRGGLVAQASSTIQRMQKALTEMNIQLSNVLSDLSGVSGMRIVRAILDGQRDPKALAALADPQVKASKQVIAKSLEGNWRQELLFVLGQEVEMYGMYQDRIAACDRELQQQLRVRASKVDLQAQPLGPRPKGKRARGNAPKFDLRSELYRISGVDWTQVDGIDVQVAQSVIAEVGVDLEAFPSERNFASWLGLCPTNDSSGGRVLNRRTPKVVNRAKVAFRQAASSLIRSQSYLGAQYRRLRTRLGAPKAITAMARKLACLFYRLLKQGKQYVDKGTEYYEQRHREQQVRFLIKRAKQLGLQVVAPATPNA

SEQ ID NO: 440896 - protein, 403 aa, unidentified
MNAVGIDVSKGKSMVTILRPFGEIVSSPFEIKHTSSDILSLIKLIHSIEGESRIVMEHTGHYYEVLAQQFSAAGLFVSAVNPKLVKNFNNDSLRKVKSDKADSIKIARYALDKWQNLKPYSIVDELRTQLKTMNRQFHFYVKQKTAMKNNLINLIDQTYPNANTYFNSPPRSDGSQKWVDFVYTYWHVDCVRKMSLNSFVKHYQNWCKQKKYIFNKSKAEEIYTKATELVPVFPKNEITKRIIRQAIAQLNSTSATVETIRILMNETASKLPEYPIVMQFKGIGPSFGPQLMAEIGDITRFTHKGALTAFAGVDPGVNESGSYAQKSVPTSKRGSSNLRKTLFQVMDVLIKTMPQDDPVYQFMDRKRAQGKPYYVYMTAGANKFLRIYYGRVKEYLCILSESS

SEQ ID NO: 440897 - protein, 338 aa, unidentified
MNIVFLGIDLAKNVFQLCGLNLAGKPVYTKRTGRKELLQTLANIPACLIGVEASTGAFYWQREFEKLGHKVKVISPQYVKPFVRGQKNDGNDAQAIAVALMQPTMQFVPPKSPEQQDIQALHRARQRIVNHRTATVCQIRGLLLDRGIPIGSAVSRVRRAIPLILEDAENGLSSRMRRTIAELYELFNDLGRRIHFFDKEIETVFRQSEACQRIARVKGIGPKTATAVVAAIGKGTEFKNGRHFAAWLGLVPRQHSSGDRQVLMNMTKKGDKHLRTLFIHGARAVVRVATNNDDGHMNQWVNQLKGRRGFNKTTVAVANKNAQIIWSMLRNETEYQVV

SEQ ID NO: 440898 - protein, 408 aa, unidentified
MNSVGIDVSKGKSMVAALRPLGEVTIAPREVPHTLSKLESLGYDIISLGEDTKVIMEATGRYHESVAAALHELGICVCVLNPIVIKQSGSGSVRKVKSDKKDALKIAKYGLDNWAELCPYSPVDSVRQLLKLFSRQYNLYMKTSVSLQNNLISLLDKTWPGANTLFSSPTRADGHQKWVDFVADFWHCDCLNRISEKAFTERYQKWCNRKGYHFSSSKAEDVYISSAGHFPTLPKNDNSKLLINSAAAELTAARKTLMTVKAEVIRLAQQLPEYGIVQSMYGVGEITGAQLMAELGDVRRFDNRRSIVAFAGVDPEVNQSGSYNRASNPASKRGSPHLRKSLFNVVETHLKCSPADEPVYQFLDKKRSEGKPYYVYMTAAANKFLRAYYARVKEYLNEHCPEQEPLKL

SEQ ID NO: 440899 - protein, 343 aa, unidentified
MQTVTTIGLDIAKSVFQVHGVDGAGQVVIRRQLKRRSVLTFFQKLPPCLVGIEACASAHHWSRELQALGHKVRLIPPAYVKPYVKRQKNDAADAEAICEAVTRANMRFVPTKTPEQQSGLVLHRTRHLFIRQQTAVINAIRAHLAEFGIVAPVGRHGVEELLNVLADPNDKRVPEIARACLSAFGAQLRRIKEQVLEFDRLIRAWHRSDEMSMRLDEAPGVGPVLATAVVATVADPKSFRSGRNFSAWIGIVPKQHSSGGKNRLGNISKQGDRYLRGLFVAGALAVIRYAKIHGTKHRPWLTALLARRPTKVAAIALANKLARMVWAMMVKGERYKEPAALAA

SEQ ID NO: 440900 - protein, 429 aa, unidentified
MQNESTPGARGPVFCGVDTHADSHWLCVLDWRGRRVLSRQFPADAAGYEALAGAIAAAGEPACVAMEGTSSYGAGLTRHLASLGMPVREALSPARMQRRRPGQGKCDESDAERAARAAMSGSRLGTPKSQDGWVDGVRCMLAARSGAVKARTSAINTARSLLTTAPEGLRSRFRGMAGPRLMEELPSVRAEGALGAALGALADLWAAARDAALDMERAIEASLEENCPALLAMYGCGPVSAAKLAVAAGDNPGRLRSEASFAAICGACPIPASSGKTVRHRLNRGGDRQANSALHEIARQRVMRDPETAEYAERARARGKSDREVMRCLKRYVAREAYRALMRPHEVRRPEDASGLVAARRAARVSQVRAASILGTSEKYISMLERGQRELKPIRRAYEAWVEAGLPLDWDRQAFEAERKMDSKKHLAK

SEQ ID NO: 440901 - protein, 417 aa, unidentified
MKVVYPICCGVDVHKSFLVATIIKTEGITPHYSKRRFSTFNNSILQFKQWLVENNCYDVCMESTGKYWYPIYNLLEDTIRLTIATPKWVRAIKGNKDDTKDSKWIGDLFRLGLVPGSYIPPKSIRILREYTRYRFKLISCKSSEKNRFQNAFTVCNVALDSVVSDMFGKSAASITDYLIKTDSFDPEYCSSLLQKSLKKKSDAVNESIVGYEITTEQKYRMIMVHSHLDYIENSIQKLDEKMDELVKPFESIIQLLCTIPGVERTSAITIISEIGTDMAQFSSSKRLCCWAGLTPGNNESAGKKKSVRITRAGVYLKPALVQIAHAAVKSNNSPYYKIKYEHISKRRGKKRAIIAIARMILTAIYHMFSTGEVWNPCDLFKIDMPQALHDKQKEKAVKQAMKLLISEGVIQVPNTSV

SEQ ID NO: 440902 - protein, 373 aa, unidentified
MDQDTTYVAFDTSKETLAVGIAKGGRRREVRFFGTIASRPEAVRKLVEKLARQHHRLAFCYEAGPTGYGLYRQIRAMGYDCQVVAPSMVPVRPGGHIKTDRRDATTLAALFRAGELTAIWVPDAAHEAMRDLSRGRQAAMEGLRRARQQLLSFLLRHGRVYPTRSHWSRAHRRWLSEQRFDHAAQQIVFEELIQAVEQAQSRRDRLEQQMVALLPSWSLREVVAALQALHGVALLSAITLMAEIGDFRRFTNPRELMAWLGLVPREHSSGATTVRGAITKAGNRRARRVLVEGAWTYRLPARVGLELLRRNRALPQAIKDVAWKAQVRLCARYRRLLRAGKPTSVITVAIARELAAFVWAVATTVMPPLEPTA

SEQ ID NO: 440903 - protein, 403 aa, unidentified
MTMYKTCGLDVHKDTIFCGVFDGKHHQAVKEFSTLTSSITSLGEYLKSEAIEDVAMESTGIYWIPIWNILEAMGFNLTLVNPYLIKQMPGRKSDVKDAQWIAALLHKGLVRGSLIPCKEIRELRTYSRKYIRLQQRLTSILQEMERNLEMCGIRITSFVSNISGKSVMKVIHALVEGENDPEVLAGYIHGRIVNRHKRETIVESLRGHTTPQHLFQLELSLEEYELLCGQRDRCEEEMSRLCHLHYPKELALLQTIPGISLLSAMIVIAETGSDMKAFENSGKFAGWTGLRPRNDESAGKFKSTATTKGNRYLRAILVQVAWAASRTKGSFFKEKFSRLCLRKSRKKALIAIARKMAVLIWNVLYYKEEYNPQKLIVYEPGKVQAKMDYHQKEFKRLENLLKN

SEQ ID NO: 440904 - protein, 342 aa, unidentified
MEKVTIIGVDLAKNVFQLHGAAADGSVVFRKKLSRLQFCKFMASQPACVVAMEACGSSHYWARQMARLGHEPRLIAPAYVKPFVKRQKNDVADAEAIVEAAQRPTMRFVEPKTKEQQSRAIVFRTREQFVNQRTELVNALRAHLYEFGYVAPQGIGHMPRLAEIVEDESADLPDLVRDICSALLDQIDQLSSRLAALKKTMDTLSKQAATSRRLQIMPGVGPIAALAIETFAPPMEAFKCGRDFAAWLGLVPRQKSSGGKQRLGKVSKMGQRDIRRLLIIGAMAVVRWASRRRAPDGSWLARLMLKKPRMLVAIALANKMARGIWAMLTKQEDYRNPATVPA

SEQ ID NO: 440905 - protein, 347 aa, unidentified
MGLDLGDRAHSVCVLDAAGAVVVQEKIVNERAALSALAVRWRGALFVCEVGTHSPWISRLFKAAGCRMVVANPRKVRAIFESENKSDVRDAQQLARIARVDVALLHPVEHGSEEAQRDLLAVRLRDNLVRARVQLINAVRFSLKSLGYRVCNPASERFHRSVVDEVPADCVVFVQPLLDVLACISERIAEAERTIARLAVERYPAAARLQQVDGVGPVTALCFVLKVGDPARFGRARDVGAFLGLVPRRDQSGGCDRELGITKCGDVYLRKLLVNCAHYILGPFGPECALRAFGQRLLGTTSRDRKRAVTAVARKLAVLLLSLWKTGAAYERRAPVCDAPEAAAEAA

SEQ ID NO: 440906 - protein, 351 aa, unidentified
MIVLGADTHKRSHTIAGVGATTGELLGERTVQVGRAGFGALLAWARALGGERVWALEDCRHVSGSLERFLIERGERVLRIPTNLMAETRKSARQRGKSDAIDAVNVARAALREGLATFPAAHLDGPELDLRLLVDHRERLVIHRVELNNTLQWHLHDLWPELELPGGALFSKKWSTRIARRLSRAEQTMRVRIARDDLRRLRELTETVKALAREITQLIEQIAPRLLAEPGFGPLIAAKLVGEIAGAQRFATDAKLARAAGAAPIPASSGNTRRQRLDRGGNRQINAALHRVIVTRARCHQPTRDYIERRRREGKTTRDAIRCLKRYLARQVWNLLRASPPNMTLTTPSIS

SEQ ID NO: 440907 - protein, 360 aa, unidentified
MRYSTIVGIDTHSKKNAVCAIVPETGEMREAVLSEDPGQLLAWIVEQDFPKPVGCVYESGPTGFGLARSLVAGGVACTVAATSKLSYRVDRQKNDRADARWLAQQMLAGGVRAVRVPTPEEESLCHLSRLRGEVASDLRRAKQRVSSFLLLTNTEYNLTKKKWSKTFYRWAESHEFDQPADTFAFRCKMSAVLRLEERLAEVEAEIMRVVAASPKLSERMSRFTCIHGVGKVSAFSLVCEVHDFDRFKNGASFASYLGLVPSESSSGKKVSRGAIAKQGNPHLRRVLVEAASCYSKQFKAVKSEDAAVPEAVRAKADRCAVRLRKRRAALKERNVPANKAKVAVARELAEWVYYIAVMPA

SEQ ID NO: 440908 - protein, 339 aa, unidentified
MKKFLFIGIDFSKSKFDVSVIESADQKSFSQAVFENEEKGYSKFLKWVCKQSKIKREDWLFCGEHTGLYSRGLSNFLAKKQLFVWLENPLQIKQCSGIKRTKNDRFDSLVIAQYACRYTDKAVAYKPAENEIEDLQLLVSYRSRLVKSKVSLEVSANEMRRVIKRKPTAKSIYDDSMRDVERLKKRITGIEKKMHETIINSSLKENYLLISSIKGVGMQTAVMLIIHTNNFAGFENARQIASYCGCAPFPNQSGTIDKGNHVSRLANKELKVLLTQCALSAMMHNKEIVAYAGRKTAEGKPKRVVINNVRNKLIQIVCAIVKSKIPYQENYLNQLAQCA

SEQ ID NO: 440909 - protein, 341 aa, unidentified
MSIITVGIDLAKNVFAVHGVDDNGKPALVKPKVSRADLLPLIAQLPPCLIGMEACSGAHHWARLFRQHGHTVRLIAPKFVTPYRMSGKRGKNDAADAAAICEAVTRPNMRFVPVKDEHQQATLTLHRTRQGFVEERTALYNRLRGLIAEFGIVLPQKIERLRIEIGAHLEDLPGWANRCVGDLLAHADRLDERIGEYDRAIAQVAREDERSRRLMQLPGIGPTTASALLASIGIGHDFANGRQLAAWIGLVPGQYSSGGKARLGRITKAGDGYLRSLLVLGARAVLNSLGDKQDRFSRWARNLVERRGYWRAAVAIAAKNARMAWAVLKYGEDFRLAPNAA

SEQ ID NO: 440910 - protein, 340 aa, unidentified
MNRQYAAVDLHLARSLIVREDEAGTELAVERIDNSPMALAEALTDAGPNPEVAIEATYGWYWAVDVLEELGATVHLVNPSGLGQSWEGRRVKNDYKDCRELIDRMRLHKLPEAWIAPPELRELRELVRYRAKLVNLRTGLKAQVKAVLAKHCLRPPVKDLWVGHRGASFLDELALPDAYITRIESLRDLVGVVNREVAMLERTIHGRLRDDRGYRAIQHLEGVGPVLAAVFCAEIGDAGRFAGPQALCSWSGLTPKHRESDGKAHRGRTTKQGSRLVRWAAIEAISKMRGGPKLKIDYHRIADRRGINVARVAVARKLLTLVYYGLRDGEIRCLARAEAA

SEQ ID NO: 440911 - protein, 426 aa, unidentified
MKVLYERVAGIDVHKKMIKVGIRVPGDKPWTRKSEVLQYRTFYGVLQQMAAELRKRGITHVVMEASGVYTEPVCYALAERDFEQVAVINPAHAKALKGHKTDARDCLRLAELFECGLLRGSYIPAPELKEVRDLTRCRIKTVQARTSEIQRLAKALESAGIKLGSVASDITGKSATAMIEALIDGERRGAVLADLARGRMRTAGKLADLSQALAGRFTDHHALLCRLHLDRIAIFDSAVAGLEDTITRKAARWQREQDLLKTIPGFGDAVAQAWLAEIGPAPHSYFAGHDKLASWVTLCPGNHMSAGKRKHGRTGDAGAYIKPMLVNAAWAAVKAPGRLQAKYHRLVRRFGGQKNPAAKKKAIIAIAHTLLKIAYQVLQSGQPYQDLGADFYTRRESPEQRQAYLLRQLQQLNPGCTITITPAEAA

SEQ ID NO: 440912 - protein, 350 aa, unidentified
MQTIYIGVDFHARQQTICYLTTDSGELLFHQLKHEDKALVRAFYAQFRGHVIVGLEASGYSPWFERLLEELGCEVWLGHATEIRRRARWRHKNDRRDAELILDLMVHNEFPRLYLPPLQSREVLRMLRYRQKLIKMRTIGKNSLQALALQSGLAKGPHLFTKAGLQELRSTTMSPAMQWQREQWLQLLEPLNERLLETMRWLQQQSQADQRISRLRTHPGVGLLTALCLVHSLEPVRRFANTRKVTAYAGLDPVERSSAERQRFLGISKGGSRVLRFLLVEAAHTALRKDADLKRFYQRLAQRHGRPKAKVAVSRKLLIRAYIMLRDEIDYAEFQRRAVAARPVLPAHGL

SEQ ID NO: 440913 - protein, 347 aa, unidentified
MDVHKEAIVIAVLNEGGKLVMESVIETKASSILQFLHGLRGELHVTWEEGTWAAWLYDLLQPQVQHIVVCNPRRNALLKEGSKSDKVDARKLAELLRTGMLRPVYHGENGLRTLRELGRSYQTISKDLTRVMNRLKALYRGWGIPCAGTQVYAPRYREAWLNKIPQAGVRRRAELLYQQLDGLQGLRRNLRPELLAESRKHKAAKLLRQIPCIGPIRAARLLALMQTPHRFRSKRQLWTYSGLGIETHDSAQYRFVSGQLQRAKKPQQIRGLNRNHNHEMKEIFKSAATRASCGRGPFHDFYAALLAKGMKPEMARLTLARKIAAITLTLWKKEERFDIELLKTQAA

SEQ ID NO: 440914 - protein, 412 aa, unidentified
MQVVHRVCCGIDVHAKMLVACLILANGEKQKRTFSTMTAELLQLRDWLVAVQCTQVAIESTGVYWKPVFNILEDALTVILINPEHAQALRGRKTDVKDAEWLADLLRHGLLQPSFIPPPVIRELRELTRYRDSVVREQSSVANRIQKLLESGNLKLGQVASDALGVSGRMILKALAKGESEPRKLAALARGKLKEKSLSLEQALQGRLTVNQRFVLGELLSRWEQLEAADARVTGEIDKYVQANPKLARAREQLDTIPGIGPRVAEVIMAEIGIEMAAVFADAAHLASWAGICPGNKATGGKRLSGRTRKGNTYLRSALVQAAWGASLKKHCYLSSQFQRLVKRLGRKKALVAVGHSLLVIIFHVLQNDQSYTELGGDYFDRRHVEQQRDYYVRRLQMLGLKVTLEELPQAA

SEQ ID NO: 440915 - protein, 355 aa, unidentified
MDSVKYIGMDVHKESISIAVRNGTGKIVMESLIETKASMILQFIDGLRGDLQVTFEEETSAAWLYDLLKPHVTKLVVCDPRKNASMREGNQSDKIDARRLADLLRLNHLSPVYHGEHGLRSLKELVRSYLTITKDLGRVMSRVKAIYRSWAIPCTGKQVYAPRHRAEWLGKIGEPGVRRRAEFYYQQLDALRTVRQQVRRELLAEGKKHQAWKRLCQIPSIGPIRSAILLGILQTPHRFRTKRQLWTYSGFGIETQSSADHRRVDGQLQRAKKQSSIRGLNRNCNHDLKNVFKGAAIVASSKPGPFQEFYAALLTKGIRPEMARLTLARKIATIVLIVWKRGACFDAQHLKPQTA

SEQ ID NO: 440916 - protein, 413 aa, unidentified
MRDIVHRRCCGLDVHKDQIAACVRWAEDGGNIQQETRVFGTTTQQLRDLASWIRGHGVSLVAMESTGVYWRPVWNVLEGEFQLRLANSQHIRNIPGKKTDKKDGAWIAKLLQHDLVPASFVPSAGIQELRELTRSRATLVQEKTAVANRIQGILEHANIKLASVASDVLGRSGRTMLEAIIAGEADPERLADLARAQLRGKIPQLRLALEGRVRDHHRFCLRQLMDHLEFLEGKIFVIEEELRKRSKPYEEAIQLWITIPGVRWLIAVTLAAEIGIDMQQFPSSAQLASWAGVCPGNNESGGKRKSGKTRKGSVWLRRALCEAAWAASRTKKTYLSAQYRRLAARRGQKRASLAVAHSILVIAYQLLKHNTPYQEPGGDYFDRIRADGLKRYYIKRLEQLGVSIFPTSATDQA

SEQ ID NO: 440917 - protein, 348 aa, unidentified
MRFYNQPHRYYCGGDLHARTLYLHVLDAQGATRFEKNLPANPSAFLDAVAPFRDGLVVGVECMFAWYWLADLCERESIPFVLGHALAMKAIHGGKTKTDRIDAAKLAGLLRGGVFPQAYVYPKAKRATRDLLRRRSSFVRQRAHLIAHIQNTNSQYNLPPFAKKLTYAGNRDGGILDRFEEDSTRKSVEADLNMIAAYDGQLQQLETHLIRHAKVDDAVTFQLLRTVPGIGPILGLTLLYEIDAIQRFPEVGHFLSYSRLVSCVHESAGKVRGVGGKKIGNAHLKWAFGEAASLMLRSFPAAKAWMQRQERKRSKVRAHAILEAKIGRAVYALWRKQQPFDPNRFLAS

SEQ ID NO: 440918 - protein, 346 aa, unidentified
MTIVESRAVTGGVDTHQDVHVAAALDGIGGLLGVEEFATTTAGYVELLGWLRGFGAVQLVGIEGTGSYGAGLARYVHTEGVRVVEVDRSDRQDRRRHGKSDPLDAVSAARAAQSGRARGAPKGRDGAVEAIRALMVAKRSARGERTQTINQARALICTAPDDVRGRFEKHSSAALVAEMASLRPRPGDTVGYATRVALRELGRRAEFLAEQIDRLDDLLVPLVAARAPALLALRGVGPDTAAILLVAAGDRPERLRSEAAWAHLCAAAPIPASSGKITRHRLNPGGDRQANHALWRIVITRMSSDPRTRAYVERRSAEGKSKMEIIRCLKRYVAREVYPHLRPATD

SEQ ID NO: 440919 - protein, 341 aa, unidentified
MNAIYYIGLDIHKKTIAYCVKKVDGTLVRQGTVCAERKALLQWQSELPGPWYGAMEATLFTGWVYDFLKPYAVDLKIAHPAMLKAITAAKKKNDRADAEKIADLLRVNLLPESHMMSEELRELRRILRYRNMIVRTAVKMKNKMSGLLMEVGAQYSKKRLYGKKYFNTLLERVEDVPNSVKELLKLSRSGFELYDGIQKKLVSALRENKRIQARVLRLMTIPGVGEVTALTWVLEIGELGRFSSSRHVISYCGLCSAQHESAGKEQRGPISKQRNKHLQTTLIEAAKLAPRWNEQLALLHEKESARGNRNRATLAVARKLVEFMMAVDRRESEFETTKLAA

SEQ ID NO: 440920 - protein, 347 aa, unidentified
MYQDNVIALDLAKNVIQVCILDKQNQVKTNRELRRQQVPSWLAKQAPAVVAMEACGSAHYWAKQARALGHQPVLISARFVKKFVEGHKTDKNDAVAIGIAARQPNLKPVAIKSNDQLALQAMEKMRKHYQDIAIATSNMVRAIVYEFGMVIPQGEKAFRERLPDILEDAENGLPMMLRVPLHQQYQFWISLKQQVREAEKQLRAQLKTHEQCNELQKLDGVGPVNALNLYLALGTRGEAFKNGREAAACIGLTPKQHSSGGKVVMLGISQRIAKKQLRANLIQGALAKIKVVAKRAPRNTREVWMKQLIERRGIRRAAVALANKTVRMAWAMVHYQQPYQAPESVTI

SEQ ID NO: 440921 - protein, 336 aa, unidentified
MIAVGVDTHKHEHLARALDGLGQLLGGLTVDASLAGYTQLAQWLRTLGEDVLVGIEGTGSYGAGLCEYLLAEGITVVEVERPRRQDRRRGKSDEIDALMAAKKVLANDGLSTPRAGGTRQALAALLIAQGTCKSERTRLLNQIQALNTTAPVALRERIGEGNGRKLATRLIKMRTRGDRPSSEQMIFTIMRDLARRSQELAAQASAYEHELTILINSLDPALLEEQGVGPISAAKLLVCDPKRLKSEAAFARCNGTAPKPASSGQTIRYRLSRGGDRQANNAIHTIALHRARRDTTTRAYLDRRISEGKTPREAMRALKRHLSRRLYKQLITIPLT

SEQ ID NO: 440922 - protein, 310 aa, unidentified
METTIVGIDVSKDRLDVHLHPVGERFVVSRNAEGLDALIARIVPLGVQAVAVEATGGFETVVAANLGAAGLPVIVVNPARVRAFAQSLGKRAKTDPIDAAIIARFVEGTKPEIRPLPDADTRLLADLVARRRQIIQMLVAERQRERQLPTRYLKKSAARLIKALEKELNVLDEGIDESVRGSPVWCEKEDLLKSVPGVGSVVARTLLAEMPELGTLNRHEIASLAGLAPWTRQSGMWKGKSFTGGGRTTARTALFMAALVATRHNPLLKAFYQRLTAAGKPKMVAIIAVARKLVTILNAILRDNTPWQTA

SEQ ID NO: 440923 - protein, 354 aa, unidentified
MQNDRQSSETVILGVDTHLDIHVGAVISQAGKLLGTHIIQTNQAGYLELLDWARSFGSLERASIEGTGTYGAALTRYLIKNSIYVVEVNRPDRSKRRLEGKSDPLDAENAARTVLSGSSKAIPKMQSGACEALRIISVARRSAVKACTQAINQLRALLVSAPQDVRDKLWKSKPHECVTACINSEVSEHSPLRIALCSTLRSLAKRWMALTEELNELDESLDKLTRKYASNLRSQFGVGPQTAATLLAVAGDNPERLKNEAALASLCGVNPLPASSGKTVRHRLNRGGSREANNALWTIALVRMRSDPRTRIYVDRRTGEGLSTKEILRCLKRYIVRELYPLILSDLAYANRRS

SEQ ID NO: 440924 - protein, 409 aa, unidentified
MRIIGLDIHRAFAEAVAWDDGKLKRLGRVDMRRPLLEAFAKKLSKEDVVVVEATGNAASVAAVIAPHVKKVVIANPKQVRVIAHAKIKTDTIDASVLAQLYASGFLPEVWIPDEPTQALRRQVTRRNQIVRQRSRLKNIIQSILHSHLIPSCPHADLCGASGRTWLFHQVLPEDERLAVERHLREFDRRGEDLKVIERDLARSALRDEGVKRLMTIPGVDMVVALAIVAAIGDVGRFEQSQKLVSYLGLNPSVRQSGPGPAYHGRITKQGRGHARGMLVEAAWAAARAPGPLRAFFLRVRARRGQHVAAVATARKLAVLIWHLLSKGESYVWARPALHARKLRDLELKAGYKAERGQRGAAHAYNIKSHRDQERRWVEQAETAYARFVAGWNPRGPKRVRTGAATEGRR

SEQ ID NO: 440925 - protein, 358 aa, unidentified
MAGPQPIVADVYTYVVGVDTHAATHHYAIIEARTGGLIDHAEFPTHTAGLLRAADWIARRTAEATAGEVDRVLVSIEGTRSYGAQLTAVLSQTGYRVVDAPTPKRERGSGKNDQIDAVVAARGSLHKHLDQLADARSGETSATLQVLLSARNSITGERTRAINALTALLRVHDLGVDARRKPTRQTIRSIAAWRTRRGDTPTQAVARREAIRLATRILALDAEATSNDKQLHDIVAATAPTLLDLPGVGPVNAATVLTAWSHPGRVRNEASFAKIAGVCPLEVSSGRRHEHRLNRTGDRQLNRALHSIASNRMKHPPATRDYVARRTAESLTKPRIRRCLKRYIAREIYRHLAALDTL

SEQ ID NO: 440926 - protein, 336 aa, unidentified
MGQYVGIDLHRRGSTIYRMAEDGEVLGVERILSQPFELAQAMASAGSEPEVVLESTYGWYWAADVLEDLGAHVHLAHALGNNWGNRRVKNDERDAQDLAAMLRLGRLAEGWIAPPEIRELRELVRYRHSLTPHRTSVKAQIHGVMAKNGILPVVGEMWGPAGTAQLDRLEVPEAYAVRMRSLREFLGYYDREITRIDARLHRRLKDESGYKALVRLPGVGKVLGAIFYAEIGEIGRFRSPKQLCSWAGLTPGHRESDAVVHRGGITKQGSPLVRWAAIEAVGNYRAKGNEKLRADYKRIAERRGKYKARVAVARKLLTLVFYAMRDGEVRCLSAAA

SEQ ID NO: 440927 - protein, 380 aa, unidentified
MEVLYERCAGLDVHKDVVVACMRVQRGGRPERELRRFSTMTKGLLELSEWLSSQQCTHVAMEATGVYWKPVWHVLEGSFELVLANAMHIRNVPGRKTDVNDATWIADLMAHGLIRASFVPPAPVQAMRDLTRTRKQLVREVAQHIQRIQKTLEDANVKLDSVLSDVVGMTGRAILDAIVEGKKDPEQLAALANVRVKAPPEQLREALEARMGKALEPFRAQVNLLLTIPGVKRTTAETIAAEIGFDMKRFPTAGHLVSWAGLCPRMDESAGKRRSTRTRPSAQWLKPILVQAAWAAGRKKGTYTQAQFQRLRARCGGKKAAVAVAASLLTAAFHMLRDGTAYQDLGGTYFDTRDKAKVTKRLLRRLKDLGVHVVPAPIAN

SEQ ID NO: 440928 - protein, 370 aa, unidentified
METLTTYVGLDVHKETISVAVAESGDRGQARYFGKIANSAQALSKLAAKLSRKGRTLRFCYEAGPCGYEVHRHLTGLGHDCAVVAPSLIPKRPGDRVKTDRRDCLSLSKLDRAGELTAVWVPDAEHEAMRDLVRARGAAVKALRRARQQLSGFLLRHARVRKGKNWTLAHRRWLATLRFEPPAQQIVLEDYIQAVEDAQARRDRLTAQIEALVPNWSMAPVVQALQAMRGVALITAVTLVAEVGDLTRFHNPRQLMAHLGLVPREDSSADKIRRGGLTKAGNAEARRVMVEAAWCYRLPARISRCLLDRLDGLPKDVRDIAWKGQVRLCARYRHLRAQGKDAPLVTAAIAREMLGFIWAIAQVVAPRKAV

SEQ ID NO: 440929 - protein, 388 aa, unidentified
MKAQIVDTLPPVAADHDPVRCLLAIELSKKSWIVAITTALSDKISRYTLDGCDWKGLLELMERVRTRVAREVGRPVEMISCYEAGYDGFWLHRLLERQGVRSHVIDPASVQVDRRARRAKTDHIDAKRLLRSLMAYLRGEPKVWSVLRVPSVAEEDERRLHRERDRLIAERGQHVNRIKGLCAIHGIYAYEPMRRDRMLRLEQLHNGDGRKLPPRLKAEIARELQRLELILGMLKEIEAERDAIALTEKVSAHTNAKKIQNLVKLKAIGAEIATVLTGEVFYRPFNNRHQVASYVGLTPSPFQSGSKCRDQGISKAGNPKARSTMIELAWLWLRHQPDSPLSIWFRERVGTRKGRIRRITIVAVARKLLIALWRYLETGMVPTGAVLN

SEQ ID NO: 440930 - protein, 422 aa, unidentified
MLEETQETEAIIERVAALDVGKAELTCCVRVPGPGGSDRRLQEVRTYQTMTRWLLAMADRLAELGVTRVVMEATSDYWKGVYYLLEAAGFEVWLVNARDVKHLPGRPKTDTLDAVWLCKLAERQMLRPSFVPPRPIRQLREVTRYRADLVAARTAEKQRVEKLLEDAQIKLSVVASDIFGVSGRAMLAALIAGERDPKVLAQLARTRLRAKLGPLAEAFTGFFTDQHAFLLAKMLARVDTLDADLADLDAKLAELIAPFTRAVDRLDEIPGIGQLAAQLLIAELGVDMTRFPTAGHLVSWAKFAPGVKESAGKRKGRGSTGHGNPYLARVLGEAAVAASKTDTFLGERYRRIARRRGAKRAIVAVGRSILVIVWHLLADPEAHFHDLGAGFYDTRINAERAKRNHIRQLEALGYKVTLEPAA

SEQ ID NO: 440931 - protein, 385 aa, unidentified
MQKRHDESKACLTAFVQDNTVIAVIEMGLASWLVAGLLPGVNREPLKKIAPDPEVLLRLLYRWRDEAIRAGKEITRIAVAYETGRDSFWLARWLQDRGIDAHVIHATSVAISREHRRAKTDRIDTAMLKRAFLGWVRGERGHCSMAAIPTIAEEDAKRPHREREALVKERTRVINRMKAILTQFGVRSFKPALRKAAEKIAEVRTPEGVPLPPNAAAALRRHIEHFRLINGQIKIIEKARLQRLQQNPTDKFNAMVFLLVRIVGLGVETAEQLVHEILSRKLRDRKAVARYAGMTGSPDESGARRREKGLSRSGNERVRKILIQLSWRMLRFQPTAGLVLWFKGRTANSRRSRKPMIVAFARKLIIALWRYVNAGLVPEGFQLAK

SEQ ID NO: 440932 - protein, 349 aa, unidentified
MSKTITETIGVDLGDKYSNYCVLDQESGEPTKEGRIRTTPAAFERLFAGRSTARVVLEVGTHSPWTSRIASADCGETYIANARKLRFIFKNDRKSDTVDAQSLARVGRFDPALLSPIRHRGEQAQVDLVLVRARATLVAARTKLVNSLRGLIKSTGSRLPKKSASSIGPKTIDGVPAPLHSALEPMLEAIDGLTDQIRVYDKRVDKLAEEAYPETGVLTQVPGVGNLTALAYMLTLEDPAHFKKSRDVGAFIGLVPKRDQSGETDKQLRITKAGDKMLRTLLVQCAQYILGRNGPPCDLKRAGERIALRGGKVAKRKAVIAVTRKLAVLLHALWRTGEVYAPDRAACPQ

SEQ ID NO: 440933 - protein, 341 aa, unidentified
MDKIASQPVAWCGIDVSAQQLVVALQRGDRAVQHRTFPNGSVGHQALIRWLARSTGTVRVCLEATGLYSLDLALSVHAVPSIELAVLNPKAVCRFAETLRRSKTDPADAVVLLDYARRMPWQSWQPPSATALVLRSITRRFAALTKQHTMEANRLHAAEASKTVPRCVRQDLKQSLRQIECRLKRLQSEARKLVARDAELEQRYTLLRSIPGIGESSALQIMGELEVLAPDLDVRQWVAHSGLDPMQHTSGSSVHRAARISRAGNRHLRRVLYMPAVVGVRFDPYLRTFYERLLARHKTKLQAIIAAARKILHAIYGMFRSRSRYDGSKLFPLFQPVTQAA

SEQ ID NO: 440934 - protein, 525 aa, unidentified
MPYHVRRKGRQQHKAKPRRQSLQKPRGVISPRVQRVGGEHFAIVCIDPAKHRSEWMMADYFGNLLIEPQTVEHQSVFFQVAVEMIRQAQQQHDIRDTIVVVERTGNYYLPPKRAFARAGFETRVVHPFATKQYRMPADPGNKTDENDLYAQHRAAVAGFGLCELELEPPYRDLQLRARHRRNLVQKTAALACQIRDHLHLAMPGYAGLFDRLFESPTALVIAARCDSPTKLLELGQNRLSRFLSKSKVPHQLRTVDKVLAWAAQAADDPIRDGPMHHAIWTDLHELYQHFQRRIAALERQLACDVVQTPYVRLMAIPGINVVSAAELAAEMGPISGYANANAITGRAGLFPSRYQSDQTDNASGEMIRQANRRLRCVLMAIADNLACHCNYYRGQAELDIARGVDKRAIRVKIAKRFSRLALACVAGDEPMRHPCFQKPDSILDKLRRFHQQHATPIDVLLADLEAAVGKLPYNTCRHEAEIVADVLQQHTRRRRGAGLIGDVLPAVLARLNLRITQANKKRDRS

SEQ ID NO: 440935 - protein, 417 aa, unidentified
MELKPIYRRVIGLDIHQAKISACAVSEQSDGSVVVEMQEFGGFKRDRRALAQWAKAFDPEIVVMESTGIYWKSPYAALESEGIAAWVVNARHVKTVPGRKTDVADAQWLATLARAGLLRGSFIPPAHIRHLRLIARQRQKLGGMLASEKNRLHKILSDAGIRLSVLVSDIHGQAARLMIKAIIAGKPMTHVLDLAGRLRASRSELFEALQPEELSSAHLFVLTEIMAHIEEIEARMGRFEQALLQGLSAWQPQLTLLQTIPGIDQMGAAMLLVEISTDMDSFGSAQKLASWVGICPGNNESAGKRKSGKTRKGNAWVRRLLCEFAQAASRSRCALKDKFAALSIRKGHKKSIVALAHKMLRIIFSMLKDNKPYHDRAVDYEALSVQRNAPRWLKMLKKYGFLPANETIAPTSPAFAA

SEQ ID NO: 440936 - protein, 350 aa, unidentified
MFIIGADYHPSFQQIAFFNQETGESGEQRLNHSDGEVEKFYRELRRKVGRVRVGMEATGFARWFERLLAELGIELWIGDAAEIRTMRVRKQKTDRQDAQLLLKRLLENRFPRVWIPDPENRDLRQLLWHRHRLVQMRTRILNQLQAVAMNEGQRWKKRLWSEQGRAQLEKLPLAPWASRRRQDLAELLDRCNPVIAELTAAIEWEAKKRPEVVRLMTHPGVGPLTALAFVLIIGDPHRFARGKQIASYVGLVPCEDSSAGRQRLGHISKQGNKLLRFLLVEAAQAAVRWDPDWRRYLHLAMRRERRIAKVAMGRKLAVRLFWMWRNGWDYSQVVEFGSHAGQLERTPGVE

SEQ ID NO: 440937 - protein, 355 aa, unidentified
MSSEKYIGLDVHQATISVAVTDSQGKVIMESILETKASTILEFFAGLRGSLFVTFEEGTSAAWLYDLLKPHVTDVLVCNPRKIPLHKQGNKSDKIDARKLAERLRLHDLKPVYHGENGIRMLRELARSYLTVVKDLSRVMNRLKALYRSWAIPCAGRDVYYRRHRSQWLEKIPEAGTRRRAEQLDEQLDVLQRLRQQARRELLAESRKHAITAKLRKIPSLGPIRSALAVALIQTPHRFRGKRQLWTYSGLGLETRDSGEYHYVGGQVRRRKKQATIRGLNKDYNHDLKGLFKGAATWASVKPGPFQDFYQRSLAKGIKPTMARLTLARKIAAITLTLWKKGEDFDVNKLNSQAA

SEQ ID NO: 440938 - protein, 321 aa, unidentified
MQFIGIDAAKATFDIAVPLSGSKYRTKAKLPNTPKGFDELLAWRAKHAPNAAVGMEATGIYHEALARALVEAGVVVHVANPARVKAFGQAEGIRTKTDRSDAKLIARFFEAQRPEKLHPYVPPTPSEVKLRALVRRRDDLQEMLQMEHNRLDVADISVQQGIKDVIRTLEEQIKQVQKAIEDHIDNDPDLRRRHQLLTSIPGIGNTSSAQLLAMLGDLSKYSDVRQVVAHAGLNPAQRQSGNYEGKSRISRVGDAVFRKKLYMPALTGKTHNPTLKSFADRLSAKGKPFKVVMCAVMRKLIHLVWGVLRSGRPFEPDGALA

SEQ ID NO: 440939 - protein, 406 aa, unidentified
MKLTCGVDWAEAHYDVALVDGDGVVVARARIDTGATGFNKLLALIAEHEGSAQDTPVSIETDKNLLVVALVEAGFTVYPINPRAVARYRERYGQAGGKSDPGDAAVLAHILRTDRHLHRQMPAVSEQGRAVKALARQHQEAIWALHQTVSRLRSVLLEFYPQALQAFPNLTHKAALTVLAAAPTPASSRQLTRRRVVTLLQRSGRGNHPTLVEQILTDLHTAALRQPPQVEQALGHTVVGLVGIVVAMQRAVDDLELELAREFDQHPQTAILRSAPGLGPILAARILAEIGDDPQRFANPNSLRAFAGTAPVTIASGRSHYVKARKVRNKRLADACHWWAFTALTKSAGAREHYDKRRASGDHHNAALRNLANKLLGRLWWCLANNQTWDDTAAWPHRLKPDSVAA

SEQ ID NO: 440940 - protein, 428 aa, unidentified
MQTATANSERVAWIGLDWADQRHEIRLRAAGSTRVESCTVEQKPEALHDWVAQLRARFPQGKIAVALEQSRGAVIYALMNYDFLLLYPVPPKGLARYREAFFPSGAKSDRSDADLLLEMVWQHADRLRVWQPDDALTRQLRLLVEHRRHLVDDRTRLTNRLTALLKTYFPQALDWAGELSKPAAGEFLSQWPSLEALQAAGRSTWRRFYRSHRRLSAEELDQLLKAIAQAQPLTRDRALLEASVLMTGALVEQLRTLLVILERLDKKLQELFDQHPDQGLFASLPGAGKALAPRLAAAFGRDRQHYQNVQELQQFTGIAPVTEASGKMRWVHWRMACPKFLRQTFHEFADASRKKSRWAQAYYQQRRQLGTSHHAAVRALAYKWIRILFRCWKTSTPYDESMYLKALKRRRSPLWLAAISLSTQEAHG

SEQ ID NO: 440941 - protein, 326 aa, unidentified
MTVSTSPIRVFVGVDVCKETLDVHVLFPDASADACAFSVPNTPAGIDTLRQKLKPYHVQLLVVESTGGYERRLVIELLTAGLAVAVVNPTRVRRFAEALGTLAKTDRVDARVLAEFAMRLEPRPSEKPSPQQVLIDELLTRRRQLISMRIMELNRQGQAVGAVAVRQIKHHLKHLEKQIAQIDAELDQLIDNNPHWKERVKLIDSVPGIGKTIAYRLVADLPELGQLNREQIAALAGVAPMNRDSGGHRGKRTIRGGRIDARNALFMAAWVAKRHNPTIKAYAARLLAAGKPFKVVITACMRKILIILNVMLKTNTTWNPKLVQGT

SEQ ID NO: 440942 - protein, 385 aa, unidentified
MTKLDRTDAPATHDYATIHVVFELSKSKWKLGIMLPSSQKLSRYTIAGGDLNALASRLADARVKAARAGKPVRIVSCYEAGFDGHWLHRWLTDQGVITHEIDPSSIQVSRRARRAKTDRIDLDQLMRTLLAYLRGEPRVCSVVHVPTVENEDRKCRNRERDYLIDERTAHTNRIKGLLHAQGIRDVMPLKPNFVAGLASMRTGDGRPLPARLKEEIVHQHKRLCLVHMQVKELEAKSKAELHAASPGSNDAKIVQLAQLKGIGPVGAQGLVNEVFYRSFDNRRQVGSYFGLTGTPYNSGKSERDQGISKSGNRRAREFAIELAWLWLYHQPGSELSRWFRERVRDIKGRIRRITIVALARKLMVALWRYLTTGVVPTGAVLRPTF

SEQ ID NO: 440943 - protein, 328 aa, unidentified
MLYVGIDVAKNKHDVTVIDNTGKMVLNPITITNRKQGFELLHNTLKQLNQNCLIAMEDTGHYALNLLTFLHQNNYQIYTYNPLLIKEFTKSISLRKTKTDKKDARTIALKLLSDPNRALFMHDNKQEELKIMTRHMNRLKKHQSDWKVQYTKCLDIIFPELHQVVTKHSDYVYELLKRFPSPEKMVTAGFDKLIEIKRLTAKHALDILELAPNSIGTTSLAREFELIEIIKNIQHYEKLIKQTEKKIDELMAELNSVITTVPGISNRLGSVILAEIRNINTFNHSAQLQAFAGLEPAIYQSGQLDAQGKWSNESHHTYVGHSYKLPLK

SEQ ID NO: 440944 - protein, 315 aa, unidentified
MYLGIDVSKLTIDCCLISDGLFFERKFKNSKVGFQELKDWLKENGATERLHCCCEATGKYYEAAAEYLSKYYRMSVENPRKIKGFGTAVLQRSKTDRQDAKTIAQYCKALEPRPWQKPTEAQTKLQELTRYQHRLKRQKAAEQTKLQTAPAYLLPLIQSTITHLQQQIKAVQNQLNQFHKDNPDYKIQKERLKTITGIGEAAANSLLSVLIQKDRFKSAAQFVAYIGLDPKENQSGTSLKGRPRISKLGNTHLRTTLFIPAMHAYRSSTFAKYVSRLQKNGKRPKVIIVALMRKLAVIAFTLLKNGKDFQVERYK

SEQ ID NO: 440945 - protein, 348 aa, unidentified
MDVGKRKCVACVMNQDGDISETYSYPNTTADASEFARCLVEKYGECKAVVESTGNMWMKTYEAFEEAGIEVKLANPSKTRVIAEARIKTDKLDCRVLAHLLRADLVAGCYVPTKQLRDTRYTLTHRMNITRDRTRIQNRIHSLLHKYDLQCEYGDIFGTHGMDWLRTLRLPAIRDRQILDSLIRQVEFLNCEEETVNSEIASDAVNNRYVVTIMSMTGFDYYGASVLAAYIADISRFPSPSRLVSWVGICPSVHQTGESLHMGKMKDGNTKVRWIMSQAANVAAKCDPRMKAFYERKLRRRHHNVAITHVANKMLRILWHMLRDNTLYNEKKEQLYHRKLIRMARTAS

SEQ ID NO: 440946 - protein, 344 aa, unidentified
MGQYVGLDVSLETTKVHVLDEQGKRVWRGTCVTHPTAIEATIRQHAPEAVRIGLETGPLTTWLWQALTEVGLPMACLDARQAQAALNMRINKTDDNDAEGLAHLVRSGWYREVRVKSREAMLTRSLLGARTQLLGIVTELSNQIRGLMKTFGLVVPKGAGKIFEANVRRLLEGEPAVAAIILPLLESWRAVRVRAAELDRQLLAAAREDRACRRLMTAPGVGAVVAASFVAAIETPEAFRRSRDVGAWIGLTPRRYQSGEVDYDGHISRRGDARLRSLLYEAATSILTHVHADSTLRNWGLALKKRLGFKRAAVALARKLAVILHAMWKTGTNFDARASASAAP

SEQ ID NO: 440947 - protein, 342 aa, unidentified
MAIIGAFDVHRRQVTYDVLDTVSGQVHRGQVRPACRATLRQFLARYARETDVSFAVEGCAGWRFIVEELERAGFAAHLADPAATADVRGPKRRAKTDRTDTRQLRQQLVEGRLPESWISPMLVREIRAKLECYHDLREEHTAWVQRIHATLFHHGVPVFEHALSTVEGRARLEAGEGLSPAARQTMGVALRVADSLQTELDALYRELGRFARRQPGCKALAAQYGVGPITAVAIWAFMGDTRRFSSSAQAVRHTGLDVTVYSSDGKRSPGHLSRQGPPVLRWALYEAACSAARATSPDLDYYHDTKERIDHKRAAISVARKIARRSHHILRNLGDTAWQDAA

SEQ ID NO: 440948 - protein, 425 aa, unidentified
MNIDGNDEPRFAAFVAIDWGDKKHAWSLQPGDSDRRERGEIEHSPEAVAAWAAMLSARFANQPVALAVEQSRGPLVFMLGKYEQLHVYPIHPRAAAQFRAALVPSGAKDDPSDAELLLDLLVHHRARLRRLQPDSEQTRLIQHLVEGRRRLVNERTRQTNRLTAQLKLYFPQLLDWFDAIDSALVGALLQRWPTLEALERARPDTVRSFFTAHHCRNRELIERRLDQIRQAVPAVSDKALIEAAQAMTKVLVELIATVREGIDNFDRQIAQAVAKHPDFAIFDSFPGAGPALAPRLLAAFGSQRDRYQSATDLQTFSGIAPVTERSGKSEWVHVRWACPCFLRQTFHEWAAHSIGFCDWARAYYQQQRDRGKGHHAAVRALAFKWIRVAFRCWKDAVPYDDARYMQSLRRRGSPLIAALAKPVLP

SEQ ID NO: 440949 - protein, 424 aa, unidentified
MGDNGGRDAISTLCLLLLISAFLGVFVPCMFASSDRDSVMDSAVGKAAERSEAGFPTAAGDRSIVPGSLKTVTKQDRRRFRGTSPNSRQSRRRASSSHLQDRDHSMDGSITHFAGIDVSKKSLDLCLLPEDRRQTFTHDKAGIQQLLAALPVGETCLIAVEATGGYHRNLVAELVNAAHQVAVVNPRQVRDFARGLGILAKTDRLDAHVIACFAQHVRPRVAAPLSPAQAELEQLVTRRRQLVDLRTAELNRMQTVSSKSVRKSVQQMVDMLRKEIRRVEHDILTLLESDDDWKAKMDRLESVPGVGPVSVASLLAELPELGQLNRQEIAALVGVAPFNRDSGRFRGKRAIWGGRASVRSVLYMAALTARRHNPILRAFANRLEAAGKPFKVVITACMRKLLIILNTMLKERTQWQPEKSLPNA

SEQ ID NO: 440950 - protein, 349 aa, unidentified
MKIIGCDFHPGYQQIAMLDTETGELTEKRLSHSREGEEVRQFYSGLTGPVLVGMEASGQSQWFERLLAELGHELWIGDAAKIRASTERKQKTDRRDANLLLELLEQERFPRIWVPTPAERDVRQLLLHRAKLVRVRTQVKNQLQALALNQGVQRKWKLWTAVGRKQLESLPLLPWASRRRNELLKLLEELDGSITALDGAVCQEANTRPAVRRLMTHPGVGPVTALAFALTLGPAKRFRRGKQVASYFGLIPSEHSSGGKQRLGHISKQGSSFVRGLLVEAAQSAVRHEPQMRREYQRLSQRRCRALAKVAIARKLAVRLYWMLREEVDYAQLLQGSDAGQPESFRGRS

SEQ ID NO: 440951 - protein, 457 aa, unidentified
MGTLTSSPGMSMPLSSHTARVPVGGGTLSVSQPRRLPCWGGMEHCGPVPTGTLGRYGCRPCAWARFNKSGAWQEAPSLSCPFARLVRAALPPVTNDRTTMPSITPQDAAIIEVAGGVDTHSDTHTAAVIDQVGRVLGSERFPADAAGYTALLTWMRTFGRLVRVGVEGTGAYGAGLAQLLRTEQVHVVEVDRPDRKTRRFQGKSDPIDAVQAAKTALAGERTGTPKRRDGRTEAVRNLRVARRSAVDQRADAQRTIKTLIVTAPDELRERLRGMPVNALITTCANLRPDRTDAASPATTVKIALRSLARRHQQLTTEITDLDDLLDPLVAAINPGLVAANGVGTDVAGQLLVTAGDNHDRLTSEAAFAMLCGAAPIPASSGKTSRHRLNRGGDRQANKALYRVVICRLRWDPRTHAYVERRTKDGLSKKEIIRCLKRYVARELYQLITTPNDHELAA

SEQ ID NO: 440952 - protein, 407 aa, unidentified
MEVVYRCCCGIDVHKKVIAACLVNGGEQELREFGTTTSEIKTLANWLTESGCEMIAMESTGVFWKPLYNLFELMDLDAMIVNAAHMKALPGRKTDVKDAEWIADLLRHGLLKASYIPNREQRELREITRYRKSLTEERCREVNRLQKILEGANIKLDSVVKDITGKSARKLLQRIIDDDIPDSDEVSKLVHGRMRPKLEQIVASIEGITTPLQRKLLAQIIDHIDDLNRRIGELDKLVQEYMAEYEAAIEAIDEIPGIARRSAEVILAEIGLDMGRFPSAAHLCSWAGVCPGNYQSAGRRKHGKTTKGNKALKTILTQCAKSAKTVKSSYFFAQYQRISARRGKNRATLAVAHSMLIAIYHILKNKTAFHDLGSDYYDSFNRDRKINSYLKRLKALGWEPDAIPSSA

SEQ ID NO: 440953 - protein, 343 aa, unidentified
MQAITTIGLDIAKSVFQVHGVDGNGQVVIRRQLKRRYVIAFFEKLAPCLIGIEACASSHHWSRQLQALGHTVRLMPPAYVKPYVKRQKNDATDAEAICEAVGRANMRFVPTKTPEQQSGLVLHRTRHLFIRQQTSVINAIRAHCAEFGIIAPVGRQGVEELLNVIVNANDKQVPEIARACLSALGAQLRRIKAQILEFDRMIRAWHRSCEVSRRLDEIPGVGPALATALVASIADPRTFRSGRDFSAWIGLVPKQSSSGGKPKLGSISKQGDRYLRGLFTAGALAVIRHAKIHGIGHRPWLTALLARRPTKVAAIALANKIARMAWAMMARGECYREPVALAA

SEQ ID NO: 440954 - protein, 338 aa, unidentified
MAIVMGLDQHRAQITAEWFDTETGEVSRGRIVPADRSGVRKFLARFVGRELEVALEATTGWRFVVEELHRVGARVHLAEPAETSALRGNKQRAKNDRADARHLRELLMAGRVPESWVPPGHLLDLRARVRLRHTLVDQRGEWQQRIQAVLYHHGLPKRAGLLTCENRAWLEQLPLPAAGREQITVALGMIDAGEARVAPLDKELRSYARRQPGCHALQALYGIGELTSVVILAELGDARRFSSSREAVRYAGMDVTVHASDKRRAPGHLSRQGPPALRWALYEAAQTARRKTSPDYVYYQQAAERLGGNRALLGVMRKLLKRSYHTLRELGEEGLRPA

SEQ ID NO: 440955 - protein, 392 aa, unidentified
MTLINFVAANQKYYAFNLLSVFIMVFWSVQYLLQHLLVQTQLSDQLLQPLILILQLPQTPQFRHARSGKFFLPVNGMDYLLPLRLTVRNVLTRRITMNIVFLGIDLAKNVFQLCGLNQAGKPVYTKRTGRKELLQTLANIPACLIGIEASTGAFYWQREFEKLGHKVKVISPQYVKPFVRGQKNDGNDAQAIAVALMQPTMQFVPPKSPEQQDIQALHRARQRIVNHRTATVCQIRGLLLDRGIPIGSAVSRARRAIPLILEDAENGLSSRMRRTIAELYDLFNDLERRIHFFDKEIETVFRQSEACQHIAKVKGIGPKTATAVAAAIGKGTEFKNGRHFAAWLGLVPRQHSSGDRQVLMNMTKKATSICGHFLFMVPALSSGVPRITMMVI

SEQ ID NO: 440956 - protein, 388 aa, unidentified
MQDVADQSAAPTTIGADLCAIFISLELSRSTWLVTSLSPGGGEKMSKHSVSAGDVAGLLARFSELRRKACARTGRSFPVLVIQEAGLDGFWIHRVLLSEGIESHVVDAASIATSRRRRRAKTDRIDGETLLRALLAHKRGEPRVCSMVRTPTPEDEDRRRICRERKVLIMERVQHVNRIKGLLFSQGASGYEPLRRDRRDRLDALQTGDGRRLPQHLKAQVCRELDRLELLLEQIKAVEAERDALLDEEQTKASAPPPMLLGVHGVGPEFASVLWSEGLSRQFDNRRQVAAYAGLAPTPWQSGSVNREQGISQSGNPRLRTTMIQLAWLWLRHQPRSALTLWFQDRIERNGGRRRKTTIVALARKLLVALWKYVSAGVVIEGAMIRPA

SEQ ID NO: 440957 - protein, 360 aa, unidentified
MDKYIGFDIDSKKTIACVVQKGKKDRFTTLKTDINRMKDFLNGQRRDGEKLHLTFEISGEAGYRHDALINLVDSITVSNPTKMTWIYRTAKKNDRIDSRKQAVLLSIGEVPKVYIPNREVRQWRVTIQHRRKMVSSITQVKNRIRMLLKANGFVKAAHRGSWWKVANRVWMRGLCEQAEINSEELWRMNLIDMLEGLWLLEGQLKRTTRYLDGYLDKQPGGKLLMSIPGVGPRTTEAILAYTLYVRRFGRSKQTNAYFGLTPRLDESGSVRRLGHISKQGPSVVRWLIVESAWRAIRKSPGLRAFYERVMCGQAGRKKVAIVAVARKLLSIMCAMQMSGELFNEQLVCRECGMTGVRRTA

SEQ ID NO: 440958 - protein, 324 aa, unidentified
MTLPTLGIDIAKLKFNVCLINSGGKLRHKVFPNHAAGFEQLKEWLSRQGVEQVHACMEATGTYGEALALFLHQAQQVVSVVNPAAIKAFAQSCLSRTKTDRVDAELIARFCFAQAPPAWTPLSAEVRELQALVRRLESLVQMRIMEENRLSSGVMVEAVRESVEAHLAYLNEQIKRCEELIRDHINSHPRLKRESQLLDSIPGIAETTAALLLAEITDITQYRSARQVAAYAGLVPRERQSGSSVRGRTRLSKIGNARLRKALYFPAITALRCSPFFQAWAKGLQERGKSKMSVICAVMRKLVHVAYGVLKSGKPFDPEWVKSA

SEQ ID NO: 440959 - protein, 386 aa, unidentified
MMNLVGPLMSTERANKTVCFMAIELSKMGWVIAMLTPLSNKISLRSIPCGAVEQLMEIVDQTINRVMQTTGESVQVVSCYEAGYDGFWLHRFLEARGIINHVLEAASLLVNRKARRAKTDRLDAEKLVRVLMAYCRGEPKVCSLARPPSVEDEDAKRLHRERQFLMKERVQHIGRIKGLLAAQGIYDFRPGRKDGRNRLAELKTGDGRPLPSRLKSEIDRQCQRLALVDAMLKEIDQERDAVVEAKNAPSETVARIQRLAHLKGIGPQIATVLGTEIFYREFANRRSLGSYLGLTPSPFRSGGMDRDQGISKAGNPRGRTVMIELAWLWLRYQPQSGLARWFKARTNGLKGRLRRIAIVAVARRLAISLWRYLETGLIPAGAELKA

SEQ ID NO: 440960 - protein, 414 aa, unidentified
MEQIHERVAGLDVHRDSLVACVRMTGPRGGVANEKERFATTTSELARLAGWLAERQVTLVAMEATGVYWKPVYYALERGLEVWLCNAHHVKNVPGRKSDMSDAEWLADVAAHGMVRASFVPPLAIRELRELTRYRKTQIDARVAEIQRLEKVLQDAGIKLTSVASKVLTQSGRSMVEALIAGQCDPSALAELAKGKLRPKIPQLTEALNGHFGAHHAVAAQRILGHVDFLDASIATLTEQIDVRMQPYGAARCLLTPVPGFDRLTIDTVIAETGADMTRFPSAAHLANWAGVCPGNHESAGKRRRVGVVPGNRWLRRALIEAAHAAARTKGSYFGAQYRQIARRRGPNKAAVAVAHSLSDLVWHMLSTGQCYTDLGADYFQRRRDPQREADRLVRQLQTLGYRVTVIEPPTPAA

SEQ ID NO: 440961 - protein, 374 aa, unidentified
MQSIVYVGMDVHVENYTFACYEENKGIYAQNQIKDADWKSVIKYLEKIQKERPGEDIHFVCGYEAGCLGYSLYNELLKAQTKVSLDCIIMAPTTMAVQGNKPKTDRRDAAMIAKNLCYGTYSKVYVVDDADNGVKDFIRMRDDTKARCKSIKQQVLALCLRHGKRYGESTNWTIKHREWLRKLDLGEKNANRALQEYLHQLAKVEEDLERYDREIEEIAQGERYSEKVSQLKCLKGIQTVSALTAIVEIGDFHRFATAERFASFLGLVPGEHSSGGTIIRTPITKHGNSHLRRLMVEAAQSYSRGNIYQKSKKMRSKQAGQDQDIIDYCDRQNLFMGRKYHRLCAKGKNSNVAKTAVARQLACSVWGIMTGNIA

SEQ ID NO: 440962 - protein, 312 aa, unidentified
MTEHYYCGIDVAKDRLDVMVLPDRKSFSVDNNAAGYSELVKRLRGLAIAAIGIEPSGGYERAVIRALLAADLSVRRINPNKLRQFARARGVLAKNDRLDARLIAEYVAIMPTRVVQRDPATEQLAEVVTMRRQFCDEHVAVENQTAHLEDAILRRLNKRRLARLEADILLLDRRMAQIVASNANLTRRYELLTSMQGVGPTLAFTLIALLPELGQMSRKQIAALVGLAPYDFDSGRLKGHRCIYGGRLPVRNVLYMAALSACRYNPALKVFYRRLAATNKKPKVIIVAVMRKMITTLNAMLRDNVAWQPKSA

SEQ ID NO: 440963 - protein, 344 aa, unidentified
MTSNDYIGLDIHKKTISFCAKAQDGTILDQGTIVARRDTLVAWAKARPRPWIGAMEATLFTGWIYDLLKPLAQELKVAHPAMLKAITAAKKKNDQVDARTIADLLRCNLLPECYMAPSAIRDLRRVLRYRNLVVRQATRMKNRIAGLLMETGTPYNKERLHGRAYFSELLGSLREVPRSVVELLQLSRGQLEFFATIQRRLLKGLCQNPDLSERVARLQTIPGVGEIMALSWALEVGEVKRLPSIAQAASYCGLTSAQHNSAGKEQRGPISKQRNKHLQTILIEAAKLAPRHNPQLAVVHERELQRGDRNQATLAVARKLVAYLMAVDKSGKPFAMRASGEEAA

SEQ ID NO: 440964 - protein, 338 aa, unidentified
MDQYAGIDVSLECSSVCVVDASGMILREARVASEPEALIAWFRWSGFELERIGLEAGPLSQWLFAAMRQAGLAVELLETRHVRKAFEAMPVKSDRNDARGIAQLMRLGWFRPVHCKSMSAQETRTLLTARKLVQSKLHDVENSLRGILRGFGLKVGKTTELKFAGRIEELVAGHPHLQVVTKALLSVRAVLRTEFAAFQKQTRKMAQSDARTRLLMSTPAVGPIVALTYASAIDDPARFTSSKQAGAHFGLTPKKYQSGETDYTGRISKIGDSSVRTALYEAAHIILTKPLKGCTQLKSWAMRIARRAGMSKAKVALARRLAVIMHRMLADGTPFKAA

SEQ ID NO: 440965 - protein, 422 aa, unidentified
MDVLHARCAGLDVHKDTVVASIRIADGGPAKTEVRTFDTTTPGLLALSAWLAQAGCTHVAMEATGIYWRPVWHVLSDGEVTLILANAAHVKNVPGRKTDVADAVWLADLLAHGLIRPSFVPEAATQGWRPKAVNRALLRTRKQLVREQASHVQRLQKTLEDANIKLSSVLTNIMGKSGRTIIEALVEKQTDPEGLLALVQKGVKAPAERIKAALTGRVTDRHRFLLRLHLRQIDALDATLADIDAEVDRGLDPFRQAVTLLRSIPGVSDLTAQVIVSEIGTDMSRFPTAGHLVSWAGLCPRNDESAGKRRSNRLRHGAAWLKTTLVQCAWAATRKKASYLQAQFQRLRHRRGPKKAVCAVAASILTAAYHMLRDGTFYHDLGPDHFRRTSPETHAKRLAQQIAKLGFTCTIAPASTVEEVFI

SEQ ID NO: 440966 - protein, 393 aa, unidentified
MICVGIDVAKDKHDCFILSSEGEILADVFTIQNNAEGFDTLLQTIRRCTRPEDKMKVGLEATGHYSYNILGFLLNEGLPTYVINPLHTNLYRKSLSLRKTKTDRVDARTIAAMLMSDVDLKPYTDTAYHNEELKSLTRYRFDKVRERAKLKQSVSRLVTILFPELEKLVPTLHLASVYGLLSELPGAKQVAGAHLTHLKAVLSDASKGRYGRDMATTLRDAARCSVGSVMPAKSLELQHTIRLIRELDSEIEDIEAAIQSMMDRMQSPITTIPGIGFRMGAMILAEIGDFSCFDSPDKILAYAGMSPSTYQSGQLSLSGSYSHMEKRGSRYLRYALYNATKYVCLWDPTFAAYLAKKRAEGKHYNVALSHAAKKFVRLIYAMEKSRKPYCSAA

SEQ ID NO: 440967 - protein, 348 aa, unidentified
MDNIGLDLHKRESQLCTLAEDGTVTERRIATSRERLTAVLGARPPARVLLEASTESEWVARHLEALGHTVVVADPNFAPMYASRSRRVKTDRRDARTLAEACRTGGYRPVHRTSEAQRHVRAELAVRDALVRTRARYIVLAKSLCRRDGLRVAPGASPRFLARLAAVELPLTLQAELRPLLALLRPLNEEIAAADARIAVLAEHDPLVARLTTAPGVGPVTATAFVATLDDVTRFAGAHQVEAYLGLVPTEYSSGEKQRRGAITKAGNPRMRWLLVEAAWGVLRSKRPDTADLRAWAERIAVRRGRRTAVVALARRLAGILYAMWRDGTDYGVPRARTDAAPALVGVA

SEQ ID NO: 440968 - protein, 401 aa, unidentified
MEGPIISIDVSNGCSHFRCFIDRNKAFGKVHKIKHDLDGFQYLLDCLGRLNEKTNEEACVVYEATGVYTKPLIRFLNKHKVKHYMVNPLQAAKMRKTDLHSKKTDKNDPNSIAKVYYDKDLYEYVDEEQIYHTLRVMNRNYEDQLEHLRKYKVTFQNILSIVFPGYSSLFKNSYCDIALAILKKYPHPDMIKNKKPETVAKYLEKHTCHHKNSCLKWATKVIEYANKTYPGCDKDEIEVIELLRIIKELEACIDSCDTQLNEMIQLAEQLPNYFLILSIDGLGPNLACRILAEIGDIKRFSNTKQLISYAGIDPHISQSGDVDGLHLSISKKGNKRLRCLLYLAVTCNLRLKKENDPIQQFYKKKKQQSVPLKPKAARVACTNKLLRIIYGMCKNGCLYQN

SEQ ID NO: 440969 - protein, 424 aa, unidentified
MKVTYQTCCGVDVHKSFLVATIVKTTGGIEPSYQKKRFSTFNNSILEFKQWLLDNHCHDACMESTGKYWVPVFNLLEDKINVVIANPKWVKAVKGNKDDTKDSKWIGDLFRLGLVKGSYIPCKKVRILREYTRYRYKLVSCRSSEKNRYQNALTVCNVALDSIVSDIFGKSSTSIIDYLLEQSGTSINHEEIASKLLRSLKSKEDAVIESVEGYQMTDAQKYRMRLVRAHMDYITAEINDVDKMIENMISSNPDFENAVQFLCTIPGVKRDSAITIISEIGTDMSQFSSSKRLCCWAGLTPGSNESAGKKKSVRITRAGVYLKPALVQCAHAAVKSDKSPYYKKKYESLVKRRGKKRAIIAIARMILTAIYQMLSTGEQWNPSDLYKIDMPVALVEKQKAKAIKQAKKLLQREGLLPPDEPLAS

SEQ ID NO: 440970 - protein, 374 aa, unidentified
MLLPRQRFKLARGTKDKEHAMSEKLNTAIAVIGIDIGKNSFHVVGHDQRGAIVLHQKWSRGQVAARFANMPPCLIGMEACVGAHHLSRKLKAFGHDARLMPAKYVRPYSKGQKNDFRDAEAIAEAVQRPTMKFVATKTADQLDLQALHRVRERFVSQRTGIINQIRAFLLERGIAVRQGQRFLRAELPRILATPSDVLSPRMVHLIENLAGDWRRLDERIESLSSEIEAIARQDAGCERLMSVPGIGPIISSAMVAAIGSGEVFTKGRDFAAWLGLVPRQMSTGGRTILGRISKRGNRYLRVLFVQAAWVVLIKPKSWERHGLKSWIEAAKKRLHPNVLAIALANKLARIAWGVLAHGRDFEARTNTNGTAQAA

SEQ ID NO: 440971 - protein, 347 aa, unidentified
MTTLARSVTGGVDTHLDVHVAAALDEKGTLLGVEYFETTRAGYKKLLAWLENFGPVALVGVEGTSSYGAGLTRHLHAERIAVVEVDRPNRQRRRRKGKSDPEDAISAARAAFSGDACGAAKTQDGNVEAIRVIRVARVSARRARTQALNQMRSLISTAPDPIRDELRGLNIYNLVSRASAYRPGARRDVVSLTKWTLRSLARRAIELEEEISECDAILKDLIHQTAPELVGTLGIGTDSAAALLVAAGDNPHRLRSEAAFAHLCGVSPIDASSGKQERHRLNRSGDRQANSALWHIALTRSVYDPRTTEYLDRRMSEGLTKKEAYRCLKRYIAREVYGLLPMDRLTT

SEQ ID NO: 440972 - protein, 309 aa, unidentified
MDTIVVGIDVSKDRLDVHVRPTGTVVSFGRDGAGIEALVGELAGVAPSVIAVEATGGFETVVVASLAAAGLPVVVVNPAQVRAFAIALGQRAKTDPIDAAVIAHFAAATKPQVRELPDAATQALADLVARRRQIIQMIVAERAREKRASARARKSIVRLLKTLQSELSALDADIDESVRGSAVWREKEDLLASVPGVGRTIARTMLAEMPELGSLDRRQIAALAGLAPFTRQSGRWRGKSFISGGRASVRAVLFLGAMTAMRWNPTLRTFHQRLRAAGKPKMVAIIAVARKLLTILNAILRDKTKWQNA

SEQ ID NO: 440973 - protein, 387 aa, unidentified
MTKNKGRVVGLDVHPDSFAGAVVQGRDPASAMVLRTSTRVELERLEEWARRHTCTEDTLVLEASGNAFAVAARLRAIGREVEILDSHRAGKVGKVYCANDRVDAVKIARIYLSALSPIVWQPDQKTLERREIFSAYQAVVKESTRAKQQLRSMLNEHCVRLEKGFRLCHPQAIARLLKLREWTPARRMLLQQLHGSLVAARARRTLLRRHMAQEIVAEEALLRLTRLCGINLITLYGVVAAVGDVRRFTQSKKLVAYLGLNPSVSQSGNFQGSGALKRHGRGALRALLIQSGKKLLEVNNPLQKWGLAVAARRGRNKAAVAVARKLCVALWHVIMGHAIGTLERLDTLQTKLSKFATEIGPAALTAFGYNNKADFVEKKLYVLRSYP

SEQ ID NO: 440974 - protein, 316 aa, unidentified
MTTYAGVDIAKHGFDLAFEPKEKIQHFDNDAKGIQRCCELLKQRQAELIVMEPTGGYERALVKQLQAAGLSVSVVNARRIREFARASGQLAKTDKLDAQMIARFAAVLQPPAQEPLDRQTRRMKALVARRHQLVQMHTAESNRMEHADDKAVKQSIQAILKALKKQMDKAEQQIAELISSTPKLQKKAECLESVPAIGEITAALLVTELPELGRLNRRQIAALVGVAPINRDSGTYRGKRMTGGGRRDLRARLFMPILCATCHNPVIRDFYQRLLKKGKVKMTAVIAAMRKLLTILNTMIARNESWNPKTPCPTHG

SEQ ID NO: 440975 - protein, 421 aa, unidentified
MSNSTLSKKLASVKPGAVFVGVDLALDRNVAVVLTERAEQLARFGFPNEREGYDYFYRHLEAIQERRQAPAVLVGMEPTNYFWKLLAADMEQHRPDYGYRLVNPFTVKKNREGDQLDRSKDDNRDAFTIGDLLRTGKYTETRLLHGAYAELRQLVTLYTRLQRDIRRQKTLIRNIAGQMFPELPRVFKDLTCLTALAMLRRHASAEVVRGMTQEHFIASVRADFGGRRMQATKLRCAHAQAQSSVGLTDGIEALQLALRLHIETLEALRRQLEAVRTALVDTFLDLPESKYLLSMHGLGIITAATILAEIGDPSHYTKARQLVKLAGTQPVPNSSGRKSRSQTPMSHKGRPRLRTALFFAVMRLVQVDEAFAQEYLRLQTREKNPLVKMQALGVLMNKLLRILWALMRDRTLYNPSFQGTT

SEQ ID NO: 440976 - protein, 430 aa, unidentified
MPFAALDLHKREIEAATFDDAGQLLHRRRFPGTREAILAFAQTYLSPHHHVAVEATFNTWAVVDLLTPLVASITVSNPLLTRAIASAKIKTDKIDVTVLAHLLRLGYLPPVWIPDSATRELRKQTAERASLTHDRTRLKNRIHAVLNQRLIQAPTDLFDADGLLWLQRLELDPVGRRSLDRMLAQLTLVEQQIRAATETLARQAHADERVRLLMTLPGVGFATAQTLLAALGDLSRFPSANHAAAYLGLVPSTYQSGDKTFHGHITKRGSSHTRWMLVEAAQHLDTHPGPLGAFFRKLAARKCRNIAVVATAHKLVLLAWHLLKSGQPYRYAIPRSTEEKLRLLRVQATGEKRKTGPKPGNGFAQPKIAPGVRSRKLKSLSEVYAEESLPAMSPAPAGELRHVAECGVSEFAADILESKYVPRGKDTRKE

SEQ ID NO: 440977 - protein, 398 aa, unidentified
MGNAITHVGLDVHKSSISAALLASGSTQVVEWKLANEPGEVRRLVRRLKREGQGEVLCAYEAGPCGYELQRQMAKEGVQCLVVAPSLIPRKPGDRIKTDRRDARKLAELLRAGMLTEVCPPTPSEEAVRSLCRAREDARIDLMRARHRLSKMLLRRGLHFSQGKAWTDKHRAWLWSLVLDHPAEKAVLDDYLLAVDQVTERLKSLDRQLSDLAGQEPHRERVGWLRCFRGIDTVTALSIVAELYGVERFARPRSLMAYLGLVPSELKWRESAARGDHQDRQPTLAPAAGRSSPPLPPPASRRHHSSPPARGPTRRRDCPGRSRSAAALSTLYPSSPGSRCPCPEGGGRLRPRVDGLRLGHAPASRNGLGPIGGCILGPSEVQPANELDLWREPVSVDG

SEQ ID NO: 440978 - protein, 355 aa, unidentified
MDSVKYIGMDVHKEAISMAVLNSAGKPVMECVIETKGSSILQFFQGLRGSLHVTFEEGTWAAWLYDLLKPHVTKLVVCNPRRNALLKEGSKSDRIDARKLAELLRSNLLRPVYHGEHGVRTLKELARSYLTISKDLERVMSRLKAIYRSWGIPCTGKQVYAPRYRPEWLGKIAEAGVRRRAEFYYQEFDALRSLRQEVRHDLLAEANKHSAAKLLREIPFIGPIRTALLIAILQTPHRFRTKRQLWTYSGLGIETHGSAEHRYVEGELQRSKKPISIRGLNRNHHHDLKNLFKSAATVAAAKPGPFQEFYAALVAKGIKPEMARLTLARKIAAITLTVWKKGVRFDAKYLKPQTA

SEQ ID NO: 440979 - protein, 547 aa, unidentified
MDCCVGKFQVHTFTFPDYGVSKMYHVRRSGRKQPKARPRSKQSLQKPNGVISPRVQKVGGEHFAIVCVDPAKHRSEWMMADYFGNLLIECQTVEHQSVFFKVAVEMIRQAQQQHDIQDTIVVVERTGNYHLPPKRAFASAGFDTRVVHPFATKQYRVPANPGIKTDENDLYAQHRAAVAGFGLCELELEPPFRDLQLRARHRRNLVEKAASLACQIREHLHLGMPGYAGLFDRLFESPTALVIAARCDSPAKLIQLGRNRLSRYLSKSKVRHQLRTIDKVLAWAAQAADDPIQDGPMHHAIWTDLHELYQHIQRQIVALEQELAGDVVQTPYVRLMAIPGINVVSAAELAAEMGPISGYANANAITGRAGLFPSRYQSDQTDNDRGPLIRQANRRLRCVLMRIADNLACHCAYYRGQAEVDKARGVDKRASRVKIAKRFSRLALACVAGDEPMRHPCFQKPDSILDKLRRFHHAHQTPMDVLLTDLEAAVEQLPYNTCNHEAEIVADVLEQHTRRRRGAGLIGDVLPAVLARLNIRTTEANKNRDRS

SEQ ID NO: 440980 - protein, 389 aa, unidentified
MSHSTPESDRIMIGIDPHKASWTAAAVGPGLQPLATVRVPVGPHGYRDLRRFVARWPDAMWAIEGAGGLGAPLAARLSADGIAAVDVPAKLAARVRVLSTGHGRKNDDADAISVAVAALSAAGLRTVTVDEEVTALRALVEHRDDVVKTRTQTVNRLHVLLTQLIPAGAPRQLTADTAAQLLRTVRPRSLGPRTLRRLAADLITEIRRLDRRITVANTEIADAVQASRSTLSELRGIGNLTTGKILARVGDVHRFRSAAAFASYTGTAPIEVSSGDVVRHRLSRAGDRQLNCCLHTMAITQLQRDSPGRVYYLRKRADGKSHKEALRCLERRLSDVVYRCLIRDADPQNGAGPRGHQGATTNSSATGSTPTAGSSDKSLPGPATTDSTT

SEQ ID NO: 440981 - protein, 414 aa, unidentified
MVPDHGQLDCDQQPEAELFAGVDWGGSFHQLCVLNAAGTPVLQQSISHDVAGLALLASQLAGLCSSVAMAIERAEGLLVELLQTLPNLILYCVSPKISARARERYRLSAAKSDLFDAFVLADTLRHEHRRWRPLSRMSPLTAELQAVSRDRQPVLHAKVACESRLRAVLESYHPAPLHIFSELDRDITLEFIRAYPTPDQARRVKTGRMSAFCARQHYSGRTDPAVLVDRVTPHLLEASKGTTAGKFFAAKLFAEELRMHTEHLRAFDKRLDELLQRHPDAPIFTSFPGIGPVVAATLISEMGDDRTRFPSPDVLLAEAGLAPVTKASGRTRQVRFRYAANRRMRHAIDWWAFVASREDPWSKIVYQTARGHGQNKYRALRGLGARWTRVMWRCWTDHSCYDPTRHPRPELLTA

SEQ ID NO: 440982 - protein, 348 aa, unidentified
MEAPLIFVGIDVSKAQLDVAIRPSAQSLSVTNDRAGIKSLIKHLKKLGPQLVVLEATGGLERQVLSALIAGEIPVVMANPRHIRDFAKSIGQLAKTDRIDASVIAHYAEAVRPKPRPLPDEASLELRALSARRRQVVDMIVAEKNRLATASKVVKKRITAHIAYLEQELNDPDQDLDRFIEKNAAWKENQQILCSTPSIGPVSSRTLLVELPELGALDRKKISALVGVAPFPRDSGTLKGRRTIWGGRASVRSALFMATVVATRFNPVIRDFYKRLKAKGKPSKVCLVACMHKLLTILNAMIKNKIRWSENLLTRPLDMKHSCYISGLRLRLARSCTGEFIPSADCGF

SEQ ID NO: 440983 - protein, 408 aa, unidentified
MEVLYPRCAGLDLGKDALVACVRIHGREVQQECRTFGMTTRELLALSGWLTGYGITPVAMEATGTYWKAVWHLLEPAFALVLANAAHVKGVPGRKSDVNDAMWIADLLAHGLIRGSFVPPEPIQDVRDLTRTRKQLVREIAQHTQRIQKTLDIANLKITGLISDVLGVTGRSILRALIAGETDPVRLADLARGTLKAKRAALIEALTGRVTAHHRRLLKLHVHLIEQLEAAVAEIDQQLGETLAPFREAVTRLDGVPGINTIAAQAILGEIGLDMTRFPTHEHLVSWACLCRRLDDSAGKRKSTRTRKGACWLKTVLVQCAWAAVRTKDSYLRAQFLRLRARRGPKKAIVAVAASILTAIYYIVRDGVKYRDLGGRYFETLDQAQITKRLVQRLERLGYRVELQHVAA

SEQ ID NO: 440984 - protein, 429 aa, unidentified
MTSKSCTTSPVVRVAIDVAKLTHQVLLELPSGTRRVLRVANTKAEIDRFVATLRALELSCEIAFEPTGDYHRPLAYLLGQAGFHLCLVSSIAVARTREALYNSWDKNDPKDAQVILHLLKNGTTQRYLDPLMTGYQDLQEIAKTYQQISLRKVRLQHSLVTHHLPLYFPEAERYLHSSRAEWFTELLLFTPCPTAVRRYTKTAFVAAAREQIGGRKVDKARWLADFYETACSSVGLPVSEASETMRMFRVVLEEYRALCQLRKRLETDVVTRLANQPDFVRLQTLPGIGPILAMIILAEARDLRRFGCARQFLKYCGFDLCTEQSGQFRGTTHLSKRGNARLRYAFWMAGTVAIRMQQNSFRRKFDDYIRRDPQNTDRRRKGYTAVAAKMARVAYAVVTTGTDYRRFPEATRPGGRIPSPGAVEAHATS

SEQ ID NO: 440985 - protein, 402 aa, unidentified
MNAVGIDVSKGKSMVAIMRPFGEIVSTPFEIKHTSSDINSLVKLIKSIEGESRIVMEHTGRYYEVLAHQLSEANLFVSAINPKLIKDFDNDSLRKVKTDKADSVKIARYALDKWQNLKQYSVMDELRNQLKTMNRQFGFYMKHKTAMKNNLIGILDQTYPGVNTYFDSPARSDGSQKWVDFASTYWHVDCVRKMSRNAFINHYQNWCKRKKYNFSQSKAEEIYGKAKELVPVLPKDEITKLIIKQAVDQLNSASTTVESLRTLMNETAFKLPEYPIVMAMKGVGPSLVPQLMAKIGDVSRFTHKGALTAFAGVDPGVNESGTYEQKSVPTSKRGSSDLRKTLFQVMDASIKTKPQDDPVYQFLDKKRAQGKPYYVYMTAGANKFLRIYYGRVKEYLSSLPES

SEQ ID NO: 440986 - protein, 391 aa, unidentified
MVCVGIDVAKDKHDCCILDSDGTIRADCITIPNNMDGFKQLLQTIRDCTKKSDKIKVGLEATGHYSYNILGFLLDNDLAVYVMNPLHTNLYRKSLSLRKTKTDRVDARTIATMLLSDVDLKSYTDTAYHNEELKSLTRYRFDKVRERAKLKQSVSRLVTILFPELEKLVPSLHIASVYALLSEYPGAKQISEIHLTKLTNLLATASKGRYGKDKAIQIRDAARTSIGSVMPAKFLELKHTIKLIKELTSEIDEIEDSIQQIMDELHPPILSIPGVGIQSAAMILAEIGDFSNFESPDKILAYAGCSPSTYQSGKLTNCYAHMEKRGSRYLRYALYNATKYVCHWNPVFAEYLAKKRAEGKHYNVALSHAMKKLVRLIYALQKSGKAYLTAA

SEQ ID NO: 440987 - protein, 418 aa, unidentified
MKKHSNSRKKSEATTKRAKSRGPVQRDTKEVLAELVGKLKEKLDPKKAAAASAGDGHPRGELRPNLDRLTVGVDLGDQWSHYCILGLEGETLAEGQLRTTQEDFATFFQGLNAARVVVEVGTHSAWVQEVICGCGHEVLVANPRLMEGSKRRKRKNDRIDANKLARLGRVDPESLYPIQHRSREVRQDLVMLRARDALVAARTEIINTTRGLVKSMGTRLPKCSSRSFAQKGEETVPVEMREALLPLVRLAAALSADIKEYDKKIESLGREKYGHTTLLRQVKGVGPITARAYVLTLENPQRFAKSRDVGPYLGLVPKQEDSGESQPQLGISKAGDTMVRKLLVGSAQYILGPFGPDTDLRRYGLRLCERGGKNAKKRAAVAVARKLAVLLHRLWVSGEVYEPLRPGMSVTMTPAAAA

SEQ ID NO: 440988 - protein, 315 aa, unidentified
MTQTNITTAGIDTSKAKLDIAVHGRTERWQVANALPGWRALAANLAEAGVTRVGIEATGGYERGVVEHLRAAGFTVLMLQPLQVKAFGRIHLRRAKNDALDAVLIAACAAAVDPPEIAPDPRLTELADYLTFLEQIEEDIRRFKTRLEHIDEPTLRRIVNSDIARLKARKTAQMRDIAKRLRSHDDLAKRLKLVLSIPGIGERTALAIVIRMPELGRVSREEAAALAGLAPFDADSGQHRGQRKIAGGRSRLRRSLFAAALPAAFRWNKALIALYARLMAKGKVHNAALIACARKLLIYANTVVQRGTPWTEKAP

SEQ ID NO: 440989 - protein, 386 aa, unidentified
MKLVGIDIAKYEHAAFIMEASTGESLCDPFFFKNNKEGFKKLYTELNKYSKNELLIGMEDTGHYNFAIESSLLAEGYKVALINPITTKSLRKASLKSVKSDKEDALLITKALLDKAYYRIISIQDEKLKEAKELTRYRTQLTLEMNRKKNVLQRHIDIVFPEFNTLFNNEYTITYLNILRKYSDAYTIAHTDIRSLRKCFKYCNSFSAEELKELASNSVGIHDVSISFIIQSVISSIDLINSQIEVLDKKIEELAITQDSSITSIPGISIITGTSILAELGDISKYSNAGKVIKFAGVNPYISESGKFSADKTAITKKGSKYLRTTLYRVIIPVIRHNPAFNNYYHLKRNQGKGHLCALGHCVRKLLRIIYHLETNNLSFDINSLK

SEQ ID NO: 440990 - protein, 359 aa, unidentified
MSEITFIGLDVHARSVAAGVLDGASGEVRSCTAPPRSAELVAWLQRQGESLSVAHEAGPTGFGLARACAAAKIPCLVAAPSRIARAPGERVKTDGRDALKLAKLLRLGELVAVRVPSVAEEGARDLVRAREDARGDLMRARHRLSKLLLRQGLVWEGSAWTLAHEHWLASQSFEARGLGIAYEEAVAAMMSVRARRDALDRAIAEEATREPWATTVGRLACLRGVSTLTAFGLAVEIGDWQRFNGRSIGAYLGLVPSESSSGEHRRQGAITKTGNTHARRLLVEAAWHHRRPSSHLGRELARRRAGQPALVRERAEAAGRRLQKRWRSFDARGKRSTVAAVAVARELAGWCWSLAVMDL

SEQ ID NO: 440991 - protein, 375 aa, unidentified
MKEKVRFLGLDVHAETIAVAIAEPDGEVRSLGTIPNRAESIRKLVKKFGPADKLRACYEAGPTGYVVYWQLAELGIQCEVVAPTLVPVKAGDRVKTDRRDAEKLARCHRSGDLTAVWVPDEGSEALRDLVRAREGAKQDQMRARHRLSKFLLRSGQRPPTGVRPWTRPYLIWVAQLRFTQIAQEATRQDYLHEVEHMRERVARLEQAITEAVKLASPALQQVINDLQALRGIADISAVTIAAELGQVSRFGSAKQLMGYCGAVPSEDSSGKRTRRGGITKTGNAHLRRIVVEAAWSYRRPPCIWYGLRRRQESISEEAKEIAWKAQHRLHKRYMRLGAAGKDQRKIVTAVARELLGFIWAIGIRAETISKQQIAA

SEQ ID NO: 440992 - protein, 341 aa, unidentified
MSELYAGMDLHSGNTYVGIIEKGSSRRIFEKRVRNNLEELVWALNPYREEIRGIAVESTFNWYWLVDGLNEAGYDCVHLANPAAIQQYKGLKYADDRHDAFWLAQMLFLGILPEGYIYPREERPVRDLLRKRSFLVKQRTAHIISLQSMIERNTGVHMSANALRKVKAEDIKRILKEDHLVLLGTTSLEAIAFLGKSIRNIEKTVKRELKTRDAFEKLHMVPGIGDILAMTIMLEVGDISRFARVGDFTSYCRCVPTGRLSNGKSKGKGNAKNGNRYLAWAFVEAAYISLRQSPRIAGYYKRKASKTHRMVAVKTIASKLARACYYMLRDGVEFKEEMLFC

SEQ ID NO: 440993 - protein, 392 aa, unidentified
MYEVFVGLDISKGSFAACAIGQEQDKIFEFSAPMNMEGFRKLTEHLSKFSKDSILIGQESSGCYHINLSAFLSDKGYQTVIINPLLISNFMKLSLRKTKTDRKDAFAIACFLTMFHDSLPQSCFLSTDFRELARERERLSSEIARLKNDIEKLLSVTFPELLKATNVYSRAILNLLKHHPSAWMIKSLPTSEIAKLLKPNGSGRKPRISPEELISLAKNSIASMSPGRELILSQKASRLLLFEEELKKLTDMLAETCRKCALEDLEILKSIKGIGDITALHFLAEVGDVSRFENCKKLIAYAGLDPTVHQSGKFEGQSRVSKRGNRHLRRVLWLMAAKVARYNQVFREYFLRRRAEGISYKKAILAVAHKLIRVIFAVLTHKTYFLAKKNSL

SEQ ID NO: 440994 - protein, 416 aa, unidentified
MKIVRPICCGMDVHKNIIVATIGITNKKTRITEYIQETFSTLNPDLLNLKQWLINHKCFDACMESTGKYWIPIFNILEDEINIYLTHPKYVKAIKGKKTDKKDSKWICDLFKHDLIKFSFIPPKEIRALREISRYRYKLVGMRSSERNRYQNCMTVSNIGIGSVFSDPFGKSAQAIMKEVLESDIIEDEKILKCIHGSCKNKDKILDSIKHCNIETDQRFKMNESMTHMEELQVHIDNCEIEMMKRAAPMFDQFMHITQLPGISTLSAILIISEIGVDMKQFESDKQLTCWAGLAPANNESANKKKSVRISKAGQYLKPLLVQCALGAIKDKEGYFGIKYSRIKKRRGHKKAIIAIARMMLVSIYHMILTGETFNPSDYESFRNPKPPIKQQVLTEESAIEFLKKSGFDVSKLTKP

SEQ ID NO: 440995 - protein, 426 aa, unidentified
MFAASVDEDQVIARVAALDIGKAELVCCVRLPASGGSKRRVQEVTTHSTMTRSLAELANRLVDLRVERVVMEATSDYWKPVFYLLEAHGLDPWLVNARDVRHLPGRPKTDVLDAVWLCKVAERQMLRPSFVPPRPIRVLRDLTRYRIDLVAARTAEKSRVEKLLEDAGIKLSVVASDIFGVSGRAMLAALIAGQRDPAVLADLARARMRAKISLLEEAFAGLPTGAFAEHHRFLLQRMLGRIDAIDADIAILDAEIEAHLAPFDQAVQRLDEIPGIGPVAAAIIIAEVGVDMTRFPTAGHLCSWAKFSPGIKSSAGKSKGSGSTGHGDRYLARVLGEAVVMAGRSDTFLGDRYRRIARRRGKKKAIVAVGRSMLVIIWHLLSEPDTPFHDLGADHYTRTINTDARKRNHIRQLEALGYRVTLEPAA

SEQ ID NO: 440996 - protein, 331 aa, unidentified
MNFNLFIGIDVSKSTLDVHLKPIGCYKAFSNDPHGFIAIVEWIMDQAGKFCHKELVFGLEHTGLYSENLILFLDQNDFAFTVIPGLELKRSLGIRRGKSDKVDARNIAEYIYEKREKIKLYKLPSQTLDKLKKLASIRERMVKERAAYQVRMDEYLEQFPDSTFETYLQTQQELIHCFNSQIERVEKDIERLIKEDSSLSDQYKLINSIKGVGPQTAIMMIILTNGFSSFDNWRKFASYAGIAPFPNQSGTFNGRTKTNKLANKRIKSLLTMCASTAIQFNPEMRKYYENRVQMGKNKMSTLNIIRNKLTARIFAVISRNTPYVEIHKYAA

SEQ ID NO: 440997 - protein, 375 aa, unidentified
MKEKVRFLGLDVHAETIAVAVAEPDGEVRSLGTIANREESIRKLVNKLGPVEQLRACYEAGPTGYVLYWQLTQLGVECAVVAPTLVPVKVGDRVKTDRRDAAKLARSHRSDDLTAVWVPDEGSEALRDLVRAREAAKQDQLRARHRLSKFLLRTGRRPAMGLKAWTERYLAWVQQIQFSQPAQEFTLLDYLHEVQHMDERVQRLEQAIAEAVKLASPQVQEVIRGLQALRGVAHLSAVTIAAELGNISRFESARKLMGYSGAVPSEDSSGQRQRRGNITKTGNAHLRRIAIESAWSYRFRPAIGPRLRQRQEGVPEEIKEIAWKAQIRLHKRYLKLTAAGKDKKKIITAVGRELLGFVWAIGIKAETAGKLQMAA

SEQ ID NO: 440998 - protein, 310 aa, unidentified
MNDTIGIDISKDHLDAHRLSDRQAAQFANTRVGFETLRKWIGKVPPARVVYEATGAYHGAFERTFATTMPLVKVNPLQARRFAQACGTRAKTDAVDAAMLARMGDALKLEADKPDAEDLPVLKELQIARQALIKEQTRLKNRVQTQTVTLVRRQSKARLVQIKSHLAQLDQEIANRINDCPERARAYTIVQSIPGLGATTAAAILIEMPEVGTLSNKAVASLAGLAPMTRQSGKWRGKAFIQGGRKFLRDALYMPALVAMRFNPDLSRKYQNLKAAGKPSKVALTAIMRKLIILANTLIKNRRMWVENGA

SEQ ID NO: 440999 - protein, 355 aa, unidentified
MNTLNENSIVVGVDVHKYSHTAVAMNAWGEERGLITFTNNTLETYTEWLEQIGLKENIIVGLEDVNSYGIHLVERLRNDNFHIRYVPAILTERERKTSTKRDKSDPVDAKRVGKVLLYKYEQTLPAKESIADKRELDTARQMDLLLMERKDLVRWKTIIKNQLHGLIHQHYTESYRLHCPRSFSKKVTQWFLDDLKENKTILATSITRRFHRLLFIENQIYTISKEMTVIGETSKEVVSLSTIHGCGMITACSIMAEVITVKRFRNKHHFSSYAGIAPTPHSSGRKNTMHTNPFGNRQLNKCLHVIALSQIAIKGDPTGKEYYQKKVKEGKTKLWALRCLKHQMAKVVFQKLRYA

SEQ ID NO: 441000 - protein, 353 aa, unidentified
MIIGCDYHPGFQQIALVDSETGDLQERRLEHREEAEKFYRDLSVQGVRVRLGMEASGQARWFERLFSELRFELWIGDAAEIRTKRVRKQKTDRQDAQLILRLLLEDRFPRIWVPSSENRDLRQLLWHRHRMVQARTRIMNQLQAVALNEGLRCKKKLWREAGREQLDSFKLAPWASRRRRDLLELLDRLSPTIAELTQAIEQEVEKCPEAQRLQTHPGVGCLTALAFVLIIGRAERFPCGKQIASYLGLVPSEESSGDRRRLGHITKQGSSLLRFLLVEAAQVTVRSDPEWRRRYFHLAMRRGRKIAKVAMARRLAVRLYWMWRKGWDYEQMTKFSSHAGEPGNRDGVKYNTE

SEQ ID NO: 441001 - protein, 381 aa, unidentified
MKNNYQNLKITHTKEGFATILSIYNQIIEKTNIIPIVYFEYTGVYHKTLVAFLKENNIEFHPIPPLVAAKERKSDIRNKKTDTRDCKTLSYVVYKNKTKIYYEPTKEEKKLKDLQKYYMTTEKQYQEITVHLYEMIDIIYPFYKSVLSEFDCNTSLKLLQKYPHPDFVTSHRKATLIKDFKEITGHGDVYATNVITKLLALIETIVPGCSKDDFEVEMLKDYATQALFYKTRLNKTLDEMNEIINADEDKKRSLDCIDSIPGIGTNTASRLLAELYNLERFHSYKALIAFAGTDPNIDQSGKKDGKHLSITKCGNKRLRTILFMMVRSMVRNRIPKNPIKDFYKKKTQLGLPPKVVLIACVNKLLHIIYQLNKNGEIFIYH

SEQ ID NO: 441002 - protein, 271 aa, unidentified
MGEITTIGLDLAKNIFQVHGIDETGTAVVVKRLRRNQVIGFFAGLPRCLVGMEACATAHHWTRELTGVGHEVRLMPPQYVKAYVKRNKNDAADAAAICEAVKRPSMRFVPAKTIEQQSALLMHRTRDLLIRQRTMLINALRGHMAEFGLIEAQGLHKVAGLITTVMDDRDERIPEMARQALKMITGQINELQARIAVLETQVLAWHKNNPVCQRLATIPGIGPIIATAIAATVADPSVFRSGREFAAWLGLVPRQSSTGGKAAPRWDQQTR

SEQ ID NO: 441003 - protein, 411 aa, unidentified
MQVIHERCAALDVHKKTVVTTILKTQADGSVQEWTRTFLTMTADLLALDDWLRSHGIEIIAMESTGVFWRPVFNLLEEGRQVILVNAQHMKAVPGRKTDVKDSQWLADLLRHGLLKASFIPPKPVREVRDLMRYRKTIVQERADEVNRLQKVLETANIKLASVATDVLGKSGRSMLDALLDGQDDPEMLAELARGRLRAKLADLRKALDGRVQPHHRLLLTRILAHIDFLEESLAQLQAEMEQYLDPFEEAMELVQSVVGIDETAAASILAEIGTDMTRFASEKHIASWAGVCPGNKQSGGKRLSGKTTKGNPYLRAILCEVAWAIAHTKDNYLSAFYHRVARRHGKPKAIMALSHKVLVIIYHILRTKKPYTDLGADYFDQRDRGRIERHHIHRLEQLGYTVTLMPKEAA

SEQ ID NO: 441004 - protein, 363 aa, unidentified
MFTERTSIGLDVHARSVAAAAIDGVTGEVSRTRLTPSYEHIMDWITQMPGPVAVAYEAGPTGFGLCRVLTDAGVRCEVVAPSKLQRPAGDRVKTDSRDALHLARLLRLDEVTSVSIPSVNQEAARDLVRAREDCRGDLMRARHRLSKLLLRHGIVYHAGAAWTDAHDRWLRAQAAPQLLTPATRLAFDSDYEHVLMLQGRRRALDSAIEDMAADGEFTAVVRRVSCLRGVGTLTAFALAVEIGDWNRFTGNTIGAFVGLVPAEFSSGSTRAQGPITKTGNTHVRRLLVEAAWHHRSKYQARAVMRSRWELAPAAARARGHEGNLRLHNRWVGFLARRKRSTVANVAIARELAGWCWSLAVMED

SEQ ID NO: 441005 - protein, 378 aa, unidentified
MPSETTVHVSIELSVSSWLVAARSAGAEKSRLHRIQGGDTTTLLALITKLRSRASTKLGRAVDVACCFEAGRDGFWLHRLLTAHGIAAYVLEPTSILVNRRARRAKTDRLDAEGMLRVLATWLAGDRQVCSMVRVPTPEEEDAKRPHREREHLVQERVRIENRIEALLFTQGIRKRPSLRSWVRDVAELRTGDGRELPCLLRIELERLRRRLVLALELIHEVEADRAEALAATADDKMTQKIAALQRLRGIGPNFAAVLVREVLYRSFANRRQLASYVGIAPMPYQSGGMDHDRSISRAGNPRARTTLIQLSWLWLRYQPGSALAAWFRERVGTLQGRTRRIAIVAMARKLLIALWRYVETGVMPDGVEIRAQADVTA

SEQ ID NO: 441006 - protein, 368 aa, unidentified
MKKNLRFVGLDVHKDSISVAVAESGREPARLLETIPADESLLLKVLDRLGPKSRLRVCYEAGPTGYGLARRLNEQGICCVVVAPSLVPTQKNRRIKTDRRDAVRLAHFLRSGDLVEVTIPQAQTEAMRDLERAREDAIRVERVARQQLDKFLLRHGRRWSEGKKWTLKHWRWIKLQEFPEEASRRVLGDYLHTAEQALARVQRLTTDLSELVDRWTLGPLVRALQSLRGVDVVTAVVLAAEIGDFKRFRSPKQLMAYLGLVPSEHSSGGDRRQGGITRTGNRHARWVLVEAAWNYRFRPCASQRINARRQRVSAGVRTIAQRAEQRLSRRFRRLIDRGKSSQKAVTAVARELVGFVWAIAQEDTLLAA

SEQ ID NO: 441007 - protein, 355 aa, unidentified
MTVTIVEEARPVTCRTAITGGVDTHADTHVAAALDPVGGLLGVREFPATAAGYARLLGWLGGFGTVCLAGIEGTGSYGAGLARYVTAAGIRVVEVDRSDRQDRRRQGKSDPLDAVSAARAAQSGRARGAPKGRDGAVEAIRTLMVARRSAAGERTRTINQARALILTGPDDLRARFARHKPAALVTALAALRPRPGGVAGHAVRIALRELGRRAQFLDGQLERLDELIVPLVTARAPGLLAVYGAGPRTVALLLIAAGDHPGRLRSEAAWAHLCGVAPIPASSGKVTRHRLNPGGDRQANHALWRIVFTRLGSDPATRAYAERRTAEGKSKAEIIRCLKRYVAREVYRHLRAAAG

SEQ ID NO: 441008 - protein, 342 aa, unidentified
MYYIGLDVHKKTISYCVKDASGQVHQEGKVGATRWELDDWMKTLPQPWTVAMEATIFTGWIYDHLLPHAQQVKVAHPLMLRAIAAAKKKNDRIDAGKIADCLRCDFLPECHMASTAIRDRRRTLRYRHLLVRQMVQMKNRISGLLMETGVSHNKRRLHKVGYFRELLSSNEEVNESIRPLLRVSRDTIVRLQKTEYALVSSLQRDPLLAERIKRLRTVPGVGPITALTWALEMGDVSRFPSIRQAISYCGLCGDEKTSADKVMRTPLSKQRNKHIQRVLVEAAKLAPRQDHDLALVYEREKQKGNANRATLAVARKMVAYLLAVDRGQRDFVPFADSQSAAA

SEQ ID NO: 441009 - protein, 412 aa, unidentified
MLFIGDDWAEGHHDVVVHDDAGKTLARRRLPEGVDGIARFHELVARCWGEDSEPDPAQVVVVIETDRGPWVKALAAAGYRVYPVNPKQASRHKETIAVSGKKDDFFDAGGLADMGRTRRHQLRELAADSDIAEAVKIAARAHQKLVWERTRHLLRLRSALREYFPAALEAYAVLTVAGPDALELLAKAPDPAAAAKLTVTQITAALKRAGRRGDLAGRAREIQAALRTGHLGQPAVVAEAYAASTQAAAAVITVLNEQIKIMEAKVSELFHRHPDAGIYLSQPGIGDITGARILGEFGDAPGRYATAKARKNYAGTSPLTIQSGKKKTVHARYIRNKHLIDPLHAQAFSALTASPGARALYDELRAQEVGHDDALRRVANRFTGILHGCLSRGAGYDEATAWAHRAEHPKAA

SEQ ID NO: 441010 - protein, 328 aa, unidentified
MSPNTIKHMQTENAVVYAGVDVAKATLQLHLQSRQSEFANTPAGLRQLLKEMQKVTGVHVVCEATGGYEQPMVKVLHGAQIPVSVTNPARVRAAAQAQGQRAKSDPIDAQGLTDYGQRYQPEATPPTSATQEQLVALTQWLKQLIHGQAMAKTQAEHHQEPFVRRQHAKLIVHLQSQIKAVEEQIEALLERDAALQKRVNCLDDIAGVGPRTAWMVLAHMPELGQLNRQQVGSLAGLAPWIRDSGTMKGRRCIGGGRPEVRLALYMAALSAARSNPVLSAFYKRLRAKGKLAKVALTAVMRKLLIYMNHQLKDLLAHTATEKTAEVKT

SEQ ID NO: 441011 - protein, 343 aa, unidentified
MQAITTIGLDVAKSVFQVHGVDGGGEVVLRRQLKRSYVLAFFQKLPPCLVGIEACASSHHWSRELQGLGHTVRLMPPAYVKPYVKRHKNDAIDAEAICEAVTRPNMRFVATKTREQQSFMTLHRTRHLFIRQQTSVINAIRAHLAEFGIVAPVGRKGIEQLLNVAADAGDKRLPEVARACVTALGAQLQTLKAQILQFDRLIMAWHRSSQASRRLDDIPGVGPALATALVATVADPRAFRSGRNFSAWIGLVPKQHSSGGKDRLGSISKRGDRYLRGLFVAGALAVIRYAKIHGTKHRPWLTALLARRPTKVAAIALANKIARMAWAMMAKGERYKEPVALAA

SEQ ID NO: 441012 - protein, 427 aa, unidentified
MNTVRPIAVQNRKYVLSVGLDWADQKHTLCQRCWADGQRQQFEIGADPASVEAWLAQLKALAGPEGRVAVGFEQNRGALFAMLRAHTDWIDLYPLNPLTVSKFREALFTSGAKDDPLDSQLIEELLYHHLDRLRPYMAAEPELRELDLLCQQRRKAVDAAVACANELCSLLKVYYPLPLDLHEELRCSLTLHFLKRWPTLEQLKKAKPQTLRSFYYQHHSRSQSLITERLEKIARAQAVTEDLALIRPSVLSLQRLVNQLLTLQASVAAFDKAIQALFAKHPDHLIFESLPGAGPRLAPRLLAAFGSNRAALSHSSEMQKKSGIAPVLDRSGQAKTIARRWCRSKFLCQTFHEFAAHSIPHSTWAKACYQQLLARGKSHNAAVRALAFKWIRIIFRLWQNGTLYDESHYLKALENRRSPLSKKISKL

SEQ ID NO: 441013 - protein, 367 aa, unidentified
MSNYVTAIGLDVHARSISACAFDPMTGEVVRARFGYDPASVAEWVLGFESPKAVYESGPTGFHPCRALRALGVDCAVGAVSKMHRLAADRGRKNDRRDAEWLARLLACRNVVEVWVPDDRTEAARDLSRALEDARDDLQRARQRMSKFLLRHGPVVDETTPAGRRRSNWTEAYWRWARSIEFGEADDAAAYEHYMDAVERCAGAKRELERKVEEAAARPERAPVVDALCLAKGIDVASAFLLAAEAGDFSRFPSAPSFASWCGLAPSGRSSGETESRGGITRAGNGHVRRALVEASWHVPMSTRHPEKPRPGHGVAPAASRHAAKCNRRLQDGRDAMSQAGKRPCVANCATAREMACRVWAIALMAR

SEQ ID NO: 441014 - protein, 341 aa, unidentified
MNHYVGIDVSLEASSLCVVDANGKIAREGKVASEPDALIAWLRGLKLEQTRIGLEAGPLSQWLFAAMRQAGFAVELLETRHVCTALKTMPVKSDRNDARGIAQLMRMGWFRPVHCKSIAAQETRALLTARKLLQGKLHDIEMSLRGILRGFGLKVGPATPVHFEERIRELVAGHPSLETIAEGLLAVRVALRREFDRFEKQVRATARGDRRARLLMSVPGVGAIVSLTFASAIDDPARFKSSKQVGAYFGLTPTKYQSGETDIDGRISKVGDGWVRAALYEGAHIILTKPLKGCTALKSWAMKIARRAGMRKAKVALARKLAVIMHRMLVDGTSFRNLAAV

SEQ ID NO: 441015 - protein, 309 aa, unidentified
MNAEVTVYCGIDVSKEHLDARIKGKTIRFSNTVKGAGLIMDRAGEVHFIFESTGGYERMAAWMMMTAGKKVSIVNPGRVRHFAISMGQLAKTDNIDARIITEFAEQAKPAPAEKPSKSQRTLTALVDRRQQLVEIRTAETSRLDTAGDPIYRKLINRHLKWLNKEIAHIEEEIGTTITEDTEMAQKAQSIQRLKGLGAVCTSTLLAHLPEIGTLSRQEIAALAGVAPYNRDSGKTSFRRHICGGRKRLRACLYMAAVCAIRYNDPMKKFYTRLVEVNHRPPKVALVAVMRKLLIAANSAVKNPDFIVVV

SEQ ID NO: 441016 - protein, 392 aa, unidentified
MSQHFRFDASRSLTALEQDSTIIAVIEMSQTKWLVAALVPGVERQPLKKFDAHEETLLKLLHRWRHEAGQAGRNIKRIVVAFEAGRDGFWLARWLRARDIEVYVIHPTSIAVSREHRRAKTDRLDTELLMRVFLGWLRGERRHCSMAAIPTIEEEDARRPNRERQNLVTEQTRIINQMKAIFTRFGIRSLRPTMRKVAENLEDLRTAEGTPLPQNTLAELRRHLARLHVVRDQIRAVEQERLRKLAVAPAAEKKGPHAMVRLIARVLGVGVETADMLVNEIFSRHWRDRKAVARYAGLTGSPDESGSRRRERGLARAGNVRVRSGMIQLAWRFVRFQKNSALAQWFAARTADGRASTRKTMIVALARKLLIALWRLVTKGEVPQGVVLRPAS

SEQ ID NO: 441017 - protein, 427 aa, unidentified
MFDNDYNRQVERRQRIKKTTLVLGIDIGDDFNAVAYMHKEGTILSRHPIVYNSRAGFDQFVRITEDLKAKHGMKDVLIGLEPTGHYWRKIAYFSMDQGYAVRFIKTTSVKHERELNESSSAKSDIKDAITLANLTREGKYIDTVIEDGVSRQLRTLSKVREKILRQSTGAKNTLHAVLDDYFPELKKLFYAMHTRGLWAVLETCPFPEDVLKCDQSAIAEIITKASRSKIEGTKKARALYLAAQTSIGLKRVSDADRYRMQVCLNEVKQTERMLHEIKKELKGLLLQLPAAQYLLSIPGVGHLSAAIFLGELGNPEYFHRAKQIIKYAGYDPQESDSGKRIGRKVISKKGRWLLRKYLYLMSVSAVNHSMFFRKYYQRRLKTKNRFGQLLKKKEALCAVAIKLIKVIFALLRDKRAFQDTVRFALAA

SEQ ID NO: 441018 - protein, 412 aa, unidentified
MMEVLYERCCALDVHKKTVIVCVATRDGKQTRTFATMTSDLLELADYLVSKGCTHVAMESTGVYWKPIYNILDGLGMELLVVNARDIKAVPGRKTDVKDAEWICDLLRHGLLRGSFIPDRSQRELRELVRYRKGLVQERSREVNRIQKVLEGANIKLGDVATNVMGKSGQAILEALVQGNTDPESLAGLAKGKLRRKNEQLTRALQGLIGPHQRMMLSTQLGHIRFLDGQIERLNREVEERMRPFEEAIEAIDAIPGVGRRIAEEVLAETGADMAQFPTAAHLASWVGVCPGNNESAGKRKSGRARKGNPHARQALVEAAQSAAHTKDTYLSSQYHRIAARRGNKRAIVAVAHTILTIMYHILTERTTYRELGPDHFDKLNQDAVARRAIKKLETLGYKVTIEPLSTLECSA

SEQ ID NO: 441019 - protein, 413 aa, unidentified
MEVIHPRCAGIDCSKKDAKACVRVQARGRRATTKTVTTWGSTTAEVLALREHLVAEQVGCVIIESTGDYWKPFYYLLEDALEVMLVNAKSVRNVPGRKTDVSDAAWLADLGAHGLVRASLVPPPPIRALRDLTRARTVITRERTREIQRLEKLLEDSGIKLSAVASEIVGVSGRAILEAMIAGERDPAVLADLAKAGMRKKIPALTQALTGRFSEHHAFMARLYLDCLDDHSAKIARLDERIAEAMTPFAAARELLMSIPGFSVRIAEVFIAETGADMIAFPTAAHLASWAGVAPGCNESAGRVKSAATRPGNRYLKAALGIAALSAARSKNTYYNAKFTRIAARRGRMIALVALERTMITDAYNMLCNGAFYRDPGPDFYTRHQPAKAKNRAVTQLQNLGYNVTLEPRTDAA

SEQ ID NO: 441020 - protein, 372 aa, unidentified
MSEIKNTTLHVGLDDHKAFITVAHAEAGRSDPPVFVGPIGTRHADIDTLVRRLHSKAAHLVFAYEAGPCGYGLYRYLVAKGETCRVVAPSLTPKRSGQRVKTNRRDALELARLSRSGDLVDVWVPSVQDEAIRDVCRARDAARITLKAAKLRLSSFLLRHGLSYTGRTAWTAAHRRYLARVVCPTPAQQIVFQELLHAVDEQAERMARLEQQLVELAPSWRLRPVVEAIQALRGVQWLVAVTVIAELGDITRFDNPRQLAAFVGLIPSEHSSGTTRRQGGITKTGNGRARRALVEAAWAYRFPAKVSEHIQKRIQDLPKPAQAIGWKAQVRLCARFRRLVSRGKESNVAVTAIARELIAFMWAIAKEVPIQS

SEQ ID NO: 441021 - protein, 448 aa, unidentified
MVQASETVSTDYNEALLKLFKKQENCLVKNNRKETTMKEKAYVGIDLAKDSSRVAAFDETGEALVKPFSITNSKEGIKKLLSKLSGYKASQIVCGMEISSNYWENMCSHLKGMDVGIILLNPYQVNRYRQATGAKIKTDTIDAEAIADLIRGRKYDSLYISDDTTIELRELVRIKYGFQRRVKDLKKSVLALLFLVFPEYTRIISRPFSKVSMEILSKYPTSCHMAKVSPSRLVKIFRRYQGCNFNLDKAKELVSAAKDSFYSGRASKSRGMSITMQLDEIRSLSEKIADIEEEIKSILCPDDPSGGSSSYDTLNSIKGVGIGTIATFLGCVGDVSRFSSADKLVSFIGFYPIIFESGKYKKKSPTIQKAGPKELRYMLYLASVACIKHNSELKKYYHDKVSAGMPAKKAIIKVAVKLARMMYSMLKYGSRYDSSRVFSQPVSLKNAA

SEQ ID NO: 441022 - protein, 400 aa, unidentified
MNIKGSKKKNQVLSVNIFEQQEIIAKADAIKAELKASTWHELETKGKFDKNDKLSFVSDDMLILGCDIGSETHYVRAIDTRGRELSKSAFGFSNMAEGFESMLDWSTKLAAANDKKQIVLGLEPTGHYWFCLTTWLVAKGISVVQVNPYAVKQTKEVEDNSQLKDDKKDPKLIANLVKDGNFGMPYLPEKLYADIRRLSMFRDQLNEDRIRNLNRLHREMKIYFPEYKDAFGKIDGAFSLELLKEAPFPDELAALGTEGMKQIWHEAKLRGRGYANASSILEYARKSVGIRDGADAGKQAVKWFVSRIIELDEQLSDIENQLNQRCNEIPYAKNILAISGIGENILSGILAEMGDMSRFDNVKEIQKLSGLGLVACSSGKHTGETKISHRGRKRLRYWLF

SEQ ID NO: 441023 - protein, 326 aa, unidentified
MQGKEASEQETKTKSNVGIDVSKDWLDVHVLPADERLRVPNTCEGIRQLKRWLMRLDLALVAVEATGKWHRQVQRSLVESAIAVAVVDPFRVRMFAKAHGIFAKTDRLDARVLAMFAALMAPTARPPAPQALTELAELVTARMTAVDAQTALKNQRSAATVKFLQRQLDRGIERADQDIEALDAAILKRIKLDEGLARRYTILTSIPGFGFVTAAVLIACLGELGGITAKQSGMLAGLAPIADQSGKREGARVIFGGRAPVRRALYLAALSAARFNADMRAFYQRLRDDGKPAKVALIAVARKLVVLANTLIGHDRMWQPTPPKCA

SEQ ID NO: 441024 - protein, 405 aa, unidentified
MVNAGVDLHKTQFTVCFRSRNGERFEKYPTTGEGYKAFLKEVQVWQKKGEQVRVAVESTGNTRYFKSRMEEVGIGVTVINTLKLKVVNESVKKTDKHDAATIAEFLEKDILPESQLCSRQSEQLRRLLKVRTTLVRAEVVVKNQIHALLCAEGIEDVKSAVVQSKRGRKRLLDALGQWTNGLVAQPLIETIERLEENIKSIEEQIRALTAGDRMVELLMSIPGCGEICAWTIRAYTDDIQRFATAKKYASYAGLAPWVQSSNETVRHGRITKRGPAELRTALVQVVMGLRRMKEKTFSWRLMQRYEAMKKNKGSGKSIIATARKMAVIIWHMLTENVEFKIGLMVDPKVTKKTQSMKEVVVLDKEAWVVVEHHLSQFRTEDEKGEKKLALPVKKERKRQKELIPS

SEQ ID NO: 441025 - protein, 318 aa, unidentified
MPQKTRFVGLDVAKSKVDACIRSEGLRLSAPSTPEGRAGLVAWVRANRVGRAVMEASGGYERGWAEALRAAGVEVRIVDPKRVRHFAKAAGRLAKNDPIDADTIAWFAEAFPDREAQPHDPARDEIDRLVAARTALKDAEDRIKQQGEHRPPAVVAKALAAIAKTIRAELRKVEGAIAAKIKANPGFARRAEIIASVPGLAAQTAAGVIAWLPELGHVTNEAAAALIGAAPYDDDSGGRKGQRHIKGGRRKLRNLLYMPVMGAATRHNPMLKAHYQRLRARGKQAKVALIACMRKLIVILNTMLARDQTWNPPVRAAR

SEQ ID NO: 441026 - protein, 349 aa, unidentified
MRFYTQTHKYSCGIDLHARTMYVCIVDRDGNVLVHRNMKSAAEPFLSVVAPYREDLAVAVECIFTWYWLADLCAREGIAFVLGHALYMKAIHGGKTKSDRLDSQKIALLLKGGLIPQAYVYPPAMRATRDLLRRRLHLVRKRADLIAHIQNTASQYNLPPLAASLGRKHQRKGIAEHFPDPVVRQMIELDLRLIDTFDAEVRVLDQDLALKAKAHDAHAYHLIRSVPGIGRVLTLVILYEIHDIHRFPTLQQFASYARLVKCTKESAGKPVGKSHKKIGNSYLKWAFSEAAVLFLRKNPKAQQYIQRLAAKHGKGKALSILAHRLGRTVYTMWQTGQPFDKERFMATLN

SEQ ID NO: 441027 - protein, 423 aa, unidentified
MPGTVNTMEMEREVVCGADIHKQFLLATILTKDGQKFQDRFDSNFEGLLNFRQWLLDHDCQRLAVESTANYWQPIYFVVGKDVEFVLANAYQIKHIPGRKTDVLDSEWIAELCLKDLISPSRIFSEDDRDLRSMTRTRENYVKMRSQIKNRIHQELESACIKLSSVLSDIFGKSGIHIIRGILNGLSIDDILDRIPSKKLKAKRGEIQDAIQANISPVQIDLISLLLDSVDFLNREIESIDKQIQSLISTRQEDLKIAMSIPGMGFTSASTILAEIGNLKDFNNGEKLAAYCGLVPSVYQSAGKLITGHITKHGSPHVRRMLIEVAHAISRTKADSKLKRFYFRIKSRHGAKVAVVALARKVLCILHHLIVNREMFEDGISSKSKREKTGRSSSSTEMIIEDAIQIFVRAGYLVQKRSEKEGG

SEQ ID NO: 441028 - protein, 340 aa, unidentified
MSEVSIIGVDLAKRVFQVHGALPDGNVAFRKKLSRSQFIKFLAEQPPCLIAMEACATAHYWGREALGSGHEVRLIPPIYVKPFVKRQKNDAADAEAIVEAALRPTMRFVEVKSADQQSLGLLFRTRELLVRQRTQLINALRGHLAEYGIVVAIGVRNVKVFQQALLDHGTRLPKTVLSISGVYFEQIAALTERVTELEIALRRETARDGQATLLQTMPGIGPMSAAAIQAFAPPLENFARGRDFAAWLGLVPCQHSSGGKDRLGRISKMGQRDIRRLLIIGAMSIVNWASRKGSRDSWLMRLLESKPKMVVAVALANKMARRLWAMCVKKEAYEIPILVA

SEQ ID NO: 441029 - protein, 320 aa, unidentified
MDCKYVGIDISKNDFNLSFYNENGKFVDAKFTYSKKDLTSMKKLLPQNCICVMEATGHYYLRLAYFLTENQINLSVVNPLIIRRYAQMKMMRAKTDKADARVICKYGIDQKPELWKPKDIEILKLRDIYSVMDKLIRDRASWMNKHEAAKHNKYFDLKALKKIKMMISFLTQQIEEMQEELENLALKHFEDQKEILTSIPGIGNKTAIMLIVITNGFKNFEDVRQLVAYVGLAPRIYTSGISVKGKPKICKLGMSKIRQLLYMCTWTAIKANAACKNLYKRLIEGGKKGKVALIAVANKLLRQAFGCIKNNTKFKVELSF

SEQ ID NO: 441030 - protein, 343 aa, unidentified
MQITTIGLDLAKSVFQVHGVDAAGQVVVRKSLRRSQMLPFFAKLPSCLVGMEACGTSHHWARELIKLGHEVRLMPPAYVKPYVKRGKTDAADAEAICEAVTRPTMRFVPVKSLEQQAALSIHRARDLLVKQRTQLINMIRGLLAEFGVDIPKGLERALLMARQIVDGKAPEVPIEAAKIVATLSRQALDTHVRLREIDRDLLVSLRGNDVARRLMTIPGIGPVGATALAASVTDPHQFRSGRQFAAWLGLTPLQKSSGGKERLGRITKMGDKYLRKLLVVGMTALVRRARQNPESDPRLADLLARKPTRVATVAMANKTERVIWAIMTRGETYRAGHRPALAA

SEQ ID NO: 441031 - protein, 341 aa, unidentified
MENVALIGIALGKHSFHLHCQDKSGKALQRKKFTRTNLMQFLATCPSTVVVMEACAGAHFMARRISDIGHEAKLISPQFVRPFVKSNKNDFVDAEAICEAASRPSMWFVLPRTEVQQAMRALHRVRESLIRDKVKTTNQINGFLLEFGISLPAGDTVIKRLPLVLVEHEIPEYLSRLLMKLHAHYLYLVEQITELESELNQSIKTDDATQRIMTIPGVGPITASLLSSQLGDGKQFSCSRDFAASTGLFAASTGLVPRQYSTGGKSTLLGISKRGDKNLRRLLVQCARSFMMRLEHQQGRLAEWVREQLSKKHSNVVACALANKLARIAWAITTNHNAYQA

SEQ ID NO: 441032 - protein, 343 aa, unidentified
MTQYVGLDVSLKETKLHVLAEAGNRVWRGRCATEPAAIAAAVRRYAPGAVRIGLETGPLTTWLWTALTAEGLPVVCLDARHAKKALDMRVNKTDANDAEGLAHLVRAGWYREVRVKGRSAMLAKALLGARSQLLSMSLALENQIRGILKTFGRIVPKGAGGLFEKNVRVLITEDAAIAAVIMPLLQARQVARGNCAALDRRLIRLVQGDATCRMLMTMPGIGPITAVAYAAALEKADNFKQSRAVGAWLGLTPRRFQSGEVDYDGHISRRGDRQLRALLYEAAAVLLTRVRRESALRRWGLMLWKRLGFKRAATALARKMAVVLHAMWKSGTSFNPTLGPVKA

SEQ ID NO: 441033 - protein, 282 aa, unidentified
MNIKRIGIDLAKSVFQVHGVDSQEKIVLRKQLRRAQLLDYFKKLPPCLIGMEACGGAHYWARELQKLGHTVKLMAPQFVKPYVKTNKNDANDAEAICEAVARPTMRFVAIKTIAQQDIQAVHRIRSELVQQRTAKVNQIRGLLAEYGIVVGRRVDVLQNALPLILEDADNGLATDFRALLEGLQQDLATLNGRVDDLDKTIKTQASNNADAKRLQQIPGIGPITATALVCAIGDGKQFKRGRDMAAWLGLTPRQHSSGGKDRLLGISKRGDAYLRTLLIHGA

SEQ ID NO: 441034 - protein, 391 aa, unidentified
MKGVSMVIIGVDPHKRLHVASVVEPATNGQVAVLQVEASLAGYRRLLKWGGGFGERRWAVENARGLGRHLAQWLLARGEVVVDVPSTATARVRELSRGGRRKNDVIDAAAAASVAALQGEANPVLAEDLSTVLALLDERRNNLSTQRTRLVNQLHAMFRDLVPGGAPTDLTATIASGLLTRVRPAGPVEAARKQLARDLVAEIRDADQRLKALTVQIADTVAATGSRLTEVDGVGPVVAARLLARTRRASRFPTAAAFASYAGVAPVEVSSAERVRHRLPRGGDRQLNFALHIVALTQVRMRSSSGRAYYDTKIAAGKTHNEAMRCLKRRLADHLWRLMIRDEGSQAAGPGGHQGATLQSSAAGSTPTASSSEKSLPEPATPDSTTGRSAA

SEQ ID NO: 441035 - protein, 427 aa, unidentified
MRVLYDRVAAIDVHKDMVKVAIRVPGAKRGTRKTDVLEFRTFYGVLQELARELRRRGVTHVVMEASGVYTDPVYYALTELDFEEVMVINPAHAKALKGHKTDAKDAVRLLDLYECGALLRGSYIPAPDLREVRDLARYRMKTVQARTSEIQRLQKTLESAGIKLSSVVSEVTGVAATAMIEGLISGERRGAVLAENAHIRMRNAGKMADLSMALAGRFTDHHALMCRLHLDRIKIFDQAVTGLDGHIAPKVAAYPREAALLDSLPGFGDVVVAGWLGAIGPAPHQHFATAERLASWATLCPGNYKSAAKSKGGRTGDGGACIKPLLIQAAWAAIRVPGRLQARFRRLVRKFGGPRNKGAQKRAITAIAHTLLKIAYSVLKTGKPYQDLGDDFYSRREDPAARQDYLMRQLQKLNPGCVITITPTEAA

SEQ ID NO: 441036 - protein, 399 aa, unidentified
MRRVCGLDVHKDTIFCATFDGKTKTPVTEYTTLTASIQRMGEMLKDAGVKTIAMESTGMYWISVWNILEEMGFDLLLVNPYLIKQMPGRKSDVKDAQWIAMLCHKGLLRSSMVPGKQIRELRTYSRRYIKLQQRQTSVLQEMERTLEMCSIRITSFVSNISSKSVQSVISQIINGEKDPEVLIGSIHSRIINKHTKQHIKESLTGFITEHHRFILEISKQEYELLLSQSNLCLQKMAQLCKTHYNDEMKLLMTIPGISEISSMIVLAETGADMKVFENSGKFSGWTGLRPRNDESAGKYKSTATTKGNKYLRTILVQIAWAASRTKGSYFKEKFNRLAMRKSRKKALIAIARKIGVIIWNVLNYSQEYNPQKLIVYDPAKIQAAIAYHQKEWDRLKRLM

SEQ ID NO: 441037 - protein, 394 aa, unidentified
MRFAGIDIASETHVLAIVNTDGAVEVKATPFTEDAAGYAKALALLGAPGELLIAMEATGHYWKNLFAVLAAAGHAIALINPLRTHRFAGEDLARTKTDAPDALGIARFAAQKRPPALHLPDAVADELRELVRLRERLLQDFGDRVRQLHRLVDLGFPEFTRHVRTLDSELACSILRDYPTAAAFRGASVRRLAALRYDGCHLVGLELARTLIDAARRSVGQHHSPPYRIQVRYACDDLDVLRRRLRDLDRDIEGKLREHEVGRLLTTIDGIGPNTAARIIAAVGDPAAFHSAAALAAYVGTIPRLRHSGKRQPVRAPLTSIGNAALRAALWMPTLTAVRSNPWLRAHYQRLRARGKLPKVALVACMHKLLFAVYSVAKHRRAFVPQLAASGTAQ

SEQ ID NO: 441038 - protein, 411 aa, unidentified
MDRIYDNCCGIDVHKKLIVACFRCGKKQDVREFGATTRELLSLADWLKEGGCEMVAMESTASYWKPLYNILESSDLNAMVVNARHMKAVPGRKTDVKDAEWIADLLQHGLLQPSYIPDKDQRELRELVRYRKSLVGERTRELNRLQKMLEGANIKLSGTVSDINGKSARSILEYLLTGEPIDEAKYDEMYNQKVIAHNLKATREQIIDDLNGVMSSLQRRMMKELLIHLDELNIHIRNLDDEIDNFMKPEEKQASQAIQDVTGIGNTSAQAIISVIGTDMERFPTDKHISSWAGLCPGDNESAKKRKSGKTRKGNSLLRTTLITCAHAAVKNKKSYFHAQFMRISAHRGTRRAYVAVAHSMLIAIYHILKDGVVFKDLGADYYNQFNKERKINAYLKKLKALGWEAPVVAA

SEQ ID NO: 441039 - protein, 350 aa, unidentified
MHKPSAEGFLCCGIDVSAGQLVVALEVENGRSLQRSFPNRVTGHQALIRWLQKDGTRVRVCLEATGLYSLDLALALHAAAGIEVAVLNPKKVNRFAATLCRSKTDPADAQVLAEYARRMPFQRWHPPQAAALELRAITRHLAALTQQHTQQSNRLHAVSASRTGARCVQQDLKRSLRALERRVERMRRAAFAVIEQDAELRPRFALLLSMPGIGEVSALSLLGELALLAPSLTVRQWVAHSGLDPAHHDSGASVHKRSRISRAGNRYLRRALYMPALVAVRHDPHLRAFYQALVARHKAKLQALIAVARKMLHAIFGMFRGRTGYDGSRLFPAIELAVAAQIERGSPAPL

SEQ ID NO: 441040 - protein, 337 aa, unidentified
MQLYCGIDLHSNNSVISLIDKEDKVIKENRLANDFDLIEKYLAPFQDNIEGIVVESTYSWYWLVDGLVDKGYQVHLANTLAIQQYNGIKHTNDETDARFLAHLLRLDILPTGFIYPKAMRYVRDVLRRRLLMVKQSVAQLLSLQSLISRHTGKQLTSQKVKQLTVEDLSNYFHDMSALFSARQSLQLWQQLQQQISDIEIFVLSKCTKEDFSIITSTPGIGKILGMTILMETGPIERFPQVGNYSSYARCVPSSKISNGKVKGHGNTKNGNRYLSMAFVEAAHYATIWNPTIKKYYQKKCSKTPVMVAKKAVANKLTRACYHMLKENKPFDIKRAFG

SEQ ID NO: 441041 - protein, 457 aa, unidentified
MKTTRLKKAKVNKSNDKMITMPTINPHAAGIDLGSKSHFVCVAQDNVKEFGVFTSDLHAIAAHLKSYGVKTVAIESTGFYWRSIYLILLDYGFEVFLVNAAHLKNVKGHKTDVVDSRWLQLLHSIGLLSNSFQPDALTHELRTYTRHRKNMITDASHLISKMNKVLVLMNIQLHGVLRNITGVSGLKVIRAILQGERDPKVLSSLVSLRAKASREDIEKALTGDIRKEYLFELDQCFQLYNFYWQKIEEADKQIEAWLKDHVSNMPPNDGYKKPKNKNKGTNDPTFNVGKYVHRISGGVELLDINGVGSNTILTLVSETGLDMSKFPTAKHFASWLGFVPNRKITGGRKISSHTRKKTNPLAKVIRDAANSTGNSKSKLGDFFRHLAYRKGRTAAIGATARKISVIIYKMLTEGKPYSYEYAQEQTEYMKVSKLKNILKTMDKFNISREDLQLAWSM

SEQ ID NO: 441042 - protein, 364 aa, unidentified
MTAAQAGRQAASSTVEVVGGVDTHKDTHTAAAVDTAGRVLGSAQFPTDAAGYRALLRWLRGFGTLLLVGVEGTGVYGAGLARMLAAQGVAMVEVDRPDRKARRWQGKSDPVDAEAAARAALARVRTGVPKQRDGRVEALRALRVARRSAVGQRADVQRQIKALIVTAPESLRAQLRKLPDRELIEVCADLRPDRADADDPGTATKIALRSLARRHRRLSVEVADLDELLGPLVAQINPGLLALKGVGAEVAGQLLVTAGENADRLTNEAAFAMLCGAAPLPASSGKTTRHRLNRGGDRAANCALWRIVITRMGTDQRTKKYVARRTTEGLAKPEIIRCLKRYVAREVFLALQSASTEKRPANAA

SEQ ID NO: 441043 - protein, 306 aa, unidentified
MRYIGIDVAKETLAIYISDGESFSASNTRRGFQKIRKKLQKADVLGVESTSTYHHACALFFLQKGFVVKELNPIVTKQFIRATVRKKKTDKSDAQIISRLLSQGEGHEMTEGNIHNPVKKLFRVKKRLIQMRSSLKNQLTSLQTSPMNTKTMERTYARLIKSMTKEIEKIEQEMLKEESRDIEILESIPGLSALSARGVLAEIGDIFRFSDKRKLIAFAGYDPKLTESGTSVHHSGKLTKRGSPSLRNALYRAAFANIQLNTVFSQYYKKKMSEGKHFTQAMTAVSRKILEVIYTLLQKQEMFKSL

SEQ ID NO: 441044 - protein, 393 aa, unidentified
MENQSELLSQNVGVDVSKDTLDVVFSTIDREQHVKVKASRSFANTPYGFGQFGKWVDSKRDKAVELRILMEATGIYYEQFAWFVYEKKYAVSVILPTKAKRYLQAMGNKSKNDSIDAKGLARMGLEQRLPLWQPLSGNIYRLRLLTRQLEDFNNQRTACLNQLHALSHSAYAVKEVEKSLNRVVQGLEKGISQLEKAIGRLIEGDEALNAKVGKILPIKGVGLKTIAVLLAETNGFATFENQGQLVSYSGYDIVENQSGKRSGKTRMSKKGNAHIRRAMHLPAFGVVRYREPAFYGLYQRLIARGKTKMQAYVAVQRKLLILIWALWRKDERYDPRYGQKANDTPSNEEPKPLFSLGSEGDTKKVAPALARATQDELPRNESPEALFSLSQSY

SEQ ID NO: 441045 - protein, 440 aa, unidentified
MQKVTVFETVYEQAAAIDIGAEKIFVSVDGKEVVSFNTFTSDYYKCVEYLQQKEIKHVAMEATGVYWIALYGMLESCGLKVCLVNPKETKQVKGRKTDVKDCQWMQKLFSSGILRRSFIPEAKYMEVRQLVRERMVIIEMSSAFVNKMQKCLELMNIKLKEVISQIHGASGMKMIKAILSGNRDKNYLLSLCDKRIVIKKGESVLKALEGNYNDTYLFMLEQNMLMWEKHQQQVDLIDKHIKQLLEQLCKEKKTVDIKSKPKLIRHHAPKIEGLHEMLIRLYGINLNSISGINDYTLLRLLGETGIDMNRFATVKNFVSWCGLSPKHHQSGKMNKRVKGSRCNKTGQIFKEIAQALINSKYIAIGSFIRKLRARKDSAIAIKAGARKLATAYYNALTKGTDYVEQGTRKYEEQIKQREKAALYRLAKKHNLELIEKQTAT

SEQ ID NO: 441046 - protein, 372 aa, unidentified
MAHGTTNAAMVTIGLDLGDRQTAGCVVDAGGQILERFQARTTPTRLLAAVTRWPGARVVLEVGGQSPWVSRRLQAAGYGVVVANARRVRLIAEGDAKSDRLDAELLARLGRVDPALLAPIQHRSERTQRDLGVVKTRAALVRMRTLGINHGRGVAKALGHRLPACAAEAFPARVRAQAVGATLPGITELLAVLEQLTASIRALDRQLATLATTRYPVTELLRQVPGVGPLTALTYVLTLEDPTRFPRSRTVGAYLGLRPKRRDSGAQQPELSITKAGDVLLRRHLVTAAQYILGPFGPDTDLRRWGLALAGRGGKAAKSGRGGGAEAGRAAASAVVDGRGVRTGGLSRAGGIAGPTRPAADDGRRAGETVFG

SEQ ID NO: 441047 - protein, 369 aa, unidentified
MGEYSEAFVAFDVAKKKHAVAIAEGGRTGEVRFVGEVENSPAAIERTIKKLGKKYDRLHVCFAAGPTGYGLCRQVRDLGHDCMVVAPALIPKRPGERVKTNRRDAVTLARLHRAGELSGVWVPDVVHEAVRDLVRAREAAADDLRRKRQQLLSFLLRHGRIYETGGHWTLAHRRWLAHQSFEHTAQQIVFQEKIDAIEDAVQRLDRLDEQLRALVPTWSMARVVEAYQAMRGASFLVAVIFAAEIGDVRRFDTPPQLMAFLGLVPGERSTGDTVRRSSLTLAGNRRARRALVEAAWTYRYPARVSETLRARLEGLPKAVRDIAWKGQVRLCARYRRLSAAGKKPPVVVAAIAREMAAFLWAIGREVAPS

SEQ ID NO: 441048 - protein, 460 aa, unidentified
MTPRKDNFPEPHRRSRRARLEVKNPDAAGIDVGATAHWVCVPADRQANPVACFGTCTADLEALAAWLQQCGVTTVAMESTGVYWVPLYELLEARGLEVLLVDARQVARAPGRPKTDAQDCQWIQRLHSYGLLSAAFRPEEQVVVLRAYLRQRDMLVTGASQHIQHMQKALEQMNVKLTEVVSDITGVTGMAILKAILRGVRDPAALAELRDPRCKESTATIARALQGSWRPEHLFALEQAVALYEFYHQQITACDRAIEAHLRTFADRSGGQALPERPHRRRRREANEPRFDARARLYCLCGVDLTAIEGIEETTALVLLSEIGTDMSRWPSVKHFCSWLGLCPQHKISGGKILSRRIRRGANRVKRALRLGARSLHHSQSALGAFFRRIKARHGTAAAITAAAHKLARLVYSLLKHGAAYVAQGLAEYEAKYRERRVHAVTRQARELGFQLVPAAAAGD

SEQ ID NO: 441049 - protein, 430 aa, unidentified
MKSNTQNAKIKAITETTLVLGIDVGSETHYARAFDYRGIEYSKKPFKFSNDEAGFVTFKAWILDIKEKHGKDKVVPGMEPTGHYWFNLGKFLQDNEMKAVLVNPHHVKKSKELDDNNPTKNDRKDPKVIAGLVREGRYMIPYLPEGVYADLRTASNMRFQLQAELTRIQNRISRWFNIYFPEYKTVYGQPDAKSGMLILKVAPLPEDIMTLGIDGVNQIWRDAKVRAVGKARAKTLIEAAEHSVGSKEGEISARMEIRMLLEDYESRNTRLQEVVALIEELVKKIPMAEKLLEIKGVGIKTVSGFLAEVGDISRFNNPKELQKLAGLALVENSSGKHKGETTISRRGRKRLRYLLFEVAMSLVSKNPEFRELHSYYTTRKLNPLKKMQSLMAVAAKLLRVFFAMLTKGVDYDPKKLVGDIKRPAVYLQVA

SEQ ID NO: 441050 - protein, 419 aa, unidentified
MVQEDDNSLVSVVHPICCGLDVHKETLAACLLITGADGRIQSEIKEFATFTDDLLRLREWLGVNDCPVVAMESTGVYWRPVHNVLEGQVTVILVNARHIKNVPGRKTDVADSQWLAGLLRLGLLKGSFLPPQEVRQWRELARLRKHYQESIADFKRQVHKLLESSNIKLAAVLSDIFGARGRLILERLAHQDGIPDLSDLERGAGRPLRHKTQELRRAVGGFFTAHHRFQLCLLLRSIRQLEGQLGEVLARLEEQLTSHQELRQRLQVVPGISQVASAGILAEVGPSLADFRSSDALSSWCGLCPGNNQSAGKRKSGRSPVRSHPLKTLMVQVAWAAVKKKGSYYKDKFHRLRYRLGPKKAIVAIAHRLLKAVYHIIKDGAAFRDLGEDYLQRRHHPGRLNHLKKQAQLLGYQLIPATA

SEQ ID NO: 441051 - protein, 411 aa, unidentified
MNPVVGLDVAKGESQVQAFLDKKKPYKRSFKVAHTIEGLESLHQYLREIENLAGIRPPVVLESTRHYHTPVVQYFEERGYLLIIINPLVSYRAKSSSLRKVKTDVIDAYHLCELYYKEDLEPNKKRGIQLLNLRNLTRQHENVTGIYVQTKLQFQAVLDQVFPEYHGVFGDLYSVVSLLTLLEFPTSKDVLVVDEEALGNKIDELCTSRSRKWANTKAKKLIAAAAINPFQTTLYQSHIMSLEMYIKMLMEYQKHLSKLDEEIGALAKEIEEYKIIQSIPGIGEKIAATIISEIGEIDRFNHPKKLVAFAGIDPSIFESGRFKGSVNKITKRGSSRLRHALYMAVRCAIRDCRKKKTTDEVIPRNKRLREFYDKKRKEGKPYKVAVIACANKLLQWIYALLQNNSTFQDLD

SEQ ID NO: 441052 - protein, 401 aa, unidentified
MPDGIRWVGLDVHAHESTIAIFDQATGEVTTKRVVGRPHELLPYLRAVPRPARMVYEAGPTGYGLARRARADGIEIVVCAPGRTDRAPGDRLKTDKRDAIRLARALAAGQLAIVTVPSIEREQLRDLVRCREDIRSDLMRARHRLGKFLLRREIYYEGPGEPWSRKHRAWLTSLRFADRASQLTIADYLHSHDVLIARRDRVEDELATLAAESRCKDTVARLRCLRGIDTLSALGLCAEIGDWERFDHPDQLAAYVGIVPSEHTSGERRRQGAITKAGSSHARRLLIEASYHYRRQPGVGLKLERRQRDQPPEIINIAWSAQRRLNARWRQLKDARHKPNGIVAVAIARELACYCWQIATCPTHPDRVPPASMPTGDPLTQAASVPQKQTPPTTRRISASL

SEQ ID NO: 441053 - protein, 429 aa, unidentified
MNSTQNKKIEQVKETTMIVGIDVGSEKHYFRAFNWRGIELTRKPVAFSNSMEGFNSFYNTIVELMQKSELEEALVGIEPTGHYWFDLGQFMGEKSIKFVMVNPHHVHKTKELDDNSPSKNDRKDPRVIAGLVRDGRYFYSYMPTGVYAELRNASNRRFVLVEEQTRTKNRLQKWIAVYFPEYKGIYTHIDAKGGLLVLKQAPTPEEIVKLGEEGIIKIWKDAKLRRNGNKKALKILNAAMRSIGLRTGLTEARMEIQDLIEDYELQTKRLERVNDLIKELCQQIRYADKLLEIKGIGITTVAGFIAEVGDITRFDSTKELQKLAGLELVADSSGKHNGKTKISKRGRKRLRYLLFEAAISVVGKNEEFKEIHRYYTTREKNPLKKMQSLIAVACKLIRVFHVILTKGVSYDASKMLEGIRHPGEQLKAA

SEQ ID NO: 441054 - protein, 431 aa, unidentified
MLKINPLSTLYVGIDVSSKSNYVCALDFYKNKYINSSFANNQPGAEELALKILECLKEHPDITTIVAALESTSVYSIHIANYLSSCEELMRFKPYVFVLNPKCTANYKKSYIGLGKSDPIDAFVIADYARAGNIESEPWRGSQFLALKRLTRHRLHLVECMTREKTYLVSNLYLKFSELQMLEGDDQPFCDIYGATSSSVLMEYFSPEEILDSSEEDLIAFLAKKSRNRIKDISKTADLLKKAARDSYRLDKALYEPLNVSIASSFNCIETFKREIKVIDNAIEKEIKGLNPNAFIILQSIDGIGPVFAGGIIAEIGDITAFHSSDALAKYAGLTWKSNQSGDFDGEDTPMIKAGNRYLRYYLGEAANSMRKHNVEYGAYYRKKYNEVPKHQHKRALALTSRKFVRLVYGLLARNQLYSGVSLDTSIKDSN

SEQ ID NO: 441055 - protein, 310 aa, unidentified
MGGINAAIDVGKHQLDVALGSNGELFSEPNQLRAIARLAKRLAQLGCERVLIEGGSYQNILVGALRAAELPVVVINPRRVREFAKSIGQLAKTDHIDARVLAEYGERIQPPVRELPDEQTQALRGLWVRREQLIEMLVMEENRLEHAPKALHRSLHAHITYLRKQIKQADHDLDRAVRNSALWDKYELLSSVPGVGPILSVALLADLPELGRLNRREIAALAGVAPFNCDSGTLRGQRKIQGGRKRLRRVLFSATIASVRCNPVLRAFYLRLRATGKPAKVALVAAMHKLLLILNAMVKTQIVWSAPCPA

SEQ ID NO: 441056 - protein, 423 aa, unidentified
MENTAARKRKQVPEGYLVIGIDPHKKRHAAVAITQDFTTRDKFKFDNTREGLETMLRRARTEMVKSDCRGVMFAIETGGRYWRNIAYFLDERGIPFRFINQFTLKRRREGKDLNHRKNDYRDSEVAAQLLCTGEFVDSVIPQGVYAELRTGHNAYQRLVKERTRITNLLKGLLDGLFPEFARVFKDPCGLTALSVLSTCAIPSVIAGTTEEEFVATIEAKHQGRLMRKKLRALHCSARTSIGIDAGARSVSSEISFLVEKLELIRRHIRIIERKLVGLVDETEEGKYLLSIRGLNYTAVAGLLAELGCFKAYRSAKQMIKMAGSNPTESESAGKRSSHTPMSKKGRPVLRYCAWTAVIPMLRFNPDFRAWAKQRRERPAHANPLSGREVVGAALNRLLRLAFALVRDQTYYQVSKPELTLVAV

SEQ ID NO: 441057 - protein, 321 aa, unidentified
MTETQKPSSRPFIGIDVAKYRFDGASSSGLIIGLHVRELPRLVDWVESQNPQLVTLESSGGYERDLVAALVEKDIPVAVVNPRQVRDFAKASGRLAKTDVVDAKVLAAFGEAIRPVVRDPKSPELMELRDLIARRRQLVEMRKVEKTRLEGARTPALVKAITRHIDWLSGEIKSADKDLDGAIKANSSFQEDDEILQSIPGVGPILSRTLIGDLSELAFMNQRQAAALVGVAPFNCDSGMMRGKRAIWGGRGEVRSALYMATITAIKKNLIVKTIYDRQRAQSKPFKVALVAAMHQLLKLAQALLKSRQKWNPHLANLTVA

SEQ ID NO: 441058 - protein, 373 aa, unidentified
MDQDTKFVGLDVHSASISVAVADPGRGEVRALGTVPNTSDAVVKLIKRLGPASRLSFCYEAGPCGYGLHRRLTRLGAACMVAAPSLIPRKPGERIKTDRRDALNLARLLRRGDLTPVWVPDEAHEALRDLSRARSDARIDLLRHRNQMSKFLLRQSIFPMTRLRPWGKMHRAWLQTLRLPHASHQVVLGDYLETVDHAENRLANLEAELALLAAQSPLAPLIAVLQAFRGIALTTAIILVTELGDLRRFPSPRALMGYTGLVSTEDSSGDRHHRGRITKTGNAYVRHVLVEAAWQYTRPPKVWGALQKRQLGLPPAVLAISWKAQQRLHRRFRRLTHHGKLRHVAVVAIARELAGFIWAAAQAVPMPAQEVVA

SEQ ID NO: 441059 - protein, 337 aa, unidentified
MYYIGLDIHKKTISFCVKDATGCVHREGKIGSSRRELDAWVRTLPQPRMMAMEATIFTGWIYDYLLPHAEKLKVAHPLMLRAIAAAKKKNDKIDAAKIADCLRCDFLPECHIAPTEIRDRRRVLRYRNLVVKQMAQMKNRVSGLLMETGVSYNKQRLHKVGYFGEMMSTNVDISDAVRPLLNLSRGMIRRSSKLEYDLVSSLERDPLLRERLRRLRTVPGVGSITALTWALEIGDYTRFSSNRQAISYCGLCADEKSSADKVMRMPLSKQRNKHIQRVLVEAAKLAPRLSPELAMIRARELERGNPNRATLAVARKMVCYMLAVERRQQDFVQTAAA

SEQ ID NO: 441060 - protein, 337 aa, unidentified
MNTTRNDVLGIDVSKKKLDLALMINGKLKAKVFDNTSAGHRALVAWLRDSKASLPTLHICMEATGVYYEAIATTLHAEGFKVSVVNPACIKGFGLGENIRNKNDEIDAGLIARYCAAMSPDPWTPPPLEQRQLRAWTLRVQSLKDIRQQEENRIEAHIVAGLRDVADNVGEHIKWLDAEIRKLQDEIDDHIDRHPGLKNDAALIASIPGLGATTVARVLGHLGDIRRFKNAKAFAAFLGLTPKQRTSGTSLKGRTMVSKTGNTSLRAALFMPSMVARRHNPILRQFAERLLANGMAKRAVISAVTHKLAHLIYGVIRTGKPFDANYLHKNLAIQDGI

SEQ ID NO: 441061 - protein, 351 aa, unidentified
MVVVGVDVHKRTHTFVAVDAVGKQVGQRTVEATTKGHLRALAWARKEFGVEVTWAIEDCRHLSARLERDLLSAGQKVVRVPPKMMAEQRRVARTRGKSDPIDALAVARAFLREPSLPVASHDEVSREAKLLVDRRETLVNTRTRTINSLLWRVHELDPQRAPKPRSLDLVKHQNALKAWLETLTGVVAEMALDELEDIIALTARIKEFDKRLSVLTRREVPALLALVGCGELTAAKLLGESAGITRFHSEAAFARHAGIAPIPVWSGNTAGRVRMTRSGNRQLNCAIHRIAVTQARIPGTLGHAYYEKKLAEGKSKAEALRCLKRRLVRVVFRLLTTDHNNRQTPAAPAAA

SEQ ID NO: 441062 - protein, 403 aa, unidentified
MKKGSMFVGMDVHQKSIDITVAEAGHDGKVWHFGCIGGDLKALDKAVDKLLEAGGPLHVVYEAGPSGYVIYRHLQGRGLQCTVVAPAQVPKKASDRIKTDRRDSQKLAVQHRAGALRAIYVPEPADEAMRDLVRAREDAVEARRRARQHLNSFLLRHGRRYGGKTKWSTAHRGWLAEQRFEHSAQRVTLEEYLGTIAEAEQRVERVSQQIRTLLPTWRWHPYVEALQALRGVSWIVATTVVAEVGDLRRFRPRELMGFLGMVPSEYSSGDTKRRGTITKSGNAHVRRVLCEAAWAYAQRPAISRELLQRQQALPQEIRALAWKAQLRLCARFAHLSAARKHRNKINTAIARELTGFMWAIAGAVGQPATATASVRGRATAKSGAHAQYVLRRQPRPARKRAAA

SEQ ID NO: 441063 - protein, 374 aa, unidentified
MEGSTAYVGMDVHKDSITVAWTGSQGEPVEVGQIANEPSAVRRMVQRLAGRHRRLEFAYEAGPCGYDLYRQLVSMGHSCVVAAPSLMPRRPGDRIKTDRRDAQTLARLLRSGDLTAVWVPDPHHEAIRELVRCREDFKQAERRCRQQLLALLLRHGRSYDKDNWTGEHRRWLLGRGFDCLETQRVLDHYLHSIQETEERILHLERQMEEALGGWSLAPLVRGWMAMRGVKRVTAMTHAAELGDITRFPRAPDLMAFIGLVPSERSSGQTRRQGGITKSGNRHVRRVLIESAWSCRHKPRVSDPLRARGRDASEAVRAIAWKAKKRLYARYHRLISRGKSAQVAITAVAREQLGFIWAIGQKVMEEQRSLASSSV

SEQ ID NO: 441064 - protein, 414 aa, unidentified
MLKIVYRVCCGMDVHKSFVVACIASTNEYGVTTYKSKRFSTFTGDLRRCAVWLAENNCKDVCMESTGKYWIPIYNILESTCNIVLAHPKYVKAIRGKKTDKRDAKWIADIFKHDLVAGSFIPPADIRQLRDLFRYRWKLTSFTTGEKNRAQNCLTISNFKLDDVFSDVFGKAASAITARILENPTEKITDVSGFRTKGMKATNEQVLAAVDGEMCEEQAEKLRIIRSHMDSLELCKLNLESLILATAEKYLPQLDLVMTVPGIQSFAAIGIISEIGVDMSVFPTSKHLCSWAGLTPQNNESAGKKKTTRISRAGAYIKPLLVQCALNAIRAKKFPEVRNRYLALKKRRGHKKAIIAIARMLLSAIYNILKKNEPYNPELYRQTDRPPAHRQVSVEEAIFILQRQGYLVAAPSTS

SEQ ID NO: 441065 - protein, 428 aa, unidentified
MADTTNATPALNLVAIDIARYWNYVLLETAAGKLHRFKMGNTAADFDRLIGFLQSLSGPCRVGIEPTGDYHRPIAYRLLMAGFEVVGINSVAVARYRDAMFNSWDKNDPKDAAVILEMLRRQAYQRYVDPMVAGTHDLQEIAKTYYQVSRARTKTQNSLINHGLPLYFPEMHRYWATTRNEWFIRFLMEFPTPAHVRALSQEAFVLAAWDLVGRKVNKQAKLEEIWEIAGSSAALPHAPDSLAVEMFRVTLKRYQELNQLRASIEERAEQVLAGNEAFEHLKTLPGVGPVIALTVLAEAGDVKRFAHHRQFLKYCGFDLAKQQSGNLRGREQLSKRGNARLRLAFWLAGAGAVRMLENSFRDKYERYIKADPKNADLRRKALTAVAAKMARVAYSIVKTNQPYRQFFEQALPSGSIPHSAAVGAHATP

SEQ ID NO: 441066 - protein, 331 aa, unidentified
MNKQNFNYFIGIDISKKFFDVAIIENDRTTSYVFENTKKGTNAFIRLLKNQKIPLDNTLICMEHTGVYGKLIITKLVEKQANFCVEMPIQITKSIGLQRGKNDKVDAKRIAFYASKNYPELELYKPIAEVLEKMKILLKIRKKLVNTRADINKYPNELERFSPEIGKLARKNLKRINKNLEDEIKRIEAEIKKLILSDDKLNKTVGLVTSVTGIGQITALHLTVFTNFFTRYDNPKQLACYSGVVPFEYTSGSSIHRKSRIHPMANRTLKKHLHMSALAAINHDPDIRAYFLRKVEEGKNKMLIVNNVRNKLVHRVCAVIKRQQPYVKNIA

SEQ ID NO: 441067 - protein, 380 aa, unidentified
MTTTEMLQNHDTKTPVLLVAIDMGLKRWHLAMMALRGAKRRHQTVDGGDYLALSEAVLKAKQKWGLAEEAPVIVCYEAGRDGFYPYRRLTEMGYRVYVIDAASIEVSRRKRRAKADRIDAAKLVELLHRYESGEKKALRVVNVPSEKTEDLRQLPREREELLAERQQVWNRLSSLLFLQGYREIPGSAHDLKKWLAERQGVGAYLRLRLEREVARLELLESQLKEVERKEGVWLQEHGDEALVGKVAQLAHLGGFGVISAWVLVTEVFGWRGFRNRREVGGALGLTPTPYSSGEEEREQGISKAGNWRARKMLIELTWCWLRYQPDSALTHWYAERFGRGSKRQKRVGIVALARRLAVAIWRYLEYGVVPEGARLKGTTG

SEQ ID NO: 441068 - protein, 359 aa, unidentified
MNSIAPEAHQRKIIIGIDTHKYAHVAVAIDHLGVRVGERHVPANREGYARLEAWAASLGRVSAFGIEGTGSYGVGVASSLRRNGHRIVEVNRGDRRSRRSNGKTDTLDAEAAARAVLSGEAAAVPKSADGAVEMIRQLKIARDTARKGRTSAIVTLKALIVTCPDELRETFEGSTDKSLIDRCANLRPGAVTSPTAAAKHALRALARRYQALGAEIAAHDAVLDELTKNHAPTLREGFGIGVDTAAEVLIVFGDNPDRVRSEAAFAKLCGVCPIPASSGMSNRFRLSRAGHREANAALYRAVIVRMRFHQPTIDYVARRTTEGLAKRDIIRCLKRYIAREIYQRVMTDHRLRHTALTPA

SEQ ID NO: 441069 - protein, 370 aa, unidentified
MNKRITVHVGLDVHKESIEMALAEGTAGGEVRHFGRIGGDLASLDRAVRQLGGAGRSLIFTYEAGPCGYAIYRHLLAQGHACQVVAPSMTPRRPGERIKTDRRDCIKLARLARAGELTKVCVPDAQDEAVRDVVRARSDAVRNQRDARHRLKALLLRHEIRYAGKTAWTPAHERWLATLKMPHAAQQIVFQEYVDSVRESTQRIARLTQSLHDAVVVWRWQPVVQALQALRGVQLVNAATLVAEIGDIERFTHPRQLMAYLGLVPGEHSSGSHRRQGSITKTGNAHARCALIEAAWQYRLPARITPIIAKRQEGLSEPIRALAWKAQQRLCHRYRRLAARQLHKNKIVTALARELTGFVWAIVREARAAP

SEQ ID NO: 441070 - protein, 356 aa, unidentified
MQTQVTKKIDFKGKELFIGLDVHKKSWSVTILVEGMEHKTFTQPPDPKTLANYLQNMFPGGSYYSAYEAGFCGYRIHRELNDLGIKNIVINAADIPSSQKDQLQKRDPVDSRKIARALEKGMLRAIHIFDRDEEELRSLNRTRFYLMRDLRRSKNRIKSFLQYYGISIPLEYDNNQWTLKFLSWLKQIEMQTLSGQDAFSNLISSYEHHRAQLLSLSRQIRLRIREYDNELYTLLKTISGIGPLTSSALITELGDINRFPHIDHLSSFVGLIPRIRESGETSHTGGITFRCSSYLRTMLIESSWQAIRKDPALMQYYHEHVIHTKGQKVIIKVARKLLNRIRYVMKNRQPYVKGVA

SEQ ID NO: 441071 - protein, 363 aa, unidentified
MFTERTSVGLDVHARSVAAAAIDSITGEVVQAKLTPDYGDVRGWLERLAGPVAVAYEAGPTGFGLYRYLRAAGVRCEVVAPSKLQRPAGDRVKTDAKDAVHLARLLRLDEITSVAIPTVEQEAARDLVRAREDCRGDLMRARHRLSKLLLRHGIVYYGGAAWTGAHDRWLRTVAAPQLRSSATRMAFDADYDHVLTMQARRGLLDSAIEDIAADSEFTPIVRRVSCLRGISTLTGFALAVEIGDWNRFTGNTIGSFVGLVPSEYSSGASRVQGAITKTGNTHVRRLLVEAAWHHRPRYHVGAVMRSRWDRASAPARARGDEGNRRLHGRWVGFLERRKRPVVANVAIARELAGWCWSLAVMQD

SEQ ID NO: 441072 - protein, 399 aa, unidentified
MPRYSTAFGMDVHLRSTTVCALDAETGEAVTRRFRGNPWGEVAEWMSGFPGPSLAAYESGYLGFAPQRELSGLGVDCVVAAVSKVPRSAADLSSKNDRNDAARMAKAILSHDVIPVWVPSPEIEGLRDLAGAHDAATARLAAAKQRLLAFLARRGYAYGGTTPAGNPRRYWTYDFLRWLDKVRPADDGGIRALAALRNEVEAAAETRDDLLAEYRAAVAAGPLSAEVEALQSIKGCGFALAAAFASEVGDFSRFRSGRQVTAYFGLAPKQRSSADSVRLGGISGAGNALVRRLAVEGSWSYVQASHQPKLMPKGSGVPLEVRMHGRKGSERLLRRREEMLARGMPQAKANAATAAELVRWLWALVSVNIIFTISTNAFSPIAPTRIHRIRQRGCAAFGA

SEQ ID NO: 441073 - protein, 335 aa, unidentified
MDIAKSVFQVHGVDAAGQVVIRRQLNRRFVLSFFEKLPPCLVGIEACASSHYWSRELQALGHTVRLMPPAYVNPYVKRQKNDSTDAEAICEAVTRPNMRFVPTKTIEQQSCLMLHRVRHLFIRQQTAVINSIRAYLAEFGIVAPVGRRGVEQLLEVVADPADRRVPEVARACLAALGGQLRALKAQILEFDRRIIAWHRSNATSKRLDAIPGVGPALATALVASVADAKTFRSGRDFSAWVGLVPKQNSSGGKDKLGRISKQGDRYLRSLFTAGALAVIRYAKIHGTSHRPWLTALLARRPTKVAAIALANKLARMAWAMMARNEPNKEPAGLTA

SEQ ID NO: 441074 - protein, 401 aa, unidentified
MNAVGIDVSKGKSVVCVMRPFGEVVLEPFEVLHTAQNLRDLAGKLKALDGETRVVLEATGNHHKPVAFVLHDAGLFVSVVNPVLIHDYDNNSLRRVKTDRKDAVKIANYTLDRWTRLRQYLPGDDTRLALKNCYRQYQQAVAIRTMLKNNLISSLDLTFPDANKLFNSPAKSNGCEKWVDFIGDFWHSECVSSLSADAFAKKYLKWCQKHGYNFTRSKSDEIYACAVNSVSLPKSPTSKLLIQQQVAQLKAISQSVAAFQQEMLRLSQQLPEFDTVMEMYGVGLSLSPQLMAEIGDVRRFSSKISVIAFAGIEPLPNDSGKVVGNDKGISKVGSAVLRRTLFLIMSVILQTQPQDEPVFQFMNKKRSEGKPYKVYMMASANKFLRIYYARVKAVMDSERSQ

SEQ ID NO: 441075 - protein, 369 aa, unidentified
MDGPLRHRCARMRLLRSQTREPSVNQIIRIGMDTSKHFFQLHGVDAAERPVLRRKLRRKEMMAFFVRLPPTVVGMEACGASHYWARELGQLGHEVRLIAPQHVKPYIKRNKNDGRDAEGLCEAMSRPTMQFVPVKTAEQQAALMLAGMRERLVARRTQLSNAIRGYAAEFGLIAAKGLDKIEPLLADIAADGALPVLARELFAMHGREYAQLQAELKNIEARLMAWHRANADSQRLAQIPGIGPIGATALVMKAPDPRLFPSGRHFAAWIGLTPKDHSTAGKTRLGKITRAGDEMLRSVLVAGATAVIQQVRRGRGRASPWLLALLKHKRPKLAAVALANKIARIAWKLMTTGESYDGARMSGASAFAA

SEQ ID NO: 441076 - protein, 319 aa, unidentified
MKEAFLGIDISKLTFDVALLEEDKVKSKKFTNNKQGFKKLTGWLDSKNVCIIHACMEATGVYGEHLAEYLFLNKIPVSIVNPARIKGFSQSELSRAKNDELDAKLIARFCKLIRPKLWEPTPDKIKFLQQWVRRLDDLIKLQRQEENRLEAASDYMKPYIEKTVKHISNQIKEAKKIINEHIDNNSELKEKSELLKSIPGIGETTTAQVLAFIGDTGKFRNAKEVAAFVGLNPKQNQSGTSVRGRTRLSKTGDATLRKALYMPAIVSMRHNPVIRQFASRLESSGKHKMAIIGAIMRKLIHIIYGVLKNKNAFNAELNC

SEQ ID NO: 441077 - protein, 359 aa, unidentified
MSKLSKIDTFFNNVKFTANDNLFVGVDVHKKSYHVALYLNDAPSIDFVMPANKQQLSEKLKPAMPALRQVCYETGPTGYGLARWLHKNHLPVAVAATSKIPRPSGVEDKTDKLDSKKLAEYTAKNLLKSVQVPTVKQEADRQLYRMRHRQVRNLAKVKTQIKSFLLMHDIAEPPGLGRWCKKSVEALRIQRLQKTLRLSLDELLCDLDYYSQRVKMLDKLLIEQLDKGALGRRMTLLKTHPGVGPVVSCQFATELFHYRAFSSTREVFKYLGLSPRIHQSGDRSVRGSVSKVSNSRLRSNLIQAAWRWIALDVNAKKTYLRILNNCGGIKQKAIVAMARKLAGHLWTMLIKDQPYDPTK

SEQ ID NO: 441078 - protein, 343 aa, unidentified
MFYAALDVSLRFVAVCIIDQDGKIRLEKSVPSDVADLVRCFRSFGEAIHQVGLEAGTLTQHLTYGLVDAGYDVVCMEARQVKAALSAMRNKTDRNDARGIAQILRSGWYSRVHVKSIASHQTRALLTSRKVMQRKYLDLENEIRGLLKIFGVKLPARLYRGAFESAVRETIENDAALSHVLLPMLEARGMLFRTFLELDRRVKRAAREDAVCRRFMSVPGVGEITALSFKAAVDDPTRFKRSRTVGAHFGLTPRRFQSGETDNAGHISHAGDADVRSALYAAANAMLMRSITWSSLKAWGVRLIKTKGRRRAIVAVARKLAVILHRMWLDGSEFRLGSKEAAA

SEQ ID NO: 441079 - protein, 339 aa, unidentified
MIIQSKIIVQESKPLFAGIDVGAEELILVIRKNGIPHKAQKFANNPADRARLVKKLVNLPGIIVCLEATGVYHFDLSIALHDAGVALMVVNPKASHNFAKVLMKNSKTDAVDAETLAQYAERMDFVAWTRPSDEKIALRSFARRIDALTRQKAAAKNNLHALSASQETPKAVLRDVKLAVSQLEKRIDRLSNEALALIGKHAELERVFRLLTSIKGIAKTSAIALMGELLLLPPGLSHRQWVKFAGLDPRAFDSGKSVHKQARLSKAGNRHIRSALYMPALSAKQHDPHVKAYFQHLVDNGKKPLQAVCAVMRKLLHAIHGMLKNNTPFDNTRFYAIPA

SEQ ID NO: 441080 - protein, 357 aa, unidentified
MKKHSEQILKNEKIFVGLEDSKKTWKLCVRSGGMVVNETSMPAKYEVLCNYFHNKFPECQIEVMYEAGFRGFELHDQLVADGWECVVTPPHTVTEEKCQRKKNDRIDCRRLAKNLENNDYHRCFVPDKELREDRQVSRTYGQADADIKRVCNRIRRTLEFHGLDNDLPAGRWNSAMYAQVKKHLEESKLSDSLRLSFKMMFQELEHLRQIKKEVLLYLRKLARSSRYKEDVELLESAPGIGILTAIRLVLEWGNVNRFGRKEEFASFLGLVPSDYSSGEQERQGHITKQGNRGVRSWLIESSWVAIRHDPVLLEKFRRVFKNSGKQKKAIVAVARKLAMRLRRILLTRESYVLGVVE

SEQ ID NO: 441081 - protein, 335 aa, unidentified
MLDPSTGEIIERCLDHSNDDVERFYAALPGPARVGIEATINARWFEKILDRYHHELWVGDAAEIRAAMVRKQKTDSRDAAHILDLLLTNRFPRIWMPSPADRDLRQLLRHRHKLVGYRTSVMNQLHGLAMSQRLCRKRKLWSQVGRRELEALVLDPWASRRRQELLQLLDQLNPWIADLDREVQKQAEGSPEATHLMKQPGVGPVTALCFVLTMGPISRFQRSKQVVSYLGLNPSEESSGGKQRLGSISKQGNSLMRYLLVQAAQTASQSDPELRRFYQRLKFRRGHSAVAKVALARKLAVRLYWKLREAAQPIPPARMQGSSRNPMVDPSPSRS

SEQ ID NO: 441082 - protein, 366 aa, unidentified
MIQHTQQDFRGQVVWIGLDVHVRFWLVAIMVGDIFHKSFHQVANAQLLVNYVHRNFPGAEYRCVYEAGYCGFWIQQELERSGIRCSVANPADVPTTDKEKRNKTNRVDAHKLVRSLRNGDIDAIYIPSRQAQEDRSLVRTRHRMVSKQTRCKNQIKSLLCFYGISLPEDMDKRYWSRRFIAWLKGLKLQNDSGTNALQILLNELEYYRVSILSVTKTIRQLARQERYVRHVNNLVGISGISTLVAMVFLTELVALDRFRSLDALAAYVGLVPGEDSSGDDRTITSITPRKNRYLRWVLIEAAWVAVRHDPALMLAFTHLSARMPKNLAIIRIARKLLNRVRFVLKNQKPYVSIVVDQNSTIVVQET

SEQ ID NO: 441083 - protein, 418 aa, unidentified
MCIKTKKVKWINKKTMIATFDIGKNVHYGYFKAPDGRERKPFCFHNTQKSFKQLWADIFQFKQDHHLEQIVIGFESTGPYAEPLFHFLRKKPVKLVQVNPVHTKRIKELTGNSPNKTDKKDPRVIADVICLGHALTLVVPKGASAHLRRLTQARERALRDRTATINQLQHLIFVIFPEFLSIMKNINTKTATYLIKHYPGAQNIAATAVEDLTAIMRKISRGKLGRERAEELIAAAKDSVGICEGRESIFLEIAHLNARIENESGFIDTLENQLDEYLQQIPYSSSILSVKGIGVVTAAGLIGEVADFKKFDTISEIMKLAGLDLYEISSGKHRGQRRISKRGRPLMRKLLFFAAINAVKTNGIMHETYQRMLERGMLKMKALVAISRKLLGLIFAIVRDNTKYIEDYSEKHHYKLAA

SEQ ID NO: 441084 - protein, 402 aa, unidentified
MNAVGIDVSKGKSMVAIMRPFGEIVSTPFEIKHTASDINSLVELINSVEGESRIVMEHTGRYYEVLAHQLSAANLFVSAINPKLIKDFDNDSLRKVKSDKADAVKIARYALDKWQNLKQYSVMDELRNQLKTMNRQFGFYMKHKTAMKNNLIGILDQTYPGVNTYFDSPARSDGSQKWVDFASTYWHVDCIRKMSLNAFIDHYQNWCKRKKYNFSQSKAEEIYGKAKELVPVLPKDAITKLIIKQAVDQLNSASTTVESLRTLMNETASKLPEYPVIMAMKGVGTSLGPQLMAEIGDVSRFTHKSAITAFAGVDPGVNESGTYEQKSVPTSKRGSADLRKTLFQVMDVLIKTHPEDDPVYQFLDKKRAQGKPYYVYMTAGANKFLRIYYGRVKEYLSSLPES

SEQ ID NO: 441085 - protein, 411 aa, unidentified
MVKENFIYVGIDLHKETHTAVMIDCYNQKLGEITFPNRPADFPKLVTKVKKCNTDAKEVVYGLENAYGYGRPLAVWLIDKGYFVKDVNTAISHRQAKHRGAMYRKSDSDDAEAIALATLNMLDKLPDACPNDAYWSLGQLVHRRDNIMKQRTRLVNQLHEQLCIAYPSYKQFFNDISRPTALYFWEHYPSRKYLKGKSVEDLRAELVPVSHNKCSTRTCEKILDAIAGDKVKNNAYQDARDMVTLSIVSDLQHYDKQLAEVDKMLEQMYKMLGCTLTTIPGVNVITAVKILAEIGDIKRLSNANKLAQFAGIAPLHLSSSGKGKDLATKQGNRRLQATIYFLAIQMVHISSKGTPRNPVVRAYYEKRKAEGKTSQQALICISRRLISIIYEMLKNGTEYRMPVVENAGENV

SEQ ID NO: 441086 - protein, 342 aa, unidentified
METKRHIGIDLHRNCFTVCVRLENGRNYLSEWKLEDLPRFTQKLRAGDEIAVEMTGNTRFFHAAVAPHVARVVAVDPNQFKVISQSVKKTDPNDARNLALYLAKDLLPEVRMKEKTEAQIASLTQTRDTLVKLRTALKNKINNILAAHGINLAKEALSSEKALAGVLEMHFDEMVELELQVIVEQIRGLNQSIGKLEQTIRDRGRKLKGHPNLTSIKGIGNLGASILLSVIGDIDDFADEGKLAAYFGIVPRVQNSNETERSGRITKRGSKLGRTTLVQCALVAKRYSPYLARYYEHIKSRKGGGKAIIALARKFLGIIYRTLKNGWVFEDFPNFVLAEATS

SEQ ID NO: 441087 - protein, 364 aa, unidentified
MNYIGIDLHSNRITADFRSPDNSSRKAAFSLHDPDDRNQFLSDLSPSDNVAFEASTNSFAFYDLLKERVKDVFVLNTIRFRLICDSGKKTDHVDAAKISGMLKYHVESRSDFLPVVYVPDTNIRTLRSLFSTYKHLNKQIVSTKNRIKSILTSNLYSYRGRNIFGKDREEIMGLNLSCEYRIQLEILYEELDMLEKKKQRIKEAILYYGREYEDQIDIITSVSGISAFIAIALISDYADISRFKTAKQFTSYLRSAPRVHASNETVHIGKTNKCGRKTSAPLLVQAITHFISLNPYIGRFYGSKRQGKGAGKVRMAVIRKILVAVYYMLKKKEYYRFRNTKNHILKMNMYRRFVKKYETALKTT

SEQ ID NO: 441088 - protein, 324 aa, unidentified
MEKLYGGIDIHKENLVGCIMDGNGKTMREHIFPFSKKAVERFLCGIPNSEITIAVEACGIWRGAYKVLTELGYEVKLANPKKTHDIACRKKTDKVDARILADLLRTNYLPEVYIPDERVLGLRDITRHKSNLTHLRVMVQQKIKGYLLRKGTKYGKLWNEKALSKLAEEDLDIRNLVNVYWSLKNEEKEVLKRIRKIARNMKETTLLMSMTGVAEFSSLMILAEVGVIKRFKTPKELVSYSGLCPGIYQSGSTERNVKNNAVNKCLKWIMYECSGRAIMLDPKFQEYFYMVKQRKGFKTARRAAARKMLTIIWYMLTNEEPYRA

SEQ ID NO: 441089 - protein, 408 aa, unidentified
MPRYYLGVDWADKSHQLYVCDESARKIKEQEVQHTVGELVELGRWLDESRQNGIELWGAIEKPHGRIVDFLLDHGVMTYPINPKALDRARDRFRMSPSKSDAFDARVLAEFLRTDHAHLRALEPDSIAAQELKMLTRDHQRLGRQKIGLINQIKITLKEYYPRALEVFGDLETQIALDFLNNYPTPQALSKLTQRSWMRFATREHHLGEARAKELWDKLNPIQLPVPEHVVRAKTKLLLALVVQVQASIKAVDSYNEEIQSFFAAMPPAQLAKTLPGAKSATTVATLWAELGDAPSRWSSFRHLQAQAGAVPITNSSGKNRLVQFRSACNKHLRQTLYWFSFNSLSRCEWAKKYYRDQRAKGHNKHQALRALGAKWLKIIFVMWKDHKPYDENYHLANIARQRMRQAA

SEQ ID NO: 441090 - protein, 389 aa, unidentified
MKIFVGIDIAKLNHFAAAISSDGEILIEPFKFTNDADGFQLLVSKLESFDKNSIIIGLESTAHYGDNLVRYLVAEFYQVCVLNPIKTCQMRKNNVRKTKTDKVDTFVIAKTLMMQDDLRFITFFDLDMMDLKALGRFRQKTIKQRTRLKIQLTTYVDQVFPEIQYFFKSGLHQNAVYALLKEAPSPKEIASMHMTHLANLLKVNSHGHFTKEQAKELRILAQKSVGANDSAISIQITQTIQQIELLDSQLEKIEAEMTDIMKFNDSVIMTIPGIGYINGGMILGEIGDIHRFSNPNKLLAFAGLDPSVYQSGNFQAKTTRMSKRGSRVLRYSLVNAAWNVVRNNATFKAYYDAKRSEGRSHYNALGHCAGKLVRVIWKMLTDEVEFNLE

SEQ ID NO: 441091 - protein, 348 aa, unidentified
MLTVGLDVHQSCSSVCVLDEKGNRVREREVRGGWDKVVEELGKLKEPFQVCYEASTGYGALYERLLPLAKKVAVAHPGKLRLIFQSKKKSNRADASKLAALLHLNQVPLVHVPGQEVRSWRGLIEHRRRLVDKQVQVKNQIRALLRGMGIKGGHRASLWTKAGRKWLGELPWPTAIESLRVEVMVEELVDLKKKIDRVTGVLDEMGSVCAGVSLLQTIPGVGPRTAEAFVAYVDDPRRFRSDTIGAYFGLVPREDSTGSHRHLGHLTREGSATVRKLLTEAAWRASVGDAGVKKKYEQMLRGDKSRRKLAVVALGHWLCRVMLAMLKSGEAFRPSSPPLCQDESKQVS

SEQ ID NO: 441092 - protein, 342 aa, unidentified
MSEITTIGLDLAKNMFQVHGADATGKAVLRRKLRRGQVLEFFAKLPPCLVAMEACAGAHFWGRELTRLGHDVRLIPPIYVKPFVKRQKNDAADAEAICEAIQRPSMRTVPIKSEETQAAANVFRVRELLVRQRTQSINALRGHLGEYGHIVPQGAQNARRLVALVEGEDTGLPAAARASLVALTVMLAQLDQQIAALDAEIARRARENPVARRLMTIPGIGPLIATAFATLSPPPELFAKGRDFAAWLGLTPRQHSTGGKQRLGATTKMGERSLRRLLIIGANSVIIKRHCHASARPGTWLADMLERKPAMLVRVALANKMARIVWALMKHEETYRAPAVAA

SEQ ID NO: 441093 - protein, 336 aa, unidentified
MIRKGVESTRAGKDLPMLGIDVAKDNLVCTLVDPATRHTLWERTVPNTAAGVNCLLHVTPEDTAWVLEPTGQYSTWVVKQAKAAQRPVLLAPPRQAKSFLRSVQSRAKTDRLDSRGLALFALSQPLLPFPVKSPAVEHLDQLLCARKGLAQALVSLGQQRAALPHAQEALTGAIEALLVQQKALDKQIAALSASAPELKAAAALEKVPGIGAVTGPALAARLSGERFSHPDKFVAYLGLDIGVVQSGKRKGERGLTKQGDAELRRLLYLCAKSSLRAKNSPFKAQYEREKGKGLSNKAALCAVARKMAKVCWSIVQHSAEYDPARVYQQPQVKQQP

SEQ ID NO: 441094 - protein, 408 aa, unidentified
MQVLYTRCAGLDVHKDSVVACVRCVSPPMHQEVRSFGSTTTELLELAHWLGEHDCTHVAMEATGVYWKPVWHVLEDEFELVLANAAHIRNVPGRKSDVNDAMWIADLLAHGLIRSSFVPPQAIQQLRDLTRTRKQLVREVSQHSLRIQKVLEDANLKLGSVLSDVLGKSGRAMLDAIVAGQSDPAQLAELAQGTARNKTAELREALRGRITEHHRTMLKLHLQVIDALQRTLAELDAAVGKALAPIRQRARLLTTMPGVSDLTASVLVAEIGVDMSRFPSAGHLVSWAGLCPRSDESAGKRRCTRVRKSGTWIKTTLVTAAWAAVRVKTSYLRAQFLRIKARRGAKKAILAVAASMLTAAFHMLRHGVEYNDLGSEHFDRQNRSKTIRRLLKRLHDLGCDLPELVHAT

SEQ ID NO: 441095 - protein, 445 aa, unidentified
MHYKRLLTWIDGSSSYLSVGLDVGADFTWMSIALPNGAFIGKPFKIVHSDPRSRDLAVTKIKEAQETYSLKSRCFLESTGIYHIPLLCFLRDKGFDCSVINPIITKNSTNINIRKLHNDKFDSKKAALVGLNVSLKASIIPEDSIVDLRNLVRDYYYFKDLQSAVALKLTAELKMSFPAYAKVFSKVTTQSSLKLLSSYPLAGDMLEASKDDIVETIRSTARFGEAYALRKYDAVIAAAQDASVFGRALPSNAVRIRLYIDTYQEYQKHLDALLKALHETVERLQDTLIYDQICLLQSLRGIGFLSAVVLIAEMGDFKLFPSPKKLYAYFGLDPAVKQSGKLNGDKVHMSKRGSSLARRVLHMVALNNVKVDKGSGTPVNPVIYDYYTRKCSGKKKPVAMGAVMHKICNIIFAMLRDNKPFEIITPEEHCQRFAAEYPDKIRKAA

SEQ ID NO: 441096 - protein, 428 aa, unidentified
MHTNEITRIKEFRQMRKEIRGSEKYLIVGIDVGKEKHYAFFGTANGKTLMRRLIFENNFIGIEKLMDVAYTLKKEHLFEKVVYGMEPTSNYHKPLAEYLIKSGCNVVLVSGVLVARNRELLDGRWDKNDGKDSANAADLISQGKFQYYDYPPVEIRDLRNLLSLKRMLKKQEHRMKVRIRNNLIAQYYPEFDSQFAKGCSESLATVKWCLKPREIADMEYEEFEEMVAPRIRTITQEKRVRAIWEDANESIGCEAGDTLQFGARLMIEDLQNIKDSIKAVDEQIEKICTEFSDYHYLLTIPGFGPDISSKVFGAIGNPLRFDTGNQVLKLVGYDLSASRTGMTSDKAVPVISKRGNAHLRYALYQAALIASTRNSHFKRYYTNKLRGREREKGIKTKMKVKLAAKMLVIAWTLMKKKEPFDPAYLNIE

SEQ ID NO: 441097 - protein, 387 aa, unidentified
MARKRTLSTLDTSIAYEAVGLDLAKEDTAIAAFGPDHEGPYLIDRIPYDKLYELLADMAPTLVAMEPCSGAHQIAEQIQELGHEVMMISGRHVQAWVKDHCNGQKTDLNDAFAILNLAYDRWLTPIRGKTREECRLLALQSSYRQLKGQRTKTMVHVKATLHAWGFPIRTGSFNQKALHELIDANREAFGDEVVETLHLMINRVHDLDHDIATVLKLLTEATQRDPRASLLRSIPGFGVLTTSRWCAVVGDIARFDTPKQTMAFIGLVPNNRITGHHTETSSGREARGQGKMSKRGDKMLRSLCILGAGALCLMVRNDRLPDCPFVASIKERLASPRPWFKVLVYVAAKLVRIATALLKYGETFSFEKAGISKAVLKQWELEQAKAA

SEQ ID NO: 441098 - protein, 345 aa, unidentified
MTIVETHPITGGVDTHLDIHVAAALDSNGGTLGVESFPTTTGGFSDLYTWLSGFGTLGRVGVEGTGAYGAGLARSLRAAGVTVIEVDRPNRQARRRDGKSDSLDAVEAARAALSGRARGVAKTADGNVEAIRVLLIAYRSGRDVRIKCLNQLRHLGFCAPDDLRERFRGVTVNSLARDAAALRPNPNGDVVVYATKLAMQTLGRRVIDIDADCTRLYGELNRLVAATAPSLLALHGVGTHTAALLLVAAGDNAERIRSEAAFAHLCGVAPIHASSGKTTRHRLNRGGNRQANHALWRIVFTRMSSDPRTRAYVERRSLEGRSKPEIMRVLKRYVAREVYRHLPGV

SEQ ID NO: 441099 - protein, 402 aa, unidentified
MNAVGIDVSKGKSMVAIMRPFGEIVSAPFEIKHTASDINSLVELINSVEGESRIVMEHTGRYYEVLAHQLSAANLFVSAINPKLIKDFDNDSLRKVKSDKADAVKIARYALDKWQNLKQYSVMDELRNQLKTMNRQFGFYMKHKTAMKNNLIGILDQTYPGVNTYFDSPARSDGSQKWVDFASTYWHVDCVRKMSLNAFIDHYQNWCKRKKYNFSQSKAEEIYGKAKELVPVLPKDAITKLIIKQAVDQLNSASTTVESLRTLMNETASKLPEYPVIMAMKGVGTSLGPQLMAEIGDVSRFTHKSAITAFAGVDPGVNESGTYEQKSVPTSKRGSADLRKTLFQVMDVLIKTHPEDDPVYQFLDKKRAQGKPYYVYMTAGANKFLRIYYGRVKEYLSSLPES

SEQ ID NO: 441100 - protein, 339 aa, unidentified
MNEVTLIGIDLGKHSFHLHAQDATGRMVFRKKLSRQQLLRTLANVPCCRVVMEACAGSHWLARQLAGMGHEPRLISPQLVRPFVVGNKNDFGDAQAICEAACRPSMRFVSPRNEAQQTVSAMHRLRERLVRERTATVNQIHGFLLEFGISLPRGAALMSRLPTVLDHETLPPRLVGLVVRLRAQVHYLEEQLRQVVQDLKAALREDDKSRRLLEIPGIGPITASALAVELGDARQFANARQFAASIGLVPRQYSTGGKPTLLGISKRGDRNLRRLLVQCARAVMQHTASRTDALSLWVKTLSTRRHSNVVACALANKLARIAWAILARGTHYQARALTT

SEQ ID NO: 441101 - protein, 361 aa, unidentified
MQSTPLIAFDQHAATTVAAVLLPGERTPALHTLTSDPSTILRFVTRLQRQGPIRCCYEAGPCGFELQRSLTVHGIPCDVIAPALIPRRPGVRIKTDRRDAGQLAVLYRAGALTAIHIPTEQEEAARDLLRCREDIRADLLRARHRLSKFLLRHGRRFTATKKAWSKRHAVWLRAQTWPLPALDQTHQAYVRAIDEAVGRLRSVEEDLRALLDLAPLRPRVQRLRCFRGIDDLTALTIAAELGDARRFATAPSLMAYVGLIPSEHSSGTKQARGAITKTGNAHLRRVLVEAAWHYRHHPFVGDTLRGRQRGAPATVIAQAWTAQQRLHRRYARLAARGKPKQHGVTAVARELTGFVWAALTQ

SEQ ID NO: 441102 - protein, 386 aa, unidentified
MAHSTNILPRSVDYDQTLVLAIELSNKSWVLAAQVPGLSQTKAKRTIDPDKNDLLAAIDGYRTRAAAAGRSVKRVITSYEAGWCGFWLARWLMAHGIEVHVVQPSSVPVDRRMRRGKSDGIDAELLLRTLLAWLRGEPRVCSMVPIPDEADEDARRCVRERSELVSERVGLVNRIDAILATLGADDYNPLLQSRRRRLTELRTGLGDPIPPNALAKITRLLTRLELVLAQIAELELERDAVARTGAPDHAGKMIQQLISLRGIGVQSATVLVREAFVRRFANGKALGSYAGLTSTPYSSGGIDREQGIGKAGNRRLRTVMVELAWLWQRYQPGTAQVAWFRERVGSTGRRVRKVMVVALARKLLIALWRFVIDGVMPEGAVTKPSI

SEQ ID NO: 441103 - protein, 416 aa, unidentified
MCLSEAKGMDIKMYNAVGIDVSKGKSTVTVLQPGGTVIRKPFDVSHTSQNLNELAAYLDSLDGDTRIVMECTGRYHEPILKALSEAGLFVSVVNPHLIKNFGSNSLRKVKSDPADARKIARYTLDNWAELRQYSGMDNTRTQLKTLNSQFSFFMKQKVAVKANLIALLDNTYPGVNKLFDSPVREDGSEKWVDYAYSFWHVDCVRGIGLKAFTERYQAFCKRHHYIFQADKPEKLFNASKELAAVFPKEKTYKLLIQQSIQQLNPASGHVERLRREMNELASTLPEYSTVMGIYGVGRTYGPQLIAEIGDVSRFTHREALTAFAGVDPGVDESGQHKSKSNRASKVGSARLRKTLFQIMTTLLQNAPEDDPVYRFLDKKRSQGKPYYVYMTAGANKFLRIYYGKVKECLRNLEQES

SEQ ID NO: 441104 - protein, 384 aa, unidentified
MYKHNILFIGLDTHKVSTEVAHIEDQHGAKPVHHGKIKTTKAAITKLARQYQSKYPQATLHFVYEAGPCGYWIYRLLTSLGHCCYVVAPSLIPKKPGEKIKTDKRDALKLAKLLKSEDLTPIYVPESEDEAIRDLSRARETAMKDLKDAKYQLKALFLRNNITSKVNDNWSAQHLRWLTELVLPHPSQHIVLQEMIQTITERIAREKRLANELFHQVKQWRFYPVVKALQAVRGVKLLIATGVVAELGDLRRFDHPRKLMAYLGLVPSEYSSSDKRRLGSITKCGNGRARRLLVQGAHTYKHKANISTELQKRQESLPKEITDIAWQAQLRLCRRYNRLMSRGKHRNVVVIAIAREMAAYIWAIAREVVISEVNPRLRVSRVPA

SEQ ID NO: 441105 - protein, 356 aa, unidentified
MSQKLNSKVAVIGIDIGKNSFHIVGQDRRGALVLRQKWSRGQVEARLANLAPCLIGMEACTGAHHLSRKLQAIGHDARLMPAKYVRPYSKGDKNDYRDAEAIAEAVQRPTMKFVATKTAEQLDLQALHRVRERLVSQRTGIINQIRAFLLERGIAVRQGLRFLRAELPGILAKRTDVLSPRMLRIIEDLCGDWRRLDERIENLSGEIELLASQDKGCERLMTVPGIGPIISSAIVAAIGTGDAFSKGRDFGAWLGLVPKQMSTGDRTILGNISRRGNRYLRTLFVQAAWVVLVKVGPKHWERYGLKSWIEAAKERLHHNVLAIALANKLARIAWAVLHKGRAFEYVKTNATASRSA

SEQ ID NO: 441106 - protein, 491 aa, unidentified
MRGLAGCLSQAVIVSRKKTQQQKVRGGQGPVPAKRKRNKRPDPWGQSDRPVFEPNAAGIDIGAREIFVAVPADRDEHPVRKCETFTGDLHQMAEWLVSCGITTAAMESTGVYWIPVYDVLEQHGIQPCLVNPRNMKNVPGKRTDFHECQWIQHLHSLGLLHAAFRPDAEVCAVRSLMRHRNDLVMMASEHIQHMQKALTQMNVQFQHVISDLTGLTGLAVLDAILAGERNPEVLAKLRDPRIQASEETIRKSLEGNWRAEHILALKQRLSLYRSHRDLIDECDREIEKLVAAFEPRVDPDEKPMPEDRKQKQRKRKKKSGSADFNLRAEAYKLFGVDLTQIPGLMTLVFLLFSEVGRDMSRWPTAAHFVSWLGLCPDNDISGGKVLWRGTRRTKNRAGTLFRLAAHSLHHNQTPMGDYLRRMKAKLGPAAATTATAHKIAIIFYTMVSKQVEYDASLWANRDQMREKRLEARLQKQAAQRGYKLVPLESAA

SEQ ID NO: 441107 - protein, 448 aa, unidentified
MDVLQLDVEDEEEVLARVAAIDVAKASGMVCTRVPHEKTPGRRVTRVWQVSATTNAIIDLADQLVGAGIERVVLESTSDYWRPFFYLLEARGVRVWLVNARDVKNVPGRPKTDKLDAIWLAKLNERGMLRPSFVPPEPIRQLRDYTRLRLDLTTERSRHAQRLEKLLEDALIKISTVATDIMGVSGRAMIEALIAGQRDPHALADLARGRLRVKHAALVQALTGQFDHHHGELAQILLDQVDALSAQIEHLTARIDELIAEIPAAQGVDADGTTGPQAGTGPDAAALAAIARLDEVPGIGTRAAQIIIAEIGLDMAVFATPGHLASWAKLCPRANQSGAKNRSGATGKGNRYLKGVLGEVAAAAAKTNTFLGHRYRRLVKRCGKLKALVAVARSILVIIWHLLSDPAARFHDLGPDFYDNRLGPERTKRNHIRQLEALGYKVTLEPAA

SEQ ID NO: 441108 - protein, 311 aa, unidentified
MGVSVGIDVSKQHLDWALGSETKPGRVPNTRAGIRHLVGQLAKARNLDRIIVESTGGYERALTEALSEAGLPVLLVNPWRVRRLGEGLGILAKTDSIDAHVLALFGERAAPPLRPIPSPRDRQMADLVRRRRQLIAMIVAEKNRLEHATSVVRRDILTLVTVLERRVVKLDRCIDAAIAADATKAEARRRLEAVPCIGPGIARALIVELPELGTLGRRQIASLVGIAPFANDSGKKSGHRRIRAGRSGPRTALYLAAMNASRFNPVLKPMYDRLVAAAKPPKVAYIAIARKLLTILNAMVRDGTDWQQDAI

SEQ ID NO: 441109 - protein, 371 aa, unidentified
MKSIIYIGMDVHKKTYSLCALLKETGEIIGETKIPADVSLIIKFIENAKKSVDSDDVQIKTGYEAGCLGYSLYWQLAEKGIECDILAPSTMHRSAKNKVVKNDRRDAKNIATNLANGTYKSVYVPTDEDVEIKEYIRMMHDFKIELKKVKQHINAFLLRFGHQYPGKSKWIPAHIKWLKELELSDMHREILDEYLSQLEILSEKIERFKHRLEELSQKETYNEKIGQLRCIKGIDTTAAMTMHAETSDFDRFPTANAFASYCGLTPGEDSSGESYHRLSITKQGNSMIRTTLIEAAQVLVRGTIGKKGKKVKSKQKDQDVKVIDYADKAVIRLQKKYHRMIFRGVKRNVAITAVARELACFVWGIETGHIS

SEQ ID NO: 441110 - protein, 377 aa, unidentified
MEKVRFIGLDVHAETIAVAIAEPGGDVRSLGVIPNRPESIRKLVKKLGPAESLRACYEAGPTGYVLYWQLTALGVGCEVVAPTLVPTKAGDRVKTDRRDAEKLARCYRAGDLTAVWVPDAAHEALRDLVRAREAAKKDQLRARHRLAKFLLRQGHRPPTGVTAWTQRYLAWIKTAVQFAQPAQEATLLDYLHEVEHMGERLERLAHAIDEAVTQAPAAMRAVIDALQALRGIALVSAVTIVAEVGQLSRFARAPQVMGYSGMGAREDSSGERTRRGGITKTGNAHLRRILVEAAWAYRHRPSVGSALRKRQATLSEEVKAIAWKAQHRLHGRYHRLLGRGKCQPQVVTAIGRELLGFIWAIGVTVETQSTPPRSVAA

SEQ ID NO: 441111 - protein, 457 aa, unidentified
MGNARARKIPAQLVEDEEYQLRHERVAGIDIAKAKADVCTRLPPQHDGGRRASRLEEVPATAREILALAARPLAGGVQLVVMEATSDYWRIWFYLLEAAGLNVQLVNPAHARQLAGRPKTDRLDAQWIARLAETGLLRPSFVPPPEIRALRDLTRTRLQLVRDRTREWQRLEKLLEGALVKLSSAVSSLAGTKTARDILEAVAGGQRDPRALAALASSQVKGGRAAIEQALDGMTLGGRHPRLIRIHLDHVTFLDRSIAAVEDEIEAALDAIPAARGISADGVPSPGPGPDATVLPAAERLAEIPGVSLKLAMAVTAETGLDMTRFPTAAHLVSWAGLAPVARQSGPRSRKPKKGQGNDYLKGYCTQAANGAARTDTFLGARLRRLSRRLGGNRAKCAVARSVLVIIWHLLADPAARFTDLGPDWHEHKADRDRKIRAHLRQLQALGLDVTLTPAAA

SEQ ID NO: 441112 - protein, 402 aa, unidentified
MNAVGIDVSKGKSMVAIMRPFGEIVSAPFEIKHTASDIHSLVELINSVEGESRIVMEHTGRYYEVLAHQLSEANLFVSAINPKLIKDFDNDSLRKVKSDKADAVKIARYTLDKWQNLKQYNVMDELRNQLKTMNRQFGFYIKHKTAMKNNLIGILDQTYPGVNTYFDSPARSDGSQKWVDFASTYWHVDCVRKMSLNSFIDHYQNWCKRKKYNFSQSKAEEIYGKAKELVPVLSKDAITKLIIKQAVDQLNSASTTVESLRTLMNETASKLPEYPVVMAMKGVGTSLGSQLMAEIGDVSRFTHKSAITAFAGVDPGVNESGSYEQKSVPTSKRGSSDLRKTLFQVMDVLIKTHPQDDPVYQFLNKKRAQGKPYYVYMTAGANKFLRIYYGRVKEYLSSLPES

SEQ ID NO: 441113 - protein, 315 aa, unidentified
MSNVQPFVGIDVAKDHLDLASRPGGKPVRTRNREAEITQLVQQLQDLQPALIVMEATGGLELPLAAALAVAGLPVAVVNPRQVRSFAEATGQLAKTDQLDAQILAHFAEAIHPAPRALPDEQAQHMGALLARRRQLIEMLTAEKNRLHSALAQVRPRLQAHITWLEDALAALDQELDQAVKDSPLWRAKEDLLRSVPGVGPVLARTLLFDLPELGALSHKQIAKLVGVAPLNRDSGRLKGKSSIWGGRAVVRTALYLAVLSAMRFNPVIKAFYQRLVQAGKPKKAAMTACMHKLLTILNAMLRNQTAWQPPAVPS

SEQ ID NO: 441114 - protein, 384 aa, unidentified
MIFDNNAEGFTKLVEWIHKLCKENGFSDVMLGMEPTGHYWFNLAENMKRYGMRVVLVNPNHVKKTKELDDNNPSKTDRKDPKTIAMLVKDGRYMEPYMPEGIYKELRTAMDIRWRLMEELTAIRNRINRWISIYFPEYKEVFAGWEGKASLQILHECPTPVKIIEKGIDGIIAIWKSKGIRTVGKKRAVRLIEAAKVSIGGKEGLVAAENELKILLEDYDRKKEQYGRVMVLIEELAMQIPGFDRLLEIKGIGLVTAAGFVAEVGDISRFGHPKQIQKLAGLSLKENSSGKHKGKTTICKRGRKRLRYYLTFGIMPLLSNNEEFRLLHQYYTTRAERPLKKMQSLVALSNKLIRIFFVLLKKDVAYDPQKMLGDIKRPQGKMAA

SEQ ID NO: 441115 - protein, 416 aa, unidentified
MGRATRKSGNFVASSNRWSCRDAPAERPRPSPGQALSRSLVALDQNSTIIAVVELSQSSWLVAGVLPGIERQPRKKLEPSPERLLAVLHRWRDEAVRAGRTITRIALAFEAGRDGFWLARWLDVRGVEAHVIHPSSVAVSREHRRAKTDRLDTELLKRGFLGWLRGERGHCSMARVPTIAEEDAKRPNRERDCLVGERTRIVNRIKSTLARLGIRNFKPTLRKAAERLATVHTPEGMPLPPNTLAELQRDMARLGFVVSQIRQIEDARQKRLEQEPETGSHAMVRRLARIVGVGVETADMLVHEVLSRPMRDRRAVARYAGLTGSPDESGAQRREQGLARAGNARVRRSMVQLAWRFLRFQKESALALWYRVRTADRRMGTRKTMIVALARKLVIALWRFVTTGEPLEGVVLRPAS

SEQ ID NO: 441116 - protein, 425 aa, unidentified
MAYKIAAIDVHKRMLAVVIADGMVDGEFQYERHTFLTTPDPLKALAQLFVEQGIQEVVMESTAQYWRPVWEVLERFWQPVCQKQSEATPLSGSLHLAQAESNRARRGRKDDFEDAERLIRRYVAQELVLSFVPSPEQRLWRTVTRRKQQCVVQRTRLQNPMEAFLEEAHIKLSSLVSDLLGLSGRRMLEALAEGVTDPAAIAAKADRNLRASQAQLCDALGAAKELKPVYRRLLKQSLEELQLVEKQIRELEQELSTLLAQHKDAVQRLAEVPGLGADSAQQIIAEIGPTAATFPTAKDLASWVGVCPGDDISAGQQHNTKSPKGNKNMRRVLDQAAHAAVKMKGSIFEVVFQRLRRGLKYKEAIWAIAHRLCRLTWLLLTKKVRYEERGPSVSAASKRQHANRMMRALRRMGYKVDPPAELNNA

SEQ ID NO: 441117 - protein, 309 aa, unidentified
MECFVGIDVSKDRLDVHVLPSGEAFSVSSDGESVGLLADRLSALRPVTVALEATGGFEVVAAGILASSGLPVVVVNPAQVRSFARALGRRAKTDPIDALVIARFAEAARPELRPLADAEQRLLSDLTARRRQILQMLVAERQRLGRAGDLRLKKSLRRLITALQKELDEVDGEIDQAVRASPVWRRKETLMQSVPGVGRITARNILADMPELGTLDRRQAAALAGLAPFTRQSGQWRGKSFIGGGRSHVRCALFMAALSAARYNPALKVFHQRLIAAGKPKMVALIAVARKLLVILNAVIRDQKPWQPA

SEQ ID NO: 441118 - protein, 466 aa, unidentified
MLQQINPRAAAADVGSESIYVSIAGAPPVRFGTVTKELHRLRDHLLAHHVDTIAMEFTGVYWVPLYELLENSPIRACLFNGAQVKALPGRKTDVADSQWAATLHSHGLIRSGFVPAAPFRVLRDYLRLRESHLGDASSSVLRMQKAMELMNIKVHDVISDITGASGRRVVQAILDGERDPERLLDLCETVIIKKKGQRMRDALEGTWAKQHLFALQQAWDAFQFCQAQAAACDAKVGEVLREMAEAIRAERKEEAKLGHGGTPPEGGEGVPGQEESKPKGRSGGKKMGKNAPKILDLESVLSTVLGGRRPQQIPGLTPYTTLTLVSEIGTDLSAFRSAKSFTSWLGLAPGQRQSGKRRRNQSRKGARAGQIFRMIAQSVGNGTKMGLGDFYRRLRAAKGGLIACKALGRKLAVLYYNVMTKGVEFVEEGLQKAQEKYKEQAIARLERLAKKVNMAVVPIAATEGST

SEQ ID NO: 441119 - protein, 320 aa, unidentified
MQTLIPVGIDVASQKFDVAIWKGKTAYKSKVFSNTPKGFDALKKWLEPVGDCHICMEATGVYSEALATYLVDVGYAVSVENPARIKSFGCSELSRNKTDKADARMIARYCKLHAPALWQPVPLSERKLKALLNRLINLQEMKQMEENRLETAASVVQVFIHTVITALDTQIAEIKQAIDDHIDNDLGLKKNRKLLESIPGVGGMLSCTILGYLGDMSRFGNSKAVVAWVGLNPMLQESGLWKGKSRISKMGNAVIRKTLYMPALTAMRYNPAIIALKERMKARHKSGKVVVCAAMKKLLQQAYGVLKSGLEFDAEICIAR

SEQ ID NO: 441120 - protein, 428 aa, unidentified
MKNRNDQKLKAITPGTLIVGIDIAKETQWARFVDYRGLELRKTLKFKNHKNGFDSILASIKAICKNRRLDNIIIGMEPTGHYWKPLANYLLKHKVTVVMVNPYHTKRAKELDDNSQTKSDKKDALTIARLVRDGRYYEVYMPQDMFAELRVLSNSRISLMKRSNALKNTITAVMDEYFPEIVTVFKYPLKGKAAMHILKSCPFPSLILELGIDGVLAEIKKAVKKTVGRKKASQLVETAKSSIGVGYGLVSAKLKLELMIEELELLSKQLEQLEKAMEKALADTRYIKLILSIPGIGVVTAASFLGEIGDPMRFDHPRQICKMAGYNLIEDSSGKNKSKTKISKRGRKNLRSILYQMARTMVAVNTEMKELYQYLKTRPNNLLKKKQALVVISKKIVTVIYNLIKKQTEYQAELVLGEFRKNQIRQAA

SEQ ID NO: 441121 - protein, 355 aa, unidentified
MIVGIDVHKNFCEAASIDEDGRLIKRWRFKNQNEAIEEFLPNLPEGTKIAMESCSYFYPLYNQLERGGFQVCVAHPLKVKLIAESRNKNDRVDANILAQLLRMNYLPTSYIPPEPTRQVRDLLRYRAALARQRTQTTNRIHHLLEKRGIKTSQLGCGDLYSRKAQGNLAQIELPPIERSILDMELNLVRVLNDAIEKANIEIAKQAKENPQAKLLMTIPGIDYYSAMLLLAEIGDIHRFPDAKKLCAYAGLVPSVSQSGARTVYGHITKQGNRWIRFVMVEAVQRTRTIQRESPLAAMYRRIQARKGGGVAKVACARKLLKIIWFMLTRNEPYRYMDREMFAGKEKRLMRTASKA

SEQ ID NO: 441122 - protein, 409 aa, unidentified
METVVERPAALDVHKESVTACVRVPGAGGRREQHLHAFKTTVAGLLTLRDWLRAHGATQVAMEATGVYWKPVWAILEDDFDCLLVNARHVKQVPGRKTDVQDAAWLCQLLEAGLLRRSFVPPKPIRTLRNLTRYRKAQLRERQREANRLHKILEDTGIKLDCVASDILGVSGRAMLEALAAGTTDPAVLAELARGRLRKKLPALREALEGRFTDEHALVVSSILAHLDFLDEQIERLSEAIEQAIAPFANAVELLCTIPGVQRRTAEVIVAEIGVDMSQFASAGHLVSWAGLCPGQDESAGKRRNAHTRKGSKWLRSALLEASLAATRTTDTYLAAQYRRLKPRRGHGRASIAVCHSILAACWHMLTTGELYREPGGDYFQRRDPERTTRRLVRQLEALGHTVILEAAA

SEQ ID NO: 441123 - protein, 387 aa, unidentified
MTKNKGRVVGLDVHPDSFAGAVVEGSDPAQARVLSSSTRVELEQLEQWALRHTSTEDRLLLEASGNVFAVAARLRTIGRKVEILDSHRAGKVGKVYCANDRVDAVKIARIYLSALSPIVWQPDAKTLERREIFSAYQAVVKESTRAKQQLRSMLNEHCVRLEKGFRLCHPNAIRRLVALREWTPARTMLLQQLHGTLVAARARRTLLRRHMAQEIVAEEALLRLTRLCGINLVTLYGVVVAVGDVRRFSHSKKLVAYFGLNPTVSQSGNFQGSGALKRHGRGALRALLIQSGKKLLEVNNPLQKWGLAVAARRGRNKAAVAVARKLCVALWHVLMGHTIGALERLDTLETKLSKFATELGPVALAAFGYNNKAEFVEKKLYVLRSYP

SEQ ID NO: 441124 - protein, 408 aa, unidentified
MIYCGIDWAERTHDVALVDDDGTLLAKRHITDDATGYKILLDLLAEHGDTEDNPIPVAIETSRGLLVAVLRTGKRQVYAINPMAAARYRDRHAVTRKKSDPGDALVLANILRTDMHAHRPLPQDSDLARAIAVLARAQQDAVWNRQQLANQLRSLLREYFPAALDAYPHWQNGLCRPETRVLLELAPTPSRAARLSLAQLRSALKRAGRQRGIDADAERIREVLRAEYAHQPPLVEDALGKQMLALLRQLSAACIAADQLAEAVEEAFPQHPDAEIILSFPGLGTQLGARILAEIGDDHTRFTTARGMKAYAGASPITRASGKKSSITRRWVKNDRLNHTGYLWAFAALTASTGAKAHYDRRREAGDWHAAAQRNLFNKMIGQLYHCLQKHILFDQNLAFPTQLLEAA

SEQ ID NO: 441125 - protein, 412 aa, unidentified
MEVMYLRCCGLDVHKSSITACILVAQSGKPQKQIRRFGCTTRELRELVVWLQEFGVEHVAMESTGVYWKPVWNVLESHFQIVLANAQHIKAVPGRKTDTKDCQWIAELLQHGLLRGSFIPPVVIRDLRDLTRARTSLSQEHSRIASRIQKVLEDANIKLASVASNTLGKSGRAILQAVIDGEESSERLADLALGHLRLKIPQLQAALEGKVRDHHRFLLQSLLRQLGFIETEIELLDARLDQLGQEHCDLAEALNRWTTVPGVDRVAAWSFIAEMGTDCSSFPSAAHLASWAGVCPGNNESAGKRISSKIRKGSPWLRRMACQSAWAAARTKNTYLSAQFKKLAARRGRKCAIIAVAHSILVIGYHLQRKRCVYADLGGNYFDRLHADGLKRYLVKRLESLGHAVTLQPRTA

SEQ ID NO: 441126 - protein, 403 aa, unidentified
MNNVAGIDVSKGKSMVSVLRPFGEVVAKPFSIGHTGSELKELADYLKSLDGETRVVMEHTGRYYEPVARFLHDEGVFVSAVNPKLIKDYGNNTLRKVKTDKADSRKIARYGIDNWAELRQHTPMDTIRMQLKTLNRQQSLYTKTKTMMKNNLIALLDQTYPGVNALFDSPVREDGSQKWVDFATTFWHVDCVRNMSLTAFAERYRKWCKRHGYNFSQSKAAEVHAGAQDLIAMLPRDALTKTMVRQAIDALNAISASMERLKAEMQALAAQLPEYPVVMAMHGVGDSLGPQLMAELGDVTRFTHRNAITAFAGVDPGADQSGTHEAKSTRVSKSGAPELRRALFLVMDCLLKTQPQDDPVYRFMDKKRAEGKHYLVYMTAGANKFLRIYYGRVKEYLASLEGN

SEQ ID NO: 441127 - protein, 391 aa, unidentified
MIYVGIDVAKDKHDCFITNSDGEVLFKSFTISNNREGFENLFQRIESVSDDLTKVKVGLEATGHYSYNLLGFLLDKGLTTYVINPLHTNLYRKSLSLRKTKTDKVDSRTIATMMMSDMNLKSYSDTSYHNEELKSPTRYRFDKVKERAKLKSSVSRLVCILFPELEKLVPTLHMASVYALLSEFPSADAVANAHLTRLSNLLIESSKGRYSKDIAVMFREAARSSIGSHMPAKSLELKHTIKLIRELDAEIEEIENEIKSIMDEIHSPILTLPGISYRMGAMIIAEVGDFSRFDSPDKILAYAGMSPSTYQSGQLDNCYSHMEKRGSRYLRYALYNATKYVCHWDESFATYLAKKRAEGKHYNVALSHATKKLVRTIYAMEKSGQPYQSAS

SEQ ID NO: 441128 - protein, 348 aa, unidentified
MLHVGLDLSRRRLDYCLLGGDEERIETGAVAPDADALAGLVRLIELRHGPRPVRAVIESMNGARFVHDTLERHGWDVEIADAQRVKGLAPLACKTDRIDAWVLAELSRRELVPAIWLPSFAVRQERERARWRLHLVKHRSSLKHRVHAQLMAFGHACPVADLFGHHGRELLDRLEFPEPWRGDVLAAVALIDELDRQITAIASELKALGAEHPYVPLLLTVPGVGWVLAYTIAAEIGDITRFASPRKLCGYSGLCPRVYQSGESDRRGPLAKHGPKYLRWALMEAATNAAKHPLYRDRYQQTKARVGRQRGAKVAQIDLARRLAEAIWHMLTRNQPFAPKGAAFPLAA

SEQ ID NO: 441129 - protein, 404 aa, unidentified
MTDSLTRFFGLDIHKEYFVPVAVNRDQETVFGPQRVSNYQLEDWAEKVLTPQDAVVLEMTTNAYLFYDTLLPYARSVSVVHPPNVPEVTNARVKTDKKAAETLAQLLAAGMLKGKEVWIPPDEVRDLRAVIARREKMVRLSTIAKNRLHALEHRKHLILPENPFSPEQRTWWENLELSTTEKLLVRSDLDTLDFARKQIEQVEEYLKQQSPQDERVPFLIQLPGVGMLTAMTILAAIGDITRFPTAEKLVGYAGLGTSVHNSGMTHSSGRITKAGRRDLRRAMVNAANHAAENHPHWKAELERLEPHLGRSKTIVAIARKLLVTVWHVLTEQVADRYADPQSVASSFLAYAYQVRIKNLPKGQSAPAFTREQLDRLGLGKDLQKIPRGSKFVNLPPSKLLIETE

SEQ ID NO: 441130 - protein, 414 aa, unidentified
MIKEKHLYVGIDLHKETHTAVILDCFNNKLGQITFANTPAEFPKLVRKVKKYCIDGKEPVYGLENAYGYGRALAVWLIDKKYIVKDVNTSISNRQAKHRGAMYKKSDSDDAQAIALATITMLDTLPDACPNDAYWSLGQLVNRRDNIMRHRIRLTNQLHEQLCIAYPSYKVFFSDISRPTALHFWSKYPSQKYLKDKGVEDLREELVPVSHNRCSTKTCEKILDTIKNDKVKDNEHQDARDVVTKGIVSDLQHYEKQLQEVDMELGKLYHSIGCTLTTIPGINITSAVKMLAEIGDINRFSNASKLVQFAGIAPINLSSAGKGMDKASKQGNRRLQATIYFLAVQMIQVSSKGTPRNPVFRAYYERRLAEGKNGQQVLICISRRFVNIIYGMLKSGTEYRMREVKESNKDSDKM

SEQ ID NO: 441131 - protein, 382 aa, unidentified
MEFYHKEHRYYCGIDLHEKTMYVCIVDQQGNIRYHRNIKTSREEFLVAVAPYRDDICVGVESTYAWYWLADLCEDEGIHFLLGHALYLKAVHGGKTKNDKIDSKTLAFILRGGNFPVAYVYPRKMRSTRDLLRRRMYLMRHRSAILSHIQNTNSQYNLGPFAKTLKYKANREGVANRFEDRSVRKTIEVDLHLLDFYDEVLRDLELYILKTARLDDPISLHLLQTAPGIGMILSLVMMYEIQDIGRFKRVQDFLSYTRLVKCPRESGGKKYSSKNSKIGNAYLKWAFSEAAVLFLRGNEQIEKKHNRRVSKHGKAKALSILARDLGTAVYFMLRRKEPFDMNKFLGAGDASRKSNWTEKGETLKKAAKIKCIEECQPVAVGQ

SEQ ID NO: 441132 - protein, 344 aa, unidentified
MQSTTIAVDLAKSVFQIAVSHQPGRVAETHRLTRSQFLRFFAERKPALVLLEACGTSHFWARQLQALDHQVLLLPPHQIRPYVRGNKTDQADAKALLEAHRNAEIRCVPVKSVGQQTLAALHRLRSAWMADRTARINLVRGILRELGFPIAVGARHVIPRALALLAEPDALPEPLRLVLAEACQEIRDFERRVLGVEKQLRALAAQLPVVERLQSIPGVGLLTATALVAFVGGVLRFPTGRHFASYLGLTPREHSSGLRRRLGSISKRGDPYLRMLLIHGARAALFAARRLKQPDRLRTWALVVEKRRGHNKTAVALANKLARIVWAVWRRDVAFESRAALAAA

SEQ ID NO: 441133 - protein, 344 aa, unidentified
MNEVITIGVDLAKNVFQVHGVDTDGAVIVCRQLRRAQMLPFFKKQRPCLVGMEACATAHHWARQLIGLGHEVKLMPPHYVKPYVKRNKNDAADAAAICEAVTRPTMRFVSVKSTEQQSVLMLHRTRELLVRQRTMLINAIRGHMAELGIVAPGGVPQVKKLLSIIADTDDVRLPPLARTCLESLARQFLLLDEEIYAAGKHIHAGHKSNEASRRLETIPGIGPIIASALTASITDPDVFKNGRELAAWIGLVPRQNSTGGKQRLGKISKQGDQYLRWLLVAGAMSVILHAKRRGKTDIPWLADMIARKPTKVAAVALANKNARIVWALLKQGGTYQQPATNSAA

SEQ ID NO: 441134 - protein, 391 aa, unidentified
MYIVGIDIAKRKHEAAVIDGEGTVIIKPFSFTNNCSGYNRLLAMLAKAKLPLDEVSFAMEATGHYWLALFTRLQKEGFRVQVINPVQTNSIRNFYIRQAKTDPRDALLIAEVIRFGHFSESTLHPENIYELRELCRGRHAIVSMQADVKRKVVALLDQVFPEYETAFTNMFGDTSMAILQTCPTPKELSEMRLEELCHLIEVSSHKRFRMAKAQELQALARNSFGFAMAGDVFSTMIRLYAKHLDFLKQQVREMDRKIAEIMETLDTPITTITGIGLTLGAYILSEIGDISRFSSAAKLAAYAGIDPTMRQSGEYNGVRNRMSKRGSPYLRHAIWLAASSAVLHDPALKLYFQKKRDEGKPYMASVGHACRKMVSIIYAVMRDNKAYCLCA

SEQ ID NO: 441135 - protein, 283 aa, unidentified
MYFSGLDAHLRYVTVAVLDRLGGVALETTVPTREPDRLLAVLAPFRPLEVVVETCPFWPWLYDLLVPAGIGFHLAHAKALRAIATAPQKSDAVDARLLARMLLSGLIPEAYPRSADQRELLRLLRHRTALVRFRTRLAGRIHSQLHQQRLSLPREKLLRRATRAWLEATAWPRLTVEQQAIVTTHVELIDHLTPLIRALERRIAAAAAGDATAPPLATIPGIGPYRSLLLAAELVPISRFPRAEHLVSYAGLAPVTRSAGGHTHHGSIPPAALRTSPSRSRLV

SEQ ID NO: 441136 - protein, 407 aa, unidentified
MPLFVGIDVSSKNLEACLMDDAGETLATRTVTNNLPGATELKAVILQHVKKDDSIQIAMEATSVYSWHPAMFFHEDPELKQRQTKVFTLNPKLVKNFKRAYAEMDKTDPKDAWVIADRLRFGRLPKSVIQSEQYLALQRLTRMRYHLVHSLTREQQVFLNHLFFKFSAFNLEVDTSAFGHAITELLLEAYSLDEIAQMPLEDLAKYLQTKGRGRFSDPEDVAASIQKAARDSYRLSKCVEDSIDLILGSSIEIIRHLKRQIKDLDKAIARVLDGLPNTLETIPGLGPVSCAGILAEIGDIERFENQAAIAKFAGLFWPRHQSGDYEADEKMLARTGNRYLRYYLVEAANLVRRHEPEYRAFYQKKYREVQKHSHKRALVLTARKLVRLIDALLRNDQIYAPKKKVTR

SEQ ID NO: 441137 - protein, 424 aa, unidentified
MKVTYQTCCGVDVHKSFLVATSVKTTGGIEPSYQKKRFSTFNSSILEFKQWLLDNDCHDVCMESTGKYWVPVFNLLEDEINVVIANPKWVKAVKGNKDDTKDSKWIGDLFRLGLVKGSYIPCKAVRILREYTRYRYKLVSCRSSEKNRYQNALTVCNVALDSVVSDIFGKSSMSIIDYLLEQSGTSINHEEIASKLLRSLKSKEDAVIESVEGYQMTDTQKYRMRLVRAHMDYITAEINDVDKMIENMISSNPDFENAVQFLCTIPGVKRDSAITIISEIGTDMSQFSSSKRLCCWAGLTPGSNESAGKKKSVRITRAGVYLKPALVQCAHAAVKSDKSPYYKKKYESLVKRRGKKRAIIAIARMILTAIYQMLSTGEQWNPSDLYKIDMPVALVEKQKAKAIKQAKKLLQREGILPPDEPLAS

SEQ ID NO: 441138 - protein, 403 aa, unidentified
MDAARDVVVIGVDPHKRSVTIEARDAREVLRATGWFPTTTTGYRAMLRYCRQWPRRVWAVEGAGGVGRPLAQRLLAEGERVLDVPAKLSARVRVLDKGQGRKTDATDAHAVVMAALRDRNQLRELSLTEDLVVLRLLADRRDELSRSRAQGLNRLHRLMTELVPGGIPVKKSVPQYQTILAGVRPREPIGRTVRRLAADQLADLVRLDVRLKALKAELKQAVLASGSHLMDLHGIGPAGAARILADVGDVRRFPDRNHFASWTGTAPLDASSGAQIRHRLSRAGNRRMNHVLYIAAFVQLRHDTPGRAYYRRKLAAGKTPMEAMRCLKRRLSDAVYRQLRTDSQPNDPAVEAGSGGHSGATLPSSAADLTPHIGTSDQPQPEPAPTTLPGPRPTRHPSLTPRS

SEQ ID NO: 441139 - protein, 583 aa, unidentified
MSTDMPLDRLGVGIDTARYGHRVSFLRPDRQPAAKPLTVLESRAGYVALQERLEQLHQQHPQAHFHVRIDAAGQYAANLEHFLRGLDLPMTLSIGEPKRNKDYQKAHFPKRTTDDTESQAMARFAVVELPAATPPSSPAMALLHEVAGRLQAKVKQSTQAINRLHNLLARVFPELANLTDDIAVSWVLRLLDKYPTAQDIAQARRAALQRIPYLSAELAQQVQLAAQQSIASLRGEVAATLIRDLVAQVRHSQKAERQIRQLLSQAYADLPPSGHNQLITIPGIGTATAAVLAAKVIDIDRFSTPERFVGYFGVFPEENRSGVDKHGKPLPPGTMCMSRKGNNLVRYYLWNAARAALRCNPAVRALYRRLRAKGKRGDVALGHCMCKLLHLVYAVWKTNCPFDPKHFDWEQTGDMPMSVTPPAADGPSASNDKAVGHKRDVPARKVVTTAAATVAPGPAPVKPKSPPARPRCGKVDFTFLREQVTMTQVLEHLGLLGNLRGRGQQRRGPCPIHGRPNDPAPTFSAHLGKNIFQCFHADCGAHGNVLDLWAALHHLPLYDAALQLAETFHLRRNREEEPVSGIR

SEQ ID NO: 441140 - protein, 338 aa, unidentified
MKTYAGIDLHSSNNFIGVIDAKDTRIYSKRHDNRIEDVLKVLGQFKSSLQGIVVESTYNWYWLVDGLMDQGYRVHLANPNAIQSYNGLKHTDDKWDSFWLAHLLRLGILPGGYIYPKNQRPLRDLLRRRLMFVGQRTSQILSLQSMITRNRGLNFSGAQIKRFRDEFIEKLFSDRHLVFTAQRNIETIRFLDRIAGEIEQEAASQIKIKKEFIKLLTTPGIGNILGLTIMLEVGNIGRFAKAGNYSSYCRCVESKKTSNGKKKGENNKKNGNRYLAWAYVEAANHAIRCCPKAQKFFQRKLAKSERVLATKALANKLTKATYYIMRDQVAFDEDKLFG

SEQ ID NO: 441141 - protein, 320 aa, unidentified
MAAVLGLDISKAKINLALRTDDGKLRRKVCRNDASGFRDLVAWIDRYTARPLHACLEATGTYGDGVALFLHEAGCTVSVVNPAAIHAYAASQLTRAKTDAVDAALIADFACTQRPPAWTPPAPEIRALQALVRRLDALLEMRTQEANRLAAGVVVAEVRASIDAVLASLDAQIAHVRHLIRDHIDRHPGLRQRRDLLTSIPGIGDTTAATLLAELFDKPYTSARQAAAFAGLVPRLQQSGQWRGRARLSKLGSGRLRKALYFPAITALRCNPSMRATAARLAAAGKPKMVIIGAVMRRLIHLAFGVLKTRRAYEPELARP

SEQ ID NO: 441142 - protein, 342 aa, unidentified
MIEPEPNLPRSVVGGVDTHKELHVAAVVDERDQLVESRSFPTTRQGYRRMLAWMRSFGQLERVGLEAGGSYGAGLLRHLETAGVEVLEVTAPDKADRRRRGKNDDLDAEAAAHAAFARKRVVTPKSRDGMIEALRVLKACRKTAVAARRTALRKKTRMQLVRMLAATRPDLTDCRSILSAYRIALKSLARRYLELHDEIADLDDMIAAIVLQLAPELVAADGIGHGSAAQLLLTAGDNPERLRSEASFAALCGVSPIPASSGKVTRHRLNRGGDRAANSALHMIAIVRLRTDPRTKAYVARRIADGHSKLEAIRCLKRYIAREVFTLLRKRQREINQTQFAA

SEQ ID NO: 441143 - protein, 404 aa, unidentified
MSVHAAPVTSSTIVVAVDVGKTSAMFSATDSVRQRVLGPIEFAMTRSGLVTLVHRVSAVIPPGAQVKVGIEAAGHYHRPVLDYRWPTGWEVLEFNPAHVAEQRRVAGRRRVKTDAIDLEAITELVLAGRGQPITEREVRIGELAAWATHRSRRVATRTATKNQLLGQLDRAFPGLTRALPDVLGTKIGRLVAAEFADPARLSALGVTRLIRFAAARDIQLYRAVAERLVAAAADALPTRDGVVARRVLAADLGLLGDLDTQIENAECELAALLPASPYATLTSVPGWGVVRVSNYAAALGDPDRWPGPRQIYRASGLSPMQYESAGKRRDGTISREGSVALRRAVMDLGIGLWLSDPAAKAYAAELKSRGKPGGIIGCALAHRATRIAYALVRDHATYNPSRWA

SEQ ID NO: 441144 - protein, 357 aa, unidentified
MGEGSWVGLDVHARSVVAVVLDGVSGELRSLRAPVVGDETVVWLLQLPAPVRVAYEAGPTGYGLARACAAAGIACVVAAPSKIPRAPGDRVKTDRRDAERLARLLRLGELVAVRVPEPQVEAARDLVRAREDARGDLMRARQRLSKLLLRHGLVYDASAWTLAHDAWLRRQRFERRPLALAFDESYGAVLQAKTRRDALDRAIAELASEPPFAEVVARLVCLRGVSTLTALALTVELGDWSRFRPQSLGPFLGLTPSEDSTGERRRLGAITKTGNSHARRLLVEAAWHQRRPLRASVALERRRQGQPAAVRARADASGRRLHARWEALEGRGKRRTIVAVAVARELAGHCWALATMA

SEQ ID NO: 441145 - protein, 350 aa, unidentified
MNIVGAFDVHRKQITFDYVEIETGESHRGEIRPADREHLRSWLEEFAERFCGREAAFALEATTGWRYVVEELQRAGCEAHLAEPADTRALQGRKKRAKTDRIDAKHLRDLLVIERLPESWVPPEHVQEIRTLMRMRHSMVEERSAYLQRIHAQLFHNGCPRQEKELLCAEGREHLQKLDLPGAAPQVVGVCLKMVEHINEELAPIEAELRAYARAQSGCRALMNHYGVGELTSVALLSELGDTRRFSSSKKAVRFAGLDVTVHSSDEKRAAGKLSRQGPPVLRWAAYEAAKGAYRKGSPDHEYYLQTRERVGTNRAALSIARKLIRRAHHTLRELGEEAMSEPVALSSTL

SEQ ID NO: 441146 - protein, 354 aa, unidentified
MKRTTKYVALDVHQATTSASVREESGRVIARSVLPTDGAAITEFVRGMRGAVHVALEEGTQAQWLHDLLAPLVDRVVVCDRRGAPRQGNKADQVDADQLSEQLRRGGLRAVYHGSVDRTTLKELTRTYRNLVEDATRVMLRLKALFRARGIPASGKRVYHPRARAQWLAQLQNPGARLRAEALYAELDVLRTLRPRAKAAMVTEARRDPAWPVLRTIPFFGSVRVALLLATMQTPWRFRTKRNLWAYAGLAVVTRSSADYALVAGQAVRRQRPPLTRGLNRNHNRVLKDVFKGAATAATARPGPLQDFYHSVIARGTREELARLTLTRKLAALTLRLWKKGERYDPTKLTTPAR

SEQ ID NO: 441147 - protein, 355 aa, unidentified
MVTGLKHQKEKRSMDHFAGLDVSVKETSVCIVDETGKIVREVKLASEPDALVAVLANPAYHFKRIGLEAGPLSQWLYSALAEAGLPVICVETRHMRALLKAQINKTDRNDARGMAQMMRAGLYRLVHVKTLRSQKLRMLLTHRKLLQSKAIAIDNDLRGTLRNFGLKVGVVGAMKFEARIKELVENFPDLAVMVEPLLIVRRVLREQIGILHRRLLAVVRDDEVCRRLMTVPGVGPVVALTYRATVDVPARFRKSKSVGAVFGLTCAKYQSGEIDRSGAISRCGDEMMRVMLYEAAQSMLRSTKWSWLKAWAMQIARRRGMKKAIVALARRLAVIMHRIWVDGTEFRWTREVTVA

SEQ ID NO: 441148 - protein, 405 aa, unidentified
MNAVGIDVSKGKSTVTIRKPGDVVLMSPCDIPHTQSAINDLIKQIKSLEGETKVCMEHTGRYYEPVATWLSDAGIFVSAVNPILIRDFGDDSLRTPKTDKADSKKIARYTLDRWAKLKQYGIMDKTRNQLKTMNRQFGFYMAQKTAMKNNLIALIDQVYPGANDFFDSPARNDGSQKWVDFIHTYWHVDCVRSKSLNAFTEHYQNWCKRKNYNFSAEKAAKIYQISSDLISVFPKNDITKMLIWQAVALLNTASKTVESLRSKMNELASTLPEYPVVMDMNGVGATLGPQLIAEIGDVSRFTHREALTAFAGVDPGKNDSGKHIQNSVRTSKKGSPYLRKALFQIMDSLIKRSPVDDPVYAFMDKKRSEGKPYYVYMTAGANKFLRIYYGRVREYLSNLSNNEII

SEQ ID NO: 441149 - protein, 264 aa, unidentified
MTIGIDLGDVWSHYCKLNRDGEVVDRGRFRTTPKAIEKRFTDVPSARVAMEAGTHSIWISEQLQEFGHEVIVANVRELRAISHSDRTSDQVDAEKLARYARLDPEILRPIAHRTVEQQGALTLIRARNLIVRLRAAAVNAIRGLTKSCGHRMPASTTGTIAKRSLSVMPPGLAQALGPVLEQIAQMTLKIKGYDRQIQQLGQTEYPETQALLKVHGVGPLTATTFVLTLGSKERFKQSRDVGCYLGLRPKRSQSGDRDPQLGIT

SEQ ID NO: 441150 - protein, 321 aa, unidentified
MTSQTESPRFGIDVSKRWLDIAEYGRSPVLHIDNTAPAIRSWLRTLPPSACHIACESTGTYHRALVELLIGAGHRVYLIDGYTLSRYRDTLGQRAKTDRHDAGLIARYLAHEGARLRPFSLPPRAVTDLRALLRRRATLVRCLGRMRQSMEELPGFARQVRAVTERIQALIKRLEQRIAALIGTSGWEDPYRRILKVEGIGALTAAGLCATLHRAPFCRADAFIAFLGLDVTVRQSGTQRARGVLSKKGDAEMRRLLYNAAMAASRSSTWQPFYQRMLQRGFSRTQALVALARKLARVAFSLMKNASDYVPQQHENACART

SEQ ID NO: 441151 - protein, 408 aa, unidentified
MEVLHQRCAGLDVHKATVVGCLRVQERGRVRHEVRRWGTTTAELLALGDWLRQAGCTHVAMEATGVYWKPVWHILEGELDLLLANPAHIRNVPGRKSDVNDATWIADLLAHGLIRASLVPPGPIQELRDLTRTRKQLMREIGQHKQRIQKVLEDANVKLASVVSDVFGESGRRMLKALSAGETDPAQLAALRDGRLTASRETLAAALQGKVTAHHRFLLSQHLGTIAHLEQTVAAFERQIEAVVAPFNPAVACLVTIPGISLTAAHVIIAEIGVDMSRFATAAHLRSWAGLCPQLNESAGKVMSRRLRHGAPWLKTVLVQCAWAATRNKNNYLHAQFVRLRARRGPQKAIIAVAASILTTAYYLLRDQVAYRDLGSLYFARMDKERTAQRLARRIKELGYEVEIRKAA

SEQ ID NO: 441152 - protein, 335 aa, unidentified
MKEITTVGVDLAKSVFTVHGVDAMGRVVLRKTVRRAQLVELIAGLPPCLIGMEACGGAHEWGRKFQLCGHRVGIMMARFVAPYRKSSKNDGNDAEAICEAVARPNMRFVPVKSAEQQAILSLHRVRQGFIEQRTATINRIRGLLAEFGVVLPQRAEQVRRAAVVMAEGLPVLAREAIADLRAHLTYLDERVTHYERQLVSLARQREAAVRIQRLPGVGPLTASAITASISDGHEFANGRQFAAWLGLVPRQYSTGGKARLGRITKRGDPYLRTLLMLGARAVLQNAAPKTDRLSRWALALRARRGYHRAIIAVAAKNARIIWALLAKNREFVLPA

SEQ ID NO: 441153 - protein, 425 aa, unidentified
MPDTTSYAGWIGLDWSSKEHVFCIHNAATNHESIRHIPDKADDLLSFFAELRALFSNHPLLLGLEATRASIMPILLQQDFLRIILINPKTAANFRTMFRLSGVKSDALDATYLCRLIRTHPEEFRICQAHDPQTRQLAALTEKRRSLVEWRVQIANRLRASVACAFPQILELLHCQLTVPIAAHFLNRWPTVQKAQAAGAAKLRAFFYKNNVRTSKTLEARLSAFLQTNTLLRHTEDNFPFELEIQVLAKQLLQLHRSIDQFDEHIARCYAVHPVAKILAEVPGAGPQLKPRLAACLGTHRERFASAQELSSYTGIAPVHKSSGKKICVVARHIRPLFLHQTWIEFANCSIRQPGWARAFYETKRDGGLAHYEAVRAVAFKWTRVIFACWKADQPYEAATYLASLRIKNPAIAARIKALLPLVNN

SEQ ID NO: 441154 - protein, 322 aa, unidentified
MRYIGIDVSKATFVVAYSSDKGGEIRTFNNTTTGIKQFIGALPKDGSIHCVMEATGNYSAMLLYLLNVAGIAVSMENPLKIKNFARAMLSTVKTDKIDARLIALYGEKMNPQPFKIQGEAILRLRQKRTVIRQLTKQITAMSNLRGSLACLPVPDKGATHTVDETIEFLEKRRDRLQSELTDLVEVEFSRQLALLTTIKGIGITLATALIITTGDFTYFQNAKQVSRYLGICPTYEQSGTSVNIRGHINRNGDAYTRGLLYVAAWTASRFNAKCGETYTRLRQNGKPGKLAMIAVANKLIRQAFAVVAHDKEYVDGFVSNRP

SEQ ID NO: 441155 - protein, 330 aa, unidentified
MTTNPPRSAFTHIVAFEVSKDELVVHTLPVDEQCTIDNRPVSVRRLIRAEIKRNKKDRLGQMLVICEATGGYECHVLDVALEMGVAVQRAHGARVRHFGRYRGLLAKTDPIDARLLAQYGLKTENIRLYTPPPPETVALRALHARRTEIQQMIIAETGRLDHARHKSVLKSLKAHIASLEAAFATIEAEIAQLVEENETLGKKVALMRTVIGIGPVSAMILLAHLPDIGRLTKGQVARLAGLAPINDDSGKKRGARHVEAGRTAIRRALYMAAGVAMRTNPVLKAFADRLRGKGYPFKYVVTAVMRKLVVILNAILRDGQPWKGAQTACG

SEQ ID NO: 441156 - protein, 431 aa, unidentified
MSERDYSKQVARRQRIRSTSLVVGVDVGKAYNAVGFMNKEGKVLGSCAKVDNSREGFEQFLKMVEDLKTRYGLKDVLVGMEPTGHYWRKLAYYAKEHGYEVRFIRTTALKHHRELDESASAKSDQRDALTITNITREGKYIDTVIEDGPLRQLRALGKARERLLRYSVSAKNSLHAALDDYFPELHELFWSMGSRSLWAILDRCPFPEDVRSIKVSTLRRLIVQSSRRKAGAIQKARALSQAATQSIGLRQIGRADRYRVQMCLEEVKRTVRTLKSMDQQMKNMLQEIPAAPYLLSIPGIGTLSAAVFLGELGDPGHFQNARQIVKYAGYDPQESDSGSWVSRKFISKKGRWLMRKYLFFMSMRVVVLTNYFKTYYERKLETKNRVGQLPRRKEILCAVAIKLIKVIFALLRDKRRFEDTRGTVMALSQAA

SEQ ID NO: 441157 - protein, 409 aa, unidentified
MSEATPDVVYVGLDWAATVHAVCVMSAAGKVLAQFTIEHTADGIASLIRRLVKYGDPEVVQVGIERPNGRLVDLLLEAGHPVIPVSPNAIKTWREGEVVSGAKSDAADAIVIAEYLRLRHHRLHPVQPYSAETKALRTVVRTRDDIVEMRVAATNQLSSLLDDHWPGAKEIFADVESPISLAFLRRYPTAAAAKHLGEKRLAAFLTKNGYSGRRPASQLLARLRSAPAGTTNPVLTEAVHDAVLAQVTVLEALNTAGKQLDRSVVAHLEEHPDAEVFTSLPRSGQINAAQVLAEWGDSRAAYDDPDAVAALAGVTPVTKASGKQHAVHFRWACNKRFRRAITTFADNSRHASPWATHIYAQARARGHDHPHAVRILARAWTRVIYRCWHDHQPYNPNLHRGAQRLPNAA

SEQ ID NO: 441158 - protein, 343 aa, unidentified
MGEVSTIGLDIAKSVFQVHGADGTGAVVMRKRVSRSKVLEFFAGLSPCLVGIEACPSAHYWSRELQALGHTVKLMPPSYVKAYLKRSKNDANDAAAICEAVTRPSMRFVPIKTQEQQTGLMLHRTRQLLVRQRTMLSNAIRGHMAEFGIISAKGRNGTAELLQIIGNVSDDRIPPVARFCLELLARQYLTLNAEVSSIDKRIHAWHRSCEQSRRLEQIPGIGPIVATALVAEIGDWRAFRSGRSLAAWIGLVPTQHSTGGKERLGSITKQGNRYLRWLLVAGAMAVIRYARAHGTKRPWLTRIIDRRPAKVAAVALANKIARMAWAIMVRGERYTEPKPLLAA

SEQ ID NO: 441159 - protein, 340 aa, unidentified
MPLYGGIDLHANNSVVVLLNDQDQVIYQKRLPNHLPTILEPLSLHHREIEGVVVESTYNWYWLVDGLMEAGYRVHLAHPAAMQQYNGLKYTDDRSDARWLAHLLRLGVLPEGYIYPKAERAVRDVLRKRAHLVRQHTANVLSVQNIMARNTGARFSGKRIQELTKQELTTLLADETQVLAVTSSLVVLDCLRQQIKTLEKTVHKHLHRTPSYEQLLTVQGIGPILAQTITLETGAISRFPCVGHYASYCRCVDSTKISNGKRKGTGNVKNGNPYLAWAYMEAAQFALRFNARAQRFYQRKLAKTNNNTILARKAVAHKLARACYYIMRDLVPFDAMKAFG

SEQ ID NO: 441160 - protein, 318 aa, unidentified
MNTKMNQSINVGVDTGKFQLDIYIRPLGIYFTVTNDEKGIKEAVNTIKKHKPERIVIEATGRLEMPFIIACAKANLPFVIANPVHIKRFAGAIGQRAKTDKLDAQLIAHYGEAIKPKLSTLKPDIMQSMSDLVARRNQLLVMQTMEKNRMQILPQHLAMTIKPVLTVFKNQIEKIENKIVSLIESCPDYQAKNIILQSMKGIGKIASASIISNLPELGYISSKQASALVGVAPMNRESGRYKGHRKIQGGRHQVRTVLYMAMMSAIQSNPVFKETYQRLVAAGKPKKVAIIACIRKMVVILNSMLRDGVMWEAPKAIN

SEQ ID NO: 441161 - protein, 412 aa, unidentified
MEVFCGIDWAEDHHDIALADRDGTLLAGRRISDDAAGLAQLLELLAGHGDTAEDPVPVAIETPRGLLTACLRATGRKVYPINPMAVARYRDRHSVAGRKSDHGDAFVLANVLRTDLHAHRPLPDDSELAQAIAVLARAQQDAVWARTAAHNKLRSHLREYFPGFLAAFADARGGIMRPGARAILAAAPTPAAAAALTLTQLRGLLKEAGRSRGIDTEATRLRDAFRVRQMRQLPLVEDAMGRQALALLGQLDAACTAADDLEQAVTGSFNQHPDAGIITSFPGLGPLTGARVLAEIGDDRSRFADAKGLKACAGAAPITRASGKTRSVTRRHIKNNRLNAAGYSWAFSALTASPGARGHYDRRRDAGDRHAAAQRNLFGRLLGCLHHCLITGQHYNENIAFPENPKKLPQAA

SEQ ID NO: 441162 - protein, 341 aa, unidentified
MERYFVDLDVSKDETAICVRREDGRVVRSGKAPTDPEEICAALKGLKKGLVRVVLETGRMSNWLYGELERRGLPAICVDARQAHAVLSQMHNKTDANDAAMLADLARTGFFRKVEVKSQRGQELRALLTAREAAIGARRNVENTIRGLLASFGVRLPKEPRNYDARIRCVLEGNDGLARIILPLLTLRTEALRQAASLTKELVRRTRERDECMRLMTIPGVGTVTAAAFVATIDTPERFLRSRSVGAYAGLTSRRYQSDAVDYGGRISKRGDRLLRTMLYEAANSLLCRVKPGVGQELKDWATALKQRTNHKTAVVALARKLAVMMHAIWISGATFKPREA

SEQ ID NO: 441163 - protein, 387 aa, unidentified
MIYYIGIDISKYKHDFCIISNTGEVIVENSSFENNKKGFQALLEKLKPYNKSDVHIAFEATGHYSKNLELFLIDQGYSFMKMNNLVIHQFLKARSLRRTKTDKADSLTIASYLMSVPYKPNSDLLYNIFTLKSLCRSREQLIKERSKYQVLLTNHLDLTFPELKPFLNNRISATLLFILEKYTNIDRISLMRDYDSIKNISRGKFSYAKFAKLKELAKNSIGHHDENTDLLISTYVSIIKTFNSKIDPIEKQISTIIKELNPRMLTIPGLGEISAAAILSEYGDISNFSSPNKMLAFAGLEPSIIQSGTIENNGKMVKHGSGHLRYSIMNTAMIILRYSPTFYDYYHKKRSEGKCHRVALSHVCKKLLRVIYTLEKNNIDFYPSLLK

SEQ ID NO: 441164 - protein, 394 aa, unidentified
MKLVGIDVGKNSHHFCVMDKETGELNVTPSSFSNNKEGFDFLINSLKPYSKKSILLGMEDTGHYHVALLKFLLSNGYTVALINPKTTDLTRKMEGGITKNDKLDTITICDVLDTPERKKQYRITKVDRFDLYEQRQLTRHHHNLKEELNVYCNRLQKSIDLVFPEFNTLFGSKYGVVYMNLLKTFGSAEAIASTDIRTIRKFFEIKGKGNRISLTPEKLKECAKNSIGISSEVETIQIKHLVSQITLIKEQIAEIDKKIEEFSITNNSPILSIPGISHFSGTSILAELGDIGNYSKPSQIIKFAGVAPYHYESSQYNAQHTAITKKGSKYLRKTLYQIILPVINNNPVFKKYYLLKISQGKGHRCAQGHCIRKLLRIIYHLLETGQSFDPALLR

SEQ ID NO: 441165 - protein, 354 aa, unidentified
MEKITTVGLDLAEQVMVAHGVGADGRMVLRKALRRDQLLGWSAGLSPCVIAMEACGGAHHWERELTRQGHTVRIIAAEFVKPFRKNGKNDANDAAAICTAVRQTNLRFVAIKSVEQQAALCVHRLRQGLVEERTALINRLRGLLTEFGVLAPLSPEKLRWELAHCQDPEDLRLPAAVRQLVGEQVAALDQLEARLATYAEQIAAQAKQGDVAKRLQSIAGVGPTTAAAMVATVGTPQEFRNGRQFAAWLGLTPKQHSTGGKTRLGRITKRGDAYLRTLLILGAKSALQAAPRKPPAIRHRLRQWVVAVFGRIGYHKTLVAIANKHARIIWALLVKGEEFDVQRLAPEEVVAVAA

SEQ ID NO: 441166 - protein, 341 aa, unidentified
MKKFIRVGVDLAKNYFQIHALASEGAPAVTRKLKRSKMHEFFSQIEPCLVGMEACGSAHYWARELKGMGHEVLLMPPAYTKPYVKRGKNDAVDADAICEAMSRPGMRFVPIKSAEQQATLMLHKTRELLIKQRTMSVNALRGHLSEFGIVAAKGIGRVDELLDLAESDATLPAAAKMAMRVLAQALEGLDKAIDDLEKEISSAQAQNEMSRLLDKVPGIGKLIASVIAACVPDPSVFKSGRDFAAWLGLTPRQNSSGGKPTLGAITKQGNRYIRKLLVLGATSLLNVVGKRKGALRDWIFGLLAKKPARLVTVALANKLARILWAMMKTGECFRTEMFAKA

SEQ ID NO: 441167 - protein, 412 aa, unidentified
MPRWVGRAIGLDVHREFCEVAICEDGRTRSAGRVSATPEGIAVLARSLLPSDRVALEVTGSCWEVARILEPRVNRVVVVSPDDTGITSARAKTDKLDARALASLLWKGELEAVWMPDERCRVLRRRLARRGQLMRARTRSKNEIHAALQRRLQPKPPCSDLFGVKGRAWLSSLELPLEERESVDAGMRHIEFLDAEIAAVEKLIAKQALSWPEIRRLMTVPGVNLICAASFIAAVGNPNRFLTSRKLVAYLGLDPRVKQSGEGPARSGRISKRGSPSARWALVEAAWTAVLQPGPLHAFYVRTRNRRGHGKAIVATARKLAVLFWCMLTRGEDYAHQQPSLTRKKLRRLEITAGAPKYTRRAAGIWSTNDLMREAELELARQAETSYLRLVQDQLAGAPAKKAGASVTLERA

SEQ ID NO: 441168 - protein, 413 aa, unidentified
MRERLEYLFVGVDPHKQQHTAVAMNFFREKVCEVTFANKPAAFPQMVKEIHKHAAKGNYTAIIFGLEDTTNYGRKLTVYLKEQKFIVKEVSSKLSSAKRKSHNTVKKSDAWDAECIAAVLMEEYDRLPAANPIDHVWAVKQLLSRRTSSMKGLAFSIRKLHAQLGHHYPTYKKFFSELDGKTSLGFFHRYPSPRHLAGMSVEELTHFLQKLSNYACSTKKAEQILSLVQTDGQLENDFQDERDFIVRSLVKEIRFHKREIAQVEQEIKPLMEQLGYKLETLTGVELVTAACFVAEIGDIKRFASPHQLARYCGIAPVDVGSGGIVKQVKTSQGNRELHELFFQLACRQLALSRRYKEPRNPIFLAYYNKKQSEGKTKGQANVCIMRKLVNIVYKMMKNKTEYVLPAIPKENAV

SEQ ID NO: 441169 - protein, 433 aa, unidentified
MQDVEDEPLFAERVAGLDIAKAGVEATIRVPSDTTAGRRQQETRTCGTTRAEREPLGDWLRSWGVTKIGMEATSTYWKPVFFLLESRGFDCQLYNAAQVKALPGRPKTDRADSIWLARITERGSVRSSFVPPEPIRRLRTHTRYRRHLTQARTAEKQRVEKLLEDGHLKLSSVISHIHGVSGRDMLNALVAGQRDPKALAQLARGTMRGKIRRLEQALDCSFFTAEHAAVLAMMLATIDHYTAQIEALTARIEAIIEPWMHQVDQLDAVHGIGPVCAQDIIAEIGTTMTAFPTAAHLVSWARWSPQVKQSAGRRTGSNATGRGNPYLSAALGEAAVGAGRTQSFLGARYRRMVRRMPKKKALVATGNSMLTIVHALLADPEASYQDLGADYHEQRMHTRRQARNHVRSLERLGFKVTIQALNPGTGELLAPAG

SEQ ID NO: 441170 - protein, 410 aa, unidentified
MELLHRRCCGLDVHKETVVACLRLVSDGKVTTEVRTFQTTTADLLRLSEWLAANECTHVAMEATGVYWKPVWHILDDGEFALVLANAAHVKNVPGRKTDVNDAMWLAELLAHGLIRASFVPDTQTQEMRNLLRTRKQLVREQSSHVLRVQKTLEDANIKLDSVLTDLMGKSGRAMMEALIAGETNPTKLASLADPRVKASHEEFREALRGRVTKHHRFLLRLHLNQIDALDAAMATLDAQVEANLGPFRTAVDLIMSIPGIKNLSAHVIISEIGIDMSRFPSDAHLISWAGVCPGNDESAGKRRSNRLRKGAPWLKTTLVQCAWAAVKKKNSYLQAQFYRIKVRRGPKKAIMAVAASILTAIYHMLKDGTMYQDLGCNHFDRRSTDQQKNRLVKRLTDLGYAVEIKPLAA

SEQ ID NO: 441171 - protein, 386 aa, unidentified
MLVAADRPAAPAAIRTDLGAIFVSLELSKSTWLVTSLSPGSGERMSKHAVRGGDVAGLLARLSHLQDKAQARTGQRFAPIVIQEAGLDGFWVHRALEQEGIESHVVDAASIATSRRRRRAKTDKIDGEALVRALLAYKRGEPRVCAMVRVPSVQEEDRRRICRERKVLIGERTCHVNRIKGLLFAQGITDYNPLRRDRRRRLEELKTGDSRALPDRLKAQIRRELDRLELLLAQIKDLEAERDALLATEVADSPATTLLDLKGIGPDFATVLYAEGLFRHFDNRRQVAAYAGLAPTPWQSGSVRHEQGVSKAGNPRLRTTMVELAWLWLRHQPGSALAHWFQERVRRNGGRLRKSTVVALARKLLVALWKYVTAGVVIEGAVMKAA

SEQ ID NO: 441172 - protein, 353 aa, unidentified
MNSLTDLREVVDVVIGVDTHVHTHSAAVVDTATGGVLGEITVEATAEGYAELVEFANNHAMLRAWAIEGTGGHGAGLSRHLLEFSEIVIELDRPKRAARRNGAKSDPLDAIRAAREAIARPQLGTPRSGGERQALSVLLAARRSAINASTEAQQQVFSLVIAAPEPIRARFRGQKLAAMLNTAANLRVHASWDVETASTVVALRSLARRAHAMLKEAREHQKAMVVIIRGWRPDLLEEFGVGPIVAATVLCAWSHPGRIHSEAAFAMLAGVAPIPANSGQVTTRYRLNRYGDRQLNRALHTVVQIRIQYQPDTRDYVARRTAEGKTSREIKRCLTRYVARDLYRLLESGAAAA

SEQ ID NO: 441173 - protein, 458 aa, unidentified
MSKKSSKKAKSQRSRERALLNKVHLNAAGIDVGADTHWVAVPEDRDQRPVRNFGVFTSDLIALCQWLKACQIQSVAMESTGVYWIPLFQMLEREGFEVQLVNAKHVKNVPGRKTDVKDCQWLQQLHTFGMLGGSFRPQAQMCVVRSYLRLRDTLSKDCNSLVQRMQKALTEMNIQVHRVISDITGLTGMSILRAILAGERDCIKLAQLKHPQIKSSTQQIAKALEGDYCQEHLFALQTALELYDNYQLKIMECDKRVEEAMGVFEAKVQVAAPDLSRLRSAQKRQEALRRHHLEQMTGADLTKLPGLDLLAVQRILSEVALDMSRWPSEKHFCAWLNVAPNNRISGGKILSSKPRKNANRAAAALRLAAQSAMQSKTAIGAFIRRMKVRLGAPTAINAGAHKLARLLYRMLKFGKAYVETGQEAYERLFKERTIRNLQRKARELGFHLTPATPGALVS

SEQ ID NO: 441174 - protein, 297 aa, unidentified
MAKSHLDIALCGERWRVANTQTGIGGLVERLKAAAPKKLQVICEASGGYEQALLGALAEAAVPVTLVQANRVRQFARACGILAKTDRIEAVVLASFGQALKPLPSPAPPLHLLRLRELDRQRCHLSRLLVAEQNRLAQLRCAQLRRLARSLIGKVQKQIASIDQRIASLIEQDQTLSAKAKKLTSFTGVGTRTAALLLAQMPELGRLNRRQVAALAGVAPYNRDSGSMRGKRCIFGGRRALRSGLYMAALAAARRNHFLAPFYQRLLAAGKPPKLALTAVMRKLLIALNTALSPYPA

SEQ ID NO: 441175 - protein, 342 aa, unidentified
MQVTTIGLDIAKNVFQVHGIDAAEKVVVRKQLRRSQMLAFFKALPPCLIGMEACATAHYWARELTKLGHTVRLMPARDVKAYVKRNKNDSADAEAICEAVRRPTVRSVQVKSAEQQSQLMLHRARDLLMRQRTQVINALRAHLAELGITAAQGTAGLKELLKVIAKGEDERLPVDAHASLVVLAAELQAMQTLIGSLEKRIMAQHKKSEASRRLQTIPGIGFIGATVIAATVTDPKSFRSGRDFAAWIGLVPRQDSTGGKQKLGPISKQGDRYLRRILVVGAHAVLKLAKQHPEKYPWLTQLLARKPFKVVAVALANKMARTAWALLAYGGKYRRPALVAAQ

SEQ ID NO: 441176 - protein, 276 aa, unidentified
MSQKLNARIAIVGIDIGKNSFHVVGLDQRGAIVLRQKWSRGQVEARFADMPPCLIGMEACVGAHYLSRKLKAFGHDARLMPAKYVRPYSQGQKNDFRDAEAIAEAVQRPTMKFVATKTAEQLDLQALHRVRERLVSQRTGIINQIRAFLLERGVPVRQGLRFLRAELPRVLAAPPEVLSARMVRVISDLAEDWRRLDERINHLSSEIAVLAQQDAGCERLMSVPGIGPIISSAMVAAIGTGDAFSRGRDFAAWLGLVPKQSSTGDPHYPRQNIEAR

SEQ ID NO: 441177 - protein, 435 aa, unidentified
MEEVEDEPLFCDRVAGIDIGKAVVMVTVRVPSEARKGGRQQETREFGTTRRELLALADWLRCWQVERAGMESTSDYWKPVYFLLEREGFDCTLYQASQVKALPGRPKTDKLDSVWLAKVTERGSLAGSFVPPEEIRRLRTHTRYRRKLVQMRTAQKERCEKLLEDAHLKLSSVISDIHGVSGRDMLGAIAAGERNPKVLADKARGVMRGKIKKLEEALDCSFFTGEHAFILTMMLDSIDQLTAQIEILDQKIAEMCEPYERQIAQLDGIPGFGVTTAQDLIAETGTDMSVFPTAGHLASWARQTPRVTESAGKRKGKNATGRGNPYIGGTLGEASISVGRTQTFLGARYRRLCTHMPKKKAQVAIMRTQLVIAHALLSDPAAEYEDLGPGYYERKADIRRRARSHARALERLGYKVTIEAIDPDTGELLPVITDR

SEQ ID NO: 441178 - protein, 418 aa, unidentified
MTQELDSTFIQIIHPVCCGLDVHKDKISACLISIGQEGEEIHELREFETFTGSLYEMRNWLIAHNCPVVAMESTGVYWRPVHNVLEATMTVYLVNARHIKNVPGRKTDLSDSKWLAGLLRHGLLKGSFIPPDNIREIRELTRLIKIYTESTADYKRRIHKLFITANIKIDSVVSDLFGKTGRNLINILCTKTDITIDDIKANAFGSLKSKVKELHASIQGFFKEHHRFQLIGMMKTIATFEEQIEQINKRVDNLTQEHEDLLNRLDAIPGIDKKSAQAIIGEIGITLEEFACVAAFVSWAGLCPGNNESAGKRKNGRSPVRNHPLKTLLIQVAWAAIKAKGSYYKAKYYRLKAKRGAKKAIVAIAHRIGKAIYNIIKRGDNYIDLGEDFLNCSNQKKAIYNLKKKAEALGYNLVPCIA

SEQ ID NO: 441179 - protein, 390 aa, unidentified
MQPTQVQDVTRNDEVLAVSLELASKSWKVGLDDGRRKAPAVHGVDHAEPKGRLDEAMAVIEKTKKKWGLAPGVRVVVVYEAGQDGFWIQRALSERGYETLVVDPASIPVERRARRAKTDRLDAIRLVLALRAWLRGERDRMKVVRVPAVEAEGQRHLVRDRGTLQKEIGQHRDRMRKLLRTVGCWESIEGDLTGRLERGEVQGYGGSALPAALQERLVRECVRLKLVEEQLAKLEKTLPAQLPEAVRQRMVQLMQLKAVGPVGAQRLLLELFWRQFNNRREVGACVGLVPQPYDSGESRVDQGISKAGNRRVRALLIEMAWMWVRWQPHSELAHWFAQRTRGSGSNKRSKRIAIVAVARRLAILLWRYLKHGVLPEGVQLKPAKVTLKAA

SEQ ID NO: 441180 - protein, 343 aa, unidentified
MQTITTVGFDIAKSIFQVHGVDAEGKVILRRQLKRRYVLAFFEKLPPCLVGIEACASAHHWSRELQALGHTVRLMPPAYVKPYVKRHKNDATDAEAICEAVTRPNMRFVATKTPEQQSCLTLHRTRHLFIRQQTAVINAIRAHLAEFGIVAPVGRHGVEQLLGIAADVNDKRLPEVARACVTALGAQLRMLKKQILQFDRMITAWHRSNEASRRLDDIPGVGPALATALVASIADPKAFRSGRDFSAWIGLVPKQNSSGGKDRLGNISKRGDRYLRSLFTTGALAVIRYAKIHSTTHRPWLTALLTRRPTKVAAIALANKIARMAWAMMAKSECYKEPAALAA

SEQ ID NO: 441181 - protein, 354 aa, unidentified
MSVADSAELIVGVDTHLDTHTAAICDARGRAMAQLRVPATQAGYRELLAWADAVAAGRPAAWAVEGTRHYGLGLARYLAGCGQQVAEIDASRHVGKRRAGKSDAIDAVRAARELLARPHPAQMRADGDREALRLLMVDRDNAVQSAKTARAALASVLVTAPASLREQLRHLPRQRRAQECAALACPPGADRQARVLHQTLIRLGQRIALPAASAAELETQITALVEEMAPGLVAAEPGLGALSAARILLSWSHAGRIRSEAAFAMLSGTAPVPVSSGRTDRHRLNRLGDRQLNRALHVIAVTRMRYHPATLAYIQRRRAEGKTDKEIRRCIKRYLARHIYRTLSSQPNPVPQTT

SEQ ID NO: 441182 - protein, 423 aa, unidentified
MGRSIGLDVHRDFCEVAVADGGRARSAGRVATTPSRLKMLALSLLPEDRVVLEATGNALAVARILAPHCCEVVLAHAKQVRAISHARVKTDKIDACVLADLLAADLIPAVWVGDERVRTLRRVVSRRRGLVKRRTQIKNEISAVLHRNLKPRPPVSDLFGKKGRVWLAHQELPADERLTVDACLRQLDFIGQELAEIDNLIATEALDDPDICRLMTIPGVDVTTAATLVAVIGDIRRFPTPKQLVGYLGLHPRVRQSGSGPAHHGRISKEGSAAARHVLVEAAWMAARSPGPLRAFAMRTAARRGRHIATVAVARKLAVLAWHLLSRGEDYAFQRPSLVRRKLRALELKAGAPRTKPGPSRNPIWKSKAEQRERELAEQAEAAYQRLVSDWQQSRSRDGAGATPGRASQRPSKGKAARQATSP

SEQ ID NO: 441183 - protein, 340 aa, unidentified
MRQLYAGCDLHGNNNFIGIVDGEGKRVFKEKLSNDLSVVRDTLKPFQGDLVGIAVESTYNWYWIVDGLMEKGYKVHLANPSAIQQYSGLKHSDDKHDAFWLAEMLRLGILPEGYIYPREERPLRDLLRKRGHLVRLRTSLVNSLQNILSRNLGKRVNANDVKALREDRVSLLLEMNEDLALAGRVSKEAIDHLTRQIRKIEGVVEKRIKLKEEYRYLLTLHGVGKILSLTIMLETGPISRFATVGDYVSYCRKVPSQWTSNGKRKGSGNPKNGNKYLAWAYSEASEFARQFYPESRVYYNRKMQKSNAAVAHSALANKLSRAGYYVMRDQVAFRPEKLFG

SEQ ID NO: 441184 - protein, 356 aa, unidentified
MGQKWLMHCSQFKTKIMKKQTCFFLGIDVSKLWFDISLMAVINFQKQPMLTKRFDNTNEGLALLKKWLKAQKVTFDNDTLLVIENTGIYHRLLWKFFSENNIPIHIGNAAHIKRSFGIARGKNDKIDSQRLCSYAYKNDDELKATSALNPAFLNLKDLITSRTRLKTQLGANRTYLKELKSINDKATQKMMEKAYKMAITGLQKSVDEIEKQIAVIIQSDESINNNYKLLISVPGIGPVTAIYILCCTNNFAGKVSGKQLACYAGVAPFSDTSGTSLKGRSKVHKMANKELKSLLHMCALSTIKYYPEFRDYYDRKVNEGKHPNSVLNAICNKIVLRVVAVVNNQKEYVENYKKTA

SEQ ID NO: 441185 - protein, 430 aa, unidentified
MPKTMNNTSSSPAFAATIGLDWADKKHDLWIQAAGGGKPEHLVIQQTPESLHEWVAQLRQRFAHGRVAVAIETSRGAVISALGAYDFIVLFPINPQMLCSYREAFCVSGAKDDRTDAMLLEEYVRLHGAKLRPLEPDTELTRKLGRLVENRRGLVDERTRLVNQLHSLLKTYYPLTEVLFDDLTTPLAALFLLKWPDLAAVKKAGAATLRKFFYVHNCRSEKALKERLQAIEQAQPLTKDPALIDPAALKAQALAGMLKVLHQAIEQIEIMIEQTTDAHPDAALFRSFPSAGPAIAPRLLVAFGTNRDRFASAQEAQQFYGIAPVKRQSGQSKVIHMRHRCPKFARQTFHENASHVVRKAGWAKTCYEQQRARKKGHHAAVRSVAFKLMRIYFSCWKHRKCYDADLYEKALEKHGSPLARLLQNQAPASR

SEQ ID NO: 441186 - protein, 366 aa, unidentified
MASVSQLAPIHLGLDVHRDTISVAILVPDQQVPEVDRIPHDEASVRRLVGRLGNPRRLRACYEAGPTGFELARLLEGMGVGCQVIAPSLIPVAPGDRVKTDTRDCRRLARLHRAGELVAIRIPTIGEEAVRDLCRTRADMVTDRTRARHRLGKFLLRHGRIWRGGATAWTHAHERWLLGQQFDEPALTATYAHYRAVLLTRDAQLDAIEADLACWYTRPPFATQVARLAAYRGVTQLGALTLASEVGDWRRFPRAAAFMGFCGLVPSEYSSGQRTWRGRLTKAGNAHLRAQLVESAWSYQHRPAVGAQIARRQQDLDPQAVARAWAAQLRLCGRFRRLAARKTSKNLVVAAVARELAGFLWAEMTA

SEQ ID NO: 441187 - protein, 415 aa, unidentified
MEAIIARCAGLDIGKRQVQACVRTPDPDDPTGGRRVQTRTFLTFTAGLEQLADWLTNEQVTDVVMEATGQYWKPVWYALEDHAFTLMLVNAQHVKILPGRKTDVADAAWLAELLEHGLLRGSFVPEPEIRRLRDLTRYRKKLVQTRTSEAQRLGKHLEDAGIKLDSVASDLLGVSGRAMLAALVDGERDPAVLAELAKGRLRAKLPDLREALRGRFTDHHGFLVRVGLEHLAQLEHHIGELDERVEELIGPFARARDHLMTIPGIGTRAAANLIAEIGVDMTRFPTAAHLASWACMCPGNNITGGKRKTGTTRRGNPWIRDLLVESAWSASHTRDTYLRAQFWRLARRIGKKKAAVAVGHTILVIAWHLLSTDTDYHDLGADHYQHRHDNPRRARDRHIAELQQLGYHVTITPAA

SEQ ID NO: 441188 - protein, 432 aa, unidentified
MKFNQSNKQNQRISRISETTLVIGTDIAKHNHVARAFNYRGIELGKRCLFQNDEPGLLNLLAWAESIKQEHGLTDVLLGVEPTGHYWFPLFHFLKQHGIEVVLVNPHHVKKSKELDDNLPTKNDIKDAKVVAKLVIDGRYTQPQLPEGVYADLRVLMNQRDRLCGDLNRVKGRIHNWLDRFFPEYTQVFKDWEGKASLITLQNFPLPQDVIAAGETTIVATWKKNGVSRAVGPKRAELLDRKARKSIGLTEGATAARHELAMYLEQYAMLCRQIEQLMELVADLVEQIPGAAHMMSIPCIGLITVAGFLAEVGDLSGYDHSQQIVRHAGLSLRENSSGLHKGETTISKRGRCRLRALLFRAALTMVAKNPEFRALHMYFTTRRENPLKKKQSMIAICNKLIRVLFELGRKQKNYDASKVLGPHREAQLQAAA

SEQ ID NO: 441189 - protein, 324 aa, unidentified
MNKVIAAYVGIDVSKKTLDVTLLHEKSGKRRKRVANNTAGIQGLLNWLKKQTTGQIHICMESTSVYWEEVAEILYEAGYEVSVVNPVRIKGYAMSKLCRSKTDALDGDVIADFCEKQSPSLWEPPSDVEKKLRALVRHLEALKKSRIQQSNRLSTCKDDDVKNSLDTLLNTIDAEIKQVQKRIDDLIDQNPDLKEKKELLKSIPGFSDKTAIHILAEMYDLPAYENAKAAAADIGITTSHHESGTTVHRRPKISRMGKAALRAALYYPAITALRYNPAVQKLAKRLEARGKKKSVIRVAAMRKLMHIAYGVIKNKQPFDPAYTG

SEQ ID NO: 441190 - protein, 403 aa, unidentified
MTVRPQVWVGIDVGKASHHACAVDETGKVVWTQKLANQQRAVEQLIDRAHQTADQVRWAIDLTSPMALMLITVLLAAEQSVVYVPGKVVNTMTGTFRGEGKTDAKDARVIAETARLRSDLSAVTMPDELVVELTQLTGYRTDLMADWVRGINRLRALLGSIFPGLEAAFDYSNRTPLILVSALCTPAEIRAAGIEGVTAHLVDSHAWPTAITKTTATAVALASEQELALPGEAGTAALVKRLARKLLDLDREIKDIDKTITERFRDHPYARIIESLPGFGPGLGAEFLVITGGDLASFTTAGRLASYAGLVPVPRDSGRITGNLRRPKRYNRRLRRVFYLAALSSIRTNGPSRRFYDRKRGERLIHTQALLALARRLVDVLWALLRDGREFSPDGPTAASAVA

SEQ ID NO: 441191 - protein, 402 aa, unidentified
MNCVGIDVSKGKSMIAVMRPFGEVVVSPFEVLHTDSELSKLARLLKSLDGETRVVMESTGNYHAPVAWLLHDAGLYVSVVNAKLVHDYGNNSLRRGKTDKKDAVKLANYGLDHWITLPRYVPEEDTRLMLKSCYRQYQQYSKVRTMLKNNLISLLDTAFPDANRLFTSPPRADGSEKWVDFVAAFWHCECVCGLSEKAFTAKYQKWCKKHGYNFSQDKALDIYASACGRFGVMPKTNTAKLLVEQAISQLRATSAALAALKQEMQSLAASLPEYPVVMEMFGVGPALGPQLIAEIGDVRRFHSKKALVAFAGIDAPPYQSGQMDVRSRSISKRGSASLRRTLFLVMGVLLQCAPMDEPVYQFMNKKRSEGKPYRVYMMASANKFLRIYYASVKAYLDSLEHD

SEQ ID NO: 441192 - protein, 431 aa, unidentified
MQAMLKAGEVAKAAQVVWEAVLERCCGLDVHQRIVTACLLIGALDQHPREFIRTFSTTTRGLLELRDWLEDNGCTHVAIESTGIYWRPVFHILEGAVTVLLVNAYHMKQVPGRKTDLKDAQWIARLLRWGLLKPSLVPPKPIRELRDLCRYRRKLTQEASAERNRVQKVLEDANIKLSSVATDVFGVSGRAMLEALLAAETDPKRIADLAKGKLRQKIPQLVDALEGRVDEHHRFLISMHMQHLAYLEQAIAHLCDRIAEKIKPYQHQVDLIKTTPGFDTTAAQDVFVEIGGDVKVFPSENHIASWAKLCPGNNESAGKRKNGRTGKGNTWLRGILSQTAWAASRTKGSYFKAFYHRVAARRGKKRAAVALAHKQIGAVYCQLRENKPYQELGANFFDRLNQKALERRLLSRLEGLGYRVELHPEPVASVC

SEQ ID NO: 441193 - protein, 369 aa, unidentified
MKKTIKNIGLDVHKNSISIGIADEGRDGEVRFYGKIDNDMNQLNKVIRKLISKGAVLRFAYEAGPCGYAIYRYLTRNAMECVVIAPSKIPQQSGNRIKNDRRDCLSLARLHRAGELTPIYVPTEEDEALRDLVRGREDATRALRTAKQRLGAFLLRHDIIYSGKTKWTKAHFNWLSDIAMSHPAQQIVFQEYIDTVTDCSNRVQRLTEQVRQQSQQSRLHELIKALQSMRGISLIVAATIAAELGDLTRFKNPGKLMAFLGLIPSEHSSGERVKKGAITKTGNSHVRKALVEAAHAYRFPARRSRAILKRQDELPKEVIDISWRAQCRLCTRYQYLTAKGKKSNVVKTAIAREIAGFCWAIAKTLPKAA

SEQ ID NO: 441194 - protein, 350 aa, unidentified
MKKIVKQVLGIDVAQKELVVCLGRMYDDWSPELYAHKTFANTVKGFVALLLWLKKMTDETIPVRFVMEATGVYHESLAYFLDEKGYAVSIILPNKISNYFRILDVKTVTDKTASEAIALFGLERKLDTWKRPNPLFKKFRQLTRERDQLVQTRTAAKNQLHAEQAEAEPNKSSVARIKKQIVFLDNQEQEIKTEIKELAQQNQKVKKIMDTLESLPGVGLLTAVSVLAETNGFELIRNKRQLTSYAGLDVKEKQSGTSIKGKPCISKKGNKYLRKAMHLPALAAIRSDERFKAIFARLVSKHGIKMKAVVAVQRKLLELIYIIYKTEIAYDKDYLKKSGSNKMLLPEQAG

SEQ ID NO: 441195 - protein, 339 aa, unidentified
MIAVGVDTHKERHYAVAVDLLGQLLGESTFVATAAGYRELERWAKRLGDVQDLVFGLEGAGSWGAGLCQHLQRAGHTVVEVERPRRAERRAGKSDRIDALTAAKRVLGGENLSTPRRRGILSALRALLNARRSTIAERTRLLNQLQALNVTAPVALRERVGEGTGKQLERRVLSMRKRATADVEERAVFRVMRDLAARSRTLAVDANRYEQELAELVRSLDATILDEPGIGPISAAKLLACDPARFKNEAAFARCNGTAPIPASSGKTVRHRLNRGGDRQVNNAIHTIALIRTKHDPKTRAYLDRRINEGKTKREALRALKRHISRDLFKRLTEAPLTS

SEQ ID NO: 441196 - protein, 310 aa, unidentified
MEHVIVGIDVSKDRLDVAIRPSGEAFVVARNAAGLEELGKRLASLAPYLVALEATGGFETVVAASLGAAGLPLAVVNPAQIRAFAKALGKRAKTDPIDAAVIAHFAEATGVEPRPLPDEATQLLADLVARRRQIVAMIGAERQREKRATAKRLKKSIARLIKAMEKELTSVDTDLDDAMHASPLWREKEDLLASVPGIGPVIARSLIAELPELGHLTRKQIAALAGLAPWTRQSGQWRGKSFIGGGRTAVRTALFQGAMVASRHNPVLKSFFHHLTAAGKPKMVALIAIARKLLTILNAILRDQKPWQTA

SEQ ID NO: 441197 - protein, 396 aa, unidentified
MITVGIDIGGKQHAVARCHEGMDKADREVLRVSQDRAGFDRLDAWLARQEEPIGQVTMESSGHYWMGLAAHLRDQGLPVAVVNPLRAKYFARSRMQRTKSDPADARSLALMAMHDQPPTRDPLVGVELRQAARFAMTLVTEQSRVCQRLIRLVELGFPELGELFDDPACRTAREVLRVAPTAAQARRRRTSTLAKANAGPGHRRLGETKATRLKAAAATSIAVPELDAEAAFEVKLLLDQYDLLEHQITEAEEHLASLLDGELARRLRTIPGVGPATCAALIAEIGDIWRFDDVDQLLAYAGVHPAERSSGRKGANPETTWHMSKAGNAHLRAAAYRMAVVGITHNPVIAAHYARKRDAGKSKMNALGHCMGKALGLVWGVWRNGADWDPDWGPRT

SEQ ID NO: 441198 - protein, 371 aa, unidentified
MRIGMDTSKSVFQLHGVDAAERPVLRKKLRRGQVLEFFRALPPTRVGMEACGAAHHWARQIGALGHEAVLLPAQLVKPYIPRNKNDAADADGICEAMSRPRMRSVPVKTAEQQAALMLVGVRDQLVARRTQLSNTIRGYAAEFGLVAAKGLDKIEPLLARIAAADGLPELAKEMFTTLGADYAELGMRLSRLDERLQAWQRQDETSRRLMEVPGVGPIAAALLVMKVPNPRAFRSGRDFAAWLGLTPKDHSTAGKQRLGVITRAGDEALRRTLVVGATAVIQQMRRGRGRASPWLTGLIARKPPKLAAVALANKTARIVWKLMVSGERYDHGRAARARAERSAALTEGFALRSALAATALRGDAAATVREP

SEQ ID NO: 441199 - protein, 385 aa, unidentified
MIYVGIDIAKLNHFASAISSDGEELIKPFKFTNDNDGFQLLISKLDSLDKDNLIIGLESTTHYDDNLVRYLVAKNYKVCVLNPIKTSTMRKNNIRKTKTDKVDTYIICKTLMMQESLRFVTFYDLDLMDLRALGRFRQKTIKQRTLLKIQLTSYVDEIFPELQYFFKSGLHQKSVYALLKEAPTPEAIASMHMTHLLKVNSHGRFDKKMAQQLRVLAQKSIGASDSSLSIQVTHTIQQIELLDSQLERVEAEMTEIMKFNDSVIMTIPGIGYINGGMILGEIGDIHRFSSPNKLLAYAGLDPSVYQSRNFQAKKTRMSKRGSKVLRYALVNVAHNVVKSNATFKTYYNAKMAEGRTHYNALGHCAGKLVRIIWKMMTDNLEFNLE

SEQ ID NO: 441200 - protein, 344 aa, unidentified
MQISILGVDIGKNSFSVVGVDGQGAVILRRTMRRQTLIDFVEKLPRCVIAMEACCGAHHLGRLFAAAGHEVRLMSPEYVRPYVKAQKNDDRDAEGIAEAASRPTMRFVDLKSQEQLDIQTLHRVRSRLVAERTTLINQLRAILLERGVVFPAGRVKFESALDDLIAGGNDVLSPRIRSLILELRDEWRRLDQKIETLNTEFVALAKQNSAMRRLTSIPGIGVLNATALVAAIGDASSFQHARDLGAWLGLVPRQFTTGGKARLLGITKRGNTYLRTLLVHGARAAMHTLSQSDTPIGQWLRAMLSRGVARNVVIVALANKLARIAWAVLRKGLPYERSYGVAVN

SEQ ID NO: 441201 - protein, 313 aa, unidentified
MAQMAPSVGVDVAKDRLDVALHPEGLRFSVSNDASGWRQLCRELAPRGVRGIGIEASGGYERGVISTLLRAGLPVCRVNPWRLRQFAKAAGPLAKNDRLDARAIAWFVATLPCRRIERDPRREQLAELVDARRQMVDLQLALSNELSHRQDRELCRMQQRRLRRLAADLLRLDQRIAAAIAAEPAFAHADRLLRSVPGVGPVLAATLLAHLPELGRIPRRQLGALVGVVPYDFDSGKMRGLRCIFGGRAGVRRVLFMAAQAAALSNPVLRTYKQRLLAVGKKPKVAIVAVMRKLLVILNAMLRDDQPWQTVTP

SEQ ID NO: 441202 - protein, 369 aa, unidentified
MQEGTTYVGLDAHQESTNGAIILTSGEVVEDRFATTPEGIRRWARRLKRRCKGRILCGYEAGPLGYALQRTLVSLGMECIVIAPSLIPLKPGDRIKTDRRDALKLAELLAAGLLTEVHVPTPEQEAIRDLCRARESVKGDQKRIQHRLSKFLLRRAIRWTHGRKMWTGAHRQWLRGLRLEHVADQDILDDHLLALEQNAGRLAALDEKLAHWATQEPYAEPVAWLRCFRGIDTLTALSVAAEIHDWRRFPSPRALMAYLGMVPSESSSGGKIQRGRLTKAGNRRVRRLLIEAAWHYRHRPSVGYRLAKRRVGQPAEIIAIADRAQQRLHSRYARMSARGKRHNLVIAAVGRELVGFLWAAMQRTEIPSA

SEQ ID NO: 441203 - protein, 348 aa, unidentified
MRFYNRQHQYYCGIDLHVQTMYICILDGTGQVLVHRNIPSTPAAFLEVVRPYRDRDLAVAVECMFTWYWLADLCAAEGIAFVLGHALAMKAIHGGKAKNDKIDSHKIAILLRGGMLPQAYVYPAAMRSTRDLLRRRLHLVRKRGQLLAHIQNTRAQYNLPAFEKRLAYPGHREGVVAHFPDPSVRRSLEVDVTLIDQYDALITDLELTIVREAKRHDADAFHRLRSVPGIGKILALTILYEIHDITRFDRVQQFASYARLVKCRHESAGKVVGGGGAKIGNVHLKWAFSEAAVTFLRHNPQGQRLRARLEKRHGKGKALSILAHKIGRAVYYMLARDTVFSMEKFLAA

SEQ ID NO: 441204 - protein, 430 aa, unidentified
MSSIVQTPHRRQAVPDPIQGVVVGIDVSKGRIDWRACCLGEWGSPHRVTQGEAGFLRLEQHLLAAAEGGQEVWVALESTGPYGQCLQEWLLDRGWRVVLVNPYHVKRSRELRDGNPRKDDVKDPGVIADLVWQGSYQRVRRLYGPYAELRVGFGEWCSLAKARTARRNEAQALLELWFPEVVRLFANPLGKSVQALIGRYDSPSALLLAGQRSLHATLKRETHGRGVRYGEGIWKAVQGSVAVRQGQESRVQALRDLLGQLACVEAQQVRLRTDLERWLAQTEEGVYLRSVPGLGLLTAAGVLGECGPLAEFHSVRALEKFVGMNLYRISSGKREGQVHLAKRGRQAVRALLVQLAVGQMRAGRLGGAWVRRRKAQGHPSRKTQVALARKLLALCYALARNRVCFEATRWFAEAKTADGGAALQGTPTKT

SEQ ID NO: 441205 - protein, 321 aa, unidentified
MNKDIKYFGIDISHLVFDVTDSDGKYYQFKNTVSGFKKFVKLLDKDSHCVMEATGYYHYKLAYYLQEQGVKLSVENPLSVKRFIQMKLSKIKTDKSDSRSICEYAQQVDLQLWKGNSKHQLECLQMTRLLAVYTKQSTMLKNKLHRESVLGNPSKFVVKSLKQSLKDLEKRMKNLETALLVLVKQAHQEVLTNLKSIPGIGDKTAIMLVVLTDGFKRFTSAKELCSYAGLTPVVRQSGSSVKARPKISKIGNQKLRNLLFMCSFNACKYNKACKALYDRIVAKGKSKKLALIAVCNKLLKQAFAIAKSGVIYDNNYKSSLA

SEQ ID NO: 441206 - protein, 336 aa, unidentified
MHVTTIGLDLAKNVFQVHGIDDNGEIAFNRALRRAQVLAFFERLEPCLVGIEACGTSHHWARELIKLGHNVKLIPPAYVKPYVKRGKSDAVDAEAICEAVTRPTMRFVEVKTPEQQAILAVHRTRDLIVRQRTQTINMLRAQLAEFGLVLPQGVYHPLRFAKDCVDAEQPDLPKDAQEVVLDLCDELLFLHTKILRHMTQIAKSEKRVALLRTIPGVGPITASAIVATVGSGKQFNNGREFAAWLGLTPLNRSSGGKERLGHISKMGDQYIRRLLVLGMTSRIRSIRLEPEKFDPWFADILSRKPSRVAAVAMANKTARMIWAVLTRNEPYKVRTV

SEQ ID NO: 441207 - protein, 355 aa, unidentified
MKNQAIQYLALDVHQATTVATVRDEQGSIRMRATVRTESSALVDLVRGLGPRVHVAFEEGTQAQWLHDLLEPHAERVVVCNVRGRSEMTNKSDRIDADGLSEMLRTGSVKSVYHGGSSVLTLKELVRCYTNLVDDSTRVMLRIKALFRGRGIPTPGTSVYRVSERKKWLAAIESRGARMRAESLLVQLDSLLELRPKAKAAMIKEARRQSGWKVLRSIPFFGPVRVALLLAIMATPFRFRTKRQLWPYIGFAVITRSTADQEFVNGKLRRSRRAPLTRGLNRNHNPALKNVFKGAANAAAVKPGPLKDFYDACVRRGVREEMAKVTLARKIASIALRLWKKGELWNPDKVTTQTT

SEQ ID NO: 441208 - protein, 370 aa, unidentified
MSQSSTLFIGMDVHKETIAVAYVAQDHGAEVTSLGTLGTRQCDIDHLVRKMQSKATHLIFVYEAGPCGYWLYRYLMKKGYDCWVVAPSLIPKKPGDRVKTDRRDAIQLARLARSGDLTTVYVPKVEDEAIRDLTRAREDAISDLKDAKLRRKAFLLRHDMRYVGRANWGPAHLRWLSEVVCPTPAQQIVFQEYVRAVQEHTERLQRLEQELHEHVKAWRLSPVIDALQALRGVQFTVAVTLVAAMGDLTRFDSPRALMKYLGLIPSEYSSGAQRRQGSITKAGNTHARRVLVEGAWAYRYPAKVSRHLQLRLEKQPKVIQDISWKAQVRLCKRYRRLVARGKHANVVTVAIARELIGFMWAIAQEVPIVA

SEQ ID NO: 441209 - protein, 415 aa, unidentified
MTKVYKNEVKNKYSNYGIGSFDVGKTKQYCYVEAPNGNHLEVFSFENNLEGFTQCYERLESFKKQENLGGLLMGSESTGSYGDPLVAWLQNKGVKMVGINPKHVNRMKEVLDNSPLKSDKKDPRVGAMIVKAGSFYEILRPKGIAGELREGCKHRRQLLIKENRILNQLESQVVRVFPEYIKVMKGLKSLTSLHILNNYPLPEDIVELGRTKLRNIMRKTSRYQLGEERARTLIKAAEQSVGIKNCTTHISLGIKNLVSEVYLIKQQIKQTELMIEGLLAESLEAEFILSIPGVGVITAAEVIGETGGLDNYSNAHKVIKMAGLNLYEKSSGIHKGKKKITKRGRSALRRIVYLAALRLIAKKGIYKEQYDRYCKTMKKPQAVVVIAKKLLRVMFALVKNREVFDLENMKQASIK

SEQ ID NO: 441210 - protein, 421 aa, unidentified
MTPTSHTTFAAFVGIDWADAKHDGCLQAPGSAQRECFQLEHTPEAIDAWVTTLRTRFHGHPVALCLELTTGPLVSALRKYDFLVLFPINPLTLARYREAFTPSRAKDDPTDAALQLELLLTHRDKLQPLQPQSPTMRALAQLVEHRRRVVGDKVRITNRLTSAVKNYFLQVLQWFQDKDTRIFCDFLSRWPTLKAAQLARRSTLETFFRDHHVHTADVLATRLHAIKAATPLTTDEGIIAPNVLLVQTLVSQLRVTLDAIEAFDQAIAQRALHHPDFPLFQALPGAGPVFASRLLVAFGEQRERYASAAALQKYAGIAPVTERSGKKAWVHWRLQCPKFLRQTFVEWTAESIRHSFWAQVYYQQQRDKGNTHQAAVRALAFKWIRILYRCWQERTPYDESTYLQALMRRNSSLIPNRVKAS

SEQ ID NO: 441211 - protein, 385 aa, unidentified
MTQAPGTGTVIDYERTLILAIELSNTSWVLAAQIPGLPGVKAKRSIDPTPEALMAAIENYRGRAEKAGRNVDRVIAVYEAGWSGFWLVRWLAKHGVEEAHVIQPSSVPVDRRARRAKSDGIDAELLLRTLLAWLRGEPRVCSMVPIPAEADEDARRRVRERTELVSERVGLVNRIGAVLATLGAGEYNPLRRDRRQRLDELQTALGDSLPTNAHAKIARMLDRLELLLIQITELEQSRDAVLEDENPDRASSMIQQLAKLRGIGVQSATVLVREGFVREFVNGKALGSYAGLTATPYSSGGIEREQGIGKAGNARLRTVMVELAWLWQRYQPGSAQVRWFRERGGTGRRVRKVMVVALARKLLIALWRFATQGVVPEGAVMKPAS

SEQ ID NO: 441212 - protein, 342 aa, unidentified
MKNISVIGIDLAKNTFALCAMTAQGKVVWRKSLKRSLLAEFAAQHPTTLIAFEACGGSHFWARQFANQGHQVKMMSVVRVKPFAPPHKKNDPSDAEAIALAALQDGVPSVRVKGIEQQDIDILLNYREQLMKQRVAQVNQAHAIALEYGVMLPAGKSVKRLEDFFEHLEDASNHLTEVARSTIQKLLKTAKQLNDEANALEVQLSERLKGDSNLKLLKSIPGVGALTAAAILAHTGADVRSFKNGRQFAAYLGLVPRQYSTGGKTRLGGVTKSGSETIRRLLVIGTRSVINRSERKKDKVSQWISEKRKTRGYLRANLALANKTARIVFAVLKHQEKYRTTA

SEQ ID NO: 441213 - protein, 339 aa, unidentified
MKSTTFGLDLAKRVFQLHWVNRETGEICRRQLKRGQVLEFFANREPSVIAMEACGSAHYWARKLAGLGHEVRLIAAQFVRPFVKGNKTDASDAQAIWEAAQRPGMKFVAVKSEGQQGVLVLHRMRAQLVKIRTMQINQLRGLLYEFGADLPPGRQKGVERIPRELDQLEAVLPAMVVQTLRSQLKRLEALDQEIAQIEKRLAAWKKEDKAAKRLMDIPGVGLLTATAAVATIGDARAFKSGREFAAFVGLVPRQSGTGGRVKLLGMSKRGDVYLRTLLIHGARSVLSHDKQREPWLEQLLSRRPFNAVAVALANKTARTIWALLAHERTYQKGYAGSAA

SEQ ID NO: 441214 - protein, 354 aa, unidentified
MRKMQKYIVKDNRIFVGLEDSKRQWKVCVRCEGMIVNQASMPTDYKNLRNYFMNRFPGCEVQVMYEAGFQGFWLYDLLEADGFDCIVTPPNKVTQEKNNKVKNDKIDARRLALNLENGDYKSCHIPDKERRNDRQISRTLDQIQKEIVRTKNRIRRFLDFHGLNDGMPSGRWGPGEYERARGLKLDVFLQIPFDTYFQLLDELTKIRYQLIKKLHIMCRKKRYRVSVNVKKNCPGVGRLSAIRFTLEWGEMSRFTARKRFSSFTGLTSSEYSTGDTVRRGRITEQSSERVRAWLIQCAWRAIKVDPVLLNKYQRVLKNSGNNKKKAIVAVAHKLAVRMRAMELNEETYRIGVIE

SEQ ID NO: 441215 - protein, 355 aa, unidentified
MTSTKYIGLDVHKESISIAVMNSVGKVVMECVIETKASTILQFIDGLRGDVRVTFEEGTWAAWLYDLLKPRVTEVVVCNPRKAALLKDGSKGDRIDAYKLAELLYMNRIKSVYHGEHGLRTMKELARSYLTISADLTRVMNRLKSLYRSWGIPCAGTEVYAPRYRAEWLGKIREAGVQRRAEHYYQQLDVMHLLRQKVRKDLLAESRKHKAWKLLRQIPGIGPIRAAVLIAVMQTPHRFRTKRQLWKYSGLGLETHDSAQYHAVEGELRRSKRPATVRGLNKDHNHDLKDIFKGAAMRASTAAGPLRDFYENLLAKGRKPTMARLTLARKIAAITLIVWKKEVRFDANYLKPQAA

SEQ ID NO: 441216 - protein, 429 aa, unidentified
MKIIYPRVCGIDVHKKFIVAVICISESVEPTYLKKRFSTFHNDLIRFRDWLIQNDCQNVCMESTGKYYIPVYNVLESHISNIVVANPKWVRAVKGEKDDDKDAKWIADLFKFGIVRSSFIPQKDFRILRELTRYKYKLVNMRSSEKNRYQNALTSGNCKLDMVFADVFGKSASNIIDLILSDNPYTDEDILSKVHKNCKASPDMILNSINGTDLTPVQKSRIELVNNHIKQLSSNIQRLDKLIDLMIEPYEDYISFLCQIPGVSRNSAITILSEIGVDMNQFTSTRRLTSWAGLTPSSNQSAGKKKSVRISRAGVYLKPCLVEVAHAAVKDTNHPYYANKFNKISKRRGKKRAYIAIARKILVAAYHMLLTGEIWNPADLAEVETPVEQRIKYVKNNLKSDIKQLLDIGLTVEELTLMIQQNANTITAQ

SEQ ID NO: 441217 - protein, 423 aa, unidentified
MSIQAQCWYAAVDWASEKHDVVVTDYEGKRLGRLQVEHSGEGLARMADWLVATANGTPDAILIAIEVPHGPVVDTLIDRGFSVHSINPKQVDRFRDRFTVAGAKDDSRDCDVMASALRTDGHCFRRLATRDPTLVELREWSRMHEEHGRDRRRYVSRLREQLIRYFPAFLQLEGELDADWKLELLEPAPTPRSATALTKLRVSKILERHRARGRDAGQMLAVLQQKAVTTSPGTTKAAAAHVTALLASIRLAKQLAKEAKDNIERITYQLVDPNSDELESPCDAGKPTSEQSAPLRDAAILLSFPGIGPLNLATLLTEATDGVRDRDYQVLRCQGGVAPVTKQSGKSRYVVRRWACNKRLAHALLHWARVAVQHDPASRAKYRALRARGKSWGRALRGVADRLLYVACAALRSGTRNPSQLRK

SEQ ID NO: 441218 - protein, 379 aa, unidentified
MTLKYSVGLDFSKSKIDATICTINHQQLVEYKSSCCFNNTKSGFINLSKWISKFTQQHPQVPVFICLEATGIYHENCAYYLFDLSYQLSIILPNKAKKYFQSLGLKSKNDKIDAKGLARMGAEQKLPLWVKPKEIYVTLRSLTRQYQSIQENITAEGNKLHAEELSAIPNKEVLKQLKSLIQFLVNQKKEIEKEILKCIKSDPEIKSKMDNVCMVRGLSTLSIATVIAETSGFELFENYKQVVSYAGYDVVENQSGLHSGKTKISKKGNSRIRRILHMPSLTAIGSEGSSYQQLYLRIYERTGIKMKGIVAVQKKLLLTIYYLWKKNIPYNINILKEKQVLASPNEVPLKQKNSHIKDMATQGKHPVSSHSTLPLPNQR

SEQ ID NO: 441219 - protein, 340 aa, unidentified
MEITAIGIDLAKNVFQVHGVNSQGKGILKNRRSRVQVVPFVANLKPCLIGMEACGGAQFWAREFVKLGHQVRLIAPQFVKPFVKSNKNDAADAEAICEALLRPNMRFVAPKSIEQQDIQTLHRIRSRFVGNRTSLTNEIRGLLAEYGIVLPQGINFVRKNLLQTVETAQEQGRISENGKTLFSLLFQELKGIDEKIEEMNRKIELTHRSIEACQRLSGIPGVGKITATAVVAAVGDPAVFRNGRAFSAWIGLVPRQHSSGGKERLLGISKRGDVYLRTLFIHGARAFIRYLDRQPESNNKQWLMKLVERRGKTRAIVALANKNARRAWVLLARQEEFKAA

SEQ ID NO: 441220 - protein, 433 aa, unidentified
MGLIVPTVMPPERADQPPSYDGFVGIDWGSQQQQVSVLDRDRRRMGERVVDHDGASLAQFVAWLWGLSAGQPQRVAVAIEVPRGAIVEGLVERGFHVFAMNPKQLDRFRDRHSVAGAKDDRRDAFVLADSLRTDQPSFRRLRLDDPQLLVLRELSRAEETLLEAFRRSANQLRDQLHRFYPQMLQLCSAADAPWLWDLIDLAPTPAHAALLREEQVQGVLKAHRRRRLKAQEVLACLQTPARPVAPGAVQAAQAHCRFLLPCLRGLAEHLQACGQQVGALLHTLAEMPGAGEGPSDVAIVQSLPGVGRKMTAWLFAEAAQPLAERDYQVLRTHGGVAPVTKQSGKRRVVVMRRGGNPRLRHALYHMARVARQRDAHFNSVYAALRAKGQRHGQALRSIGNRLLRILMAMLRHRTCYDASRIHREPVVQMGETI

SEQ ID NO: 441221 - protein, 412 aa, unidentified
MDVLVERCAGLDVHRDSVMATVRVPAKRRRQREQHRRRFGATIAELEQLRDWLAGFGVSLVAMEATGVYWKPVFHVLEPRFECWLLNAQHLHNVPGRKSDVIDAAWICQLVEHGLVRPSFVPPPQIRELRDLTRLRTAQVEERTRTLQRLEKVLQDVGIKLTSVASSGYSVSARAMLEALLAGVSDPDQLAELARGRLRAKIPELREALRNRFRVDHHGILVASLLAHVDALEASLARLDARIEQQTAPLAELIELLCTIPGISTRTAQILIAECGIDMSVFPTAGHLASWAGICPGTNQSGGKRRSGRTRRGNRWLRSALTEAAKAAARSKNTYLAAHHAQLRGRRGEPKAVGATRHDILIAYYHIVRERVPFRELGVDWLARRYSPEHRARRLSRQLEALGYTVTIEAAA

SEQ ID NO: 441222 - protein, 344 aa, unidentified
MLYVGLDLSRKRLDFDARLVGGELFERGAVPPDGDGLAGLVRRLGDAEVLAVIESMNGARFVHDRLELHGWDVRIADAVKAKGLAPLACKTDKIDAWVLAELARLDLVPEIWLPDPEVRAERERARFRLHLVKHRSALKNRVHSILIAHGVPNPSSDLFGVGGRRLLERLPLPEPWRSTTTASLALIDTLDEEIDHCERELRRLGADHRYVPLLMTCPGIAWILAFTIASEIGDIGRFATPVKLVGYSGLTPKVNQSGENDRRGPLRKNGPNHLRWALVEAAHTAARHPSFQPILERKRAQFGHKRGTKIAAIEIARRLVRAIWHMLTRGQPFAPAGATRPLAA

SEQ ID NO: 441223 - protein, 427 aa, unidentified
MKEPKYKPTLCVGADVHKDEIVLRAVDKALGHEVLERFRVTNNRPGTQSAAATLAQVAADLDYTRIEIGWEATGMLWIPFHRYLSTEPLFQPFELELICFNPKLVAKFKDGLVLRSPKNDDRDAFDIAARIRFGELPVTYVPGDFWQGLRRLTRYRYRLSKALSQEKMRFQSYAFLKASDWKRVKPFSNVLGATSAALLTEFTAAELREMTHDQLVDLIARRGRGRFADPTATARLVRQALRTSYPIDPRMDEMVTASLAAMWDHIRYLDRAMKRLDQHIARYIDLIPNPIITIKGLGAVITAGILAEIVDVLRFEEHKHLAQFIGLTWRKSSSAGFVSQNTRLTKVGNVYLRYYFILGANLLRQHNLEYKAYYWRKYQEVSKYQHKRSLVLTARKLVRLVHALLTKNVPYVRPRMIDPSQEDDGLQ

SEQ ID NO: 441224 - protein, 345 aa, unidentified
MYRTKVGVDLAKKVIQVCIYRDKKVLSNVEMTPDEFLCWLINAKPVTIIFEVCGTSNYWRQRAIEAGHDARLICAKLVSTVRQNQKTDKNDALAVIQAALLPDITFISGKSIEQQQLQSIQRLRELAIRQRDASRKQIIALLLELNFRSPNNGAGMIRKIEDIVEDGENGLPIALRQALNAAKEQFECMVKTIETHDKCLEKSIQIHHDCKKLLKLEGVGPINAVNLYVSLGCAELGTFSKGKDASACIGLTPIQHSSGGKVKLGTIGKKCKNGMLRSQLIGGAMSVVRQVVKREAKTKKEMWLKALAERRGNKCAAVALANKTVRTAFAMLTQETEYKAELLAV

SEQ ID NO: 441225 - protein, 350 aa, unidentified
MERYIGIDVHSQSCTLAVMGATGKKLKSQVVETNGKVLVEAVRAVAGQRRVCLEEGTQSAWLYEILRPHADEVVVTFPDKHQGPKDDLRDAWMLANQLRTGSIKTRVYKGPRQFTGLRDAVRGYNMMMHDGVRLKNRLKAIYRSRGIGTTSEIYEVEARNAWLKKLPPSHRRLAQLLGEELDALVSLQEEAASWLREESKAHPIVRKLSTAPGMGPIRSAQVVAIGVTPHRFRTKRQFWSYCGLGIVTRSSADWVRQEGQWVRAQTQQTRGLNRNRNPLLKSVFKGAATSVVQQLKEDPLCQHYYRLLEGGTKPNLAKLTLARRIAAAVLAMWKKEEVYDPEIAQRTKKA

SEQ ID NO: 441226 - protein, 412 aa, unidentified
MEVVYPCCCGLDVHKKSITACVLWAEAKGKSCKEKKRFGTFTHDLLQLADWLQECGVTHVAMESTGVYWKPVWNILAEQFEVLLVNAQHIKAVPGRKTDQKDSEWIADLLQHGLLRGSFVPPRPTRELRDLTRYRVSLAQEINRIANRVQKVLEDANIKLASVATDPLGASGRAMLEAMLAGEQNAAQLAELSKGLLRNKIPELKLALEGRVTEHHRFLLQQLYDHLLFTESKRKQIEEEIERRMGPFRDEVVRLCTIPGVDRVTAWGLLAEMGMNMNQFPSSGHLASWACLCPGNFESAGKRLSGKMRKGNVSLRRCLSQAAWAISMMKNNYLSALYRRIAARRGAKRAVMAVAHALLEIAYHMLKRKEDYRELGADHFDRIDVNRIRRSLVRRLERLGHKVTLEPLALTA

SEQ ID NO: 441227 - protein, 403 aa, unidentified
MVTQIENYEQVDVFVGLDVGKGEHHAVALDRAGKKLYDRALPNDERKLRAVLIDLQENGGVLLIVDQPATIGALPVADAQAAGALVGYLPGLAMRRIADLHPGEAKTDARDAAIIAETARTMPHTLRSIQVTDEQVAELSMLCGFDDDLAAQITQVGNRVRGLLTQIHPALERAMGPRLDHPAILDLLQRYPSPAAMRAAGEKRIATRMLKIAPRKGRDWAHEIIAALGEQTVVVTDTNAAALVLPRLAAQLASLRKQRDEVAAEVEKMVDAHPLQPVLTSMPGVGVRTAARLLTEVAGKHFPTAGHLAAYAGLAPVTRRSGSSIRGEYSSRRGNKILKNAMFLSAFAALRDPESRAYYDRKISQGKRHNQALLALARRRSDVLYAMLRDGSLYQPSPTRLVA

SEQ ID NO: 441228 - protein, 374 aa, unidentified
MDDHSVAYVALDTSKLRNAVAIAEAGRDGEIRYLGEIDNAPAATAKLARRLAKKHATLTFAYEAGPTGYGLYRQIKNLGHDCIVVAPSLIPHKPGDRVKTNRRDALSLARQLRAGDLTAVWVPDPHHEAVRDLTRARGAAVRDQRAKRQQVSALLLRLGLYYPGKTTWGKAHMAWLAGQKLAHLEQRIALEEMLHAVRQAGDRIARLEQAIHAAVPDWSLAPSATALMALRGIEFIAATTLLAEIGDLTRFRTPRELMAWLGMVPSEHSTGERTRRGPITKTGNRRARSVLVECAWSYRHPPRVSRDKLARLEAAPPAVRDIAWKAQSRLTARYRALRRAGKLDVVAITAVARELAAFIWAVGLAVGSGRTPEV

SEQ ID NO: 441229 - protein, 493 aa, unidentified
MKKSSPKIQSVYRNQNALVRAVFERAGDARKVLCVALDYAKRKHVALICDGNGDVLKASFPVENNAAGIAHLIKEISATARRRKIPKDQIFLGGEDEASYVANFTEALRAKGYLVVRVNAYEAKENRENLLASTDTLDLLGVAKTLLSRRARLTGETDAVNPAYHHLREITRCRRTLVRQKTAASNRIHALADQLFPGFLNASKSALTPFTDASLELMKERFSAPEIARRKPASFANLLRRHRVQQPDETASQIILLAREALPPAAHRVATLQRTLAATVDLYECLQRNALELRTDAALTLATTPYVMLTSIQGIGFVLAAGLAGELGDSKHLAKLDSLCAYSGIVPRTLQSGGPDSPAIQGHASPRCNRILKDWVVQSAQKIHLYGPPELKDRITRWNAEGKHGIFAAARHHLRLVSTLVKNEVPYLAPAGRGRQATPEQIATAAQATWTTVQRKWRTVSGGLDLICDEAHPLGFWRKVMLELHGIDLPERP

SEQ ID NO: 441230 - protein, 371 aa, unidentified
MESIIYVGMDVHKDTYSLCSFDAKRNLLFSQTQMKSTTGNVIRYLKKVSEMNNDALTVSGYEAGPTGFRLCRELQKQGFACVIIAPTSIARTVKDKAVKTDKSDAQMLAKTLAFHSYKEVVLPSENIEAIKEIVRLRKSALKVCKRSKQNLLSFLLVHGFSYSEGKHWTVKFSSWLKTIHFESEYLTYCFEEYLSEATRQIQRLALLDKKLKELEDDEEIRDGVKKLKCICGIDTIAAVGLAAEVGDFNRFKTAKNFANYIGLCPGRHSSGLTDRGTGITKQGNRYLRTLLIEAAKSVKRSAPHGHKSKRILSRQEGSSSEIINYADKAGTRIRMKMNHLERRGLHCNKAATAGARELACFAWGMMTGNIA

SEQ ID NO: 441231 - protein, 308 aa, unidentified
MSRIQEKKTITTATSPFIVIGVDVSKDQLDVYVSPAGNHYSFRNDAGGVAELVSFCRDHAADLVILEATGRYHRLAHETLHEAGIKAAVANPARSRSFARSVGRLAKTDRIDAQILAEYGERVRPPASTPPSKLRAKIAEITVARRQIVDEMTILKQQKSQAVDSIVVTQMDARIALCQRHCKDLEQLLAELIEEDDGIKRKHEILTSIPGIGLTTAATLISELNELGGANAKQIASLSGVAPMNRDSGSFRGKRRIGGGRKPVRDVMYMAAVVAIRWNKDMAAFYQRLKKAGKPFCPSAEFLGPMAV

SEQ ID NO: 441232 - protein, 433 aa, unidentified
MRKFLECCAGIDIGKREMTATILTGSAAVEPVQQTQTFGTTIQELNRCLEWLRTNQCATVVMESTGSYWVPIWNVLHEHVAVIVANPEHVKARRGEKTDPEDSRRLAERLRVGSVRGSFIPSEMILELRDLTRRRKRLLSAANSERNRIQKLLEHANIKMGNVVSDVFGITGQRILQALLHNPSTDPAALANLAKGRLKKKRQALTETLEGHRLNDHLRWMIQHSLNHLVFLEKQLAELSQKTVEKLQPLEREYELLQTIPGVAAETAAVILAETGGNMAQFPSPRHLTSWAGICPGNNRSAGKQKSSAIKRANKWLLAALVQSAWATVRQRGSVFRKRFYRQMQHRGRKRAVIAAARALLAVVWQVLQSKTPYWEPVNEVLQQRERSKKVRHHLRRLQQLGVDIRGLELPPLEAPRAKNSLRALGPLGIHAR

SEQ ID NO: 441233 - protein, 359 aa, unidentified
MVKYRKKTKMRKLDSITCDDKAYVGLDVHKRSIHGAVRINGKQISTFVMPAKKDAVIKTLEPLAAGLEKIVYEAGPTGYSLARSLQEIGWPIEVIAPGKIPKEANQGSKSDRLDCKKLAEFAEKNLLKAVAIPTEQEEADRQLTRLRDHLKKKDKRTKQQIKSFLLQHGLKEPNGLSNWSQCGIDELAELELNSELRFVLDIFLEELKDLKNHLKITHNRIKQITKAERFEKKIALLKTHPGVGPQTSIKFLTEVYQPGRFTEYTQVARYTGLAPRVRQSGEKRREGPLIKAGQAPLRCMLIQAAWAWVRYDPHAAMVYRRLLKNTGKTQKAITGIARRLAVDLWCMLMRDEAFRATAV

SEQ ID NO: 441234 - protein, 284 aa, unidentified
MYVGSDVHKKNSNYTMVDGQGTEVEKGRFPTTCEGLDEFASELPEGAKVAIEASTSGIFVYEYLDERGIEVHLAHPVYVKPFAKKHVKTDNVDAGVLAQLLRMDYLPESYVPGKEIRDLRTIVRHRASLVRLRTAIKNRVHALLTIEGVQPPEVGDIFGRKGMEFLREVKLRQSRRAALDNYLEVLGVLNAAIKRVETILREKADVTEEARWLMSIVGIGFHNALLILSEIGEIGRFGSGKPKSFVCYVGLAPKVEQSGEHVRYGLWGSAPRPRLRAFAAPVTR

SEQ ID NO: 441235 - protein, 438 aa, unidentified
MSNKVIFNLDELFISVGIDVGADFSWMSIALPNQQFVGKPYKILHNSIDSLTTAVSKIKEAEELYSLESRIFLESTGIYHYPLFCYLRDKSFNCSVINPIITKNSTNINIRKVHNDRFDSKKAALVGLKPDLKVSLMPSDLALNCRNLCREYYDLMDNRSAYVNKLQGELRMAFPQYLGIFSKVTINTSLTLLETYTSPSAFLEADKQEIIDIIKSTARFGLTYAQNKYNAIIQAATDANQFGYIIESNIKRIRLYISFIRKYDEEINNILESLHELVDANEDADFVKQIHLIETFKGAGFLSAVSIMGEIGDFSAFSKPKQLFAYFGLDPAVKQSGKFEGTKVQMSKRGSSIARRVIHTLALQSISISRNGRAKNPVLREYYLQKCDSKPKLVAMGAVSHKVCNMIFAILRDNKPFEIITPQEHIKQYNAAKCDIAA

SEQ ID NO: 441236 - protein, 411 aa, unidentified
MRLFVGDDWAEDHHDVEVMDEAGKVLAKRRLPEGVTGISQLHGLIGGFLGEEADESEVVVGIETDRGPWAAALLAAGYRVFPVNPLLASRYRGRHGVSGAKSDAGDAHMLADMVRTDSHQLREAAGDSAEAEGIKVLARTHKTMIWERTREVQRLRHQLREYFPAALEAFDDLDAPDTLELLGKAPEPGQARKLTRAQVSAALKRARRRNIPDRAGAILAALRSEQLAQPAPLTAAYAATVRSLIAVITVLNEQVKTLEAQVKEHFGRHPDAEVYLSQPGMGAILGARVLAEFGDDPRRYRDGKARRNYAATSPITRASGKKKVVTARFAHNDRLIDALNAQAFASLNASPGARAFYDQQRAKGTEHNDALRRLANRLVGILHGCLKTGTVYDEATAWGHRENLPQSSVAA

SEQ ID NO: 441237 - protein, 405 aa, unidentified
MRYYVGVDWADQTHAVWVVDESGTKIAARAVSHTAEGLGEWGRELDEWRAQGIDLWAAIERPDGRVVDVLLDHGVVVYPVNPKALDRARDRFRQSGAKSDPFDARVLADFLRTDHAHLRALQPSSEAAQELKLLTEDCQRHIRQQTRLVNQLTATLKAYYPRALEVAEVTSALAREFLPAYPTPEALTALTERQWQRWARAHRLPEARAGELWAVLRQPQLPVPAHVVRAKARLMQTLMEQLRPVVAAVAQYRKAIDDFFASMPAAQWARTLPIGKHGITAPTLWARLGDAPGRWESFRHLQAHAGTVPVTKRSGKQQRVVQFRFACDKALRYVVDQVAYLSLLSSAWARPYYDPQRARGHSHRQALRALGAKWLKIIFIMWQRQVPYDEQYHLATMTRQQLGRR

SEQ ID NO: 441238 - protein, 345 aa, unidentified
MKKVVAGMDLHSNNVVIAVLDMDGKRVASRKVPCELKEVVKFLAPYKKRLENIGVESTYNWYWLVDGLEAQKYPVVLANPAGMEQYNGIKHADDTNDAFFLAELLRLKILPTGHIYDAQLRPVRDLLRRRLKLVQHRTALMLSFKSLYTRTTGQEMTLSQLKEMQIKEAQQLYTHPANQLIAGMQIKHIDQLSESITVIEKGVLASARELPFYAKLLTLPGVGRILGMTITMEVGEIKRFADPGNFASYCRTVEAKRTSNDKSKGANNSKCGNKYLAWAFVEAANFAKRYDEQCRKWYDRKAAKTSNVIAIKALACKLAKAAWYLMAEETTYDPARMFGQPAKTK

SEQ ID NO: 441239 - protein, 344 aa, unidentified
MPLYGGIDLHANNSVVVLLNEQDHVVYYQRLNNHLPTLLEQLTPYRDDLEGVVVESTYNWYWLVDGLMEADYRVHLANPSAIQQYSGLKYTNDHSDARWLAHLLRLGLLPEGHIYPKAERALRDILRKRSHLVRQQTANILSVQNILMRNTGVRFNAQRMRALSPPDLMRLLPEPAQVLAVRSGLAVLHTLGEQITTLEKTVSTSLKHTPAYEQLLTVDGIGTILAQTIVLETGDIGRFATVGHYASYCRCVPSTKVSNGKRKGQGNVKNGNKYLRWAYMEAAQFAMRYSPKVQQFYQRKQAKTQGVLARSAVAHKLARACFYIMRDLVPFEVTKAFGSGLTHR

SEQ ID NO: 441240 - protein, 407 aa, unidentified
MDVIIERACGMDVHKDNITACVMTPEGKEIQTFSTKTVFLIKLVDWIKQHGCSHVAMESTSVYWKPIVNLLEAEDIEFLVVNAQHIKAVPGRKTDVKDAEWICQLLRHGLMKASFIPDRNQRELRELVRYRRSIIEERARQHNRIQKVLEGANLKLGSVVSDIMGVSSKNMLHAIAEGVDDPEELANMAQKTLKRKKNELELALQGYISTHQRLMIKTILSHIDFLTEQIDMLDQEVACRVSSFQEDIERLDSIPGISTRMAEQIVAEIGTDIKNQFPSAAHMCSWAGLVPGHNQSAGKRKSSKTKKGNKYLRSGLTEAAHSVRGSKNYLGALYRRTAARKGKKRAGIVVAHAILRISYYLLTRNEMYVDLGENYFDEQRQQSIVRHALRRLEGLGYSVILKEPEVS

SEQ ID NO: 441241 - protein, 381 aa, unidentified
MPDVIWTAPAEVRTWVAIDQHKLSLVAATLPASGGEPEVVRLESTERAIRRFIDRLGGPEGLGVAYEAGPGGYQLYRLLSSMGVACDVIVPSLIPVRPGDRVKTDRRDAKKLVGLYRAGELSFVAPPSPMHEGLRDLVRCRDDLRCARTAARHRVAKALLRYGHIYREGKAWTLRHRAWVDSQRLADPLAQAALEHMLAHLGSLDAQLAALDHQLEQVAATEPWADPVAWLCCFRGISTLTALGLLAEIGDFRRFGEPRELMSYLGLTPSEYSSGQQQHRGHITKTGNRHARRLLVEAAWHYRHRPRQSRRTLSVQEHVPPEVAARAWQAQIRLHHRHRALAEHGKRTTVANVAVARELTGFIWAAMTNTPLRETQEAAAA

SEQ ID NO: 441242 - protein, 345 aa, unidentified
MRDLKIIGVDLGKNVCSLVGLNAAGGVVMRRRIRREGLLALLTKLPGSVVVAMEACCGAHYLGRLLTGRGLEVRLMSPEYVRPYVKAQKNDDRDAEAIAEAATRPTMRFVALKTEAQLDVQVLHRVRDRLVGQRTSLMNQVRSLLLERGIVVPQGRRSLLDAVAAVLAEGHASELGRRIRLLLEDMLDQWRALDARIAALDDEFAEMTRRDPAARRLATIPGVGVMNATALVAAVGDGRAFSRGRDLAAWVGLVPRQATTGGRPRLLGITKRGSKYLRKLIIQGARSALPSLARTATPIGAWLRGLLSRAHGNTVVVALAAKLIRIAWALLRNGTSWSVARSAAV

SEQ ID NO: 441243 - protein, 355 aa, unidentified
MGNPFWVAPVYKLGGTGCFYWSTWTSLNPRKNVRMTNVAIDIGKESFDACVETGGRRKKAQFKNTGSGRNDLHRWLKKHNVGEVHIFMEATGRYGEQLAFWAYGLGWKVTMINPYRMRKFAESEGIYNKTDSIDSSCILDFSHSAGAHNVRLWKPKSKAENELKEIHMELLGIEKMIGQERNRSKSCIATGLIKLCIRQNIEHLKAQKLKLERTALQLIKSDAKLHQAYKILVRIKGIGDKTAIKILARVDFDAFTKGRQLVGFAGLAPKKWESGKSVRKKEIISRVGHADLRSALYFPAIVAMTHDSEMAEYKKHLEFQGKHKKVIICAIMAKLLRKAFALIRDSKREQLSSAA

SEQ ID NO: 441244 - protein, 407 aa, unidentified
MDVLHPKCAGLDVHQQTVVACARTGAGKAVTYDVRTFGTTTAEVLALSDWLTAHGCTHVAMESSGVYWKPVWHVLEGHFELVLANARHIRNIPGRKSDVNDATWIADLLAHGLIRGSFVPPEPIQELRDLTRTRKQLVREIAQHTLRIQKTLENANIKLTAVLADVLGSSGRAILRALARGERDPERLAELASDRVKASRAELVAALHGRVTPHHRFMLTLHLTQIEALEAAVREVEARLGDALAPFRAALDRLITMPGVSETVARVIVAEIGFDMTRFPSAGHLVSWAGLCPRLHESAGKRLSNRTRSSNPWLTTTLVQAAWAAARKKDSYCRAQFLRIKSRRGPKKAVLAVAASMLTAAYHMLRNGAVYRDLGADHFDRHDKAKLAKRLIARLHDLGLVVDVRAA

SEQ ID NO: 441245 - protein, 346 aa, unidentified
MQHYVGLDVSLKQTAVCVVDQAGKIKREGMVASDPDAIAQFITAHAPDAVRIGLEAGPTSTWLWTELHHRGLPVICIDARHAKAALKMQINKSDRNDAAGIARIMQCGWYKEVRVKSLDSHAIRALLSSRALLVGLKRDLENQIRGLLKNFGLVIGRAKMNTFTAKALEAINGQPALAAAIEPLLKARQALARQIETLDRKLLRLARSEPQVRRFMTVPGIGPITALCYFATIGDPARFKKSRSVGAYVGLTTRRYASGETDVTGHISKWGDSMLRCYLYEAANVLLTRVSRWSSLKASGVRIAKRKSLSKARVAVARKLAVILHRMWVDGTEFCWSMQGPAMQPA

SEQ ID NO: 441246 - protein, 361 aa, unidentified
MRIIGCDLHARQQTLAMLETTTGEVVNVTLMHEGNEVRDFYSQLPRPVLVGIEATGSMQWFLNLMEELGIECRVGHPATIRAAEPRKQKLDRRDAELILRLLAENRFPAIWLPRKELLDLRALLLHRHQWVRIRTRIQNALQAIALANGLRRGPGLWSYDGQAKIAFLPLPPHASYRRSALQTLYRKMKEEIENLTKQVAEQAEQRSGARLLMTHPGVGLVTALATEVFLGDPGRFVDGKALASYVGIIPREYSSGGTQRFGGVTKQGSPLLRFLWCEAGAHAVRRDPALQRFYRRKLVQKGLGKARVAVARKLGIRLWIMLRDEIDYEEFCRRGQKPQSGAACAGMLEVGNGANRHRPID

SEQ ID NO: 441247 - protein, 382 aa, unidentified
MTHSIMVGCDLHDKTMLLKIAEGREKAETRSIKNTVAGRVEMIRMLRERARMVGGGEVMFAYEASGQGFGLYDELTEAGFTCYVLAPTKIARSMQHRRRKTDEQDALQILELLKAHVLAGNPLPKNWIPGPQTRDGRQLVRMRLDVGEKLTVVKAQVQGLLKGNKQRRPGDSGKGWNATFRRWLAELASPAGTLGPSSRSALASLLRQLSWLEEEIDLLDRQVLHLALTDRYRDVFYELLGLKGVGRLTAMVFLTELGDLSRFSNRRQIGAYLGLAPSSNESGDRDGEGGRGLPKTIGHSRRISSDRPRRPMNDPTTITRRTRAFVAWVTPVTEFAPSSASRQNDLSACRRRPNSRMPVIAITRLSCQIARFPLDTPLHSSH

SEQ ID NO: 441248 - protein, 427 aa, unidentified
MDVHRDFCEVAIAEGGCVRTAGRVASEPEALELFARSLVDSDEVAIEATANAVAIARIIEPHVRRVVLANPRAVREKARRAKTDRIDAGLLAQLLAVGYLDEVWTPDDATQTRRRLITRRCALVRARTRAKNQVHAVLGRNLLGRPPVTDLFGRRGRVWLAEQAAGLPLDERLSVDAGVRQVDFLAGEIEQLDKILGADALSCSDALRLMTLPGVNVVTAIALLAAIGDISRFPTPRHLVAYLGLDPRVRQSGNEPAKHGRISKQGMTEVRCLLVEAGWQTTRTPGPLRAFHERIADRRGRNKATVATARKLVVIAWHLLSRGEDYAFMRPALYREKLRRIELLLGGQRHQGRSATGRQLLKTDQRRAERELATQHERAYQRMVADWKASRPSSATLPQPTQLVGAGVTPGRASQRPSRGKAARQTP

SEQ ID NO: 441249 - protein, 370 aa, unidentified
MSVRRILAKTIDTDLEYEAIGIDLAKNCVSAALLTTDGEVVCIDRLDYSELEKSAQALSPTTFAMEPCTEMNYLVQKLEAWGHRCLVIGGKNVQNYVENHYSGQKTDLNDAQALAFLAQDTQLRTIKAKDVEQQKYASLTTLREQYIKQYRQTIVSLKGICQAWGLNISKGISGKARLKDLIENHAAFPEELKESLVDMVTHAQTAQKALNKITKTLELLAKNDKVCQLIQTIPGLGTICSCRLRATIGDIKRFKNPKDFPAYYGLVPRSIATGHNEKKGKITHRGDRTMRSLMVQGAGSVINMATKGKLKSKQLTKWILKKQKEKMPWGKLVCAVAAKLLRIVRAVLISNKPYNSKIAGVAKCSLPKGS

SEQ ID NO: 441250 - protein, 381 aa, unidentified
MRHYIGVDWADAEHAVWVEDETGTKVLSRALPQTAEAFADWGRWLDERRAHGVELWAAIEKPEGRVVDFLLDHGVVVFPLNPKTLDRARDRFRVSGAKSDPFDAQVGAGFLRTDHGHLRPLLPASEAAQELKGLTRDYGRQVRQQTRLLNQLTITLKEYYPRALELGGELTSQWVREFLRVYATPAALWTLLQRPPLPVPPHVVRVKARRVAVLLAQLEVTSEAVEAYRKAIEDFFAALPAAKWAASLPGGRRGTTVPMLWAELGDAAGRWQSFQHLQGYAGAVPVTERSGKGHVVKFRFACNTQLRYALSQFAFLSLRSSEWARAYYHRCRQRGHTHQHALRALGAKWLKIIFVLWSRQIPYNEEHHLASIARHQLRQPA

SEQ ID NO: 441251 - protein, 355 aa, unidentified
MDSKKYIGMDVHQATISIAVADSTGKVVIDSVIETKAATILAFMQGLRGSSWVAFEEGTNAAWLYDLLKPHVAQVIVCDPRKNALLKAGNKNDRVDARKLSELLRAGLLSPVYHGECGVRTLRELARSYLAVTKDLTRVMNRLKALYRSWAIPCAGDKVYSPRQRNAWLEKLSQAGVHRRAERLYQQLDALVPLRRDVRRELLSESRKHPASQLLREIPRLGPIRVALLMALLQTPHRFRTKRQLWAYCGLGLQTRISGEYHFSGSQLQRCKRAPALRGLNVNHNHELKNLFKSAATQVSAAGDPLGEFYQNLLAGGMKPAMARLTLARKIAAIALRIWKKGEHFDPAQLKRQSA

SEQ ID NO: 441252 - protein, 331 aa, unidentified
MGPLIATPANNPKHKEDSISMAFLHHPPHRCVGFDIAKDTIAMSDGGKAVIIPNRRRQIRSFLRHCDAALAICEPTGGCEAILIEECLRRELAVHRADTRKLKAFIRSRGRLGKSDAIDAREMAAYGMERWACLALWQAEEPSAAKLKALVRRRADLVATRVAEQNRAKAPGAHELAATFKAMLTVINRQIKSLDQAIDALMRTGALKRRGEIATAMQGIGITTAAALLATMPELGQMDRRQAAALAGLAPHPNESGNRIGYRRMRGGRPQVRTILFMPAMQVAQGRGEFVAFYKRLIADGKKPIIAIAAVMRKIVITLNARMRDDTIQQS

SEQ ID NO: 441253 - protein, 355 aa, unidentified
MNNTKYIGMDVHRESISIAVMNSAGKIVLECVVETKASVILQFIDGLRGDLHVTFEEGTWAAWLYDLLKPHVTRLVVCDPRKNASMKEGNKSDKIDARRLAELLRLNHLNPVYHGEHGLRSLKELVRSYLTITKDLGRVMSRVKAIYRSWAIPCTGKQVYAPQHRAEWLAKITEPGVRRRAEFYYQQLDALRSLRREVRRELLEESRKHKAWKRLCQIPSIGPIRAAVLLGILQTPHRFRTKRQLWTLGGLGIETYSSADHRYVEGQLQRSKKPVLIRGLNENCNHDLKNLFKGAAIIASTKPGPFQEFYAALLAKGMRAEMARLTLARKIATIVLVIWKRGVCFDAQFLKPQTA

SEQ ID NO: 441254 - protein, 368 aa, unidentified
MKIIGCDFHPSFQQIAMLDTETGEIVERRLLHGEGEAQRFYESLSGEVWVGMESSGNTLWFERLLARLKHRLLVGDAARIRAAAPRQQKCDRRDARHLLQMLLEKRFPTIWVPSMEERDLRQLLKHRHTLVTMRTRAKNQLQHIALNQGLQRKSKLWTKAGLEQLRSLLLEPWTQRRRDDLLQLVARLDADIAELSKAVEAEAQRWPKAVLLMSHPGVGPIVALATVVTLGDVNRFAEAKQVASYVGLIPRENSSGEHRRLGAISKQGNSFMRFLLVQAALGAAKGDAGLGRAYRRLCQKKHHGVAKVAIARKLVVRLYWMLRSNKRYPEVVRMQGSSSHPMAAVMADPLSGRPASRQAEQKDGPGKQ

SEQ ID NO: 441255 - protein, 339 aa, unidentified
MELYAGMDLHARNTYVGIMDSNSRRIFKKRVANDLQLILNTLEPFREDLRGIVVESTYNWYWLVDGLMDAGHGCVHLANPSAIKQYEGLKYTDDRHDAFFLAHLLALGILPEGYIYPKEDRPVRDLLRKRSFLVKQRTEHIHSLQSMIERHTAQRLNGNEVKKLYLSDLERIFEEQYVLLSARANNATIKFLSEQIQQIEKAVKAKVKLSEPFKLLLTVPGIGEILALTIMLEVGDIHRFPTAGDFASYARSVPTDRLSNGKSKGKGNRKNGNRYLGWAFVETCHFARRFYPKFRSYYQRKAATTNPFVATKAICNKLARICYYVMRDQVSFREEAIFC

SEQ ID NO: 441256 - protein, 422 aa, unidentified
MLSTTQDDEEIIERVAALDIGKAELVCCVRVPDEDRAGRRMQEVATYSTMTRSLLRMSDRLACLGVTRVVMEATSDYWKPVFYLLEAAGFDAWLVNAKDVKHLPGRPKTDKLDAVWLCKVAERQMIRPSFVPPPQFRRLRDLTRYRADLVAARTAEKQRAEKLLEDAQIKLSAVISDIFGVSGRDMMAALVAGERNPKVLAQLARRTMRQKITVLEEAFTGHFTGHHAFLLGTMLGRVDAISADITALDARIDEAITPFASAVARLDEIPGISQTAAHVIIAETGLDMTRFPTAGHLVSWARFAPGVKESAGKKKGKNSAGHGNAYLAAILGNAAAGAAKTSTFLGERHRRIARRRGAKKAVVATGHSILVIIWHLLSDPDARYRDLGPDFYTTRIDPDRRKRNHIRQLEALGYTVTLHPAA

SEQ ID NO: 441257 - protein, 464 aa, unidentified
MRKARKSGRKPGKKIVDITAGLETLRLHAAGIDVGNAEHYVAVPVGRDPQPVQTFGSFTADLHRMAKWLQACRIETVVMQATGVYWMALYQILDGYGLQVNVVNAKYTKTLPGRKTDVLECQWLQQLHTFGLLNNSFLPPEEIRVLRTYLRQRESLVAESGRCIQQMQKVLTTLNVQLANVISDLSGTTGMAILAAILDGERDPYKLAALANSRIQASRKELAQSLEGHWRDDLLFVLRQVHALYFTYLQNITACDQRIAAHLKTLEGKVDVEAAPLPEARPQDRPPRRKHIPQTDLRRELYRITGVDLTRIDGIQVQTAQVVLSEVGTDMTRWPDEHHFSSWLGLSPNNQITGGKVIRRGTKKVLNHAATALRLAAQTLHRSKSYLGAKYRRLRARLGAPKAITAMAHHLARLIYRLLRYGTQYHDQGIAYYEQKYRETEMNWLRKQAAKLNLQLIPTVALSK

SEQ ID NO: 441258 - protein, 449 aa, unidentified
MENQARMIKSSDGNKLAIVNPNAAGIDIADAEMQVCVPEDRDGDNNRRFGSFTKDLNTIVEWLIGCNITTVAMEATGIYYLSLFLKLQDAGIEVLLANPADVKNMSGKKTDAADAEWLMVLHRYGLLRPCYQPGNAARQIRNLTRQRSNLIRMADKEVLYMQKAMEQMNIKLSTVLSDITGLSGRRIITAILQGQRNIYELAALAEPNCKASQEDIALSLEGTWDVDLLFMLKQSLAAYDFFLSQVGECDMEIERLLSLYGAQIEAGSAELIRCKRKNKRSKNAPRMDIENFAYQLWGVNVFEIPGLKDTAVMHLIGELGHDFVDKFGSAEKFSSWCNLTPNNKISGGKILSSKIMKRKNPVGQIFRTAVAPLARDKGEMGNYYRRIKSRSGALQANVATAHKMAKIFYTMVKTKTSYNASKVGLGERELAERKIAKLECLLMKLKNVS

SEQ ID NO: 441259 - protein, 414 aa, unidentified
MDVVVERCAGLDVHRDSVVATVRLPGNGKSRRRREQQTRSFGTTIGQLETLADWLEGFGVTLVGMEATGVYWKPVFYVLERRFECWLLNAQHLHNVPGRKSDVIDSAWCCQLLEHGLVRPSFVPPPEIRRLRDLTRLCVAQVEERTRAIQRLEKVLQDAGIKLSSVASSTYSASARAMLEALLAGVSDPAELAELAKARLRAKIPRLQEALANRFELAHHGVLVAGLLAHIDSLDQTVATLDARIAAATQPHAELVELLCTIPGVNVNTARVLIAECGLDMGVFGSAEHLVSWAAICPGLNASGGRRRSGKTRHGNRWLRKALTEAARAAARSKNTYLASHYWQIRGRRGDAKAIGATRHDILIAYYHIANERVPFRELGPDWLARRHSPEHRTRRLVKQLEALGHTVTIEAAA

SEQ ID NO: 441260 - protein, 423 aa, unidentified
MNCSTLCIGADVHLDEIVLCAVDQAHGHEVTDRFRVTNNLPGAQAAATTIAQLATRLGYTRIEIGWEATGMLWIPFHCYLRNCPLLHPFELQLVCFNPQLVTKFKEGLVLRRPKNDKLDASTVAARLRFGELPLSYVPGDFWQGLRRLTRFRFHLSRNLSREKMRFQSYAFLKCSDWKRVKGFSDVFGATSIALLTEFTVAELTQMTHDQLVDLICRRGRGRFADPNATARRVRHALRSSYPIDPQMDEMVTDVLATIWDHIRFIKRLMKRLDTQIARLIDPVPNPLITVKGLGAVITAGLLAEIVDIQRFAEHKHLAQYAGITWEKRSTGRFVSENTRLTKVGSKYLRYYFILGANTLRQFNLEYKAFYWRKHGEVSKYQHKRALVLTARKLVRLVHALLTKNVPYVRPQSLATVQEDEVLQ

SEQ ID NO: 441261 - protein, 348 aa, unidentified
MPHQMERKMTTQWVGIDVAAKSISVAMWDDAAKRSQYIGEYGNDEAGFVQMEKALGEQMEVDTTINLVVEATGGYELRLLSYAYERQWGIALPNPKQVRDFAKGNGRRNKTDRADAQMLADYGADKQPETQQMLPVELVELDELVQRRLQLEKHLRSEKSRLKQWQQRPRPAPAVTDSMQRTIDHINEELVAIETAIKSLLKSHPHHKRMVMRLLTAPGVGDKNVLHIFLALHRFHVRTNGNGNTKSIVAFAGLDPNDFSSGSSIYRRSSISKMGDSTLRRFLFMGAFGGIRGHNPLRHFYERLVARGKPKRKALVASARKILVWCFVLFNNHVDFDPSFHSFPQSAS

SEQ ID NO: 441262 - protein, 342 aa, unidentified
MSTVKIWVGIDVAKDSLEVHIRPTDQAFAVPNTPEGVDALIEVLAPIRPELIVLEATGKLEILVMGALADSKLPVARVNPRLAREFARATGRIAKTDSIDASTLAHYAEAIQPGPSKLPEPEARELSDLMARRRQVVEMITAEKNRLKRMHPSLHAHIQAHISWLKNEKTSIEHKVEELIKASDIWRELDLVCRSNTGVGKVVSHTLLAGLPELGKVNNKQIAALVGLAPFNRDSGLMRGRRSIVGGRAHVRTALYMAAVTAVRHNHTIKAFYDRLIAAGKPVKVALTACARKLLIILNAMVRDHLLSKAAKNGSLTLDNQHSRYIQNTGHRRLAFGGVECG

SEQ ID NO: 441263 - protein, 411 aa, unidentified
MLFIGDDWAEDHHDIAVMDEGGRVLTRRRLTEGVSGLEALHDLLGGYLPENAAPAEVLIGIETDRGPWVQGLLASGYTVYAINPAQSARYRQRTGAAGAKSDKGDALVLARIVAVDRELHRAIAADSDVAEEVKVLARAHQSLIWARQRQANVLRSNLREYYPAALSAFGQDLHGRDAMAVLGAEPGPKAGARLTPARVQALLRHAGRQRYLAARAGEIVEALHAPQLPARPGIEAAYTATTAALVAVIRELNAQIGVLQGQVEESFGRHPDAEIYLSQPGLGPVLGARVLGEFGDAADRYADARSRRNYAGTSPVTRASGTKRSVLARHARNRRLADALDLQAFTALSVSPGARAYYDARRSRGATHHQTLRALANRLVGILHGCLRHHTTYNEDTAWHTTTQNVELRAA

SEQ ID NO: 441264 - protein, 320 aa, unidentified
MKHKVGKDNTVARFIGIDVSKQWLDVATLPERETRRFSNDGAGQEQLGAWLIQLAPELIVMEATGGFETRVVTALAAEGLALAVVNPRHVRDFARAFGILAKTDRIDASVLAAFAEKVHPPVRPLPDEDRRELIDLVDRRRQLVTMRAEEKTRLSQATASARQDIKEHIEWLDERLRRLDIDLTAKLRSSSLWKAKEEILISVPGVGRVTVFTLLARLPELGALNRRAIAALTGVAPFARDSGQHRGRRMIWGGRADVRSVLYMAAVTAARINPVIKSFYLRLKQAGKPAKVALTACMRKLLTILNTMLRTNQSWHAPTT

SEQ ID NO: 441265 - protein, 343 aa, unidentified
MGIVEVTGGVDTHADFHVAAAVDANGGLLGVESFPADQAGFEGLSAWLADFGTVVRVGVEGTGSYGVGLARFLTDAGVGVVEVDRQNRQVRRKKGKSDPTDAVTAARAALSGAASVVPKLRNGPVEQMRVLLVARRSARHQRIQNLNQLRHLVYCAPELIRVRFKDRSQIGLVKEAAAMRPKPGSDPVAYTTNLVIRNLARRVLALNIEIKEIDRLLVELIGQTAPELLELYGVGPDGAATLLVTAGDNPERIHSERSWAHLCGVTPIPASSGKTIRYRLNRGGDRHANAALHRIVLTRMSSHPQTRAYVARRRGEGLNSFEIMRCLKRYVARQVFKHLPQPA

SEQ ID NO: 441266 - protein, 349 aa, unidentified
MLDNTIAMLDTDTGEFVEKTLEHDGEELRKFYSGLTRPVLVGIEATGSMQWFLELMEELSIECRVGDPAKIRATEPRKQKNDRRDAQLLLKLLSENRFPTIWMPSSEQRDLRTLLRHRHQWVRMRTRVQHTLQSMALNHGLRRGHSLWNQAGQRALRALPLAPHASERRKALMTLYPRLQESIDELDREVSQQAQNHPAARRLMTHPGVGPITALATEVFLGDPLRFTDGKAVASYIGMIPREHSSGGRQRLGAMSKQGNALLRYLWCEAAMHAVGRDPELKRFYRRKLAQKGMGKARVSAARKLGIRLWIMMRDQIDYEEFCRRGKARQESGSVCAGMSDITNGPAEA

SEQ ID NO: 441267 - protein, 354 aa, unidentified
MSKDKYVAMDVHKASVVVGIRDAGGKYITEAIVETKASTLVELVKGMSGTIHLAFEEGTQSAWLYDLFKPHVAELIVCDPRRNKLLEEGSKGDRIDVQKLSELFCKGMLKPVYHGDHGTRALKEMARNYESLVSDRTRVKNRLKAIYRGRGISYQGAEIYQTKQQKEWLAKLNERGVKRRAELLYQQLEGLDGLVQEARRGLLAESRKQKVSRGLRRISTLGSISVALLIATVDTPHRFRTKRQFWTYCGLAVVTRTSSDYYFDQGQLRRSRRPVVTRGLNQNYNRRLKRIFKQAALTASRRGPFKPYYERLLARGLSEELARVTVARKIAAVTLAVWKKGAQFDPEKILKPTT

SEQ ID NO: 441268 - protein, 304 aa, unidentified
MYHNFIGIDISKADFYVAIHGTKKVSVFTNDEAGFKQFNQAYEQQLPVALVVLETTGGYENNLIKFLQKSQIAVHRANTRIVKSFIHSTGKLGKSDNIDALGLARYGSERHQTLELYQQPSDRAKELVQLTNRKKELKAFLIQEKNRLQAPDNQFIKDSYSDNIQYLEIVIKKVNEQIQLLIKAEIDGVGEVTAINLIVSLPELGEVSGKAIASLSGVAPHPYESGQKIGYRRTRGGRENIKPILFMAAMAASKSKGKLGEFYRSLIARGKKPIVALVALMRKIVVMANAKIRDLKAKTCVVVI

SEQ ID NO: 441269 - protein, 340 aa, unidentified
MTATTDHYLGIDVHKRQAQVAVLDDEGEVTEEVRVANADLDEIAQKYAGSSAALEAGSNYFTIYDRLDEELDVTLANPAKADWLADQKQKNDRKDAKNLARYLRLGEVPESYVPPEEYRRYRALARGRKKLVDKRSDFKNEVNSLLDQNGVTYDGSLWSDQGREFLRELTLDDASELLLEQWLEAIDEFTVKIKRMQRRIEEVAAEVDELDTLMSAPGIAAFSDLMIHGEIGEVERFDRAAEVVSYAGLDPVIRESGDSRREGRISKEGNGYLRWILVQCANTAVHNAKDPYLSQFYWRLRKKRNKPHKVAIVATARKLLVALFNMLRKNEPYDPPEVSA

SEQ ID NO: 441270 - protein, 341 aa, unidentified
MKKLFVGIDFSKEKIDVAIIFAEGLTETSMRVSNEFKNSVSGYKQLVKWVEESSNETEPSLWLFCGENTGDYSKPLCNFLYGRGFDMWLENAKSIKDASGIRRLKSDRADANMIAEYAMRNYDKAIIYEPLSESLSQLRELFLYRQMVVRHRCSFQVRRGEKRLNMEKSPVKTMISQSGRHIVTELNKEIEKIDKRIAELIDSDDELAQVFTIVTSIPGIGTQNAVCLMVYTDNFRRFNFDSRKIACYYGIAPFGKDSGTSVHTDPHVHYMANRQIKAMLSQAALSAARFNPVIASYYSRLIAKGKKRQIVLNNVKNKLVHIVTAMVRNKQLFDKDYKISA

SEQ ID NO: 441271 - protein, 342 aa, unidentified
MREIIRIGMDTSKHIFVLHGVDAAEQPVLRKKLSRKQVLEFFAKLPPTVIGMEACGAAHYWGRELGKLGHEVKLIAPQLVKPYVLRNKNDGRDADGVCEAMGRPRMRFVPVKSAEQQAALMLAGVRDGLIGRRTQLSNAIRGYAAEFGLIAPQGLDKIEPLLARITQDESVPAMARELFAMQGRDYAQLQGELKAVEARLLAWHRANATSRRLAQIPSVGPIIATSLVMKTPDPHAFRSGRLFAAWLGLTPKDHSTAGKTRLGKITRAGDETLRRLLVAGATAVIRQARLGRGQPSRWLVALLRRKPPKLAAVALANKVARIAWKLMATGESYDAARMNAVT

SEQ ID NO: 441272 - protein, 359 aa, unidentified
MQRNKNSFKGQKIFVGIDVHKLTWEVAVLTESGFLKRHSQESSAKVLFDFLRKHYPDGEYHAVYESGFSGFATYYALKELGIECVITHAADVPTTQYEEVMKTDKIDAEKLARALKNGEIKRPVYIREKDNIDDRGVIRIRKTIQKELSCYKSRVKHMLHNNGVEVPKRFEKPGSHWSRAFITWLMQDVKLLSSTRLSLDLLVRQVEVIRSSLLQANRELRKMSQTARYKHRFDLLLTIPGIGQHVAMCILTEVWDVNRFPNEKAFAHYLGLVPGSHDSGPHKSNGEKTFRGNKHLGPMVIEACWIAIHKDLGLGACYAYHKQRRNPQKAIVRVARRMSNIIYSVLKNDKAYEPYQWDK

SEQ ID NO: 441273 - protein, 422 aa, unidentified
MLADSEDTEEIIERVAALDIGKAELVACIRVPHPDRPGRRAQEITTYSTMTGSLLGLAQRLQGLGVSRVVMEATSDYWKPVFYLLEAQGLDPWLVNAKDVKHLPGRPKTDRLDAVWLAKVAERQMIRPSFVPPPPIRLLRDLTRYRADLVNVRTAEKNRVEKLLEDAQIKLSVVASDIFGVSGREMLAALIAGERDPAVLAQLARTRMRTTIPLLEQAFVGRFTDHHAFLLATMLARIDETSADIAAVEARIEELIAPFAAAVERLDEIPGIGPTAAHIILAEIGLDMTRFPTPAHLCSWARFAPGVKESAGRTKGRGSTGHGNHYLARVLGEIAVGASRTDTFLGERYRRIARRRGKKKAIVAVGRSVLVIIWHLLSEPDTAFHDLGSDFYDNRLSPQRRTRTHVRQLEALGYKVTLEPAA

SEQ ID NO: 441274 - protein, 421 aa, unidentified
MARTGKRTKGIEKAQPFEGISRVNPNAAGMDIGSVEIVASVKGAENTQLVRAFGNYTADLETIGDWLSEHGVTTVAMESTGVYWIPIFETLENRGFECLLISSRSLPRVAGRKSDIEDAQWIQTLHSYGLLESSFRPQADLIALRTLLRHRGQLIEHRSPHIQHMQKALLQMNVQLSQAVSDVTGVSGLRIITAILNGERDPVKLGTLREPGCKNSAEEIGRALTGTWREEHLFVLKQSFEMYVYYSEQIVDCDEEIERTYAGLRVDNDPGDLPPMSRRKRGSHSKNKPKQSEEIRVHLKRISGVDLSLVDGFGVSLSQTVLSEVGTDMSKFPSEKHFFSWLGLAPKHEISGGEGLEEQDAKNEEPRGASFSDGGAIGETFGNGLWREVSSNACASGTGAGNGGRCARDCTRGLSDVEVQG

SEQ ID NO: 441275 - protein, 375 aa, unidentified
MNKVRWIGLDVHAETIAVAVAESDGEVRALGVIPNQADSLRRLVKKLGPVESLRACYEAGPTGYVVYWQLTGLGVACEVIAPTLVPVKTGDRVKTDRRDAAKLARSYRAGDLTAVWVPDAAHEALRDLVRAREAAKKDQLRARHRLNKFLLRHGRRPPTGVRPWTARYLTWVRQDVHFTPPAQEATLLDYFHEVEHVAERIERLERAITVAAQAAPPPMRAAIDALQALRGVAELSAVTIVAEVGQLARFTTARQLMSYSGAVPRENSSGARTRRGAITKTGNAHLRRIVVEAAWAYRCRPAIGPALRKRQEAVSPEVKAIAWKAQHRLFARYRILLARGKCKQQVVTAIARELLGFIWAIGVAVGATSESRRAA

SEQ ID NO: 441276 - protein, 371 aa, unidentified
MYIVGIDIGKNHHEASIVSPEGKQIGPSLRFATTHKGADSLMSFIFINIGNSPCVFGMEATGHYWYPIYSFLKAKGYTIYVINPIQSDSLRKMYIRQTKNDSIDSFLIAEVIRFGQFGTTSMADENILAMRQLCRYRDSVISSRTEIKLRIGTIMEQIFPEYEKQFSSLWVSTSMGILEKYLTPENIENAPIDELFEIIKDKSHNRLTRAKAISIKEAAADTFGIKIAQDAFSFQLKQLIDRMNFLDKQIEALDCQILEYYEKFDCYLHTIPGIGMIAAATILAEIGDINRFKSSSALVAFAGIDPTVRQSGEFSSPHNHMSKRGSPYLRHAIFLAATARSFHNSPLNAYYKKKRDQGKHHLTATGAVARL

SEQ ID NO: 441277 - protein, 351 aa, unidentified
MTEQPSANQIVIGVDTHDLVHVAVAVDHLGRRLGDLSIPTSPSGYEYFVTWASGLGEIIAVAMEGTGSYGHALCTLLRSRGVHVVEVSRPSRKNRRNHGKADLSDAESAARAFLGGEVTAKPRGNDASVAMIRSLRIPREALVNQRTQAINQLRALIVTAPAELRESLAGLTAKQLIERVAHFRVGSVTSPAEASRFAMLQLGRHVLHIDVQVEDLDRQLDPLVAGRAPELLAIYGVGVEVASNLLVAWDNAHRIRSEAAFASLCGVAPVPASSGKTSRHRLSRGGDRIANRALWRIVLTRMRTDERTRDYLARRQAEGKSKREVVRCLKRYVAREIYHVLQSSPAPCASA

SEQ ID NO: 441278 - protein, 348 aa, unidentified
MKIIGCDFHPSYQQIAMVDTETGELWEVRLEHEQGQARRFYEALRGQAVRVGMEAVGNSQWFEQLLAELGHELWIGDAAQIRRLVVRTQKTDRRDAQHILTLLRDGRFPRLWVPSPELRDLRQLLRHRHKLVQIRTQVKNQLQHLALNQGVRRKSRLWSRAGRAVLEQLPLRGWTARRRDELLAMLDQLEKQVGELDLAVRTEAARRPEVRLLMTHPGVGPVVGLAYALTLGPVTRFPRGKQVASYLGLIPREHSSGGRQKLGSISKQGNVMMRTLLVEAAQTAARLDEELRQDYCRLAARKHSALAKVMVARKLAVRMYWMLRENKPYWQCSVARRQGSPSHSVVAR

SEQ ID NO: 441279 - protein, 492 aa, unidentified
MTKSTRPFPKKQREKRQKKKIEKSVSSPSFEQVNPHAAGIDIGSKSHFVAVRTEAGEITVKEFDSFTSDLYELSKHLKENKVTTVAMESTGVYWIPLYDLLEEEGFEVKLVNARHVKNVTGRKTDVEDCQWLQKLHSFGLLSGAFRVVEKIRPLRAYSRQRSLLIESMAVHIQHMQKALFQMNIQLTNVLSDITGLTGMQIIRAIVAGQRDPKVLAQFRDRRCAKSVEEIEKSLTGHWKNEHLFSLQQALELYDFYQKQILHCDEKIKEALQELNGGNAPEEDSQNHDGKAPAKSRKPSKGNALHFDVKAYLQSITGVDLTRIPGIDGNSALKIIGEIGADMSPWKSAAHFTSWMGLSPENKISGGKRLSSKTKPTANRVAQVLRMAASTLYRNDSAMGGFLRRMKSRLGAPQGITATARKLAVLIYTMLKNGTEYVEAGLGAYEKQYEERLLKNLKKQAAKLGLSLVPSLQNQPPDPQTALLSVISTPLTS

SEQ ID NO: 441280 - protein, 426 aa, unidentified
MSEVELVKPEPRYAAFIAIDWADKKHVWCLQGMGSEKRESGELEHTPEAVEAWVVQQCQRFDTGPIAVAVEQSRGALVFMLSKYEALHLFPVPPTMAAKMREALYPSGVKDDPRDADLLLDVLLKHREKLRRLMPDTEATRRVQNLVEERRKLVDERTEQSNRLTSHLKIYFPQILDWFEHLDTELVCALLLRWPTLEQLQRVPPAQLRTFFRKHHCRNQELIERRIQEIRQAIPAIRDRAVIEAKSTVVKVTVRMMRSLLEGIAALDEKIEEAAAAHPDFFIFDSLPGAGAVMAPRLLAAFGSQRERYGSAREVQTYSGIAPVIERSGKKKWVHFRRACPKFLRQSFHEWAGHSIAQSVWARSYYQQLRSRGKGHHAAVRALAFKWIRILFRCWKDRVAYDEVKYLVALGRRGSPLAAVDVAISG

SEQ ID NO: 441281 - protein, 345 aa, unidentified
MEHFAGLDVSVKATSVCIVDDTGRMVREVKVASEPEALLPVLTNPIYRFKRIGLEAGPLSQWLFSALAEAGLPGICVETRHMRAVLQAQINKTDRNDARGIAQMMRAGLYRPVHVKTLRSQKLRMLLTHRKLLQSKAIAIDNDLRGTLRNFGLKVGVVGALKFEARIKELVENLPDLAELVEPLLIVRRALREQIGILHGRLLAIVRTDDVCRRLMTVPGVGPVVALTYRATVDVPARFRNSKAVGAVFGLTPSRYQSGEINRSGAISRCGDEMMRAMLYEAAHIMLVRLAKWCWLKAWAMKIARQRGMKKAIVALARRLAVILHRIWVDGTEFRWTREQAAAAA

SEQ ID NO: 441282 - protein, 394 aa, unidentified
MKEVASGENGSLRMIEGQSHFRPFGLSCWGFADLNKGVGSMTASYDYHIGVDYHKSYSHLVVQDSGGKTLRSGRVKNDRQSLGGFLERYRQNSHAVVEATRNWMVIYDWLDDICDDVVLAHPLKVKAIADAKIKTDKIDATVLAHLLRADLVPEAWAPGERARELRVALRERMFYVRLRTMTKNRIVTVFDRYPEQTAQLKLGDLFGKAGRVQLAQVNVSEIDRIQIDRGLAFIGDIDGRIKQSEATIRTMTKANGNVRLLKTIPGIGEFFARLIDAEIDDISRFRNAKKLAAYAGLVPSTYSSGGKTFHGKIIKQGNKWLRWAFVEAVTPAIVTDAQLRAQYEHLKFRGVNKARVAVARKLLTIAFQILRDQRAYEPRGASPTEGASTISRLS

SEQ ID NO: 441283 - protein, 337 aa, unidentified
MKNASTIKVYKDCLAVGIDVSKADLAIVGIAVKESYLSTVNNQQKAIRSFVRRLKRCGFKGKIICESTGHYHLKLALICHELGLALIVLNPLQSSKHSKAKIRKTKTDPQDALMLATMCLTEPDLPKPAQLTPSKILIRLKMGQIASIEKQLQKMRQSLNQYEETYEGLGLPLGDLQHALHDHCDALKKIQQQLAKELENLLSESLPDDDSFQQLCKIPGYSNIVSGIVGMLDREVKSSHSWAAYVGLDVSVRQSGTWRGRGRLTKRGNAYIRKRLFQAAWGACLNYDYVRAYYDQLKAQGRKHVEAVCIIARKQLRIAYHVVINKVDFDPKIAFPD

SEQ ID NO: 441284 - protein, 483 aa, unidentified
MKPKQLEKSKKASCRPTPTNWHKMNRKQRREMTRKIQSEDLSLEVVHPDAAGIDIGNESHYVAVPPTRDSQPVRRFGCTTSELKEMAVWLQQCAIRTIALQSTGVYWIAVYDILEEAGFEVYLVNARETKNLPGRKSDVQESQWLMKLHTYGLLRNSFRPSQEIRTMRTYWRQRNDLVRAAGRHIQRMQKALTQMNIQLANVLSDVSGMTGQAIVKAILAGERDPYQLAALRNWRVKASAEEIARSLEGNWQEDLLFVLQQEQNGYEFCQKQMAECDQRLQQYLQQLQDRSHGADLPEEKRKERLRKKKKGNAPQFDLRAELFRMTGTDLTQIDGIDVTTTMTILSEAGWDMSKWKTEHHFVSWLRLCPDNRISGDKIIGKGRLPTNNRVTNALRMAASTLRLSNTYLGAQFRRLRTKLGAPVAIKAMAAKLARLVYRMLRYGMPFIDRGAEFYDAQHRKLQINYLKRKAANLGLQIIEAPAA

SEQ ID NO: 441285 - protein, 360 aa, unidentified
MAKARTLVGLDVHATTIVAAVLDAETGELGTFRMNGEGKEAAAFCAGLPSPVRAAYEAGPTGYGLARGLAKRGVECVVAAPSKIPRASGDRVKTDRRDAEHLVRLLLAGKLHAVRVPGDEEEALRDLVRARDAVRMDLMRCRHRLSKLLLRHGIRSDDGHAWTQRHRDWLATVTLDWPAAQATLLDARGAIDALAHRRDGLEREIVAMLPSSPWVVQVGRLRCLRGVDTLSAVGLCAEIGDFERFARAEQLSSYVGLVPSESTTGQQRRLGSITKTGSGHARRLLVEAAWHYRSRPAIGRALTDRQDSQPPAAIAVSWSAQRRLHRTWTRLEARGKRRTIIAVAAARELAGFAWAITQIE

SEQ ID NO: 441286 - protein, 355 aa, unidentified
MTGTKYIGMDVHKESISIAVRNAAGKIVMECVIETKASTILEFVDGLRGDVQVTFEEGSWSAWLYDLLKPHVTRLVVCDPRRNALLQQGNQNDRVDARKLAELLQNNQLRSVYHGDHGLRTLKELVRSYLTITRDLSRVMTRVKALYRGWAIPCTGKQVYASRHRAEWLGKISEAGVRRRAEFYYQQLDALRSLRQEVRRDLLAESRKHQVWKRLCQIPSIGPIRAAMLLGILQTPHRFRTKRQLWTYSGLGIEVHSSADHQVVEGQLQRKKKPVEIRGLNENCNHDLKNLFKGAAVVASIKPGPFEKFYAALLAKGMRPEMARLTLARKIATIVLIVWKRGVCFDAQHLKPQTA

SEQ ID NO: 441287 - protein, 372 aa, unidentified
MDKDSELFVGLDTSKLKISVAVADGERNGEVRFFGDISAEPASVASMVAKLAQRGANLHFCYEAGPTGYELYRQIIGLGHCCSVVAPSLIPRRPGDRVKTNRRDAVSLARLHRAGELTSVWVPDETHEAVRDLVRAREVANDGLRKARQHLQSFLLRHGRIYAGRAPWTRVHSRWLAVQSFEHPAQNIVLAEYIQAIEDAAVRLDRLTKQVSEAMSSWSMGPVVEAYQAMRGVALITAVTFVVEIGDVRRFDSAPQLMAYLGLVPSESSTGDRVRRGGITKAGNVRARRVLIEGAWTYRFPARVSRDIEARLDGLPRSVREIAWKAQIRLCARYRKLVMAGKTKTVAVTAIAREMAAFLWAIGQEVAPAKAA

SEQ ID NO: 441288 - protein, 306 aa, unidentified
MGYGIGLDVCKAWIDAHVHGMERRARFPNTDTGLEALRHWLAEVPVRQCVLEATGGYEQQALDRLHAAGVPMVRINPRQGRDFAKATGQLAKTDALDAQILAHMAAVLELTPYRPAPAWQRRLAQYHQRRLDVQQTVQQERQRLEQLTDPWLRRQTLLALGRSEAMLKALDARIAQQVAEQPGLAVLGQIKGVGPVLRSALATQLPELGHLSGKAIAKLVGVAPLACDSGNLRGARRIWGGRAGLRATLYMGTLTAVRYEPTLRSFYQSLRDRGKPAKVALVASMRKLLVILNARMRDHLNASCCA

SEQ ID NO: 441289 - protein, 355 aa, unidentified
MKRTAKYVGLDVHQATTVAAVREESGRVIARSKLPTETTALTEFFRGMRGTVQVAFEEGTQAQWLHDLVRPMVQRVVVCDRRGEASQGNKADQADADQLAELLRRNALRAVYHGSGHLATLKEVARAYQNLVEDSTRVMLRLKALFRARAIKTPGPALYQPDRRAEWLGQLPDEPGVHFRAQALFAELEVLLALRPTAKAAMIAAAKRDPAWAVLRTIPFFGSVRVAQLLAKLQTPWRFRTKRQLWAYAGFAVVTRTSAEYVVQDQRIVRRRRAPFTRGLNRNHSPVVKEIFKSAATAAATRPGAFHDWYQRLVARGMREELARVTLARKLAAITLRLWKTGARYDPTKLTVQAR

SEQ ID NO: 441290 - protein, 320 aa, unidentified
MEKAKLYAGIDVAKASLDMVVHPSGKRWSFTNDERGISEAVSCLQGLSPALVVLEATGDVEMPLTAALVVAGLPVAVVNPRQIRDFARAMGKLSKTDVLDAQVMAHFAATVQPTARPIPDAQTQELSDILTRRRQIVEMIVAERNRLLTARGVVSEGIQAHIAWLEQEMANIDHDLRGKIRKSPIWREKDDLLQSVPGIGPVISATLLAELPELGTLDRRQIAALVGVAPLNRDSGNFRGKRSVWGGRAKVRAMLYMGTLVASRHNPIIRAFYQRLCAAGKEKRVALTACMRKLLTILNAMLRHRTSWCYPNTQIIGPCS

SEQ ID NO: 441291 - protein, 342 aa, unidentified
MSIVYVGLDLGSSAFQQVAIKTDGSIKVNRSFTTSEANLRAAFADQQGEIQVHLEAGELAPWAASIIAPLVTRVVCSHPQSNAWIAKDADKCDRIDAYKLAELLRLNRFKEVHYPPDQRRRNFKQLVQHYDELTSQQARLKTKLKARLRMQGVIVGGERVFSSSGRKPVLAEVKSAEVRTAIKQLYAVLDQSVMSQTEARLLMLRAAQAFAEIRIFRTAPGVGPIGACRFSAYIHTPNRFSSKRKLWKYCRLSVSHRSSNGKPLRRPRLDRCGCGRLKDVSRKAFEAAMRERKDNGFKRAYQRALETTQDATHARLTVQRKIVSTLRAMWLTMTPYCDELMR

SEQ ID NO: 441292 - protein, 430 aa, unidentified
MTKRSSTPADAMLVAIDMSKHRQEVLIERPEGGRRRRMTVMATKADYDRLAHDLTDIGRPIVVGFEATGNYHRALAHRLLAAGFELRLISSVALARTREALHNGWDKNDSKDAQVILHMLRIGATQRYVDPLAAGINDLQDMSKTHEAISKAKTQTWHRILTHYLPLYFPEIERFAGNSRSDWFLALLERFPTPASMTALGQEGFAREAWALVGRKVSKARLLNDIYETACASIALPIEEDSVSIAMFRMVIAQARSLIRQRDEIERTAHAILSGNRDYQLLRMIPGIGPINALTILAEAGDLRRFNHHRQFLKFCGLDLATCQSGTFRGRTKLSKYGNARLRRTFWMATQVAVRQRDNSFRDKLGRYVAGYGNDPDRRRKAMTALTAKMARVAHAVIKTGAEYRPFVERADTRWKDPSLSRREGATATL

SEQ ID NO: 441293 - protein, 405 aa, unidentified
MQHHNSNRRRFFIMVVSVGVDVSKDKHDCFIVNSEGEVLADVFTVPNNMDEFHCLLQRIQSCAAPQDKIKVGLEATGHYSYNLLAFLLDNGLPTYVLNPLRTNLYRKSLSLRKTKTDRVDARTIASMLLSDAGLKPYTDTAYHNEELKSLTRYRFDKVKERAKLKSSIARLVCILFPELEKLVPSLHIASVYALLEEFPGAKQIAAAHLTRLKALLETASKGRYKRDMALEIRDAARNSIGSWMPAKSLELQHTIRLIRELDDEIAEIEKQIQAIMDELNSPITTIPGIGFRMAAMIFAEVGDFTRFDSPDKLLAYAGMSPSTYQSGQLKNCYPHMEKRGSRYLRYALYNAAKYVCHWDPTFAAYLAKKRAEGKHYNVALSHAAKKLVRLIFAMEKSRQPYCSAA

SEQ ID NO: 441294 - protein, 417 aa, unidentified
MGISNNSEFTAYVGIDWADKKHDACIQAAQGNQRELVVIPHQVKCIDEWVHSLHQRFGGPIAVAVELTKGPIVTALQKYDFLVLFPINPSTLAKYRQAFSPSRAKDDPTDAELAVDLIVRHPERFTPLKPQSTTMRTLATLVVHRRKLVDDRKRITNRLRYTLKQYYPQTLEWFNRIDTPLFCDFLQNWPTLKQAKRARKATLESFFRTHNMRFKALMQERITAIRSSTALTDDMAIIAPHRLQALVTIEQLRVLLKAIDQFDEEIEQLANQHDDYELFNGLPGAGPSLAPRLLVAFGEQRDRYKSVVEFQCYSGIAPVTERSGQKHTVHWRYLCPIFLRQTIVEWSAQTINKSYWAGIYYRQQRDKGSSHPAAVRALAFKWLRILFRCWQTRQPYNESIYLKALQRRGSNLVKQTA

SEQ ID NO: 441295 - protein, 352 aa, unidentified
MEMIALDCHKHYSVASVQSPEGRSLAECRIEHRRGSIRAFLASYSPGCPVAVETIGNWYWIVGEIEQAGKVPRLVHARKAKLMLGSIDKTDKLDVRGLNRLQQTGTLPTVWIPPAGLRDQRELPRTRMVFATARTRLKNRIHSVLDKYGLQDQLTGVSDIFGAGARERLEGCIKQLPPQAAYTSDLLLEQLDAVQERIEALEQRMAEVFRPTEELKRLDTLPGVGLILGVVLMLEIGDIQRFRCAERLASYAGTVPRVHASGGKTHYGRTRPDVNHYLKWGYTEAANAVAVHRESLAHRHVSQLYSRIRNRRGHASAVGAVARHLAEATYWMLTKKESYRERGITEVSPQGL

SEQ ID NO: 441296 - protein, 356 aa, unidentified
MMESKQLTINVVREETEMNITTVGLDLAKNVFHVVCFDERNKEVKKRMMRRNQVRHFFTQLSPCRVGMEACATAHYWGRELRALGHDVKLVPPQYVKPLVQGNKNDYNDARAIAESLDRPKVSFVAIKTIEEHDMQAIHRMRSQCLRDRTALSNSTRGLLGEYGVSFSKGLAVLRRKIPELLEDADNGLSLRFRNLLARRYEQLVEIDEHIAFYTKELELLSKQDDACQRLQTIPGFGPIVASAFRSTIGDGRAYVRGRHAAASLGLVPRQYSTGGKNVLLGISKRGDKYLRKLLVHGARTVVLHAANRDDPLSRWINRIRERRGYNKAAVAMANKMARMGWAVLMYNTSYEPTLA

SEQ ID NO: 441297 - protein, 386 aa, unidentified
MEHYVGLDVSLKLTAICIVDRTGTIQREGVVHSDPEAIAAFIKSNAPHVARIGLETGATSTWLWTELNKMGLPVICIDARHAKAVLKMQINKSDRNDAVGIARIMQCGWYKEVRVKDLDSHAVKALLVSRALLVKIKRDLENQVRGLLKNLGLVIGPAKMNAFALRAAELTEDRPELAAAVAPLLNARAAIELQIADLDRKVMKLARSNAQVRQFMTAPGIGPVTALCFLATIDDPGRFKRSRSVGAYVGLTTRRYASGEIDWTGRISKCGDKMLRSYLYEAANVLLTRVAKWSALKAWGIRLANRSGLRKAKVAVARKPCGHSAPDVDRWYRIQMVIKGGCPATSIANYRIPADHGGIQGPCRDVGVGAIAPGFAMLKRQARFTH

SEQ ID NO: 441298 - protein, 482 aa, unidentified
MKEPRMKDNRRSPAPRQAAATKHRSWSPLLKRIQPDAAGVDCGATSHYVAVAEDREPQPVRAFSTFTADLHRLADWLVQCGITTVAMESTGVYWIPLYEVLEERGLEVVLVNARQLHNVRGRKSDVQDCQWLQELHSVGLLQASFRPAGEIVALRSYMRHRQSLVEAAATCIRRMQKALTQMNLKLHHLLSDLTGVTGMAIVRDILAGVRDPQALAAHRDGRCKASEQDIAAALTGHYRPEHLFALRQNFAAFEFHQRQIAQCDQAIEAQLASLAESRPPASRELPAARPRVKLSKNEPRGELRAPLHRITGGADLSQIDGIGPYGALQLIAEIGTDMSRWRSEKHFSAWLTLAPNNKISGGRLLSSKTQPSANRAAVVLRRCAMSLTRSATALGAYYRRLAYRLGQPKAITATARKLAILVYRVLGGEMVYRDPGATAYDQLHRTRLINGLRRRAQEFGLSLINLETGEVLDHALVPQSVS

SEQ ID NO: 441299 - protein, 429 aa, unidentified
MSPSFAGVSSNFAPYSLILLERRYWYSSHLLIEGSIFIMINIGIDVGKLKHCAAVLDDKTGEVLINPFFFDNNLEGFELFYSKVKQFIRRKHSVGMEDTGHYMINLTNFLLEKKFTVKYINPRSTSLRRKELGITAKNDKKDSLLIAEMLSEKKFWRSVSKSSLETAKLREITRLYHQLQEQQNQDMNRLQRALDIVFPEVNKLSWTRYSKAYMQFLATYSSASSIAGEDIRNLRKALKTEGRGRQCKVTAEEIKELSKHSVGDDNIAVELEVKSVIAIINTRNEQIRVLEKKIEEFSRQLNSPIISIPGISHITGMTILAEIGDIKDFPEAAKLISYAGMEPLVHQSGNYDAAHMPISKHGSRYLRKALYQAVFTVCKYDPTFQAYYTKKRNQGKSHRCAQGHCVRKLLRVIYKILSTDILFDSELIH

SEQ ID NO: 441300 - protein, 330 aa, unidentified
MKQYHHFFGVDISKKTVDITFISEQENVHKQFTNNAEGMGLLLEWMEELNLDFSRTLFCMEATGLYCFTLTHFLTEKAIDVWVEHAAQIKKSTALARGKNDKVDSQRIAIYATKHLDRLRLWKPISTTLEKIKHLATLRERIVDTQQRLLVPIHEFEEAGNPEMAKLLTRSIKKTLDALEKDLTAVEKQMLQILSNDVELNDKYYFAKSVVGIGFVSAINLMIYTNGFTEMNDVRALACYCGVAPFGYDSGTSIKRKPKVHFMANKKLKCNLHMAAMAAVRSDADLKKYYERKVAVGKNKMSVLNAVRNKLLARVLSCVNNKRYYVNKVA

SEQ ID NO: 441301 - protein, 371 aa, unidentified
MDESTKMLFVGLDVHKDTIAVAYAPDDRGADVVSLGIIGTRQCDIDKLIRRLESKGATLVFVYEAGPCGYWLYRYLTRRGFGCSVVAPSLIPRKAGDRVKTDRRDAVTLARLRRSGDLTSIYVPSVDDEAIRDVSRGREDTMRDLKRAKVRLKAFLLRQDLRYEGRANWNAAHLRWLSRVVCPTPAQQIVFQEYVRAVTEQTERLQRLERELHELVKGWRLYPVVEAIQALRGLELTGAIVLVAELGDLTRFDTPRKLMSYLGLTPSEYSSGGRRRQGGITKAGNGHARRVLVEGAWAYRYPAKVSRHLQLRLEKVPAEIQGIAWKAQIRLCKRYRQLSARGTHANHVVVAIAREMAAFAWAIARTVPVAA

SEQ ID NO: 441302 - protein, 343 aa, unidentified
MGDVITIGLDIAKSVFQIHGVDADGAVVIRKRVSRAKVLEFFAAVPRCLVGIEACPSAHYWSRKLEVLGHTVKLMPPSYVKAYLKRSKNDANDAAAICEAVTRPSMRFVSTKSEQQQSGLMLHHSRRLLVRQRTMLSNAIRGHMAELGIISAKGRNGTAELLEVIANAKDDFIPAAARFSLEVLARQYIAIATEIGVLEKRIHAWHRSCEESRRLEEIPGVGPIVATALIAEVGDWKAFASGRSLAAWIGLVPKQHSTGGKKRLGGISKQGNRYLRWLLVAGAMAVIRYARRHGTKRLWLTRMMERRPIKVAAVALANKIARMAWAIIVRGERFREPRLLLAA

SEQ ID NO: 441303 - protein, 330 aa, unidentified
MDHCAIDLGGRKSQVCVRSPDGQLLFEGPYDTHSLPEFLRLLPRSRVIVETTAEAFRVADAAKEAGHEVRVVPATLVRSLGVGARKTKTDKRDARALSEVSCRIDLPSVHIPSARSREWKAICGMHDALTASRTKLINNLRGWLRGQGLRIGKGKAETFAERMMKFELPDYVTSQVEALAALTRKIRESDKRIETLAKDELCERLMTVPGIGPSSAVRFVAAIDEISRFESAHKVESYLGLVPGESSSSERQQRLSITKAGSASVRWVLGQAAWALQVRCQDPAARPLQLWAAEIARKRGRQIATIALSRKLAGILYALWRDGTRYEQRR

SEQ ID NO: 441304 - protein, 318 aa, unidentified
MSKTNTKSLVCAGIDIGKAKLDCAIAERGAELCCDNSQDGRGQLIAFLKGHGVRRVGLEASGGYEIEVVDDLRAAGFEVIMFQPNQVRAYGQFSSARAKNDRIDAILIAECTAAQDGVRAAPDPRLAAFAEHLTWIEQIEEDVARAKVRRERYRNPRLKAEIEGEIKRLGARKREEIRLLLKALRAHADLAHKIELLVSIEGIGERTALALVVRMPELGTLSREEAACLIGAAPFVHESGRYKGQRRTGGGRARARTSLFAAAQAAARQWNPALIAFYDRLVKAGKPHTVAIVACVRKMIIYANAVLQRDQPWKIITA

SEQ ID NO: 441305 - protein, 318 aa, unidentified
MTQTTHTSALYVGIDVSQETLVVATYPTNAVWVIPNDADHCAALADELAQQPVQLVLLEGSGGFERPIVHALQQAGVPVVIVPPQRARYFAKSMRGNLKTDRVDAQLLARFASCYPVPEMPETPAMQAQLKELWARREQLVQALESEKKRLQVAMHPLIRASLERTIAHLQAECAEIEAAIEALIASDEALQPKAALLQTAVGVGRVVAYGLLAELPELGWVSHKTIAALAGLAPVRRESGRWRGSARIGGGRRRVRRLLYVASVVAVTHDARWRAVYEGLLAKGKAKKVALCAVARRLLVVLNAMVRDGRAYARVQE

SEQ ID NO: 441306 - protein, 484 aa, unidentified
MKENHRRCCGIDVHKSSVTVCVLPPVGQTHLEVKKRKFRTFTRDLRQLRAWLKDCQVTEIAMESTGQYWRPLWNLLEGQFTKVILVNPQHIKGLNGYKTDPKDAQWIADLLESGKLKGSWVPPRPIRELRDLTRQRVHILEDLNRAKNRIEQLCQTGNIKVSSVASDLFGVSGRKMLKAIVEGKRDPGWMADYAKGRLRDKRRELELALEGTFTDEQRWLLEKELRQVEWLEGQVQTLEEEIERRVEIFEEPIQRLLTIPGIDRKTAWTIAAEVGADMNAFTDARHLASWAGLCPGNRESGGKRFSGRTRKANRYVKRAMCQAAWAASHTKNTYLSAFYRRMSVRKGAPKAVMALAHHMLVVIYQVLSRNEEYVEFGGDYYDQRNKPKVVARLVTRLMKLGYKVDIQPAEGIGEPAAVAAEPETGAESVPKSSDSSTEASEGAVKPKRRGRPCKCAARGIICKHRTSPETNSMIFRTLPAGKFS

SEQ ID NO: 441307 - protein, 360 aa, unidentified
MNEITRVGVDLAKRVIQVHAVNATGRVVAAKALPANKFRAWCAQLPPGCLVAMEACGGAHHWARKLRGYGLDARLIAGHFVTPYRMSGKGGKNDANDAAAICEAAGRPHMRFVPVKTPAQQALLAIHRLREGYKEDRTACINRIRGLLTEFGIVFAQSPESLRLGLADVLEDASNELPGIARLALQEARLHWIELECHIASCDERITAHVRTDEQAKMAAQLSGIGPVTASALVATVGDFKQFKNGAQFGSWLGLVPRQNSSGGKTQLGRITKRGDDYLRTLLIQGAKSAVMTAHKRSDKISQWLVQLLARVGWQKAVVALANKNARIVWALLAKGKTFDPNYVSVKPGEVPAMPGTAAA

SEQ ID NO: 441308 - protein, 455 aa, unidentified
MKKTVPSAKIISVRDSKNLLLIKEKRAPNMNYKQNEKIMQVTEKTLVVGVDIAKETHYYRAFNYRGLELARVYSFSNNHAGFESFRQWCEEIMRKNNLDKLIIGMEPTGHYWFTFAEYCRDNDMKIVLVNPFHVKRSKELDDNSPTKTDRKDPKTIAKLVIDGRFVEIYIPTGVYAELRGVLRMYDHVNGCKSVVDNKIQQWLDIYFPEFMEVFGSWNCKSAMITLRQFPLPSMIVELGETKVLEEWKKEIKQGVGKKRVRKLVETAQKSIGSKEGLKMAVRELQYLISEYDVYVKQMEEIKTEMENLLEQIPAAKKALKIKGMGVVTVAGIIAEIGEFSRFEDARQIQKYAGLNLVENSSGKHKGETTISKRGRKRLRSLLFRVIMPMVANNPEFKELHQYYTKRKENPLKKKQSLILLCCKLIRILYAIMTKDVEYDGSKLMKDIKRASKEAA

SEQ ID NO: 441309 - protein, 358 aa, unidentified
MKVKHSDVRFDGQDFCLGIDVHHRTWKVTIRTMGTELKTLAMPPDPLGVHAYMKRNFPGGRYRSVYEAGFSGFWAHRQLTDLGFANWVVHAADVPTSDKERRQKEDVRDSRKLARSLENGELKPIHIPDPRIEALRSLCRLRERSSSHIRRLKNRIKGHLKYYGIRVPEDSAYRYWSGPFIARLEALCSEPGPRSDYLSITLDALREESRRLALIVRKLRAHCREGEAARITGLLCTIPGIGPKTAFTLYTELQDIGRFANLDKLNSFLGLIPSTDSSGEDEKVTGITPRSNHRLRALLIEASWVAIRHDPELLRAFSKLSSRMKKKAAIVRIAKKLAARVAYVWRTGTPYKPAVPTS

SEQ ID NO: 441310 - protein, 402 aa, unidentified
MNAVGIDVSKGKSMVAILRPFGEVVASPFEVGHTGQELSALAKRLLALDGETKVVMECTGSYYLPIAYALQEAGLFVSAVHAKLIFSFDNDSIRRKKTDRADAVKIANYALSKWLKLPVYVPEEDIRKLLKICSRQYSKYGKLKTMLKNNFIALTDHTFPGVNELFTSPVRADGHQKWIDFATKFWHCECVCALREKEFTERYRRWCKREGYYFNTRKAEDIYVAAIGHFCVLPKNESTELLVKQAVAQLNSVSVAQSVMAGEMLRLAQMLPEWPVVSAFYGVGGILGPQLMAEIGDVRRFEKKGSLVQFAGLCEEPYQSGKFNAIGLPISKKGSPHLRKTLFQVMECVLKNKPESDPVFQFLDRKRSEGKHFYNYMTSGSAKFLRIYYARVKQTLIELNEQ

SEQ ID NO: 441311 - protein, 482 aa, unidentified
MKKRSIFQNRSQQLLRLFEKAGNRLKMMCVPIDYAKKDHIVMFCNGYGDILRKPFSVKNTLEGVKYLIDQVMRSCRQRHIKKGHVFFGGEDANSYAENFANALRSKGFLVANVNAHDAKKQRDNLQASTDRIDLMGIATMLLNLRAKCSPAQDGIYRNLRTLVRHRKKLVVMKTEVKNRMHTLVDRLFPGFLNEKNTGINPFSKSSLVLMEDRFSAQQIRRRQKSTLIKTLKRCANPDAENIAAKLHRYAAQVITTPDEYAATLQLSLQHHIKHYRCVQENIDQLVSEIAVLLARTHAAFLTSIKGVGIVLAAGVSSEIGNPFKQKPLNNLTSYCGIIPRVKQSGGIEGHTHTGRVSKRSNHLLKDYVVQSAFQMGIRGPEPLLQDYKRREAAGQHADFGIGRRFLRMGMCLMRSSQVYMPPTLRSPQTQMHERAGYYLTMWPLLRDKWKKAHAHQVAFAKDEPLGQWRQMVQELYDIKLKL

SEQ ID NO: 441312 - protein, 348 aa, unidentified
MRFYNQSHAFYCGVDLHARSMFTHVLDQSGNTVLARDLAADPKVFLDAVAPYRTGLVVGCECMFAWYWLADLCEDQAIPFTLGHALYMKAIHGGKAKNDRIDAAKIAGLLRGGMFPMAYVYPRAKRATRDLLRRRCFFVSQRSQLIAHVVNTNSQYNHPALSVRLCYPRNRKENFAERFADPATRLSVGADLKLIDHYDTQIDEIEQAVLRTAKIDNPVTLQFLRTIPGIGKILSLVMLYEIDQAERFPEVGNFLSYARLVRCEHESAGKVKGSGGKKIGNAHLKWAFSEAACLMLRAWPEAKKWLQKQERKRGKRKALSVLEAKIGRAVYHVWRKQVPFDRQRFFCQ

SEQ ID NO: 441313 - protein, 451 aa, unidentified
MKKKKVSLEIVNPYSAGIDIGSRSHFVTIGQDADEVREFGVYAEDLQELAAWLLEHGIKTVAMESTGTYWQNLFSTLQGFDIEVYLVNGKFTKNMRGKKSDVMDCQWIQKLHTMGLLSTSFLPDSTTETIRTYTRHRLNLIQLAADTSKKMQKYLRLMGFRLDVVVNDVCGLTGIAIIKDICNGNLNPQLLSEHRHYNCRKSIEEIEKALHGNGRKDYLFALKDEYEMYQILKIKIEKCDKEIELLLKEIIEGNENKKHHTAEAKPHKRITKNTNKNLDLNQVSFQYFEGIDLMKIEGVSHATVMTIISEIGLEGFSKFNTSKQFASWLRLAPNNKISGGKVLSNQIAKGSNRLKIALRNAANCIGNLKDTHLSDFFRRVCIKRGRASAVSATARKLAVIIWTMVTKKIQYDPPKEYLMLDQKRKLGLVSRIRKSIAKFDLKPDDLGFATY

SEQ ID NO: 441314 - protein, 402 aa, unidentified
MNAVGIDVSKGKSMVAIMRPFGEIVSAPFEIKHTASGINSLVELINSVEGESRIVMEHTGRYYEVLAHQLSEANLFVSAINPKLIKDFDNDSLRKVKSDKADAVKIARYTLDKWQNLKQYNVMDELRNQLKTMNRQFGFYIKHKTAMKNNLIGILDQTYPGVNTYFDSPARSDGSQKWVDFASTYWHVDCVRKMSLNSFIDHYQNWCKRKKYNFSQSKAEEIYGKAKELVPVLPKDAITKLIIKQAVDQLNSASTTVESLRTLMNETASKLPEYPVVMAMKGVGTSLGSQLMAEIGDVSRFTHKSAITAFAGVDPGVNESGSYEQKSVPTSKRGSSDLRKTLFQVMDVLIKTHPQDDPVYQFLDKKRAQGKPYYVYMTAGANKFLRIYYGRVKEYLSSLPES

SEQ ID NO: 441315 - protein, 343 aa, unidentified
MRTVTTIGLDIAKSVFQVHAVDAAGKVIIRRHLKRRYVLAFFEKLPPCLIGIEACASSHHWSRELQALGHSVRLMPPAYVKPYVKRQKNDATDAEAICEAVTRANMRFVETKTADQQSGLVLHRTRHLCMRQQTSVINAIRAHLAEFGVVAPVGRNGVDELLRVVADPDDKRVPEVARACLVALGAQLRRLKDQVLEFDRMITALHRSNKMSIRLDECPGVGPVLATALVATVADPKIFRSGRDFSAWIGLVPKQHSSGGKDRLGSISKQGDRYLRSLFVIGALAVIRYAKVHGIRHRPWLTALLARRPAKVAAIALANKIARMVWAMMAKCERYKEPVALAA

SEQ ID NO: 441316 - protein, 421 aa, unidentified
METVAGVEPLAFVGVDWASEEHAVCVLGLDGRNQDAFAVAHSKDGLAKLIRRLGGLGSTGQVPVAIERPDGRVVDALLEAGHPVVPVSPNAIKAWRESEVLSGAKDDPGDAEVIAEYLRLRAHKLTVLAPFRDDTRALRAVVRARDDLVEQRVAANNQLEACLDAFWPGAKAVFADVCSEIALAFLERYPTPASARSLGEKRMAAFLAKHGYSGRRPAAELLERLRAAPDGIAEGAETEARRDAVLGYARVIRALNTSIKNLDRSVSAHLGEHPDGEIFASLPRSGRINAAQMLAEWGDCREAYDCPDAVAALAGATPVTKKSGKHEAVHFRWACNKRFRKAITTFADNSRHASPWAADVYQRAIARGCDHPHAVRVLARAWIRVIWRCWTDRKPYNDTNHTAAVRLAALANNNERKKFAA

SEQ ID NO: 441317 - protein, 362 aa, unidentified
MNYVGVDIHKKYSVLCAVDERGRKLREARIEGNSGCGFAQFFASLEGPSKAVVEACWNWGLVHDELEEIEQVEEVVLAHPYKTRLIADAQIKTDRLDAHALGTLLRGNLVARAHVPRGETRVRKNLLRQRLYWARLRTMLRNRIHALLDRQRGLELPQCSDIFGVRGLSFLRRLELPETDAALLREQLALHDLIAQQMKAQEKRIGLEFGSEAMHRQLLSVPGIGPTLAAVIACEVDSIERFSSAEKLCAYAGVVPTTHSSGGKTRHGQLLPFCNKWLRWALIEASWVAIGCSPYFGALYKQHRARGKKANSAVLIVARRMCRIIWQLLHEKRDFEKRPLRPNFNFPGCSVVRLTAATAARP

SEQ ID NO: 441318 - protein, 331 aa, unidentified
MFPVGIDVSKNTLDLCMLYDGIKGRIKTRNIQNNRHSVENILRWLRLQHCSPEDVHVVMEATGVYHERLATELHDAGFQVSLANPHRSREFARGMGIMTKTDKVDAYMLACYAFLKKPHRWEPPAPEIRYLGALLRRRDVLLGDALREENRLEKYLSTDTPADIISSCRRMAQLLREEVSNIERQIKAHIKASPALRRDYTLLTSIKSVGPQLGMHMLVVLRSHNFVSAEQAAAFLGVVPIEKRSGTSVRRRPRMSKIGPPQLRAKLYMSALCGKIYNKRMRNIYDEMCLRGKPKMVAIGALMRKLVHWCYGVLKTGTVFNDEDLKPVLST

SEQ ID NO: 441319 - protein, 343 aa, unidentified
MEKIITVGLDLAKSIFQVHGIAENGKVLVRRTLRRSQLLPFFQSLPACLVGIEACGTAHYWANAIGEFGHTVRLMPPAYVKAYVKRNKTDAADAEAICEAVSRPSMRFVPVKSPEEQAGGMVLKTRELLVRQRSQSANAMRAHMAELGIIAATGMPSIAKLVAVLRDDQERRLPASARAALLEMAEHIESLTTRIDVLDTKIVAAVKADDAARRLTTIPGVGPIIAATVRATVQNPAAFRTGRDLAAWIGITPRAHSSGGKERLGKILKQGNKQLRTLLIVGATSILKQARRGVKLPAWVVSIMARRPYKVAAVALANKMARTIWALLVKGGTYRSPTTPVTA

SEQ ID NO: 441320 - protein, 411 aa, unidentified
MVKENFIYVGIDLHKETHTAVMIDCYNQKLGEITFPNRPADFPKLVTKVKKCNTDAKEVVYGLENAYGYGRPLAVWLIDKGYFVKDVNTAISHRQAKHRGAMYRKSDSDDAEAIALATLNMLDKLPDACPNDAYWSLGQLVHRRDNIMKQRTRLVNQLHEQLCIAYPSYKSFFNDISRPTALYFWEHYPSRKYLRGKSVEDLRKELVPVSHNRCSTKNCEKILDAAASDKVKNNAYQDARDMVTLSIVSDLQHYDSQLAEVDKMLEQMYKMLGCTLTTIPGVNVITAVKILAEIGDIKRFGNANKLAQFAGIAPLHLSSSGKGKDVATKQGNRRLQATIYFLAIQMVQVSSKGTPRNPVVRAYYEKRKAEGKTSQQALICISRRLISIIYGMLKNGTEYRMPVVENAGENR

SEQ ID NO: 441321 - protein, 355 aa, unidentified
MENVIRQCIGIDCGMKEHVASFSRMYVDLRVECLSTLAIPNGPGGFVKLSKWIRKLIDPSMPCQIVLEATGVYHETLACFLTEKGWPVSVVLPNRAKYFSKTLTVKTVNDKVSSQTLAAMGLEKKLDVWSPPDPIYNQLRQLTRERDQLKAESTQIKCQLHAEESGAWPNKSSIKRMNQRLSLIERQVEEVETSIREVVVESPEIDQAVRRMTSIVGVGMLTAVTVLAETNGFNLVRNKKQLVSYAGLDVVERTSGISVRGRSRISHRGNRYLRKCLYFPAMTAARHSNDHKALYNRLISKHGIAMKAAVAVQRKLLVMMYAIWKNGTIYDPNYESKKQQNELGQTRRPALTELA

SEQ ID NO: 441322 - protein, 312 aa, unidentified
MTEKTSPVYAGLDIAKASLQLHLQSKSFDLPNTPAGHIQLNKRLAAVPGVHVICEATGGYERSTVAALHAALVLVSVINPARVRQFARASGRLAKTDPIDAAVLTAFGQAFAPEPTAARSAVEIQLAALVARRAQLLEIRVAEEQRADTCADPALGKLFTSWITQLEKQIAKVEALIEALLKAQKPLAQQVQRLDDIMGVGRITAVAVLATMPELGQLNRGQAAALAGLAPYNRDSGQWAGQRHISGGRAEVRRALYMAALSASRSNPVLKAFYDRLIAAGKPAKLALTAVMRKLIVLMNHLLKNPKFSLAK

SEQ ID NO: 441323 - protein, 342 aa, unidentified
MQISTIGLDIAKNVFQVHGIDANETVVVRKRLRRSQVLAFFKALPPCLIGMEACATAHYWARELTKLGHRVRLMPAKDVKAYVKRNKNDAADAEAICEAVRRPTMRFVQVKSAEQQGQLMQHRTRDLLMRQRTQSINALRAHLAELGIVAAQGDKGVKELLSIVADEKDARLPIDARASVIVLAAQLQAVQTLIGSIEKRIKTQHRSNEASKRLETIPGIGVIGASAIAATVADPTVFRSGRDFAAWIGLVPRQDSTGGKQKLGPISKQGDRYVRRILVVGAHSVLRRAKENPAKYPWLTQLLARRPFKVVAVALANKMARMAWALLAHGGTYRAPELAAAA

SEQ ID NO: 441324 - protein, 353 aa, unidentified
MISIGVDAHKQVHVALALDEGGRELGRWQGPNSQGGWSDLLQWAVNLGSPRQWGIEGAWNYGRGLAQHLVVSGETVSEVNARWTAQGRRTARRPGKSDALDARAVALLVWREAATLPQVAADDETAVLDLLTTEREAALAEATRLRNQIHQLLLQLDPEYRVHLPNLQTKAGLAAVAGYQAASTRALDQERAAAVRRLAQRLQLALDQVVDLTTQIEARAATGFSPLTQLCGINLLTAGALAGILGPGRRFQTDAQLAAYAGAAPLEASSAGQSRHRLNRGGNRRLNAILYRIALTQARHDPAARTYLARRVSEGKSKREAIRSLKRFLIRAIFRLWQQCLPIQAALPAGRAA

SEQ ID NO: 441325 - protein, 427 aa, unidentified
MNASKYEPTLCVGADVHLDEIVLRAVDKALGHEVLERFRVTNNLPGAHKAATTIAHTAKDLGYARIEIGWESTGMLWIPFHRYLSTEPLLHPFELELVCFNPKLVAKFKDGLVLRSPKNDDRDALDVAARLRFGELPVSYVPSDFWQGLRRLTRYRYRLSKALSQEKNRFQSYAYLKCSDWKRVKAFSTIFGATSMALLTEFAVAEVQEMTHDQLVDLISRRGRGRFHDPAATARAVRKTLRTSYPIDPQMDEMVTAALAAGWDHIRYLKRSMKHLDRLIERYIDLVPNPIITIKGLGAVITAGILAEVVDVLRFPEEKHLAQFMGLTWRQRSSGSFVSQNTRLTKVGNVYLRYYFILGANLLRQHNLEYKAYYWRKYQEVSKYQHKRALVLTARKLVRLVHALLTKNEPYVRPRTTDHDQEDDGLQ

SEQ ID NO: 441326 - protein, 403 aa, unidentified
MGEVAADYGVFVGLDVGKSGHHATALAPDGRRLHDGPLPNTEARLRAVFGALAGHGELLVVVDQPASIGALSVAVARACGHQVAYLPGLAMRRIADLHPGNAKTDARDAYVIADAARTLPHTLRRVDAGDETLAELEMLVGFDDDLAGEATRLTNRIRGLVTGIHPALEQVVGPQVQHPAVLELLARFGGPVGLAAAGKRRLLTIARKHAPRIGDTLVDRIISALAEQTVVVPGGRAAETILPKLAASLRGVLDQRAEIAAQVEKVLDAHPLASVLISIPGIGVRTAARILVEVGDGSTFATAAHLAAYAGLAPVTRRSGSSIRGEHPARGGNKRLKRALYLAAFAALADPASRAYYNRKKAEGKKHNAALICLARRRCDVLFAMLRDRKPYQPHPAPQLSAA

SEQ ID NO: 441327 - protein, 400 aa, unidentified
MISVGIDVSKGKSTVCILKPYGEIVSKPFNITHTQKDLSELSSMLFRLNDEVKIVMEATGIYHLPVLTYLQEKGFFVSVINPYLMKSYRNESLRKAKTDKIDSRIIANYGIDHWFKMKEFQISGVIYEELKLLGQQYRHYMKLHLLSLAELTHLLDLTMPGIKNLLASWNETNRKDKRSDFVERFWHYDVITSMSEQEFTEKYILWAKEKKYVPSQEKAKVIYTLAQESIPTLPSETSSIKMLVTEAVRVLKEVDATLGLILSRMQEIAKTLPEYSVVREMGGVGNTLAPKLIAEIGDVRRFRNGKALVAFAGIDPPPYESGQFVGCNRKISKRGSASLRKVGYETMRSLKMRSRPEDPVYRYVVKKESEGKSKKSAKIAGLNKFLRIYYARVTELYKNI

SEQ ID NO: 441328 - protein, 425 aa, unidentified
MGKVARSKGAGQTPDDGTIYVGCDIGSVHHSASIIDGRGNVLEKIDRVHNNIKGFRFLLGRINNWRRRTGAASVRFGFEPTGHYWKTIVNFMREHGIEVFFIKTTAVKAMRELTDSTPSKNDRRDALTLAHLLREGKVLKSKPPQGVFRELRDLAVYRQRVMEARSACLLRLRALLDTFFPELLEVFSDMTAVGLRRLLEEAPFPADLSARGPEWLTVHLKRWTRRGKSAEEKARALMEAAGQSAGLPILAGDRIRLQSIARTLELHTRELTIIEREMERALMESGYGELLLSFPGIGVVSAATFLGELGNPANFENANQWVSMAGIDPSENSSGTRQGRKRISKKGRPILRLNLYFMALCAIRNCPELRAYYLARKKDIEEGRLDIVPNQLVFAVAIKQLRMLFAMLRDKRAYEPGRIELRKAA

SEQ ID NO: 441329 - protein, 334 aa, unidentified
MEQVTTVGIDLAKNVFSLHGVDGAGKTVLRRTVRRDRLLETVAGLSPCLIGMEACSGAHEWGRRFQQHGHTVRLMAPKFVAPYRKSDKNDGNDAEAVCEAVSRPNMRFVPVKSTEQQALLAMHRVRQGFVVERTAIINRLRGLMSEFGVVLPLRSVTIRRQAAAAAEPLPELARGAVNDLLEQLRGLDARIEGYDREIEAQARLSEPARRLMRIRGIGATTALAIVATVGNAREFKNGRQFAAWIGLVPGQYSTGGKARLGHISKRGDAYLRNLLVQGARSVLQTASAHQDRLSRWALELKTRRGYYRTLVAIANKNARIAWALLAKDQELTAI

SEQ ID NO: 441330 - protein, 423 aa, unidentified
MTKRSSNPTDAVLVAIDMSKHRQEVLIERPEGGPRRRMTVMATKADYDRLATDLSDIGRPIIVGFEATGNYHRTLAHRLLSAGFELRLISSVALARTREALHNGWDKNDSKDAQVILHMLRIGATQRYVDPLAAGINDLQEMSKTHEAISKAKTQTWHRILTHYLPLYFPEIERFAGNSRSDWFLALLERFPTPTSMTVLGQETFSREAWDLVGRKVSKARLINDIYETACASVALPVDEDSVSIAMFRMVIAQARNLIRQRDEIERTAHAMLAENRDYQLLRMIPGIGPINALTILAEAGDLRRFSHHRQFLKFCGLDLATRQSGTFRGRTMLSKYGNARLRRTFWMAAQVAARQRNNSFRDKLGRYTAGHADDADRRRKAMTALTAKMARVAHAVIKTGTEYRPFLERSDARWKDPSLQVP

SEQ ID NO: 441331 - protein, 350 aa, unidentified
MKTHVGVDLHQRFCYVTAVSARGKVLHHGQVLNEASVLQKWLGKLSGERQVVVEASGFWPAFQRAVRGHAERVVMVHPQRVKAIASAKLKNDRVDSATLAHLSRCDLLPEAWMADEATQQLRLRVRLRIALGRQRARAKNQLQSVLHQEGFKKPVADLFGKRGRGWLQQIDLSPAARMVVDTWLREVDHLETEIGTQTKALEQMAREDARARCLQTVPGIGAYGAMVILAELGDMNRFQNKRALASYAGLVPVVRESAGKQKRGGITHQGSNTLRWIMLQVAQVGARSSPAMGAWYAGLRRRKPAQVAKIALARKLLTAVWALLRHGVCFDEQAFAPKSKNRGTIGIAIG

SEQ ID NO: 441332 - protein, 525 aa, unidentified
MPYHVRRPSRRAHRKSNPNKRQSLQKPNGVISPRVQKVGGERFAIVCVDPAKHRSEWMMADYFGNLLIEPRTLDHRGAFFKLAVEQIREAQQQHDIQDMIVVVERTGTYYLAPKRAFANAGFDTRVVHPFATKQYRMPADPGNKTDETDLYAQHRAAVAGFGLCEFELESPYRELQLRARHRRNLVEKAAALACQIREHLHLAMPGYANLFDRLFERPTALALAHHCDSPARLLELGQAKLRKHLRKNKVRHQVRTIDKVLAWASQTVNDPIQDGPMHHAIWTDLHDLYTHFQRQISILEQRLAIDLVQTPYVRLLAIPGINVVSAADLAGEMGPMKRYANANAITGRAGLYPSRYQSDETDIDNGPIIRQANRRLRCALMRIADNLACHCSYYRGQAGMDEARGVDKRSSRVRIAKRFSRLALACVAGDEPMRHPCFQEPDSILEKLRKFHHQHLSSIERTLADLETAVGQLPCHTQDHEAKIVADILQQHANHRRGASAIGDLLPAVLARLGIDTTKERRDRS

SEQ ID NO: 441333 - protein, 343 aa, unidentified
MYFIGLDVHKKTISYCVKDAAGRVFQEGKIGSTRRELDEWIRTMPQPRTIAMEATIFTGWIYDHLLPHAEKVKVAHPLMLRAIAAAKKKNDRIDAGKIADCLRCDFLPECHMATTEIRDRRRTLRYRSLVIKQMVQMKNRVSGLLMETGVSYNKQRLHKVGYFAELMTGNEDVHESIRPLLKLSRDMISRAQKLDYALVSSLERDPLLKERLRRLRTVPGVGPITALTWALEIGDFTRFSSIKQAISYCGLCGDEKSSADKVMRMPISKQRNKHIQRVLIEAAKLAPRESPELAVIRARELERGNPNRATLAVARKMVSYMLAVERRKQDFVPAEEFSRTAAA

SEQ ID NO: 441334 - protein, 354 aa, unidentified
MIIIGADYHPGFQQIAFVDTDTGELQERRLQHREEVEKFYRDLAAQGMRVRVGMEASGHARWFERLLSELHFELWMGDAAEIRTKRVRKQKTDRQDAQLILRLLLEDRFRQIWVPSWENRDLRQLLWHRHRMVQARTRIMNQLQAVALNEGLRCKKGLWREAGRKQLESFPLAPWASRRRRDLLELLDRLNPTIAELTQAIEQEVEKCAEAQRLMTHPGVGPLTALAFVLIIGRTERFQCGKQIASYLGLVPLEESSGERRRLGHITKQGNSLLRFLLVEAAQVTVRSDPEWRSKYFHLAMRRGRKIAKVAMARRLAVRLYWMWRKRWDYEQLKKFGSHAGQPGHRHGVQSITE

SEQ ID NO: 441335 - protein, 347 aa, unidentified
MKYIGIDHHKQYSVVAVMDEKGTLVNKGRFPMKRAAITAYFEKVKGDEPAKAVLEASYGWEFLYDVVHDIIDEVILAHPLKTRAIAEARIKHDLLDATTLAHLLRADLVPPAYAPPKGIRFTRNLLRFRFTYTYLSVEVKNRLHALLDRHHLEDPEWSTLGSRFGKKGKAYLETLTLPGYDTFILKRSLELLDYCEERIQEIDTMLHSILTADPIAQLLDTIPGLGPFFALLIRYELGDVTRFPSAKKLGAYIGIVPSLSSSGGKSYTGRITRQGNRLLRWAFTEAVFPAIQKDAELRQFYERIAAVHGAKGAKVATARKLVSIVYRIWTDQRPFIDRVDAVALVRH

SEQ ID NO: 441336 - protein, 315 aa, unidentified
MAMPVPVSKPIVGVDVAKNELVIYHAELDLLEVIPNNKTAIKKWLKALPGTVAVAIEATNIYHLEFADLAYEAGCVIYMVGGYELSHYRKGVNVRAKTDAQDAKLLARYLKNEADELRPWTPPSPLYRQLLSLFRRRAALVQARVSLTQSWANEPLLKASFAEQVKSMQKLEGLIEKMIGDRLKEAGLSDQLKRCLKVEGIGFLTGARLVASFQRGDFRNADAFIAFLGMDLRVSKSGQKDNRRSLSKRGDSEARRLLHNAAMAASRTAAWKEFYQAQRARGYSTTQVLVMLARKLARVVFALLKGQSEYQPKVG

SEQ ID NO: 441337 - protein, 425 aa, unidentified
MGTFRVDVVGENFGAYIGMDWGDREHVFQLLDSATGKISEHKLRQCPDALQEWINELQQSYPEQKIAMAIEQSKGAVINFLMQYQFLVIFVINPKLAAKYRQAFKSSGAKDDGNDSGFILDILIRHREKLTPWKLEDRMTRTLQILTRKRRDAIRERTRLSNQLKAILKQYFPLAIEVAGDTLATVIACKFLQRWSNLESLKRSRTSTIHRFYIKHGCRQKRIIDNRLKAIQSAKPLTTDAAIVETSVMEVCMLTEQLLCVIKHIEKYDEAINNIFPSHPDAEIFSSLPGAGAVLAPRLLAAFGSDRDRFRTPVEVQNYSGIAPVTVQSGKKRLVRWRWACSKFIRQSFHEFAGESRKYSIWASAFYEKQRDSGNSHNAAVRALAYKWIRILFRCWKDRTIYDELVYIQALKRNGSDLFRYMVNS

SEQ ID NO: 441338 - protein, 369 aa, unidentified
MEKDTTYVALDDSKRKIVVGILRSGDTQPELREIANDPRQIRRLFERLKREGPVAACYEAGVSGYDLHRQLIALGVAGAVIAPALTPRRPGQRIKTDRRDAAKLVRLFRAGELTAIHVLDESEEAVRDLVRCRDDIRRDVLRWRHRVLKLLARHGRACLTGQNWSQAHWRWIREQRFDLPPLQRAFEATLFALEQALARQAELDKELEAVAATASYREPVGWLRCFRGIDTLSAIILLAEVVDFQRFRRPRELMAYLGLVPSEYSSGESQRRGALTKAGNSHARRILVEAAWHYRHRPTIGRALASRTHGQPDEVVAQAWRAQQRLHRRYRHLVGHGKRTPVAVAAVARELVGFIWAAMTRHESRRAAA

SEQ ID NO: 441339 - protein, 346 aa, unidentified
MTIVEDTRAITGGVDTHADMHVAAALDPIGGLLGAGEFPATTAGYARLLGWLGGFGTVALAGIEGTGSYGAGLARHVTTAGIRVVEVDRSDRQDRRRQGKSDPLDAVSAARAAQSGRARGAPKGRDGAVEAIRALMADGRSARSERTQTINQARALIMTGPDDLRARFARHTAAGLVTELASLRPRPGDTVGYATRIALRELGRRAEFPGGQLGRLDELIVPLVTARAPGLLALYGVGPDTAALLLVAAGDHPHRLRSEAAWAHLCAAAPIPASSGKRTRHRLNPGGDRQANHALWRIVITRMSSHAPTRAYVERRTAEGMPEKEIIRCLKRYVAREVYRHLRAAG

SEQ ID NO: 441340 - protein, 447 aa, unidentified
MEEAVAVRKRELAVLYPNAAGIDIGSAKHYVAVPPERCEQSVREFESFTADLAAMAEWLASCAIDTVVMESTGVYWIPVYELLESRGFTVYLVNARHVKNVSGKKSDVLDCQWLQQLMSFGLLAGAFRPDGKVCALRALVRQRETLIAGQAQQIQRMQKALTQMNVQLVHVISDIAGQTGQDIVRAIVAGERDARKLAQLRNYRVHASEEQIAKSLSGNWREEHLFCLAQALTLFDTHQQLLEQADAQIEAMLGHLQRHAPGAIKPDKNKGRAKHAPRFDVRAALVRWAGVDLTRIGGIDVCTALKVLAELGTDLSKFKSAKHFASWLGLCPGTRITGGKRISGATKRIANRVAQALKLAAHGLHRSHCALGAYYRRMAARLGAGKAITATAHKLARLVYAILTRGEEFIERTQDHYEDQVRSRTIRYLQKKAASLGFKLQPNAVCP

SEQ ID NO: 441341 - protein, 346 aa, unidentified
MKKLVKQIVGIDVAQKELVVCLGRMADDWSPEIYANKVFANNTKGFNALENWVKKLVNPEISTRFVMEATGVYHEPLAYYLSDQGYIISVVLPNKISNYFRTLEIKTITDQTASHAITLFGLERKLEDWKRPNAVYKRLRQLVRERDQLVQERTIVKNQLHAERSEAEPGSSSMMRMKKRIALLDKQETEIKAEIQVIVKKDKNTSDVVELISTIPGIGVLTAVTVLAETNGFELIRNKRQLTSYAGLDVVQKQSGTSVQGRPRISKRGNKYLRKAMYLPALSVMRCDERFKSIFARVVAKNGIKMKAGVAVQRKLLEMTYTIFKTNQPYDKDYFKKKEEIKLERS

SEQ ID NO: 441342 - protein, 338 aa, unidentified
MKLYGAIDLHSTNNVTVVINEQDQVVYQKRLPNDLSLITQQLSSYRRSLQGIVVESTYNWYWLVDGLMEKGYRVHLANTAAIQQYNGLKYTDDDSDARWLAHLLRLGILPEGYIYPKQERAVRDLLRKRGQLVHHRTANLLSIQSLISRTTGNSIGAQYIKALNIEHVDGVLPNPDHVLALKANLAVMNSADAQIEILEKAVQDRVKLRPQFRFLKTVPGIGPILALTIMLETAEIERFAGVGNYASYCRCVGSKKISNGKKKGQGNTKNGNKYLAWAFVEAANFAIRFNSRIKSFYQKKKSKSHGIVAIKAVAHKLCRACYYIMKDEVPFDINKAFA

SEQ ID NO: 441343 - protein, 344 aa, unidentified
MSIIKTLGIDLGKSTFHVIGRDFSDIPIFRKKFNRQSLLHYLATLPECLVVFEACGGAHWLGRQCKALGHQVKLIPPQYVKPYVKGNKNDFIDAEAISEAATRPNMRFVSLKTEEAQVIAAIHRIRQGYIKERTACMSRIGALLLEFGMSLPTGHATMKKLFAWLAKQKVFIPPLLLQELVGQHEYYLSLSNRIAEQDIKLNQVVEHNPVGQLLKSIPGVGDMTASYCLAEIGNVTDFKNGRNMAAWIGLVPKQYSTGGKPTLLGISKRGNKTLRTLFIHAARAVLVRAEQTGAIFGPWLVKLKATKPFNVATVALANKLARIAWAVMTTKQAFNGKHLQANLQ

SEQ ID NO: 441344 - protein, 352 aa, unidentified
MPTAPPTVWARVDVGKTHDWVEVVDATGATLLSRRVSNDQTEIDAVIADVVVLAEAVLWAVDIVGTPSALLLALLAAAQQVRYASGRVVSVMSSAFTGEGKTDAKDAHVIAETARLRRDLSVVDQVTDLARNLAVLTAHRADLVADRVRGINRLRDLMTSAFPALEREFGYASCKGALVLVSGYATPDRLRRVGRARLAAWLRARHVRSYAQLADRAVTAAGTQHVVLPGQDTSAGIVSELASSVLALDVRIKAVDAQIAVTFELHPQAAVIVSMPGFGPFLGASLLAAAGDLRDFPSAGHLAAAAGLVPVPNDSGRRSGNLHKPRCYSPPLRHVFYLSAQTATMRSGPNRD

SEQ ID NO: 441345 - protein, 380 aa, unidentified
METAYDGRQVVGMDLHRRRSVLVRMTEDGRRLGTARITNSPAELRKAIAVAGTDPRVVLEATYGWYWAADVLQAAGAEVHLAHPLGVKAFTYRRVKNDEKDAADLADLLRMGRLPEAWIAPAEIGELRELTRYRLKLVQRRSGCKDQVHAVLAKLGVPVTCADIFGVWGNTWLDGLALPQPYAGKVASLRKLIAELGSEITLLDTVIADLLAGHDGYRAIQALPGIGPVLAAVIVAEIGDIRRFSCPAKLCCWAGLTPRHRESDAKVARGHISKMACAGGTGPPRRSEVCDGGGWWAGSAPGAADVRLHRPGHRRVLPGADLARGQGEPAGVAAPVRRDAGCGLRGRGVHRLAVCGGGTATGGDRRAPGRAGADRGPAGQ

SEQ ID NO: 441346 - protein, 415 aa, unidentified
MDVLVARCAGLDVHKDTVMAAVRTPDEGGRRGQVVREFRTFTDGLVALRDWLRSEGVTQVAMEATGVYWKPVWYVLEEMPGVELLLVNARHVKNLPGRKTGVADAAWLAQLLECGLLRGSFVPPRAVARLRDLTRYRTKIVGERVRETQRVQKLLEDAGIKLDSVASDVLGKSCREMLEALIAGERDPQVLAGKARTNMRPKIPELRRALVGRFDEHHALLLRMHLDHVDQLSAMEQRLGEEVDRLMAPFAEEATRLITIPGVAKRTAEAVVSEIGVDMSRFPTADHLASWAGLCPGNHESAGKRKSGRARKGNAALRSALVEAAWAAAHTNDSYLAAQYRRFKRRFGKKSEGKALFAVAHSMIIIIWHVLAEARSYDDLGPDYFERRTTTASRQRYLVRELEKLGHTVLLEPAA

SEQ ID NO: 441347 - protein, 456 aa, unidentified
MIQINKIEEGVAAIDIGSQSYFVAVANQPVRQFGTFTGEIRQVAEYLRGQGVQRVAMEATGVYWIPLHDYLDSNSFEVTVFNGAGARNMPGRKTDVADCRAPFRAGHAMLHSHGLLHSCFIPPAEIRELRTYYRIREGHLESSTRCIHQMQKYLDLMNVRLHNVISQIHGVSGLRVIEAILAGERDAVRLAGLCDAQILKRKRPEVLASLEGTWDEHHLFGLRQALEGYRFFQAQMVACDREIERLLEELNQGKPPAPQTEGKKGTSKGTSKGRHNAPQIADLHGKLVTLCNGCDATVLPGISPTNLLKLVGEVGTDLSAWPTEKHFTAWLGLAPTRHESGKRRKRVKRRKTAAGQIFKEAVMGVASSKDQALGAFYRRIKGKKGPAVANTATARKIAELFYRAMTQGLEYVEEGVHRYDQRYREQSIRRVQKMAQQLGLTVVESTLEPAICAQVH

SEQ ID NO: 441348 - protein, 346 aa, unidentified
MLHAGLDLSRKRLDVHLVDEAGTTVEVGAVLPDRDGLRSLVERAARYHQPVRAVIESMTGARFVHDQLELLGWQVEIADAQRAKGLAPLACKTDKIDAAVLAQLSCRDLVPAVWLPTPEVRAERERARWRLHLVHHRVGLKNRIHAILITFGHQRPMADLFGASGRRLLDQLDLPEPWRGTVLASVRLIDELDREIDACDAELRRLGAEHPAVPLLMTAPGIGWVLASTIAGEIGDIRRFPSPKSLCGYTGLCPRVYQSGTKDRRGALAKNGPNHLRWALIEAAVHAAHHPAYSAHYEATKKRLGRQRGAAVARIEVARQLTEAIWYMLTRHQAFSPAGPATRLVA

SEQ ID NO: 441349 - protein, 419 aa, unidentified
MTLGFENGTRDAMGPAARVWHHRCCLNQPMERPVKRNDLSRSLVAFDQTSTLVAVVELGFSSWLVAGLVPNVTRQPLKKLRSDPDALLGLLLRWRDQATKAGGRIKRIVLAFEAGRDGFWLARWLRARGIEAYVIHPASIPVSREHRRAKTDRLDAGLLMRAVLGWLRGEPKHCSMAAIPTVAEEDARRPTRERETLVGEQTRAVNRIKSTLIRFGIRAFKARLRQASKHLGELRSPEGEPLPPNTMAELRRDLVRLQVIREQIRAIERARLERLKRAPRQGTHPMMRMLARILGIGIETADLLVHEVLTRKLRDQRAVARYGGLTGSPDESGTKRRERGLARAGNARVRHGMIQLAWRWLKFQNKSALAQWYGARTTGGKPGLRKTMIAALARKLLIALWRYVTIGEVPAGAVLRPAT

SEQ ID NO: 441350 - protein, 409 aa, unidentified
MKLFVGLDVSSQDAKICFLNGEGDCLQSFTITNDLPGALILKKQILDTASKSNCKIIKIGLESTSIYSYHPAMFLHNDKELRTYGSQVFMINPKQISNFKKSYPEMDKTDTIDAFVIADYVRFGRHTMSIVKEEQYMALQQLTRSRYQLVHALTKEKQHFLQHLGLKCSQFTQDVESSVFGNAMMELFLERFSLEEMAQMPLQELVFFLQEKGKKRFGDPEDVAKSIQKAVKGSYRLSKVVEDSIDLLLSTSIQIMRTYQAQIKEIEKGIESLMSTLPQTLDSIPGVGPVFAAGIVAEIGQIDRFADETRIAKYAGLFWKKYQSGRFTAENTSLTKSGNPYLRYYLVEAANSVRRHVPEYRDYYTKKSAEVPKHKHKRALVLTARKFVRLVDALLRNNQIYAPGRGVDR

SEQ ID NO: 441351 - protein, 351 aa, unidentified
MQVYQNDVVIGIDVGDRAGQVCRLNTRTGEIVEDRVSMTPEAVRKYFLRNRARLVAIEVGTHSRWVSRCIEETGIGVLVANARRLQLISKSDSKNDRADAELLARLAAADPALLSPIHHRGERSQAALALLKTRDALVKSRTAKVNQVRGVAKSFGVRLMKCSAASFSNRVRDDIPEILAPAIHPLLDAIESDTDRVKLLTAEIRRSCKEDFPETELLLQVNGVGDITALAFVLVLEDPARFESSRSVGSYLGLRPRQRDSGMIQKQLRITKAGDPFLRCLLVQCANYILGPFGADCDLRRWGLAIAERGGPNAKRRAKVAVARKLATLLHSLWVTGTEYEPFRSEKRAAA

SEQ ID NO: 441352 - protein, 343 aa, unidentified
MDHFAGLDVSVKETSICIVDETGRIVGEVKVASEPEALLQVLMNPAYHFKRIGLEAGPLSQWLFSALGEAGLPVICVETRHMQAVLKAQINKTDRNDARGIAQMMRVGLYRPVHVKTLRSQKLRMLLTHRKLLQSKAIAIDNDLRGTLRNFGLKVGMVGKVKFEARIKELVENFPDLAVLVEPLLVVRRVLREQLGILHRRLLAIVRDDDVCRRLMTTPGVGPVVALTYRATVDVPARFRNSKAVGAVFGLTPSKYQSGEINRTGAISRCGDEMMRMMLYEAAQSMLVHSARWSWLKAWAMKIARHRGMKKAIVALARRLAVVMHRIWVDGTEFRWTREVVAA

SEQ ID NO: 441353 - protein, 338 aa, unidentified
MKFKRIAIDTSKHVFTVHGVDEQERPVLRRELKRSQMGPFFGKLDPTDVVLEACGGTHHWGRVLSRLGHRVRLIPAQYVKPFVKRAKNDRADAEAISEAAARPTMPSVAVKSVDQQASAMILKHREMLVTQRTQAVNALRGHAAEFGVIAAKGTVQVKALLDKLASDEAIPAPAQAMFTEMGEHIEALDQRMATLDGQLLALHKANPVSQLLAEVPGIGPVTAITLALTVEPGHFASGRHFAAWLGLTPKEHSTGGKQRLGRISKAGNERLRTLLVVGATAVVRHAKPGGKSASAWLLGLLERKPRKLVAVALANKMARIVWAMMARGEAYRRQPAAA

SEQ ID NO: 441354 - protein, 356 aa, unidentified
MDHITRIGMDTSKRIFQLHGVDAKEGVVLRRKLLRGDMMRYFERLPPTLIAIEACGGSHHWARELGKLGHEVRLIAPQHAKRYVKRGKNDAADAEALCEAASRPHMEYVPVKSADQQAALMLAGVRDRLVRNRTQLANAIRGMAAEFGLIAAKGIGHVLPLLDRIAADLAVPTLARDLFAAQGEEYAALEARIAQVDAQLQAWYRSSPMAKKLTSIPGVGAVIASLVVMKTPDPHAFQSGRDFAAWLGLTPKDHSTAGKVRLGGITRAGDESLRSLLVVGATSVISHLRRKPQPGARPWLEKLLDRKPPKLVAIALANKMARIIWKLLTSDAVYDPTHPSPACRPSRCSALSKRVG

SEQ ID NO: 441355 - protein, 339 aa, unidentified
MNSMAVGVDIAKQVFQVHYVDQESGEIVNKPIKRAKFLEHFANRARCLIGMEACGGAHHWARQLTKLGHEVRLMPAQFVKAFNIRNKNDAADARAIWLAVQQPGKPVAVKSEMQQAMLALHRMREQLVKFRTMQSNGLRGLLTEYGEVMSKGRAKLDKEIPAVLGRIAERLPAALIETLREQWNGLARLDEQIAEIERRMRDWKKEERAVKAISEIPGVGLLTATAAVAMMGDPKAFSSGREFAAWAGLVPKQTGSGGKVNLHGISRRGDTYLRTLLIHGARSVLTHAKEPGPWVEQMKKRRPMNVVIVALANKMARTIWAVLAHDRPYQKDYLSVKPV

SEQ ID NO: 441356 - protein, 311 aa, unidentified
MNTVRYLGVDLSKLELVADLAAEAKPRAFTNNAAGHAALIAALPTEAHVVCESTGGYQRPLVRALQQAGVRVSVVMPGRVRALAHARGLRAKTDPIDARLLSAFGQAMALGAPPPPPSPAQAELQELLRARRALIARLNEESSQVDHCELPFLQAQATERRELLERQVREIEKRLRRLIAADPVWQQRAARVQEVDGVGEVSAWTVLAEMPELGQLEKGQAAALLGVAPDPDDSGPRQGRRHISGGRSSARKVLYMAALTASQRNPVLAPFYQRLVHERHKPKLVALTAVMRKLVELLNRLLADPDFKLAG

SEQ ID NO: 441357 - protein, 429 aa, unidentified
MRTESTPGARGPVFCGVDTHADSHWLCVLDWRGRRVLSRRFPADAAGYEALAGAIAAAGEPACVAMEGTSSYGAGLTRHLASLGMPVREALSPARTQRRRPGQGKCDESDAERAARAAMSGSKLGTPKSQDGWVDGVRCMLAARSGAVKARTSAINTARSLLTTAPEGLRSRFRGMGGPRLMEELPSVRSEGALGAALGALADLWAAARDAALDMERAIEASLEENCPALLAMYGCGPVSAAKLAVAAGDNPGRLRSEASFAAICGACPIPASSGKTVRHRLNRGGDRQANSALHEIARQRVMRDPETAEYAERARARGKSDREVMRCLKRYVAREAYRALMRPHEIRRPEDASGLVAARRAAKVSQVRAASILGTSEKYISMLERGQRELKPIRRAYEAWVEAGLPLNWDRQAFEAERKMDSKKHLAK

SEQ ID NO: 441358 - protein, 384 aa, unidentified
MQKPNDLNQSRIVLKQDSTLIAVIEMSLRSWLVAGIVPGVDRQPLKKLAIDESALLMLLNRWREEAEKAGRRVERITVAFEAGRDGFWLARWLRARGIEVHVIHASSVAVSREHRRAKTDRLDTELLKRAFLGWLRGERDHCKMVAIPTTKDEDAKRPNRERQSLVGEQTRIINRMKAALIRLGIRGFNPKLKKAAGRLEDLRTPEGEPIPPNTLAELHRDLERRRLVSNQIRKIEQARLERMEQAPSDGPHAMVRLIARVIGVGIETADMLVHEVLSRKLRDRRAIARYAGLTGAPDESGSKRREKGLAKAGNARVRVGMIQLAWRFLLFQKDSALAQWYQSRTEGGRNRKTIIVALARKLLIALWRLVTTGEVPAGVVLRAA

SEQ ID NO: 441359 - protein, 320 aa, unidentified
MNHKTLSVGIDVSRDELVIAYADRLRPIEHIANTAATIQRWLKSLPAGARIGLEATGAHHRLAAELAVAAGHVVYVLNPREVAHYLHSLRSRGKTDVLDACGIARFVLNEAGPCHPYVPPTALQRDITTLVQRRHQVMKNRTALRLSFSGISDCTKAVSQLLAAFDRLLADIDTRLQALVRQDEHLAAGRARLATISGIGPLVSTALAVRLSRINYATSDALVAALGLDPRPKESGQFKGRRHLSKRGNPEERRLICMAAICACRSAVWRPILEKLLAKGHPKTAAYCIIARKLLRIALAVWKSGKPYQPQLVGQAGLRL

SEQ ID NO: 441360 - protein, 338 aa, unidentified
MPTDQTGQTYALFVGVDIAAQTAMVATQRPGAKASRSLTIEQTPEGYTSLLRQLQATGFVPCQVLVVMEATGSYWMSLATRLVHEGFAVSVMNPAQAHHFAKALLKRAKTDAIDAQTLAQLAMILQPEPWTPPPQIYYALQQRLAQRDDLLNLRQQVRNQLHALVQHPEVIAEVRARMESLLATFESQLTEVESEITAALSQDSAWAAAATRLQSIKGVGWVTAAWTLVTTLNLTSCDTVDALTAYAGLAPMPRQSGSSVWHRPSIGHTGNGRLRTAFYMATLSAAQHNPVIKAFYTRLREVGKPEKVARCAAARKLLHIAWAVVKKDQPFDPNYALG

SEQ ID NO: 441361 - protein, 340 aa, unidentified
MGEQYVGIDLHRRRSVIVRMTGQGEVLETVRIDNDPVALSLELAKAGSDPEVVLEATYGWYWAADLLQACGAKVHLAHPLGVKMFGYQRVKTDARDSRNLAELLRMGRLPEAWLAPPQVRELRELVRYRAKLVALRSGLKAQVHAVLAKEGVRVPMSDLFGVAGTRLLDQLHLGHAYALRVASLRTLVAVYDQEIAMLGREISTALAGDVGYLAIQTIPGVGPVLAAVFVAEIGDVHRFAAAPQLCSWAGLTPRHRESDTTVRRGPITKQGPRLVRWAAVEAVQRLPGGSKQAADFHRIADRRGTGIGRVAAARKLLTLVYYGLRDGQVRCLASAPAEAA

SEQ ID NO: 441362 - protein, 419 aa, unidentified
MKAHRNCCGLDVHKKMIAACLLTEDAAGNSVTEKRLFGSMTRELQALAQWLCAAQVTAVAMEATGVYWMPVWNVLEQYGLQLLLINPEHYKAVRGKKTDLKDGTRIAELLQDGRLEGSYVPPRAIRVLRDLTRYRTKLVQYQSAIANRIQKLLEQCNIKLASVASDALGVSAMAMLRALAQGETDASRMANMAKRQLRKKIPELQLALEGCLLAHHRLLLSEMIEDLDHVGAKITRIEETIEQQMRPFQKSVNTWLTVPGIKHRLAWTLVAEVGPTVEAFPSAADMVSWAGVCPGNNQTAGKRKSGTTRAGNPWLRRALCEAAWAASKSKGTYLQAQFRRLAALRGPKRALIAVASSLLTAGYYMLQRATTYQELGPDYFDKRNTLRTTNRLVKRLEALGHRVILEPRFTSYPLHASSS

SEQ ID NO: 441363 - protein, 467 aa, unidentified
MSTARRRPGRKAKARSPFIVLDRHAAGIDVGAAEHWVAVPPDADPIPVRCFGTFTADLQALAAWLLACGVTSVALEATGVYWIPLFELLEARGLQVRLVDARQTRALPGRPKDDIRDCQWIQRLHSCGLLRAAFRPDDQVVVLRSYLRQRQMLIGCASDHIRHMQKALEQLNVKLPEVVADITGVTGMSIIQAVLAGERDPVQLAKLRNQHCKQDEATIAKALHGNWRPEHLFCLRQALALYEFYQRQLAACDRQLDAQLQTFADRSAQAPVPPRPTGKYKKRHKHQGNVPAFDARTRLYRMSGVDLTRIEGIEEGTALVLLSEIGLDMNRWATEKHFCSWLGLCPQHKISGGRLLSRTVRPGVNRAAQAFRLAAWGLERSQSALGAFYRRLKSRLGAPKAITAAAHKLARLVYSLLKHGQAYTAQGLEEYEREYQERQVRNLTRKARELGYTLVKPELAADAPVSG

SEQ ID NO: 441364 - protein, 365 aa, unidentified
MNCVGIDVSHGKSIIVVMRPFGEVVVSPFEVLHTDSEPSKLAGLLKSLDGETRVVMESTGYHHTPVAWLLHDAGLYVSVVNAMLVHDYGNNSLKRAKTDKKDAVKLANCGLDHWLTLPRYVPEEDTRLMLKTCYRKYQQYSKVQTMLKNNLISLLDIAFPDANRLFTSPPRADGSEKWVDFVAAFWHCECVCNLSEKAFTAKYHKWCRKHRYKFCEDKTLDIYSSACGHFGVIPKTDTSKLLVEQAVFQIRATSTTLAALKQEMQSLAASLPEYPVVMGMFGIGPALGPPLMAEIGDVRRFHSKKALVAVAGIDAPPYQFGQMDVRSHSISKRGSASLRRTLFLVMSVILQHAPMNEPVYQFMNK

SEQ ID NO: 441365 - protein, 354 aa, unidentified
MQSQTITVPKLFIGMDIHKKSWSVHLRTDLFDHKGFSMPPDPSKLVDYVTNHFGDHEVALTYEAGCCGFTAARYFLNMGWTVKVVNPNDVPRSDKQLYQKTDKLDCRNLCRQLQQDQLHGIYIPTEPEEQLKSLLRQRNQVVKQLRKAKSQIKGLLLFHGIRVPEEFENPNWSKDFMQWLQDIKWAYATGSACMNSKLRILNLLKSEYLQTSNELRAWCRKQHKTDYYLLKSIPGIGGLLAAAILAELGDIRRFNNEREFSNCIGVVPGIHQSSESDNKMGLTPRCKALLRSYLIESAWVAIRTDPEIQAYYRKHAGRNPKNVIVKVAHKMCRRILSVIKSGTPYQVNYSKLKN

SEQ ID NO: 441366 - protein, 321 aa, unidentified
MSQPVQQVIGIDVAKQSLDIAGTGEFASFTVNNAEDGFAAILRKLKEISVSLVLMEATGGLESAVACSLQAEGYDVVVINPRQARDFARSMGYLAKTDRLDANVLAQLAQVIDCSPERSRFIRPLPEITRQELKAMVVRRRQLNQMLVAERNRLYPSHSGNRESIAIIIDALESELKRITRQMNKYVITHFQRHAELISSVKGVGEATVATLLAELPELGRLTRREISALAGVAPFNRDSGKMRGKRTTFGGRGSVRATLYMAALTATRFNPVIRAFYLRLLSAGKAKKLALVACMRKLIAILNAMVRDEQKWDIALHNVN

SEQ ID NO: 441367 - protein, 347 aa, unidentified
MLVVGVDAHKRTHTAVVVDGLGRQVGQRTVKALTADHLELLRWAERLGAERLWAVEDCRHVSRRLERDLLVAGERIVRVPPQLMAGARRQVRAAGKSDPIDALAVARAALREPDLPVAGLDGAAREVRLLVDHRDDLVGERTRIINRLRWHLHELDPSWDPPAGSLDRYCTLDRIAVRLNQHDGTVARIAGDLTVRARALTVDINRLEREITALITPLAPTLLAVCGVGALTAAKIVGEVADVRRFRSKDAFARHTGTAPQPAWSGQSDRHRLSRGGNRQLNAALHRVTITQGRYHPDAVAYLARRRTGGDTKAEARRALKRRLSDVIYRCLVADTALVDQTLATAA

SEQ ID NO: 441368 - protein, 338 aa, unidentified
MTTNISMLAIDLAKGSFQVCAIGPEGAVLYNRSMSRTRLASFLAEQPACIVAMEACATSHHWGRVAQLHGHEARLVPAAYVKPFVKRQKNDRADAEAIAEAALRPTMRFVAVKSAETQARAVAFRTHQCLVRQRTQLINGLRGHLAEFGLVAPKGPASLKVLENALDDEATDLPSPVREMGAIYLDQIARLTAVIEQLADELQAASKADAQLRRLCTIPGIGPVTAGAVSAFAPDLDTFDNGRNFAAWLGLVPRQRSTGGKTRLGSVSKMGQTDIRRLLIVGAMSVIRWVVRKGGSANRWLAALVARKPRMVAAVALANKMARMIWAMTTKKEDYRMA

SEQ ID NO: 441369 - protein, 429 aa, unidentified
MNYNTQNAKITSITEKSLIVGIDVGSETHYARAFSWRNYEYSKKPFAFSNDEDGFASFKAWMDDIAEKHEMEKVIPGMEPTGHYWLNLGAYLQGQGMRPVHVNPHHVKKSKELDDNNPNKNDRKDPKTIAGLVNEGRFSYPYIPTGIYAEIRNLSNLRIQTQEEITRIKNRIARWFSIYFPEIKDVYRNPDAVSGLMVIKQAPLPCDIKGLGVYGVNKIWRDARLKGAGIKRAKTLVTAAEHSIGNTEAPRSARKEIRNLLNDYEIYKSRMDELMEEIEELLSEIPYIDKLMGISGIGIKTVSCFIAEVGDIERFDNPKQVQKLAGYGIVADSSGKHKGESRISHRGRKRLRYALYEAAVSVIGKNKEFKEIHHYYRTREKNPLKKMQSVIAVACKLIRIFYAILTKGIDYDGQKMLRDIVRPGMQSAA

SEQ ID NO: 441370 - protein, 309 aa, unidentified
MEEILFTPYIGVGCGIDVHKDLIVATIQRGNEVVGTKEFDGFTVSLESLRDWCKDAGVTHIAMESTGIYWKPVFNILEDDFEVILVNARHVKNVPGHKTDKKDSKWLSKLLVSGLLKGSFIPPRDIRDLRDLVRYKKKLVAHSASEKNRIIKILEDCNIKLSSVLSDVDGAVGRNIISALIDGESDVNQLMRFYHGKIKTPRSEFVKALQGKVSDHHRFMLQFHRDVIANDDAMLERLDAEIAKAVSDYEVELELLETIPGVGRDSAIGIISEIGVDMERFPDENHLSSYCGVSPGNNESAGKKKVQRP

SEQ ID NO: 441371 - protein, 350 aa, unidentified
MDTNTSALASIGIDIGKEVFHIVGFGTNGKIAFRRKIKRLALVDTFKGLPSCVVGMEACLSAHFVSRALRQLGHQPRIIPSIYVKPFVKGQKNDYNDAEAVAEAALRPNLRTVREKTQDQLDLQALHRVRSRLVSRRTATINQIRAFLIEQGIAVRTGARALRNSLMAILENRQDEISPRMRGLIADLYEDWVGLDERIETIAGEIETIGEKEANCQRLMSVPGIGPLISTAVVAAIGTGEAFERGRDFGAWLGLVPRQYSTGGRSILGRISKRGSKYLRTLFIQAAKVILMRPHNWERFSFGAWLLNATPRLHRNKLATALANKLARIAWSILRNEKVFDVPRREAMAI

SEQ ID NO: 441372 - protein, 323 aa, unidentified
MQTPSVMLNIGADVAKDAIVVACSEGSFPVREVANQRAAVLAFLKGLPAGSRIGVEATGSYHELFAEAAHQLGFAVFLLNPKDTRHYAKAVGLRGKTDRVDAELIARMIAHEHTKLHAWIPPTPHQREIDRLIKRRATLISLREAAEMSLHELDGFAADLKALRTRFNQLIAHIDLRVRALIDASPERKQNFARLCTISGVGPVVGAALVNTLERVPAKSADAFVAFTGLDPRPDESGQHHGKRRLSKRGPAELRRLLYLAALSAVKTKPWRSLYEHYRARRLPSTAALVILARRIARTAWSIYTYKTEFDPARLTNPVLRTN

SEQ ID NO: 441373 - protein, 307 aa, unidentified
MPQNVIGVDIAKHWIDTFCLDSGTSARLEMTPPALQAFSARCTGALVVFEASGGYERPLAEALAAAGVAYTRVNPRQAREFARATGRLAKTDRVDARVLAAMGRALELAPTPPPDPARTRLAALVARREELVDHAAREAKRLKQATDPFVRADMTSLIRLLKTRIRKAEAEIAKHIAAHDQLATTEQRLRSAPGIGEVTAASLVARLPELGQVSRSAIANLAGLAPHACDSGLMRGQRHIWGGRKDVRKTLYQAAFIASRYDPALKALRKRLQDAGKPFKVAIIAVARMLLTQLNAIIREQRNYLPG

SEQ ID NO: 441374 - protein, 378 aa, unidentified
MHSMTQDQPLVIGGVDSHADTHHFAALDQRGALLATESFPTTTPGYGQALDWLGSFGEVDAIAVESTGSYAAALVRYLREHDVRVVEVNQPHAHTRRRVGKSDPIDAEMAARLLLAGKATVTPKQTDGIIESIRTLRVARNSAVKSRTAATVQIRDLIITAPQPLRDQLADRKTLRGKATICARFRLAEHNLSRPVHAAKFALRSLAQRIEILDHEIESLDQQLEQLVAAAAPRTTQLLGISTGHAGQLLITAGQNIDRLNGEASFAALCGSSPIPASSGKTTRHRLNPGGDRQANRALHLIAVCRLRYCQRTRAYAERRVREGKSQREIMRCLKRYIAREVYNTLRADLAELQPRPPRATTTILCGSPGFGITRKRP

SEQ ID NO: 441375 - protein, 426 aa, unidentified
MKVMHDRVAAIDVHKDMVKVAVRIPGERRGTRKTDVLEFRTFYGVLEEMGRELRRRGVTHVVMEASGVYTEPVYYALAGLDFTEVMVINPAHAKALKGHKTDARDAIRLLDLYECWLLSGSYIPAPDLKEMRDLTRYRIKTVQARASEIQRLQKTLETAGIKLSSVVSDVTGVSATAMIEALIDGERRGAVLAGLAQGRLRTAGKMADLSMALAGRFTDHHALMCRLHLDRIQVLGEAVAGLDAEIAPRAARHAREAALLKTLPGFGDVIVAGWLGAIGPAPHQHFATAQRLASWATVCPGNYMSAKKSKGGRTGDGGNYIKPLLVQAAWAAVRVPGRLQARFHRLVRRFGGARNKGAIKRAIMAIAHTLLKIAYQVLKTGTPYTDLGAGFYASRETPQARQDYLIRQLQKLNPGCVITVTPAEAA

SEQ ID NO: 441376 - protein, 342 aa, unidentified
MAEIVTIGLDIAKSVFQVHGVDAAGQVVVRRQLRRSYVLKFFAGLAPCVVGVEACATSHHWSRQLQSLGHSVKLMPPSYVKPYVKRQKNDMADAEAICEAVTRPTMRFVETKTPEQQSVLMLHRIRLMLVCQRTMLSNTIRAHMAEFGIVAPIGRRGLDELLAVLSDLDDERVPALARDCLIAVAEQLMLVKGKILDMDRRIAACHRSSDMSRRLAEIPGIGPLLATALVATVPDPRAFASARNFAAWIGLVPKQNSSGGKERLGGITKQGNRYLRSMLTVGALAVIRYAERHGTKRPWIIKLLARRPTKVAAVALANKMARMAWAIMAKGERYREPVVVAA

SEQ ID NO: 441377 - protein, 312 aa, unidentified
MVEHCYGGIDVSKDRLDVQVLPQGRCFSVANTSAGWSQLVDRLRGLSIAALGIEPSGGYERGVIRALLAAGLSVRRINPNKLRQFARARGVLAKNDRLDARLIAEYVAIMPTRVVHRDPAAEQLAAVVTMRRQLSDEHVAVENQTAHIEDAMLRRLNKRRLARLEADILLLDKRMAEIVASNANLARRYDLLTSMRGVGPTLAFTLIALLPELGQMNRKQIAALVGLAPYDFDSGKLKGHRCIYGGRVPVRNVLYMAALSAARYNPALKTFHNRLAAANKKPKVVIVAVMRKMITILNAMLRDNVAWQPKSA

SEQ ID NO: 441378 - protein, 316 aa, unidentified
MTEASGFVGIDVAKAELEVVVRPSGARWTVTNNASGLAQLQERLQALAPALIVLEATGGYEVAVVAALATAALPVVVLNARQVRDFARATGRLAKTDAIDAGVLAHFAEVVRPPVRPLPDAMTQSLQAWLMRRRQLVEMLLAEEQRRSRAPRPIQRQIDQHVRWLRAQLGAVEKDLAQTLRASPVWREKDDLLRSVPGVGPVLTTTLLGDVPELGQLNRKQIAALIGVAPLNRDSGTYRGRRAVWGGRARVRATLYMASLTAARYNPVIRAFYERLVAAGKPKKVALTACMRKLLTILNAMIARRTAWKPPAAVSA

SEQ ID NO: 441379 - protein, 321 aa, unidentified
MKEFIRIGVDLAKNYFQIHALESEDGHAATRKLSRQAMRKCFSEIEPCVVGMEACGSAHYWARELRAMGHEVRLIPPIYVKPYVKRGKNDAADAAAICEAMSRPEMRFVPVKSEEQQATLMLHKTRELLIKQRTMGINSLRGHLSEFGIVAAKGLGRVDELLEKAESDATLPEIAKAALTILVQHLEAIEASIAVLDQEIAAVHTQSPVSRLLASIPGIGKITASAIVASVPDPSIFKSGRDFSAWLGMTPRQNSSGGKEKLGSITKRGNRYLRRLLVLGATSLLRVVGRRKGALRDWLVALRDWSRWRSPTSSRGSYGPL

SEQ ID NO: 441380 - protein, 480 aa, unidentified
MAAKKKAMTDTDGASAGAAEHGGDGAEVVEERVEVVERAAAIDVAKASGMVCTRVPGSRPDRRRQKVWQVGATCGEVSALVDHLRCEGIQRLVLESTSDYWRVWYYLAEAAGLEVWLVNARDVKNLPGRGKSDRLDCVWHCKLNERGMLRRSFVPPEAVRDLRALTRTRARLAQDQARHQNRVEKILEDALLKVSVVISDLFGASGRRFLDALVAGQRCPKALAALGDKRLKATRTELEAALTGRFRDIHGFEIGTHLRLIDAINEEIARLDQAIEQQLAAIPGTAPACVACGLVGGGHVPGCTSQDIPLLDLAGRLDEITGVGERNAQVIIAELGTDPSQFPTPGHAAAWARLTPRTMQSGETARPGRTGKGNRYLRGALGQAAMATARTDTRLGAMYRRIARKRGKQKAIVAVSRVICETAWILICDPAARYHELGPDYYSPRSPARQTRDKIRELERLNPGKKVILADTSPDTGTAA

SEQ ID NO: 441381 - protein, 292 aa, unidentified
MKKYSEAFIGFDTAKKKHAVAIAEDGRNGEIRYLGEIDSSPATVEKVIGKLAERYAKLHVCYEAGPTGYGLYRQVKALGHECAVVAPSLIPRKPGERIKTNRRDAVTLARSLRAGDLTSVWVPDVIHEAVRDLSRAREAAGEDVRKKRQQLLAFLLRHGRIFSGRKHWSLAHRRWLAEQKFEHPAQQIVFQDAIDVIEDGAARLRRLEEQLLAIAPSWSMAPVVAAYQAMRGVSFIVAVTFVAEIGDVRRFDNPRQLMAFLGLIPSERSTGETVRRGGLTLAGNRRARRVLV

SEQ ID NO: 441382 - protein, 344 aa, unidentified
MDATTVGVDLAKSVFEIALADERGHIFERQRLSRARFDRFFVNRPACRIVMEACGSAHHHARRLRGQGHEVCLLPAQYARAYVRRNKTDAADAAALIEAARCPDIRPVPIKSVDQQAMQQLHRLRAQWVGARNSRLSFLRGCLREFGISIALGPKRAIEAVRAALADPSGPVPSILHASLIELLEEIGTLEQRFKQIDRELKRLHAHDPVIERMLKIPGIGDLTATALRASVVDIQRFPSGRHFASYLGLTSREHSSGERRRLGRITKQGDPYLRTLLIHGARSVLLAARSAQRRGLTLDRLRIWALDLQERRGHNKAAVALANKLARIVWATWRHERDFASNP

SEQ ID NO: 441383 - protein, 347 aa, unidentified
MTTMQYIGLDLHKKTIQACAKLADGTLVERLKIPARHDELTRWAQRQPKPWMGIMEATLFTGWVYDTLQPHASELKVVHPAMAKAISAGKHSNDRVDSEQLADMGRCNWVPECYMMPAAERRLRRILRYRTKLLRESVRFQNMMAGLLMSEGVEYRASQLSGQRSASAFLDSLRELPESTRKLLRLSRSFVNLFNQTQRQLLQELRKHPRVKERVERLESIDGVGTIMALTWVLEVGDPQRLGSVAKACSYCGLTVADRRSANQVYSGPLSKQRNQHLQRVLVEVAQLAPRFNPALKALYDRERQRHAHNEVTILVARKLVAYLLAVDKSGRRFAATEEAKSNCTTV

SEQ ID NO: 441384 - protein, 412 aa, unidentified
MAMEALVERCAGLDVHQASVVCCVLLGPPGCRPRKLLRTFGTTTHELGKLRAWLAEHGVTHVGMESTGVYWKPVYAALEGHFDLTVGNAHHVKNVPGRKTDVKDAEWIARLVRHGLIGKSFVPPPPIRDLRELVRFRRALVEARTAERNRLLGLLEGAGVKLAGVASDVFGVSGTAMLKALAEGAAEPAAMADLARGRMRRKLEALAAALDGQVREHHHFLIAVQLRRLEAIARDLGELDARIEAQLEPFRAQHRLLMQIPGVDRVVAAGIIAEVGVDMGVFATAQRLAAWAGVAPGNHESAGRRKGAATRKGNVFLKATLFAAASAAVRTKGSYYRDKYHRLRARRGPVRALVAIAHKLLIAAFHMLRTGSPFRELGEDFLDRVSRKRSTTKLVRRLAALGYDVLLVPKAA

SEQ ID NO: 441385 - protein, 408 aa, unidentified
MNAVGIDVSKGKSMVAALRPMGEVALLPQEFLHTEVGLEQMAYAIIALGEDTRVIMEATGRYHEPVAAALHEYGIYVCVLNPLFIKQSGGGSIRKVKTDKADAMKIAKYGLDNWVDLREYTPMDTVRQQLKLCSRQYNLYMKTVVSLQNNLISLTDKTFPGVNELFSSPERADGHQKWVDFVMTFYHCDCICRVSEKAFTERYQKWCKRKGYHYSAEKALDIYAGSCGHFTTLPKNDNTKLLITTAAQQLLAGKMTLAALRTEMTRLAKQLPEYDIVRAMYGVGETTAVQLMAEIGDVRRFPRRSSIVGFAGVDPAVDQSGKHSTKSVPTTKRGSPHLRKTLYQIVCTYLKKSPVDEPVYQFLDKKRSEGKPYFVYMTAAQNKFLRIYYARVKECLEAFDAQQDTSQR

SEQ ID NO: 441386 - protein, 345 aa, unidentified
MVHVGLDLSRPRLDVCALDDAGALVTRTTASPDAEGLRVLANRLAPLGEVSAVVESMTGARFVRDELVACGWEVLIADAVKVKGLAPLACKTDKIDALVLAELSRRDLVPQIWLPSPTVRQTRELSRFRIHLVKHATMLRNRIHSALITYGIPCRTSDLFGVGGRHQLAQLELPEPWAGNVLSMLAVIDHLDTETAGLERQLRKLSAKDPAVPLLMTAPGIGPILGFTIAAEIGDITRFPSPRQLVSYTGLVPRVYQSGNTDRRGPLAKNGPRYLRWALIEAAMHAAAHPVYRDHYQRTKTRLGKQRGAKIARVEVARKLTEAIWHMLSTNTSFAPAGATSSLAA

SEQ ID NO: 441387 - protein, 404 aa, unidentified
MYNAVGIDVSKGKSTIAVLQPGGTVIRKPFDVSHTSQNLNELADYLGSLEGPSKIVMECTGRYHEPMLKALYEAGLFVSVVNPHLIKNFGNNSLRKVKSDPADARKIARYTLDNWTELRQYSNMDDTRTQLKTLNSQFSFFMKQKVAAKANLIALLDNTYPGVNKLFDSPTREDGSEKWVDYAYSFWHVDCVRKIGLKTFTERYKAFCKKHHYIFQQDKPEKLFNASKELVAVFPKEKTYKLLIQQSIQQLNLASGHVERLRQEMNALASTLPEYNTVMGIYGVGKTYGPQLIAEIGDVSRFTHREALTAFAGVDPGVDESGQHKSKSNRASKVGSARLRKTLFQIMTTLLQNAPVDDPVYRFLDKKRAQGKPYYVYMTAGSNKFLRIYYGKVKECLRNLEQAE

SEQ ID NO: 441388 - protein, 373 aa, unidentified
MDQQVIFVGLDVHKATIAVALAPEGRSNEIRFQGSVPHRPGAMADLGRRLQTKHPNARLTFCYEAGSCGYGLARELTDAGHECLVIAPSLIPTRPGDHIKTDKRDATTLAKMHRAGELTTVWVPDASHEAVRDLVRAREAAMYWRNRARQALSSFLLRQGYRYGGRSAWTVSYWRWLATLELEHPAQQIAMQEYILAIQEADARHDRLVKQIEGIIPTWSMAPLVIALQAMRGVAMITAATIVAEIGDLGRFATPRKLMAYLGLVPAEHSSGAKIRRRGITKAGNPRARRLLVESAWTYAKSPRVSQEIQRRQEGVELEIVKIAWKAQLRLHDRYRRLAATGKPKNVVITAIARELVGFIWAIGQRVAAPAAG

SEQ ID NO: 441389 - protein, 351 aa, unidentified
MKTQITALPKLFIGIDIHKRSWKVHCSTDLFSGKSFSMPPKPAKLKDYVDKHFSDHVVSTAYEAGCCGYYAHRCFLSYGWTSLVVNPADIHRKGKERYTKTDRIDAQLISRELKDGRLTSIHVPNPHREALRSLFRRRNDLVKDFRRVKSYIKMQLLYFGIEIPEQYDNDHWSHDFRNWVDKIVFEYPIAKESLASRMRYFRFIDKDLRYVSNQLRAYCRKHFKKDYYLLRSIPGIGGIVACGIISELGDLRRFNNIKHLAGYVGLAPGIHQSGANYKTMGITPRAHRLIRSYFIEASWQAIRTDPVMQSYYRKHQGKNVKGIIVKVARKLLSRTLAVIKTEIPYTIGVIK

SEQ ID NO: 441390 - protein, 418 aa, unidentified
MKVIRPICCGMDVHKNIIVATIAKTNDSGIAEYFQRQFNSQNYSLYELKAWLKEYECFEVAMESTGKYWIPIFNVLEDEFDVYVIHPKYTKAIKGKKTDKKDSKWIADLFRHDLVKFSFIPPKEIRQLRELSRYRIKLVGMRSSESLRYQNSLTVSNIGLASVLSDSTGKSARNIMALALNSETITEKEIKALLKASAKKKAQEVLKSLEGRRVENDQRLKMSIASGHMNELDKHIEEIEIEMAKRCIPYSSYIECMIQIPGISYMASMAIIAEIGINMEQFESDKQLTCWAGLSPANNESANKKKSVKISKAGSYIKPLLVQCALAAIKSNSEPYYKIKYERIKKRRGHKKAIIAIARMMLVAIYHILLTGETFNPSDIEEIHNPKTSKNKTLTVESALTFLKEQGLDISSINLVTQ

SEQ ID NO: 441391 - protein, 366 aa, unidentified
MKKISTVAIERIQIFKGKQLTIGVDLGDRTSHYCVLNEAGEVIVASTLATTPKGIEEVFSRIPRCRIALETGTHSPWVSRQLTQLGHEVIVAHARNVRLIWESSRKDDRLDARTLARLARIDPWLLGPVRHRSAQAQIHLTVIRARAALVSARTALVNAARGLTKSYGGRLPQCGTEQMDREMAKGLSQELRDALDPLLTEIESLNARIAEYDRRIEQIAKEVHPEVALLRQVKGVGPLISLTFVLTLDDPQRFRRSRDVGCFLGLRPGRRNSGRSEPQLHISKEGDRYLRTLLVQGAHYILGPFGEDSDLRRWGLKLAERGGKNAKKRAVVAVARKLAVLLHKLWVSGEVYEPLRNNRKLVAAVA

SEQ ID NO: 441392 - protein, 334 aa, unidentified
MQFDYFIGIDVSKDTLDFALVQANKVLFHQQESNDKKGINAFLKVLRQQTGGGLSGCVFCMEHTGIYNNPLLNLLPALSASIWVERALHIKQSLGLSRGKTDKVDAKRIALFAYKNRDEVRLWSAPRAVVAQLDLLTAQRGRLVKVIKLLKTPLTASVGFLSKSDCQAQQAACAQSLKALKADLKAANDAITALIQSDPELKRLFERVTSVVGISQTTAAEMVLTTNEFKAISNPKQYACYAGVVPFEHSSGQYKGKAKVSQIANKQVKSLLHLGALSAIQYCPSLKSYYERKVKEGKNKMLVINNVRNKLVARVFACVRQNRNYDDSYTHLLA

SEQ ID NO: 441393 - protein, 318 aa, unidentified
MNTKLKQSINVGVDTGKTQLDIHIRPLDIFFSVENTDKGIKKALGIINKYSPERIVIEATGRLEMPFVLACTEANLPIVRANPVHIKRFAGAIGRRAKNDRLDAELIAHYGEAIKPQLTIIKAENIILMSDLVIRRNQLLSMQTMEKNRIQVLPKSLHSTIKPMLTAMKNQITKIESKLVKLIEDSPEYQSKNAILQSVPGIGNIAAASIISNVPELGYITNKQAASLIGVAPITRESGRYKGKRVIQGGRAQVRTVLYMAMMSAMQCNPVFKATYTRLVAAGKPKKVAIIACVRKMVAILNTMLRDGVVWDENIAKN

SEQ ID NO: 441394 - protein, 345 aa, unidentified
MEIHTIGIDLGKTVFHLVGLDAHGEVVVRKKCSRDQILRFTANLDVSLIGMEACGGAHFLARALREQGHDARLMPAKYVKPYVKTNKNDYIDAEAIAEAVGRPRMRFVPIKTDDQLDLQSLHRVRERWVSGRTGVINQIRGLLLERGITIRKGRRHIEESLPGILEDADNKLSGALRVLLTELRLEMQYLQRQVDETDKLILRIANQLEDCRRMLAVPGIGPMTATATIAAIGNGSAFKKGRGFAAWLGVVPGEHSTGGKQTLTDTSRRGNRYLRKLFVQGAHAVLQQRMKQSNGLNTWLAQLTSRKRTQVAAVALANKMARMVWAVLSKGEAYRPPLLIETAAV

SEQ ID NO: 441395 - protein, 358 aa, unidentified
MNNITRVGVDLAKNVIQVCAVDVTGKVVLNKPLPRDRFLTWCAELPKGCLIAMEACSGSHHWARELNKLGLNAKIIAASHVTPYRMEGKGGKNDANDAAAVCEAASRPNMRFVPVKTSNQQGILCVHRMREGFKEERTGCINRIRGLMAEFGIVVSKSPNKLREKLQDILEDAENGLDWLARLAIQELYTHWCAIDEKIDWCDKRINAHISDDMQAQSAKQLIGVGALTASAAIATVVDFKQFKNGAQFGAWLGLTPKQSSSGGKTKLGRITKRGDTYLRTLLIQGAKAAVMSAHKRQDPISKWLFQLKEKSGWQKAAVAMANKNARILWAVMTKGINFDPAYVSVKPGGSIGAALAV

SEQ ID NO: 441396 - protein, 343 aa, unidentified
MAEASTIGLDLAKRVFQAHGADASGAVVFRKRLRREQLLAFFAGQSACVVAMEACSSAHYWAREISALGHTVRLIPPAYVKPFVKRQKNDMADAEAICEAAQRPTMRFVAVKSEATQANAVVFRARDLLVRQRTQAINAVRGHLTEYGLVVAKGPSHVTRLVEKVEDPATGLPEAARLVLRVLMASLQFLSERIALLDREITRRARENNEIRRLTTIPGVGPVTATALAALAPPAEGFRKGRDFAAWVGLTPLQHSTGGKQRLGATSKMGERTLRRLLIIGASSVVRHAVRHKHGTTAGSWLGQMLARKPRMLVIVALANKMARTAWALQATGEIYRAPVTTA

SEQ ID NO: 441397 - protein, 344 aa, unidentified
MGDCTKPKGGRTMRYIGLDIHKKHTQACIRNEDGKILSGERFKTEADDIASFFAKQEAHGPLSVTMEATGFYFWIHDFIVARGHPVIVVHPARIKPLMKAKAKNDRNDASMLAELLRTGCLEGIYVPPPEIREMRDLTRHRESLVRKKGDLKREIISSLDQHGVMKPLDYRISFTKKYIKWLRSLNDFVINEKLDLLEATVSKIENVERLIEERWGEDEDVQIIRSVPGIGLVTATVIKAELGDVARFPSAENLAAYIGVSPTTFQSGEKEWGGPVRHGNSRVKHVLIEAALVHTRSCPDSKISRYNFRKRESIGGAKAAVATGRKLSEAIYFMLVRRQPFHAH

SEQ ID NO: 441398 - protein, 403 aa, unidentified
MRLFVGVDWASREHAVCVVDETGGVRRRLQIVHSATGLAALLSELRRLGDPATLPIAIERPTGLLVDTLVEAGFPVYPVHPNAVVASRARYRAATSKSDPHDAYVLADVLRTDGHRLRRLQPLQAATRALRALVRGREDLLATRMALANQLRALLERFWPGALGLFAAIESPIALAFLARYPTPQSAARLGPKRLAAFLAQAGYSGRRRPAELLTRLRAAPPSHTPAAEAAANGHLVGGLVASLRPLVAEIARLSKLIEQAIAQHADGPVLMGFPRAGRLNAARLLAELGDDRTRFGSAAQLAAEAGVAPVTTRSGKYHGVSFRRACNKRLRQAVVCFADHSRHSSAWAAAIYARARTRGCHHAHAVRILARAWLQVLWRCWRDRIPYDPAKHRAAQQLLAAG

SEQ ID NO: 441399 - protein, 472 aa, unidentified
MARAARRPDNSQQSKRRSSRVHSAPLAQMNLNAAGIDVGADAHWVAVPPDRDEEPVQRFGAFTADLYALAAWLRQCQIETVVMESTGVYWIALFAVLEERGFDVKLVDAHYARQVPGRKTDVKDCQWLQELHTYGLLRGAFRPEDQVCVLRSYLRQRSMLVAMASRAVQHMQKALEQMNLKLTEVVSDINGKTGMEILRAILAGERDPQRLASHRDRRCKHDQATLAKALEGHWRAEHLFALQQAVEQYEFLQQQLRACETQIEACLQTFVTHVEVDSPRPAPARKRRSRQCHAPSFDVHKYLDAMTGVDLTPIDGIDALTALKVISEIGLAMTRWPTGKHFAAWLGLCPGNKLSGGKRYRMRSKPTANRAASALRLAAQGLVNSHSALGAYYRRMRARLGAPKAITATAHKLARLVYSMLRYGTAYVDMGQQAYEQKYRDRVLTNLQRKAKAFGYQLVHVENSDSGVASTL

SEQ ID NO: 441400 - protein, 407 aa, unidentified
MLFVGDDWAEDHHDVYLMDEAGATLVARRLPEGLAGIGQLHDVVAAYADDPGEVVVGIEKDHGLWVGALVAAGYQVYAINPMAVARYRDRHRVSGAKSDAADAKVLADLVRTDRHNHRPLEGDSAQAEAIKVLARTHQNLIWTRARQVAALRAGLLEYYPVALQAFPNLGDRDRDRDALAVLGRAPTPDEGARLSVSKIGAALKAAGRKRNIDERAREIQAILRSEQLAAPNVVASAYGASTRAAVNMLLALTDQIGELETELAQHFRTHPDADIYLSQPGFGVILSARVLGEFGDNPNRFTNAKCRKNYAGTSPLTVASGRKHAVTARHVRNPRLYDALDRWAFAALKCSPGARAYYDQHRDAGDTHHQALRALANRQVGILHGCLRHHTLYNEQTAWAHRMLTAA

SEQ ID NO: 441401 - protein, 343 aa, unidentified
MKIHALGIDLGKTVFHLVGLDASGQVVVRKRCSRTQLLAFTANLQVGLIGMEACSGAHFLGRALRAQGHEVRLMPAQYVKPYVKTNKSDYIDAEAIAEAVQRPRMRFVPIKTEEQLDLQALHRVRERWVMRRTAVVNQIRSLLLERGLTLPKGRSHLDKQLPRILEDAELNLSDSFRVLLAQLKLELEQLAARIEEMDRVIQKTARENEACQRLTEIPGVGPVTATALIAAVGNASAFGKGRKLSAWMGIVPGEYSTGGKQKLLGISKRGNKYLRRLFVQGARSVLQQRHKQAPGLSEWLAQLLARTHQNVVVVALANKLVRMSWAVLCKNERYRAPVFAGTT

SEQ ID NO: 441402 - protein, 340 aa, unidentified
MRQLYVASDLHSNNNLVGIIDGEGKRIFKKKLSNDPLLISDVLKPFREEIVGIVVESTYNWYWLVDALMEEGYKVHLANPAAIQQYSGLKHADDKHDAFWLAEMLRLGILPEGYIYPKEERPVRDLLRKRGHLVRLRTSLILSLENIISRNFGSKLPANHVKGLRKDQVTPLFEGNEDLALAGRVSKETIDFLTHQIRQIEGVVEKRIQLKEAYRYLLTLHGVGKILGLTIMLETGPIGRFETVGDYTSYCRKVPSQWISNGKRKGSGNRKNGNKYLSWAYAEASDFARRLHPESRAYYNRKMQQSNPAVAHSALSHKLARAAYYIMRDQVAFRPEKLFG

SEQ ID NO: 441403 - protein, 436 aa, unidentified
MLSYIGLDVRQQEAAVCFLLGDGREPVPRWTAPTRLPGADALAERLATLARDHGVDELRIGMEATGLYWWHLACTRKDAPVLAPYRPRVYALNPKLVHDFRKHYGALPKTDRADAYVIAERLRFGRQLPPPFALNLRYAPVQRLTRFRVHLAETLAREKSYFLTFLFLRFSGFSQAAPFHDPFGTTSCAVLEEFTTEELAQTPLDALAPYLAEKGRGRFKDPAALAATLQRAARNSCRLDRVLDDPLTVVLGTTMATIRTLQTQLRAVDKAIAQELKALPQTLTSVPGLGPVWVAGLVAEIGGITRFSDEAALAQYAGLVWKAHESGTFQAEDTAMSKTGNVYLRYYLVEAANSVRLHCLEYAAYYRAKFPQSTKHAHKRALVLTARKLVRLVDALLRTDTLYRTPAQRQDRQEGTTPTASRPGHSRRSRQAAAVD

SEQ ID NO: 441404 - protein, 394 aa, unidentified
MKLVGIDVGKNSHHFCVMDKETGEFNVTPSSFLNNKEGFDFLINSLKPYSKKSILLGMEDTGHYHVALLKFLLSNGYTVALINPKTTDLTRKMEGGITKNDKLDTITICDVLDTPERKKQYRITKVDRFDLYEQRQLTRHHHNLKEELNVYCNRLQKSIDLVFPEFNTLFSSKYSIVYMNLLKTFGSAEAIASTDIRTIRKCFEVKGRGGRISLTPEKLKECAKNSIGISSEVETIQIKHLVSQITLIKEQIAEIDKKIEEFSITNNSPILSIPGISHFSGTSILAELGDIGNYSKPSQIIKFAGVAPYHYESSQYNAQHTGITKKGSKYLRKTLYQIILTVINNNPVFKKYYLLKISQGKGHRCAQGHCIRKLLRIIYHLLETGQSFNPALLR

SEQ ID NO: 441405 - protein, 337 aa, unidentified
MTIIRIGLDIAKHVFQVHGVDENEVTVLRRQLRRSEMEKFFNKLAPTRIGLEACGASHYWARLLRGLGHEVVLLPPQYIKPYVKRGKNDANDAEAICEAMSRPGMRFVPIKSAESQAELMPLGVRDLLIKQRTAVINTIRGYAAEFGVIATKGPVKVAELLQQAHAEEASVPVLALDMLRLLAAQLDALDVKLKLIETRLMALHRENPVSQCLASQPGIGPIGAVSFALRVTDPKSFRSGRHFAAWLGLTPKDNSSGGKRRQGRISRQGNEALRKLVVLGATAVIRFARPGHGSPWLLNLLARKPKKLAAIALANKMARTLWAMMVSGEVYRRPLPA

SEQ ID NO: 441406 - protein, 373 aa, unidentified
MCSAEIGNQPDVGKSSHWACLIDRDGEVLASAPVRNREAELDALFASAPAGTLVVVDQFRNIGSLAVRRARAAGLVVAHLPGLAASRAAGLFAGEAKTDERDAAVIARTALGVPDSLSGVPGRGEALEAARALSSQRDHVVACATRDKNRLRAVLLESCPALEAAVDLSDRRWLELLAGFGGAWGIARSGAGGPRAEAAGEAAAASTAPPPALVEAENRQVRFLAARISEALDEAGALEAETAALLEGDETYACLLTVPGIGPRTAAQLAVSVDIGRFPDHDHLASYCGIAPRVRSSGTSVRSVRASRRGDARLKSLLIFSCNSLVRSSGRYGEYYRACRARGMGHGRALKAVARKRLRAIYAVMRDRVPYRE

SEQ ID NO: 441407 - protein, 341 aa, unidentified
MSKTRYFIGIDVASDNFTASVLLETVKSSQSTETFQNFPQGFGEFKQWLIDQKIKPSNSIICMEATGVYGEQLCYWLTANKYRVAVEPPLKFKRAFSTSTHKNDQIDSQKIAEYAFRFQDELHFWQPKEEVLEQIRVLLTTREQFVQQRTANFNSLNTLKRKVVQTPMANEYYQSNIERLTKQIKNIEKEIQRLVDKDQHFKKTISLLKSVPGVSVLLGANLLVATDGFNNYLNYKQLAAYIGICPYEHRSGSSVYKRPRSARYGPARLRKLLCLAARSVKTHKRPFKLYFLQKSAQGKDTSLILNNISNKLLKIICAVIRNQIPYHENYQSVCPTLLNNT

SEQ ID NO: 441408 - protein, 339 aa, unidentified
MSKPIQSQQAMVFCGIDVSAATLAVAVQQEDQPLEERNFENTAGGHKTLIGWLQRRKALVRVSLEATGIYSLDLALALDQAEGIEVAVLNPKLIHRFAQTLRRSKTDSADAQVLAEYSRRMPFAPWSAPEPSGLQLRTISRHIQGLVVEHTRQNNRLHSAEQSASTPRCVVNDLKRSMASLKLRIARLRHEALELVRSDEQMRKRFDLLIRIPGIAAISALQLLGELAPLSPEMSVRQWVAHSGLDPAHQVSGTSVHKPSRISRAGNRHLRHALYMPALVAVRRDPHLKAFYESLLSRHKAKLQALIAVARKLLHAIYGILRTQTPYDGSKLFPQLVVA

SEQ ID NO: 441409 - protein, 416 aa, unidentified
MGRLKIVYPICSGVDVHRDFLIACIASTNPQGVTEYQSRRFSTYTGNLRELRDWLLSNQCKDVCMESTGKYWFPIHNILEDSCHVVVSHPKFVKTITDKKEAQWIADLFKHDLVRGSFIPPKDTRQLRDLCRYWVKLSSYMTGEKNRAQNCLTVSNFKLDDVFSNVFGKSASAITTQLLEHPGEPFDVTPFVHGRCKTPIAQIQEAVDGIFTHEQAEKLKIIRSHMDSLEMHKAELESLILDIAQAYLPQVELLLTVPGISDAFTAIRILAEIGADMSVFETSKHLCSWAGLTPQNAESAGKKKTTRIGKSGAYLKPLLIQVALAASRSEKHPEIYGKKNALQKRRGKKKAIVAIARRLLTAIYHILSKNEPYSPAAYTKVDMPPMARHISQEKAFELLARMGYILSEPLSHPLSG

SEQ ID NO: 441410 - protein, 410 aa, unidentified
MEVFYPNCAGLDVHKETVVACSRQVVGRKASREVRTFKTTTSDLLALSEWLSSLGCTHIAMEATGVYWKPVWHILGDGDFALTLANAAHVKNVPGRKTDVNDATWLADLLAHGLIRGSFVPDEQTLEQRGLLRTRKQLIRERTSHVQRLQKTLEEANIKLDCVISDIVGTSGRAMIEALVAGETDPAQLARLANRRIRASATTLQEALRGRVRNHHRFLLRLHLEQIDALDRAIAEIDREVEANLDPFRALIPVLTSIPGIGDLAARVMLAEIGTDMSRFPTAGHLVSWAGLCPKNDESAGKRHSTRMRKGAPWLKTTLFQCAWAGARTKGSYLQAQFHRQRARKGAKKAIGAVAASMLTAAYHMIKNGTFYEDLGADHFERRAKPVQIKRLLAKLQALGYEAQIAPVPA

SEQ ID NO: 441411 - protein, 395 aa, unidentified
MVACLRLVSNGKVTTEVRTFQTTTADLLRLSEWLAANECTHVAMEATGVYWKPVWHILDDGEFELVLANAAHVKNVPGRKTDVNDAMWLAELLAHGLIRASFVPDAQTQEMRNLLRTRKQLVREQSSHVLRVQKTLEDANIKLDSVLSDLMGKSGRAMIEALIAGETNPAKLASLADRRVKASPEEFREALRGRVTKHHRFLLRLHLNQIDALDAAMATLDAQVEANLGPFRTAVDLVMSIPGIKNLGAHVIVSEIGIDMSRFPSDAHLISWACICPRNDESAGKRRSNRLRKGGTWLKTTLVQCAWAAVKKKDSYLQAQFYRIKARRGPKKAIMAVVASILTAIYHMLKDGTMYKDLGCNHFNRRSTDQQKTYLIKRLADLGYTVEIKPVVAMA

SEQ ID NO: 441412 - protein, 394 aa, unidentified
MAFKIFRKNCCGLDVHKTWIYACMGITDTNGRTEYKQARFSSFTKGLQELADWLAKYDCNDVCMESTGKFWIPVFNILEKTCWVTLAYPKYTKPQKGNKTDHKDAKWICDLYMCDMVNPSFIPPPDIRQLRDLMRYRSKLTNIMTSEKNRALNCLTVSNLKLDDVFSDVFGKSSRSVIRYILEHPGETFQVAPFIDRRCKHPVEEIQAVIDGTISHQQAVKLRECLQHLDELEVHKTNVEKEILCLVQQYPYQLELLQTVLGFSGNIMTAIALISEIGADMSVFPSAKHLVSWAGCCPRNDQSSKKVKSTRISRAGVYLKPLLVQVAIQPFTANADELSAAGALEIRCQICDGRFLSMWAALFIFLGCPLPPCPKNLHVHNGRIVILASVAWIF

SEQ ID NO: 441413 - protein, 435 aa, unidentified
MSRQNPDPNPNPSTLSSPVFAAFIGLDWGDEKHALSLCAAGSATLERTTLEQTPEALADWANALRTRFPNGRIAVCLEQARGALLAALLSYEHLVAYPVNPKSLARFRQALYPSRSKNDPVDADLLLELILKHRDRLRPWRPDTVQTRQLALANEQRRHFIDHRTALTNQLTAHLKAIFPQALQLVGEELASSMATDFLKKWPTLQALQKVSPSVLRKFYYGHNSRSEELMTQRLQRVKNAMALTQDPALLAVHSLAIQTLAAQLQALRPFLDQFDEQIAQLFAAHPDAALFESLPGAGAVLAPRLLAALGTDRDRFESAVAVSCYSGIAPVTEQSGKTQHWVHVRWSCPKFLRQSWHEFANASRKFSPWARACYEHLRTKMDHHEAVRKLAYKWQRIVWRMWQDRQPYDEARYLGSLQQRGLEIYAGLPAQTGE

SEQ ID NO: 441414 - protein, 327 aa, unidentified
MNASFEQNFIGIDVSKGTLDLAVRGQSRTVQFENTPEGISGMLEHLKCIEHIAVVLMEATGGLERAAAGQLCLAGFAVMVVNPRQAHNFAKALGYLSKTDATDAQALAQFAHTLHNGDRREKLLFRLPSEQQQMLQALVTRRAQLIVMRVAETNRLAGAHSSQRKSFESVLKVLNLQIEKVDKEIGAHLDKHFREKLDLLKGIKGVADGTKAVLMASLPELGELNATEISKLAGIAPLNCDSGKMRGKRTTWGGRADVRSALYMATLSAARFNPVIRVFYTRLRAAGKPPKVALVACMHKLLIIINAIIKSGKPWQADYGCPQAAVA

SEQ ID NO: 441415 - protein, 353 aa, unidentified
MSKILAIDLGKNNSVVCIFDRSSLKSKFKTVGTRKQVMHDLFVDYQDQIEIVLFETGSQMGWVADILWALNIPFKVANTNHPAWKWKNNPNKSDRKDAQRLAMMYNTGFFPSVHVPKRKVRQKRSFIVYRDDIVKRITKIKNSIRAILTREDIHLPGGKKGWTIKALAPIRELAMAIDEIIEPEDLWKGQLYSELQALDDATALLKNIVSKLDALGEADEKVKRLRTIPNVGPRLSEAVVAIIDDPHRFKNGRHVSSYLGMVPRRYQSGQVDITGRISKSGNKLLRTLLVEVSWLGLREPWMREIYDKVRRGDKKRSKVAIVAVARQLLVRCWAILRDESCWDADHAKKWAKC

SEQ ID NO: 441416 - protein, 480 aa, unidentified
MSQQKKHSKPLGEEKTAAGTGRRGRKRKGMCLEDRPILEANAAGIDIGAREIFVAVPPDRDEHPVRVFSTFTEDLEKMAQWLVSCGITTVAMESTGVYWIPLYDVVEKHGVKACLVDARGMKNVPGRRTDWHECQWLQFLHSVGLLRAAFRPEGDVCAVRSMMRYRTELVEMTSQHIQHMHKALTQMNVQIHHVISDLTGVTGLAIVDAIIAGQRDPVVLAKLRDHRIKASEETIRKSLVGNWRAEHLFTLEQSRKSYQHYQGQISACDEAIEKLLVAFVPRVDPTERPLPPDRKRKQRGRKKKNATPNTFDLRTESYKLFGVDLTQIPGLMAMVLMLFSEVGRDMSRWKTAGHFVSWLALCPDNDISGGRVLWRGMRRVHNRAGDLFRMAAYSLHHDATPLGDYLRRMKSKLGPAGATTATAHKIAIIFYTMVKKQVEYDATLWADRDAEREKRFEAKLKRQAQQLGYKLVPIEERPAA

SEQ ID NO: 441417 - protein, 412 aa, unidentified
MKDLLEISCGLDVHKEKIVACILTGPLGKPTRSEIREFSTLIPDMIALRNWIVSKNCHHVAMESTGIYWMPIYEILEDAFYGDITLLLVIARHMKNVPGKKTDMRDSEWISTLLRAGLLNGSFIPEKRIREFRDLNRYRKSVIRDITSQKNRIEKFLQSSGFRLSSFISDIFGASGRNIILHLIEHGQIDKTALDSCLKTKTRNRIDEILMSVNGTLSEHQKAFLRILMTHYDSLKKHLAEIETSLEKDMAPFALQVEQLNSIYGISTTASCAIIAEIGIDMNPFKTAEHICSWAGLCSGNNESAGKRKSTSVTKGNPYIKSMLCEIAWVIAGKRNTYLSAWYWRIKQKKGAKKAIVALARKLLVIIYTMLKQGTLFDESCFETRRKHCEQKQLSRYIRELEKHGYHVEAQS

SEQ ID NO: 441418 - protein, 345 aa, unidentified
MPVAEVDMFAGIDVSAHELSVALRRGQGHDKPAMAKFPNHPSGHKALVAYLLRGGGRVRVCLEASGNYSLDLALTLQAHRQVEISVINPRRARRFAESLGERSKTDPVDARVLCEYAARMPWVQWQPPSPVALHLRALTRAIADLGVIHTQQNNRAYAAAASQALPVLVVKEMQRHKKYLEQRMTRLRREAVRLIACDPELDRRFRLMLTTIGIAETSALQILGELAVLPDMLDARQWVAFSGLDPRLFKSGKSVEKRPRISRSGSRHLRRALYMPALVALRRDPYLRVFYQNLLARGKARLQAVVAVMRKLLHALFAMFRSNQPYDGSKLCAVDLAVHAIAACA

SEQ ID NO: 441419 - protein, 421 aa, unidentified
MPTTLCVGGDIHQDELQLCALDKTDGHPVGAHLTVKNNRPGAEQAIAHLVALLTQHGYTHLEFGLEATGLFWLPFFTYLQHSPAFTPFQPRWVCFNPKLVARFKEGVALTEIKDDAEDARAVAERLRFGHLPVSYVPTSEWLGLRMLTRYRYQLAHQIAEEKRCALTRVFLKASEWHRGQPFSDVWGATSAALLTEFTVAELAAMPLTQLTGLIQEYGRKHFDDPQSTARQVQRTVQTSLPVAPELDNALTVVLQVAWAHIRDLEKLMRRLDREIAQRMERHANPLLSVPGLGPVITAGIIAEIADIARFPDHPQLAKFVGLVWRKHASGQFVAEETRLAKSGNVYLRYYLIEGANLMRMHNLDYQQYYRHKFAEVPKHQHKRALVLTARKLVRLVFALLTKNQTYVRPQVGIATEEVTPA

SEQ ID NO: 441420 - protein, 385 aa, unidentified
MLKIVYPICCGMDVHKSFLVACVASTNECGVTTYKSRRFSTFTKDLRLCADWLSANNCKDVCMESTGIYWIPIYNILEASCKIVLAHPKYVKAIRGKKTDKKDAKWIADIFKHDLVSGSFIPPADIRQLRDLVRYRWKLNNFIVGEKNRAQNCLTVSNYKLDDVFSDVFGKAATQITSYLLEHRNEPLSDVSNFRTKGMKATDAEIRDAADGNICAEQAEKYTSQLSLVMSVPGIQTFSAISVIAEIGVHMSVFPSSKHLCSWAGLTPQNNESAGKKKTTRISRAGAYIKPLLVQCALCAIRAKRNPEIRNRYLSIKKRRGHKKAIIAIARMLLTAIYNILKKNEPYNAELSHKVDVPPAHRSVTIEEAVFILQRQGYLITPCTS

SEQ ID NO: 441421 - protein, 312 aa, unidentified
MIEHCYGGIDVSKDRLDVMVLPDGKSFSVDNNAAGYSELAKRLRGLSIAAIGIEPSGGYERAVIRALLAADLSVRRINPNKLRQFARARGVLAKNDRLDARLIAEYVAIMPTRVVQRDPATEQLAEVVTIRRQLSDEHVAVENQTAHLEDVMLRRLNKRRLARLAADILLLDRRMAQIVASNANLTRRYKLLTSMQGVGPTLAFTLIALLPELGQMSRKGIAALVGLAPYDFDSGRLKGHRCIYGGRLPVRNVLYMAALSACRYNPALKVFHRRLAATNKKPKVIIVAVMLKMITTLNAMLRDNVAWQPKSA

SEQ ID NO: 441422 - protein, 323 aa, unidentified
MTRIICGVDVASKSLEARVGQQGAAGSFANDAEGINALGDFCRTHEIDLVAMEATGGYEQQAFAQLSGQGLAIAILNPRAVRQFAQSMGSLEKTDRIDASIIAWYAEVKKSQPVCLAPENQQHLRALVTRLRQLTEMRVVQLNQQRLVTDRKVQASFKKLLALLARQIGELEQGIAVLLAKDPLWRELDQAFRTIKGVADRTVARLMAEMPEIGTLSNKTISKLAGVAPLANDSGKHLGKRIVRGGRAAVREILFIVASVVGRHEPDFIAFRERLRSAGKPPKVVRIALAHKLLVRLNAKAREVRQRQTTLQPNSAVLLAESC

SEQ ID NO: 441423 - protein, 349 aa, unidentified
MIIGADYHPGFQQIAYVDTESGELQERRLQHREEAEKFYRDLAAQEMKVRVGMEASGQARWFERLLGELQFELWIGDAAEIRTRRVRKQKTDRQDAQLILKLMLKDDFPRIWVPSWENRDLRQLLWHRHRIVQMRTRVMNQLQAVALNEGVRRKKALWRPAGRIQLESLGLAPWASRRRHDLLELLDRLNPSIAQLTKAVEQEAEKCSEAQRLMTHPGVGPLTALAFVLVIGTAERFRCGKQIASYLGLVPSEDSSGDRRRLGHISKQGNSLLRFLLVEAAQVTVRSNQEWRSKFFHLAMRRGRKIAKVAMARRLAIRLYWMWRKGWNYEQLTQFGSHAGQPGNPHGVQ

SEQ ID NO: 441424 - protein, 407 aa, unidentified
MNAVGIDVSKGKSMMAALRPMGEVVLPPKEYPHTEVGLERMALDILALGEDTRALMEATGRYHEPVAAALHEYGIRVTVLNPLFIKQSGGGSIRKVKTDKADAMKIAKYALDNWVDLREYTPMEPIREQLKLCSRQYNLYMKNVVALQNNLISLTDKVFPGVNELFSSPDRADGSQKWIDFVITFWHCECICLVSEAAFTQRYRKWCKRKGYHFSERKAAELYMGSMGHITTLPRNSNTKLLITTAAKELASAKATLAVLRAEMNRLAQQLPEYETVRAMYGVGETTAVQLMAEIGDVRRFPRRSSIVGFAGVDPAVDDSGKHISKSNPTTKRGSPHLRKTLYQIVCTYLRKAPFDEPVYQFLDKKRAEGKPYFVYMTAAQNKFLRIYYARVKECLIAADTRELPED

SEQ ID NO: 441425 - protein, 352 aa, unidentified
MTRITTIGLDIAKSIFQVHAIDAGDHVVVVKAIRRAQVLAFFGRLEPCLVGIEACGSAHFWAREIGELGHTVKLMPPKYVKAYVKRGKTDAGDAEAICEAVTRQTMTFVAVKSAEQQALAMLHSVRETLIGQRTQAINALRGHLSELGVIAPQGLLGQAELARIVRDDDDARLPLIARVALKLLVAQIEAVSGRIAETDAALRAEHQSSAKSRALETVPSIGPVIASALRARVGDAHGFENGRHMAAWIGLVPEQDSSGGKVKQRGISKKGDRYLRRLLVSGAMAMVQHAQRKPDKYPWIAKLLGSKPPKLVAVAVANKTARIAWAIMARGGTYDPGFHAKRTAAAVLAAPV

SEQ ID NO: 441426 - protein, 394 aa, unidentified
MPKLFVGVDVAKDTSSAQGIDSDGKGLFSLTFAMDSEGFMQLWKAITAHSKDLSEVLAAVESTACYHINLYSFLTAKGVSTVVINPLLIASFAKLSLRKTKTDKKDAMTIAQFLLVHRDTISQLSLSQDMQDFRDIARERESVGNMVNAHKVEIKRLLQSTFPELERIANLWTRVMLEFIAVFPSARLVKLARLKDIRKVLQRKGVGTRLTYTAEDLIQAAKRSVATISPAKELILQGKVRTLQHLQERCEELTKILTEYCKASMLEDFEIITSIDGINKGTATTFLAEIGCINNYASYKKLIAFAGIDPTVYQSGKFEGASRISKRGNRHLRRVIWTMTTCVIQHNEIFKAYFVKKRSEGQAFKKAVLATAHKLIRVIFAMLIQRTMFKEVCA

SEQ ID NO: 441427 - protein, 359 aa, unidentified
MTSLNHHNDLSDLREIIDAVIGVDTHVHTHSAAVLDARTGGVLDEITVDATADGYARLIEFADAHALLRAWAIEGTGGHGAGLTRHLEQHEEIVIELDRPVRAQRRNGAKSDPLDAIRAAREALARPRLGTPRSGGDRQALSVLLAARRSAVQAATDAQRQLFALVIAAPEPLRGRFRGQKLPAMIATATSLRTHSSWDLETTTTITTLRSLARRARTLIEEAAEHEKAIRAIVQSWRPDLLNQLGIGPIVAATVLCAWSHPGRIHSEAAFAMLAGVAPIPANSGQVTTRHRLNRFGDRQLNQALHTIVLTRIRHDQRTRDYVERRTSEGKTPREIRRCLKRYIARDLYRTLENAPRTP

SEQ ID NO: 441428 - protein, 412 aa, unidentified
MTVTNQFAAHVGLDWADKKHDVCVQFKNGERVFHVIEHTAEALDAWLTELHQKVKGRIGIALELKKGLVVYALQKYPFITVFPVHALSLARYRQAFSPSGAKDDPQDAELALELMLRYPQKIKAIEPNNADIRLLQQLVEQRRQLVEDKRRFVNRIINTLKQYYPQPLEWFSHRGSLLLCELIIRWPSLQQLKRARRETIRNFLNAKGGRAMALTEQRVVSIDNAIPLTTDSSVIEANALMATALATQIKVVSEIIKTYDERIEALFDTLPDAGLFKSLPGMGPCMGPRMLAALGDNRDRFNSAEEIQNYAGIAPVTERSGQKCWVHWRWQCAKFVRQTFVEWAAKTVNSSYWARLYYQGLREKGKSHHSAIRALAFKWIRIIYRCWKTRTQYDEAKYLLALEARHSPLLKP

SEQ ID NO: 441429 - protein, 423 aa, unidentified
MDVIHERVAGLDVHKDTIVACMRTMAGGKPARESRTFETTTEGLDALLAWLASRLCGFAAMEATGVYWMPVWKILSDGAFEPIVANPAHIKAVPGRKTDMNDAMWIADLAAFGLIKASFVPDEEFHELRTPMRTRKQLVREQTRHVQRIQKTLTEANIRLDSVISDIMGLNGRRMIEAMIAGVRDPGKLAALADKRLKAKPKELYGALHGRLTDHHRFLLRLHLDQWDTLDAAVKAVDAEADARVSRMDAEADAGEARFSGLIEQLVSIPGVSRLSALTILSEIGKDMSRFPDSGHLIAWAGLCPGQNQSAGKHKRSRLRKGAPWLKTMLVQCAWAAKRKKDSYYKAQFFRLQSRGGPQKAICGVAASILTAIYHMLKNGTFHKDPGSAVFEKRPPDIKVKRLASQIAKLGFQVTLQPLAKAA

SEQ ID NO: 441430 - protein, 321 aa, unidentified
MSESYNVGIDVSMDRLDVEIRPGGRGFCVVNDTAGWIELVARLRQCAIVAIGLEPTGGYERGVVRALLAAGFSVRRINPNKLRQFARARGALAKNDRIDARLIAEYVALMPTRAVQRNPVVERLAEIVTMRRQLCEEHVAIENQASHLEDAVLRRMAKRRLARIEADIALLGKRLAEHVAAEPVLARRFDLLCSMPGVGATLAYTLLALLPELGGIGRRQIAALVGLAPYDFDSGKFRGQRHIYGGRMPVRNVLYMAALAAFRFNPVLKALHRRLVGAGKKPKLAIVAVMRKMIVALNAMLRDGTQWADRHSSGRHTVPAT

SEQ ID NO: 441431 - protein, 412 aa, unidentified
MDLFAERCAGIDIGKADLKACVRTPGARGGRRSETRTFATTTAGVLALQGWLIDRRVTLVGMESTGVYWKPIFYPLEDHFECWLINPQHIKKVPGRKSDVSDAEWIARLVETGLVRASFVPPLQIRVLRDLTRYRTSLLRERTREVQRLHAMLEDAGIKLAVVATDIMGKSGRDMITALIAGQRDPHVLSDLARRQMRTKIPALTEALDGRFTDHHALLCQMMLNRIDGVDATVAALDEQIAAATECFAETIDRLSAIPGVARRTAEVIVAETGADMSRFPTAADLASWAGMCPGNNESAGKHFTGRTRRGNPWLRGALGTAAAAASHTQGTYLSERYHRIAKRRGTKRALVAVGHSILQASWHIMHNQVDYVDLGADHYIRLGDPARRASRLVQQLRQLGYPVVLPDRAVT

SEQ ID NO: 441432 - protein, 343 aa, unidentified
MQTVTTIGLDIAKSVFQVHGVDAAGQVLIRRQLKRRYVLAFFQKLPACLVGIEACASSHYWSRELQALGHSVRLMPPAYVKPYVKRQKNDMADAEAICEAVTRANMRFVPTKTPEQQSGLMLHRTRHLLIRQQTSVINAIRAHLAEFGITAPVGRTGIEELLRVVADPSDKRVPELVRTCLAALGSQLLGLKKQILQFDRMILAWHRSNQTSKRLNCIPGVGPLLATALTASVADAKSFRSGRNFSAWIGLVPKQHSSGGRERLGSISKQGDRYLRRLFVAGALAVIRYAKLHGTNHRPWLTALLARRPTKVAAIALANKLARMAWALMARGGRYNYPIALRP

SEQ ID NO: 441433 - protein, 330 aa, unidentified
MTTEAGEIRQLELLHEDPAKVRAFYEQFAGQRVIVGFESSGYAAWFEELLEELGCEIWIGHATYIRQFAKRRQKNDRRDADLILELLLSGDFPRIHRYSRSTRQMLQQLRYRQRLVKMRTMVVNMLLFMASSRGHSFRTQLQSKRGQARLGQLPLPEPLAQQRDELLSLLAQLDQKITTIERWLEQQTAEDVAVQRLRTHPGIGLLTSICVRYTLEDVGRFATTRKVSAFAGFDPMEDRSDERRRMGAISKQGSRWLRFFLVEAGQVAMRRDADLGHVYQRISRRGGHAKAKVAVARRLLVRAFIMLRDEIDYAEFLRRGVAARSSRGSA

SEQ ID NO: 441434 - protein, 348 aa, unidentified
MDFIGFDLGKVASQICIITSDGELLEHRIKTNREHLARLLGSRLPARILIEAGTESEWVARALEALGHEVVVADPNFAPMYATRSRRVKTDKRDARTLAEACRLGAYRPAHRTSDKQRHVRAQLAVREAMVRTRAKYISLIRSLLRRDGLRIAAGTARCFSVRLSALQLSNELREEVMPLLTLMESLNEQIKGADEQLAQLVKDEQVVRRLTTVPGVGPITATCFVSTLDDVRRFPDAKQARAYLGLVPSEHSSGERQQRGRINKAGPNRARYLLVEAALAILRRRSPQTAALYDWATKIKERRGMKIAVVALARKLAGILYAMWRDATDFKACRVPADKAVTQAVAA

SEQ ID NO: 441435 - protein, 326 aa, unidentified
MSSPTRQETHVGIDVSKRTLDVCVLPGEGGSGSQGESFAVANDHAGIGELLHRIEGSGPKLVVLEATGRYERLAATSIAARGIPVAVVNPRQTRDFAKAMGRLAKTDRIDAFVLARFAGAVEPRASTIPDGEAQHLQGVLARRRQLIEMLVSEGNRLQMAPKALAKRIRAHIEWLKKEVERTDKDLDEAIEDNAAFKANEILLRSVPGVGRVLSRTLLAELPELGTITHRRLCALVGVAPFNRDSGQRSGKREAWGGRAPVRAVLYMGALVATRHNPVIKEFYERLLAAGKPKKVALVACMRKMLSILNALMRDRAIWRCPHALTP

SEQ ID NO: 441436 - protein, 344 aa, unidentified
MGEVSTIGLDIAKSVFQVHGVDVAGAVVIRKRVSRAKVLEYFGELPPCLVGIEACPSAHHWGRELQALGHTVKLIPPSYVKAYLKRSKNDANDAAAICEAVTRPSMRFVPIKTKEQQTALMLHRTRQLLVRQRTMLSNALRGHLAELGIVSAKGRNGTGELLGIIADGADSRVSPAVRSILEVLARQHSAIGTEIASIDKGIMALHRGCEASRRLAEIPGIGPVGATALVAEIGDWKTFSSGRSLAAWIGLVPKQHTTGGKDRLGSITKQGNRYLRWLLVVGAMAVIRYARKHGTEKRPWLGRLMERRPTKVAAVALANKIARMAWAIMVRGERYKEPKLSLAA

SEQ ID NO: 441437 - protein, 423 aa, unidentified
MDTSTLCVGVDVHLKEITLRAVDKLTSDEIIAPFNVANNLPGAQSATSRLADVATRLGYTRIEIGYEATGMLWIPFHRFLGTCQLLAPFDLQQVCFNPKLVADFKNALVLRGPKDDDRDAFDVAARVRVGHWPDSYVPDDFWQGLRRLTRYRFQLSRIISQEKMRFQSFAFLKCSDWKRVKTFSDVFGATSAALLTEFTAAELREMTHDQLANLIAHRGRGRFYDPDATARAVQHALRSSYPIDPQMDEMVTATLATGWEHIRVIKRLMKRLDQHIARCIEPVPNPIITVKGLGPVITAGLLAEIVDISRFPEHKHLAQYFGISWSKRSSGGFVSQNTRMTKVGNPYGRYYFVMGADKLRQFNLEYKAFYRRKYNEVSKYQHKRALVLTARKLVRLVHALLTKNIPYVRPRMIVDPEEADLLQ

SEQ ID NO: 441438 - protein, 374 aa, unidentified
MADHSEAFVAFDTSKLRNAVAIAEGGRTGEIRFFGEINNTDAATSKLIKKLAAQYQRLTFCYEAGPTGYGLYRQIKALGHDCMVVAPSLIPKKPGDRIKTNRRDALNLAKLLRAGDLTAVWVPDPHHEAMRDLVRAREAAVDDLKSKRQQISSLLLRLGLHYPGKKTWTRAHMVWLVSQKLAYREQRIAFEEMLLAVRHAQERVARLEQAITAAVPDWSLAKVVTAVMALRGLDLISATIFLTEIGDLSRFASPRQLMAYLGLVPGEQSTGETVRRTGITKAGNRRARRILVECSWSYRHPPRIGKKKLDKVAAAPQAVQEIAWKAQARLAARYRALTRNGKRHTVVVTAIARELSGFIWAVNRAVAAPLTSGK

SEQ ID NO: 441439 - protein, 453 aa, unidentified
MEKEKKQISLEVVHPNAAGIDIGSRSHWVAVGQNAEDIKEFGVYSEDQMAMSDWLQQKGVTHIAMESTGTYWQNLFATLVGQGFDVILVNGKQTKNVKGKKTDIKDCQWIQKLHTLGLLSASFLPDSDTDIIRTYSRHRLNLINQSASSVKRMQKFLRLMNMRLEVVVKDIVGETGSKIIQAFIAGETDGKKLAENRHHNCRKSEEEIAKALQYNGRKDYLFALKQEWSTYRHLQKQIIETDAQINNLIKNIIDKDDNKKQYIASKKPHKRKNKNSITNTDMNQLSYQYFEGTDLMAIEGFNDGIIMSLISEVGLEGIKKFETAKQFTSWLRLAPNNKISGGKVLSHHLPKGSSRLKIAFRNAANAIGQLKEGWLVDFFRRINFKKGRITAVSALARKLAVIVWNMIVKGQNYNPPAQYLFLDEKRKLGIVKRIRKQITKFELTNEDLGLATA

SEQ ID NO: 441440 - protein, 357 aa, unidentified
MREQKRGLDFSNQDFYLGIDVHKRSWAVTIRSNDIVLKTFSMNPIPKELFDFMKKRYPNGTYNSVYEAGFSGYSMHRELENLGFNNIIVSPSEIPTTGKEKLTKTDEVDSRKLARELEKGTINGIYIPSLLQQEMRSLSRLRHQQVKKQTRIKNQIKSYLDFYGHKLPKNCEMQHWSRKFIEHLRTLEFNYDIGKEQLEIYVEELLIIRNRMLQILILLKKYFRQYELYHFIDLLRTVPGVGFVVATTLYLEIMDIKRFSNNEKFASYIGLVPSTMSSGEKKKVLGLSFQFNRYLRSLLIESAWVAIRKDPALTLAYNNFLIRLSAQEAIVRIAKKLLNRIYYVLKNEKEYIYSVAN

SEQ ID NO: 441441 - protein, 372 aa, unidentified
MNYNTVYVGMDVHKESFTLCAYTIEAGKGSYSQKTSPTYKEVLKYLDFLRSIYGNNANFICGYEAGCLGYTLYHQLTSHGVNCEILAPTTMLEQRSKKRIKTDKRDAEIIAKCLAQHNYSPVHVPTAADEETKEFLRMRDDHKLALKKIKQQILAFCLRHGYHYEGKSNWTTAHLTWLKSLRPEALYREILDEYLLTYTSLSDKLERLDKRIEGLALTDIYGESVKKLCCFIGVKTHTALSVIVETGDFKRFASADKFAAYLGLVPGEDSSGDDRTRLGITKAGNRHLRMLLMEAAQCYGRGQIGYKSKALKVRQADNTPQVIAYADKANERLRRKYYKMVLSKCKKHNVAKTAIARELACFIWGMMTNNIA

SEQ ID NO: 441442 - protein, 411 aa, unidentified
METLFERVAGLDVHKDTVVACVRVAVGREVSEELAEWGTTTKELLGLRDWLEARRVELIGMESTGVYWKPVFYVLEELCDCWLLNARHLRNVPGRKTDMADAAWIAKLVQHGLVRPSFVPPKPIRELRNLTRYRKAQIQERTREGQRLDKILQDAGIKLSSVASDTLGASGRAMLAALIEGSASPEALAELAKGRLRTKIPALREALNGRFNANHALIVGEILAKLDYLDEAVARLSDAIEEQCRPFEAEIDLLDTIPGVDRRCAEAMIAELGVDMSRFGDAHRLASWAGVCPGSHESAGRNKTGKTRKGSKWLQTHLNEAAKSIVRSKGTYLAAQYARLKPRRGHAKATVAVEHSIVVAAFHILDRHEPYHELGADYFVRRHDPERHARRLARQIQALGFDVTIRPADAA

SEQ ID NO: 441443 - protein, 374 aa, unidentified
MIYVGIDIAKLNHFAAAISSEGEILIEPFKFSNDYDGFYLLLSNLAPLDQNSIIIGLESTAHYGDNLVRFLISKDFKVCVLNPLSTSAMRKNNVRKTKTDKVDTFVIAKTLMIQDSPRFITLKDLDYIELKELGRFRQKTVKQRTRLKIQLTSYLDQVFPELQYFFKSGVHQNSVYALLKEAPTPNAIASMHMTHLTHLLQTASHGHFDKDTARELRVLAQKSVGILDSSLSIQITQTIEQIELLDRQLFHTELEMANLVTCLHSVIMTIPGIGSTNGGMILGEIGDIHRFSTPGKLLAFAGLDPSVYQSGNFQVQRTRMSKRGSRILRYALMNAVHNVVKNNATFKAYYDVTPPRQGHRPAKPGDVYHSFSKQ

SEQ ID NO: 441444 - protein, 309 aa, unidentified
MDTTVVGIDVSKERLDVSVQPAGTALGYSRDAAGIELLIGMLASAAPQLIAVEATGGFETVVAASLAAAGLPVVVVDPARVRAFAASLGQRAKTDRIDARVIAQFAAATRPPVRSLPDAATQALADLVTRRRQIVQMIVAEAQREKRASARAKKSIQRLLKSLRAELSEIDGEIDESVRGSAIWRGKEDLLASVPGVGSGTARTMLAELPELGTLNRREIAALAGLAPFTRQSGKWRGKSFIGGGRSSVRTALFMAAMTAMRCNPALRAFHHRLRAAGKPKMVALIAVARKLLTVLNAILRDNRKWQNA

SEQ ID NO: 441445 - protein, 418 aa, unidentified
MGLQVLYARCAGLDVHQKTVVACVLLTAAEGHERKEIRTFATTTTSLVALADWLASQQVSHVAMESTGVLWRPVFNILEGQFEVILVNAQHMRAVPGHKTDVKDSEWLADLLRHGLLKASFIPPKPIRDLRDLVRYRKSLVQERNREINRLQKVLETANIKLSSVASDVMGKSGRAMLTAMLAGESSAEVLAAMAKGRLRSKLELLREALEGRVEDTHRTLLRHLLDHLACLEEQIAQLEGQIEQHLVPYEQQLTTILQIPGIGRTVAASILGEIGVDMACFPSDRHISSWAGVAPGNKQSGGKRLKAGSTKGNTHLRAVLSEAVWAISHTHDNYLSAQYHRLARRIGKKRAIVAVSHSLLIIIYHLLRDEQQYQDLGPHFFEQLDHERVRSSAVRRLEALGYHVMLEERNEQQEVSG

SEQ ID NO: 441446 - protein, 395 aa, unidentified
MDNSDRTRLEQFRQFKREIRGSERYLIVGLDIAKDSHHAFFGTATGQTLWKRWLFDNSQEGFQKLLLQTQALQVQHDLPQVVFGLEPTANYHKPLGEHLIRQGHQLVLVSGVAVKRNRELLDGRWDKHDTKDAANVADLISQGKCLYYEHPDPRIRDLRLLLSLQKRLKRQEQGARVRLRNGLVAQYCPELDSSLSRLVAPGKERDLLLAMQKASPIGCAAHPELAFVAQRMVQELQGTRETLKAVQERIQRLCFQFPEYPYLLSIPGFGPEISSQVLGAIGDPFRFQNGRQVLKMAGLDLSADRSGKTCNAAPPVLSKKGKADLRYALYQAALIASTRNAAFMAYYTQKLKGRAKEPGIQTKIRVKLAAKLLLIAWTLMKRKEPFDPERLAVQI

SEQ ID NO: 441447 - protein, 427 aa, unidentified
MPEKPVAGIDVSKDFSDMCIITPDNKVFQTVHIFHDATSLRRSLAALEAAAQEFREKPVIVMESTAHYHRVIAQFLQSAGYEVMVINPMQSGALKNINIRKVKSDKSDAHRLALLYRLKTLHTTNQPNELLSNIRDYCRQRADIMNSHTAYVNRLTSLLDQAFPGYARVFSRVACKSSLGILKTYPSPAAILAADPEQLAETISKYARRGVTTDYVIKKVAALRRAAENAEEINLKREAYSVLIVTVAELLEGLQRHIETLKKRIIELATEDPSVKFEVSLLQTIPGIGLYSAVLLRAEIGDFSLFQKPKQLVAFFGMDPSTRQSGKFVGTKTKISKRGSPYARAILDICAQSAVHPVKGKEPANPVLANYYAEKVKTKEPKVVKCIIMRKLVNIIFAVLRDKKPFELRTPEEHIELLKHPNISRAA

SEQ ID NO: 441448 - protein, 350 aa, unidentified
MMIIGCDLHTRYQQIAMVDTETGEFVQRRLEHESGEARGFYAGLKGAVRVGIEATGHTHWFEAMLSELGHELWMGDAAKIRAAVVRKQKTDARDAAHLLDLLCTERFPKIWRPGLAERDLRQLLWHRQKLVWMRGAVKNQMHALAMGEGVCRKKKLFTAKGRKELEGLTLGPWASYRRQELLRLFDELQGSVTKLDQAVEQAAQSQPLAVRLMTHPGVGPITSLAFVLIIGPIERFERSKQVVSYVGLNPQEHSSGGRQRLGSISKQGNPMMRSLLVEAGHTAARLDPQLQRMYQRLKFRRGAAVAKVAIARKLAVRMYWMLRSTADYAQLVRMRGSSWPTLVEDNPSLG

SEQ ID NO: 441449 - protein, 344 aa, unidentified
MQINSVGIDLGKTTFHLVALGEAGKVLVRKKFNQRQLLTYTANMPTSLIGLEACSGAHFLGRALRKQGHEVRLIAAQFVKPFVKSNKNDFVDAEAIAEAVERKNMRFVPIKTDDQLDLQAIHRVRDRLISRRTAVINQLRAFLLERGLTFARTPAKLRNALPDILENPAVDLTTQMRNLIDLLWAEWKAVEYQIEGLSRELERISAGDAGCTRLRRIPGIGPIVATAIVAAIGNGAAFRKGRDFAAWLGVVPRQYSTGGKTRLLGISKRGNVYLRKILIHGARAAVLRMKRDRAPIGAWLDALDARAPKNKVVVAMANKLARIAWAVLSSGEDYKPASNLVKAS

SEQ ID NO: 441450 - protein, 358 aa, unidentified
MRIIGVDLHTRQQAVAMLDTETGELIEKTLKHDGNEVQKFYSALPGQVLVGIEATGSMHWFLEMLEGLGIECKVGHPAKIRAAEPRKQKHDRRDATLLLKLQVENRFPSIWMPSTELRDLRTLLMHRHQWVRMRTRVQNTLQAIALGHGLRRGKTLWSQLGQHTMESLPLPPHAAHRRTELLALYGRLQAQIDELDERVMTHAQQRPGARLLMTHPGVGPVTALATDVFLGDPARFEDGKAVVSYVGMIPSEYSSGGQQRLGGLSKQGNPFLRFLWCEAALHAARRDPDLQRFYRRKLAQKGLGKARVAAARKLGIRLWIMLRDQIDYQEFCRRGQMRQKNGDACAGMPEVGHSPAIQ

SEQ ID NO: 441451 - protein, 456 aa, unidentified
MEKKGFLGIDVSKGYADFILLGGSGQVLEENFQLLDSKEGRQKLKELISGWRLAGMEELYCGLESTGGYENNWYHWLKESFKSSGVYVCRINPRGVKANSDASLKRTITDAVSAENIAFYMIRFPQKLDYGISDATVNEGFKEGRMHLTCIKMQQKQKVQLSNQLEKLLYQYYAELLVYCRHGIPVWLLLLLAKYPTATAVVKAGVKRISAIKGIGEMKAYSVISKSKDNVRNVSPQISHVIAITAKEILHKEALIKEEKQYLKDLYKSAEEVVLLSSIPGIGLDSAVAIALEIEDVTRFDTAKKMASFFGVHPTFKQSGDSTWGNHMSKAGRGEIRAVLYMVALSGMRYNPVLKQTYAKARAKGMKHGQAAGVVMHKVLRMIYGVLKSKVAFNAAIDEKNQQKATEKQHEKEAEDKKGKKTKQQKKHRFQDISTNAPISGRAEQRIKKQVASQTS

SEQ ID NO: 441452 - protein, 352 aa, unidentified
MKIIGCDFHPSYQQIAMMDTETGELWEGRLEHEHGEARRFYQALQGQTVRVGMEAVGNSHWFEQLLAELGHELWIGDAAQIRRLVVRQQKTDRRDAKHILDLLLDGRFPRLWVPSPQMRDVRQLLRHRQKLVEIRTQVKNQLQHLALNQGVRRKSRLWSVQGRAVLEQLPLPPWTARRRGDLLAMLDRLQEQVGELDRAVRAEAEQRPEVRLLMTHPGVGPVVGLAYVLTIGPITRFPRGKQVVSYLGLIPSEHTSGGHQKFGPISKQGNTMMRTLLVEAAQTAARLDEQLRRQYGRLKARKHSALAKVMVARKLAVRMYWMLRENKPYAQLYAQRPVARMQGSPSHSVVAS

SEQ ID NO: 441453 - protein, 415 aa, unidentified
MASQEVFARVVGLFQIMRLLQWDEKAGLHGMRYSPNDRRARGARERRPAVKKISTVATNRNEIFKEPKLTIGLDLGDRSSYYCILDGAGEVILEHGLPTNPKGIHQVFSRIPRSRIALETGTHSPWVSRQLTQLGHEVIVAHARNVRLIGESSRKDDQLDARTLARLARIDPELLGPVRHRSAKAQIHLTVIRARAALVSSRTALVNAARGLTKSYGERLRKCGTGQMNREIANGLSQELRGALEPLLAEIESLNERIAEYDLRIEQIAKEVYPEVALLKQVKGVGTLIALTYVLTLDDPHRFRRSRDAGCFLGLRPGRRNSGMSEPQLHISKEGDRYLRTLMVQGAHYMLGPFGQDSDLRRWGLKLAERGGKNAKKRAVVAVARKLAVLLHKLWVSGEVYEPLRNNHKVVSAVA

SEQ ID NO: 441454 - protein, 350 aa, unidentified
MTYYLGVDLHKKTQTWVLLNEEDDMPVFSREYSVSPSEVARACKDVSKFGNIIAAIEPVCGWQWQVVQMRGAGITVQVSNPRKTAAIAKSLQKTDKNDALTLALLVRTGLLYTSIEVSPETRKLRALVRERSFLVQLRASIQCRLEGVVTREGRHLLEGATSSKKGASVILASPNHEWKRAVYIKSDITKYIDEIEIELRQEIRTPLLKLLTTIPGVGVITALTWIAEIGDFSLFKTPEKLCAFAGLVPTERSSGGVQKLGHITKAGSTHLRYMAVEAAMHIRNEPKTEKLYEFYEKNKKGAMCARVALARKMLSIAWYMVKKNEPYTSQPSRVLSSVHLPSRGDLVHTL

SEQ ID NO: 441455 - protein, 334 aa, unidentified
MITTDIEIFLGLDVGKTDHWACAVTKDGAKIWNKTLPNDEAKLTKVYQELSAKGTVLVVVDQPATIGALAVAVAQNLYIPADYLPGLSMRRIADMYPGTAKTDEKDAFIIADAARTMPHTLRSIQVSDEEEATPGMLTGFDLDLARQITQTSSRICGLFTQVHTSLERVLGPWLEYDAVLEVLAAWPTPAQLEHAGKARIDAKLKKYGSRRHTAWAGTIIDALEEQSVIVVGTDAVGLVIPHPARQLISLHAQRVDVAEHLEAMMEAHTLYPVLTSMPGVAVRTAAIVIAETSGKTFTSTAAMSSYAGLTPTTRQLRTSIKSERVSHSGNKRLK

SEQ ID NO: 441456 - protein, 335 aa, unidentified
MQSMYYIGLDVHKKTISYCVKDGSGRIHAEGTIPATRLTLDMWMKTLPQPWTAAMEATIFTSWIYDHLLPHAAAVKVAHPLMLRAIAAAKKKNDRIDANKIADCLRCDFLPECYMASTEIRERRRTLRYRNLLVRQAVQMKNKIAVLLMETGVGYNKQKLHKVGYFRELLASNQDIDEGLKPLLRLCRETVVRLGKTESALVRSLQRDSLLVERVERLMTIPAVGPITALTWALEVGDVQRFSSIKKAISYCGLCGAERSSANITMRTPLSKQRNKHLQTVLIEAAKMAPRNSPELAMVYQQEKQKGNANRATLAVARKMVAYLVAVDRRQKGFW

SEQ ID NO: 441457 - protein, 416 aa, unidentified
MTEQIHVSAGLDLHKKFIIATLLTDTGFKEQRRFERTESGLFNLKEWTIEHKCEVVACESTSDFWVPIYTMMEGHATVIVGNARDIKMFSHKKTDKVDSEHIAQLALKGMIRPSRIFDRNHREFRSLARLRHKLVQKKTDIKNEIHHILDSELFRLSSVLSDLFGKSGLRILQGITNGSPMDEIIKKLPLNIRKKTVQLNEILQTTISLEAILRLKHCLNILKCLDDEISNLTDCVFQYANEWFKLEMKVLKSVPGIGNIAAVTLLAEIGNFSDFPSGDKLASWLGLVPNVYQSADKMRTGSITKRGSDHARWILVQIAHAASRKRNTVFHKFYDRKKPMIGAGKTIVALARKIVTIVWHLITHSEFFNDENCDGIPSSKTVKIRIPVIVTLDEILKILNRAAVVLKDPNPDLRGC

SEQ ID NO: 441458 - protein, 398 aa, unidentified
MTESSDYESVQVFIGVDVGKDTHHAVAINRSGKRLFDKALPNDENKLRSLISDLKQHGQILLVVDQPATIGALPVAVARSEGVLVGYLPGLAMRRIADLHAGEAKTDARDAAIIAEAARTLPHALRTLKLADEQIAELSMLCGFDDDLAAQTTQASNRIRGLLTQIHPALERVLGPRLEHPAVLDLLQRYPSPEKLASLGEKKLAAQLCKLAPHLGKRLAADIAQALAEQTVVVPGTNAAAVVLPRLALQLITLRKQRDEVALEVEQRVLAHPLYPVLTSMPGVGVRTAARLLTEVACRAFASAAHLAAYAGLAPVTRRSGSSIRGEHPSRRGNKALKRALFLSAFAALRDPLSRAYYTRKMSQGKRHNQALIALARRRCDVLFAMMRDGTFYTPQGS

SEQ ID NO: 441459 - protein, 447 aa, unidentified
MADRVRPQTLEIAHPNAAGIDIGSGSHFVAVRPDADDTPVREFLSFTEDLEALAQWLTKCGVDVVAMESTGVYWIPLYELLESRGFVVHLVNARHVKNVSGRKSDVLDCQWLQQLMSYGLLSGAFRPQEEICVLRAVSRQRDMLVQYQAKHIQHMQKALTQMNVQLDNVISDIVGETGQKIVRAILNGERDALGLAKLRHGRIRASEADIVKSLQGNWRAEHLFALKQAVNLYDSYQTSIAECDSQLAEVLGRLAIHDDSPEPPKSGRGRRPLKVEKFDLRKALYRACGVDLTRIDGIDVGTALKMIAEVGPDLSRFKTVKHFASWLGLCPGTKISGGKVLSGASKRTANRLAQALRMSAVAAGRSHSALGAYHRRLSARLGKAKAVRATAHKLARLIYTLMTKGEQYVDKGQNYFEEQHQQRVMKNLKKKALAMGFSLIPLDAAAA

SEQ ID NO: 441460 - protein, 347 aa, unidentified
MKQSNTISIDLAKSVFQVVILNHNGKVLSNKKIQRAQLIPYITKQPASLIVMESCGGSNHWGRSFQALGHTPKLIAAQHVKPFVKTNKNDANDAVAIAEASRRPNMKFVAIKNLEQQDIQSIHRTRQRLIDSRTNLVNHARGLLAEYGLVYGIGVSRFRKALAHLTNTTEYTGEMTAYLKELCCEWYKELLIVDKAIEKQDKKIKAISMSSDQAKRLMQIEGIGPVTATALVATLGTQAKEFNNGREMAAYLGLTPKQHSSGGKARLTGISKRGDSYLRTLLINGATSVINVVGKKNDPKSQWVNNLLCRMHQNKAKAALANKMVRIAWVILARGETYKPELASAMV

SEQ ID NO: 441461 - protein, 416 aa, unidentified
MNAAGIDVSIRKSTVAVLRPFGEVVRLPFDVAHNTEGLASLAEQLKALDGETRVVLEHTGRYYEPVAKALHEAGLYVSAVNPLLIKEYGANSLRRVKTDKADAVKIARYALDNWADLRDYTPMDTIRYDLKTLNRQFQLASKQRTASANNLIALLEQSFPGIRKCFDSPVRSDGTQKWVDFVHTFWHVECVRKQSLNAFSERYRKWCKRHGYIFKQGNAVEVYSLAKNAVVLVPKSEVTKVLVQEAANQLTSISRSVETYRAEMERLASTLPEYPVVMAMYGVGKSFGPQLMAEIGDVRRFERKQSLVAFAGIDPMPNQSGDKNVRSNKSSKRGSPYLRKTLFNIMGIYLKCSPQDEPVYQFLDHKRSEGKPFYVYMTAASNKFLRRYYAQVRDYLSTLDDLPPVDMDSTGLKTSD

SEQ ID NO: 441462 - protein, 315 aa, unidentified
MTEKIYKFHVGIDVSKNKLDVVTSHGKLAQVTNDELGLKDLIKQLPRKKCTLVVLEASGGYEQLATNYLRHRKFDVAIVNAKRVRDFAKASGKLAKTDYIDAGVIMAFGKAFNPIPQSPVTTTEKSRLNYLNRRTQLVKMIATEKQHLEHSPKELYRPIQKHLEFLGKELAKIEDSLREQVKKDSELQSKVERLDEIQGVGEVTAMNILLYMPELGQLTSKEASALAGVAPYNRDSGQMKGKREIWGGRAPVRSALYMSILTAIKFNPVIKKFYDRLVQKGKLKKVAMVACMRKLIIIMNAMIRDNSTWAGVEGC

SEQ ID NO: 441463 - protein, 406 aa, unidentified
MKLFVGLDVSSFDIKVCFLNGEGDELNSFTVANDLPGATQLRDEIIKIAQNQSISELRIGLESTNVYSFHPSMFLHNDESIRSLNGQVLVMNPKQIANFKKSYSDMDKTDEIDAFVIAYYLRFGRLPMSVVKGEQYVALQQLTRARYQIVRQITQEKQRFLQYLSYKCNTFTEEVESSVFGKAMMDLFLENYSLEELSVMPLEDLADYLRTKGRNRFPDPEYVAKSIQKAVRSSYRLDKVVEDSIDTILGTSITLIRTFEKQIKELDKSIERIMKGVPQTLQTIPGIGPVFAAGIIAEIGQIERFLDETKIAKYAGLYWRKYQSGRFTADDTSLSRNGNQYLRYYLVEAANSVRRQVPEYSDYYAKKYREVPKHQHKRALVLTARKLVRLVDALLRKNQIYTPKGA

SEQ ID NO: 441464 - protein, 414 aa, unidentified
MNTIYPCVAGLDVHQKTIAACIRQNKPQGKMFEETRSFGTMTRDLLELSDWLQAAGVTHVAMESTGVLWKPVFNILEGNFELLLVNPRDVKQVPGRKTDITDSQWIAQLLACGLLTGSFVPPQGQRQLRELTRHRAQLASESTRVANRIHKTLEDANIKLGAVASDVLGVSGRAILQALIEGEQNPETMVKLAKGRLRAKIPQLKLALQGCVTEHHRFMLQMLLGHLQHLEQQIAEFDLRIEEQLRPFLTSEQYQNLDAVPGMNRRTIENVIAEIGSDMSHFPSEHHLASWAGICPGNEESAGKRKRTRITQGNRWLRRALAEAAWAAAHTHDTYLAAQFHRLAGRRGSKRALVAVAHSLLIIVYYMLKHDTCYADLGPHYFDHLNGRGLERYLVKRLEGLGYDVTLHPQTPAA

SEQ ID NO: 441465 - protein, 415 aa, unidentified
MKVHRNCCGLDVHKQTIAACLIREDGMGNTCKEKRLFGTMTRDLRELAQWLRGAEVSAVAMEATGVYWVPVWNVLEREGLHLLLINPEHYKAVRGKKTDLKDGERIAELLQDGRLEGSFVPSTPLRILRDLTRYRVKLVEHQSAVACRIQKLLEQCNIKLASLASNVLGVSGTAMLQALARGETNPERLAELAKKQLRKKIPALRLALDGHLLPHHRFLLRDMLDELAHIEGQLARLEAEIERNMPPFQKTLQAWMSIPGIKQRVAWTLVAEIGPDMQVFPSPAHIASWVGVCPGNNESAGKRKSGKTRKGNCWARRALCEAAWVAAKAKKTYLAAQFRRLAATRGSKRAIIAVAHTILTIGYHILQRGTLYQELGANYFDQRHVLRTTKRLVKRLQALGHRVILESPLPNTRIA

SEQ ID NO: 441466 - protein, 340 aa, unidentified
MFYVGLDIHANHISVCALNEKGQIAHRSQVRSIEEMMRILKGLPDRFEVCYEASCGYGHFHDLLRPLAARVLVAHPGQLRLIFRSKNKNDRNDAERMAKLLYLGETPTVHVPSLEVRSWRELINCRSQVIAKRTRAKNTVRALLRSAGIVPPKQPGLWSKKGLAWLRQLPLPTASQQLRRDLLLEEIEMLIRQVRRIERQLNHQAQQTVAVAQLRSIPGVGIRTAEAVAAFVDDPHRFRNAKAVGRYFGLVPCQDQSGDRNRLGHITREGAPVVRQLVAEAAWQAQRRSPSVRAYFERSQRGDPQRKKIALVATAHYLVRVMWAMLKRGTFWKEKMALAS

SEQ ID NO: 441467 - protein, 422 aa, unidentified
MLAETQDSEEIIPRVAALDIGKAELVCCARVPDEDRPGRRLQEVQTYSTMTRSLLGMADRLRCLGVTRVVMEATSDYWKCAFYLLEAAGFEAWLVNAKDVKHLPGRPKTDKLDAVWLCKVAERQMIRPSFVPPPEFRRLRDVTRYRADLVAVRTAEKQRAEKLLEDAQIKLSVVASDIFGVSGRQMLAAMIAGERDPKVLAQMARAAMRGKITALREAFTGFFTDHHAFLLQRMLARVDAIDADIAALDARIEEMTAPFTAAAGRLDEIPGINVTIASVILAEIGTDMGRFPTAGHLVSWAKFAPGVKESAGKKKGTNATGHGNSYLARVLGNAAVAAGRSDTFLGERYRRIARRRGRKKAVVAIGRSLLVIIWHLLADPDARYTDLGSDFYATRISPERRKRGHIRQLEALGYKVTLEPAA

SEQ ID NO: 441468 - protein, 351 aa, unidentified
MENPTTIAVDLSKNVFEIAVEREGRICERKRLNRRQMIEFFSQCEGATVLMETCGSSHYWGRVLQAMGHTVKLLPAQHVKPYRIGQKTDRRDAEAILSARHRESIVPVPVKTVEQQTICALHRVRAALMKTRTARLNTVRGLLREFGVTIAEGAERVLPAVREALSESPSPVPEPLHAALFSMMAEAGELDERSGQVEKQLKALSRTVPLVERLKEIPGIGLLNATAFSAQVGNFPRFKSGRKFASSLGLTPKESSSGKRRWLGSISKAGDPYLRTLLIGGARSMILAAHRTKRPHRLQAWALEVEKRRGRNRAAVAVANKLARIIWAISTRGVPFKPQFDIQNTPTSVPA

SEQ ID NO: 441469 - protein, 356 aa, unidentified
MISTSHHKLSRIIIGVDTHKDEHVAVAVDGLGVRLGQRNLPTTTTGYVGLEHWANSLGEIDAFGVEGTGSYGAGLSRFLRGQGYMVIEVNRPDRSTRRRLGKNDPTDAEMAARAVLAGVAHDRPKSGVGEVEMIRMLKGIKDSAMKARTQAVNQMKALVVTAPVELRAGLRHMNISQLVARCARWHNGCLETPTAAARYALRSLARRHAQLTQEIKTIDAELTRLTATFAPELMESVGIGPDTAAALLVTAGNNPERLKSEAAFAALCGVSPIAASSGKTNRHRLNRGGDRQANAAIHRVVIVRLRYDGRTRAYLQRRMEEGKTKTEVIRCLKRYVAREVFGILNDIGKLRAVQNA

SEQ ID NO: 441470 - protein, 334 aa, unidentified
MEHYIGIDAHCEYCDIAVVNKAGRLVSHRSVVTTGENLIEAVCSVKDTRIVVIEESTLAGWLQRTLEPYADHLAIVDPRRNALISRSEDKSDRNDACRLAMLYRGGYSHVIHHTLDAGFLELKEMVLHYHDAVNQVSRFKNKLKAVYRKHGLLRMSEAVYDPVGAAECIRRLPFPSSRHRAQATLSMITQAEETKLKARATIRRMSARFPAIEMFTAIPGVGLIVAATVVAIVETPHRFPNKEKLWKYASLAVAKPESGGKVQGRYASREGNKVLKKVLMLAAHNAAKGDHRFGRAFRRHGEKSCSNAQRTVARMILSTMYGMWKTGECYREMP

SEQ ID NO: 441471 - protein, 417 aa, unidentified
MFKIHRQNCCGLDVHKTWIYGCIGITDANGRTEYIEARFSSFPKGLKELDDWLTLYSCDEVCMESAGKYWIPVFNVLETNHTVTLAHPKYTKPQKGNKTDRKDAKWICDLFMCDMIKPSFIPPPAIRHLRDLIRYLRKLTNMETGEKNRAQNCLTVSNLKLDDVFSDVFGKSAMSITRYMLEHPGEKFDVTPFIDRRCKTPIEQIQAAVDGAISTEQAVKLRQCLDHIDELEQHKEKIIQAILRIVEPFSDVLALIRTVPGFDKNPMTAITVLSEIGADMSVFQTDKHLCSWAGCCPRNDQSGGKVKCTRISRAGTYLKPLLVQVASALIRSTKHVEFSERYRRLKARRGHKKAVIAICRMLLTAIWNILSKHVPYTAEGFLQHRPVKAKKVLTVAEGLYLLRSRGYEIRGITAGAT

SEQ ID NO: 441472 - protein, 353 aa, unidentified
MGNGTFVGLDVHARSVVAGLIDEATGELRVVRAPHRTEELVGWLGALAAPARIAYEAGPTGFGLARACAAAGIECLVAAPSLIRRSVAERGRKRDASDAQQLARLLRAGELTPVRVPDPTDEAARDLVRAREDARARTPGRGGAGALRGDGGRAWTGVHDAWLRRQRLDQAGARAAFEDYYGAVLAAGLRRDGLDEQIAELAADPRFAPLVGRLSCLRGVGTLTAFALAVEVGDWHRLSGATIGAYLGLVPTESQSGARHRRGPITKAGNSHARRLLVEAAWHHRRPPRPSAEIERRRAGQRPEVAGRAERAGRRLHHRWAHLERRRGLRATVVATAVARELAGWCWSLAVME

SEQ ID NO: 441473 - protein, 347 aa, unidentified
MRFYNQQHKNYCGIDLHARKMYVCIIDQKGKMKVHQNIKTDPELLFEIIFPFLDDIVIGVECVFCWYWVSDLCAEHKIPFVLGHALYMKAIHGGKTKNDKIDSYKIAALLRGGNFPIAYTYPAEMRATRDLLRRRMYIARRCGELVAHIQNTNTQYNLPEFGKKISRKYNRQGVAERFDDPAVKKSVEVDLAMIDSLNEILKKLEWHIEKTARQHDYKTLYLLRSIPGVGQILALVILYEIHDIKRFPRVQDFSSYARLIKPVKESNGKWAGKSNKKIGNHHLKWAIKEAAILMLRSSDQAKEFVAKIEKKSNKGKALGIFTHKLGRAMYFMLKNSEAFSMECFFNK

SEQ ID NO: 441474 - protein, 387 aa, unidentified
MKKISSNVSCAGMDVHYKFSNVTFRDACGKVVSRQRLYHPDRKQLVERLSHWPRGIPVVMEASFGWGWLSDLLEEAGMEVHLSNCFKVEKMRKARGWVKTNKKDADLVSLLPFELSDWWEVWRAPPDVRNRREQMRFRSDLVRDQTGAKSRIHAVFHRHGVFHEFSDLFGVKGRMFLVELCLHNPVNLSPEALLALCGQLKLLDHLRRQLADVARILHKQMLKTPLTIRLKTIPGIALILAHVLAAEIGRIERFRNHKALASYCLLAPCADDTGEETPGQAPLGRHLGIRGNHTLKWAFIEAAHGAVRSGGKWRDIFDRATNGGKKNRGRGYIKVARELVKVVYVVWTREVDYQATPPVRPGCKRNKKKSRSETGQLSHPMVHALKA

SEQ ID NO: 441475 - protein, 361 aa, unidentified
MFDIVGELDRAVVCFEPEPSPERSSVTSSNSLGRDLTMKLQKSNFDRYIGVDVAKATLEIDDSLQAIAKSIDNDADAIVQLIVGSIESPESTLVVCEGTGGYERKLACAMHAAGVPIVIANPRQVRDFASGNGILEKSDPIDAAVLRVFGEDARNLTLATPKSDDHEQLGAMARRRKQLLDMINQESNRLEQTVDPVILELIKENLQTLKKQLKTVDQHLAKMIDRQAKTNPTVRVLQSVPGVGTVTISTLISELPELGKLSRGEIAKLVGVAPLVNQSGRKDGHRSIFGGRGYVRRVLYMATLVATRHNETIKRFYTRLVAKGKPKMVALVASMRKLLTILNDMVRNRECWRTVNPSEPK

SEQ ID NO: 441476 - protein, 351 aa, unidentified
MLIIGVDYQPSFQEIAFLDQDTGECGERRLNHGDGEAEKFYRDLQQKGVRVRVGMEATGYSRWFERLLSELSVEVWIGDAAKIKTKRVRKQKTDRQDAQLLLKLLLENNFPRVWAPSPENRDLRQLLWHRHRLVQMRTRIMNQLQALAMNEGTRWKKRLWSEQGRSQLEKIRLAPWASRRRQDLLGLLDRMNPTIAELTAAVEQEAKKRPEVLRLMTHPGVGPITALAFVIIIMTPDRFPCGKQIGSYVGLIPCEDSSAGRQRLGHISKQGNALLRFLLVEAGQAAVRYDPDWRRRYLHLTMRRERRIAKVAMARKVAVRLYWMWRNGWEYSQSVEFGSHAGQLATGHGVK

SEQ ID NO: 441477 - protein, 410 aa, unidentified
MEVIILCCAGLDVHKNGVEACMRRMNRDGKLHQETRHWGTMTRELMAMADWLSEVGVTHVAMESTGVFWKPIFNILENRFQVLLVNARSLKHVPGRKTDQKDSQWIAQLLQHGLLKGSFIPPREQRELRDLTRHRSQVIGEHSRITNRIQKVLEDANIKLSSVATDITGASGRQMLQAIIAGEDNPEKLADLAKHSLRSKIPQLQQALYGKITDHHRWLLRLLYDQLTSAEAFLSKLDERIEQLTRPQQPLVEKLDRIPGIDRRVAEVVLAEVGPDMTPFPDAPHLTSWAGICPGNNESAGKRKSGKTTKGSRWLRQALVQAAWAASHKKDSYFRTHAHNLIRRRGKKRGLVAVAHSLLIVIYHMLKEGTDYVDLGAKFLDQIRSEHLVRFHLHRLEELGLKVTAIPMAA

SEQ ID NO: 441478 - protein, 462 aa, unidentified
MKHTREKKHQEKHPERESLPLITPNAAGIDIGSSEHWVAVPEDRDENPVRSFGCFTADLHAMARWLKKCGVTTVAMESTGVYWIPVYQILEAYGFEVKLVNARHVKNVPGRKSDVSDCQWLQRLHTYGLLSASFRPENEICVLRSYWRHRDNLVRYASSHILHMQKALTEMNLQLHRVIADITGVTGMRIIRAIIAGERNREKLALMRTPGVKSTSEEIAKALEGDYREEHLFVLKQAVELYDFYHDQIDACDKEIEICLSRFDTKVDLESHPLPALKKGKKKSKNGPLADLRAHLYRMTGVDFTQIDGLDVLTVQTIVSETGLSPDAFPTMKHFTSWLALCPDNRITGGKVKSTRTKKAANRAAMAFRIAAQSLANSNTALGGFYRRIRARLGAPKAIIATAHKLARIFYTLWKTHKQYVDLGARHYEERYKDRIVRSMKKRLHDLGYAVTIEPMVATAES

SEQ ID NO: 441479 - protein, 351 aa, unidentified
MIVIGSDPHKRSYTCSAVVAGTGELRGSEAVQATSAGHERMLGWARALDGERVWAIEDCRHVSGKLERFLLARGERVVRVPPRLMAGRRRGSRQRGKSDPIDSLAVARAALEEGIDTLPVAVLEGPAREIKLLLDHRDDLVGERTRIQNRLRWLLHDRWNELELPSGCLDRLVWLERLAGRLARAPQDADVRVMRAQVRRLKELVREANTIERELLLLVRGQQPRLLELPGVGPLTAAKLIAEIAGIERFRSQAKLARLAGTAPIPASSGNSARVRLDRGGNRQLNAAMHRIAVTQLRVHPPAQNYIARRLSEGKTKREALRCLKRHLVRTIYNTMTPTPGETPAPALALT

SEQ ID NO: 441480 - protein, 411 aa, unidentified
MNVVHRCCCGVDVHKETVTACVLWAEEGGPSRREKRKFSTFTRDLLELSDWLRECGVTHVVMESTGVYWKPVWHVLQGQFELLLANAQHVKAIPGHKTDSRDAAWLAELLQHGLLRSSFVPPEPIQGLRDLTRYRVNLAQECNRVANRIQKVLEDANVKLASVATDPLGASGRAMLQAIIAGEQDVEKLAEMARGLLRRKIPQLQLALQGRVSEHHRFLLKELLEHLEFIESKMVRLEQEIAERLGPFEDAVRRLCTVPGIDRVSAWGIISEIGLDMSQFPDAQHLASWAGLCPGNWESAGKRKSGRIRKASPWLRRHLCQCAWAVSTKKNNYLSALFRRLARKGAKVASIAVAHALLVIAYHILKAPVEYRDLGADYFDKLHPGRLKKKLVKRLEGLGFQVTLEARPLPA

SEQ ID NO: 441481 - protein, 352 aa, unidentified
MHITTAAADLAKDLITVCAQDASGRTVERRDLRRDGFLAWLRKLPAGCIVGMEACSAAHHWAREMAAMGLAPRIMAAEFVQPFRKSRAGKNDRNDAEAIAIAVREANMRFVAVKSVEQQARLARHRMREGWKEERTALGNRIRGLLIEFGIAIPKSQAALGRELAAAAHDERLPEAMRELVRAAREHLEVLNQRIAQCDRAIGLACRNDPAAQRLQDLCGVGPTSADAAVATVGDARAFRNGRQFAAWLGITPRQFSSGGVTRLGAITRRGDAYLRTLLVQGARTTLKCALRCEPERANRLQQWILQLHARVGYQKALIAIANKHARVIWALLAREEAYDPEAWKRYSACHQ

SEQ ID NO: 441482 - protein, 349 aa, unidentified
MPEIATIGLDIAKNVFQLHGVDRSGKIVLRKALRRSQVPGFFSALPPCLIGMEACATAHHWARTLMAFGHAVRLIPPAYVKPYLRRQKNDAADAAAICEAVTRPSMRFVPVKSPQQQSTLMLHRARDLLSGQRTALINALRGHFAELGIVVAQGARNTRQLIAYLQDETNPDLPDTARIALQPLAAMLMEIEAQIAKLDKAILAAHRSDPVSTRLAGIPGIGPIVASCLSSSIPDASLFQGSREFAAYLGLVPRQHSTGGKPRLGSISKMGNRHLRKLLVVGAHAALYSMKSGKTKTVLADWARSLLAKKPFKVVAVALANKMARIAWAVMARSTAYEPGSHGTAVSAA

SEQ ID NO: 441483 - protein, 441 aa, unidentified
MAMRTQDQEIVFPNAAGIDVGGSSHWVAVPRRSTDEPVREFGPMTDDLNAMADWLLACGVDTVALESTGVYWIPVYEVLEQRGLTVWLVDARQMKYVPGRKSDVQDCQWLQKLMSLGLLRAAWRPKGEVCTVRAVARQRDVLVAEQASWVQRMQKALVEMNLQLTEVLTDVMGVTGQAIIRAIVAGERDPKALARHRNGRVKASAAEITKALTGNWRDEHLFVLGQALAMYDDIGRHLAECDAKLQALLTELGQSEVDLGKAPRTGSKLRQEFDARQTLANWAGVDLTRINGLGLAAVMKILSEIGPDLSRFETVKHFCSWLGLSPGTKISGGKVLSAKTKRSANPVRQALKMAAMSLWHSDSALGAFYRRLCSRMDKPRANTAVAHKLARMVYFMLTRGEAFVDKGQQHYEEQQRQRSVAALKRRAAALGFAISPTVAPA

SEQ ID NO: 441484 - protein, 391 aa, unidentified
MAQSHMRREPVMRKPTRFVGLDVHADSIAVAVAEEGRAGEVRSLGIIPNRRESVRQLVKRLDGPKGLRLCYEAGPTGFALYWHLVELGVECQVVAPTLVPVKAGDRVKTDRRDATKLARSYRAGELTPVFVPDKTHEALRDLVRCREAAKKDQLRARHRLTKFLLRAGRHRPATMTAWTGKHMSWVAQQRFDEPAQQITFNDYRAEIEHVANRIDRLEQAIEEAAEKMPPAMRAVVEALQALRGVAALTAVTIVAEAGPLSRFQRPKQLMGYSGAVPSEHSSGASVRRGRITKTGNSHLRRVVIEAAWAYRHPPRVSADLRRRQHGLDPAVVEVAWKAQHRLHRRYLRLQAKGKPRQHIITAVGRELLGFVWAIAVEAERRHASEPKRLAA

SEQ ID NO: 441485 - protein, 351 aa, unidentified
MSLKVNSAIAVIGIDIGKNSFHVVGHDKRGAIMLRQKWSRGQVETRLANLPPCQIGMEACVEAHHLSRKLQILGHDARLMPAKYVRPYSKGQKNDFRDAEAIAEAVQRPTMKFVATKTAEQLDLQALHRVRERLVSQRTGVINQIRAFLLERGVAVRQGLRFLRAELPRILTAPCDAPSPRMLRVIEDLAGDWRRLDERIKGLSSEIEVLARQDKSCERLMTVPGIGPIIASAMVAAIGTGDAFSKGRDFGAWLGLVPKQISTGDRTILGSISKRGNRYLRTLFVQAAWVVLVRVGPKHWERYGLKSWIEAAKKRLHHNVLAIALANKLARIAWSVLAHGRTFEASNIQAA

SEQ ID NO: 441486 - protein, 418 aa, unidentified
MKKDSKFSQQSEPTLKRTKAHGPVQRDAKEVLAEVLGKLTGKLDGRAVSTSAKENRRGNTVGPNRDRLTVGVDLGDRWSQYCILGLEGETLAEGQLRTTQEDVGEFFQALTPARVVIEVGTHSPWVQDVITELGHEVLVANPRLMEGSKRRKRKSDRIDANKLARLGRVDPQSLYPIRHRSREVRQDLVVLRARDALVSVRTELINTTRGLVKSMGTRLPRCSSPSFAEKVKDAIPVEAGEALLPLVQLVETVNDCIEKYDQRIEELGRKKYGHTTLLRQVKGVGPITSLAYVLTLEDAQRFSSSREVGPYLGLVPKQEDSGDSQPQLGISKTGDRMLRRLLVGSSQYMLGAFGPDTDLRRYGLRLCERGGKNAKKRAVVAVARKLAVLLHHLWVTGDVYEPLRHTEAEIRTAQARAA

SEQ ID NO: 441487 - protein, 347 aa, unidentified
MKEQNNRSEFTIGLDLGERRHRFCALNGKGEVVEEGTLGNDRVSLGRLSARYRGALAVMEAGAHSPWISRYLERLGWEVIVSNPRKVRAIYQHERKSDRRDALMLARIGRMDRALLYPVRHGSEEAQQDLLRIKLRDSLVRARVALINSVRFSLKSLGYAVSNPSSERFHKVAMETLPEVVREMIAPSVQALAELSGRIAVLEREISVLARTKYPQTLWLQQVPGVGAITALYFVLKIEDPKRFKHVRDVGAYTGLCPRRDQSGESDPQLRISKRGDAYLRRLLVSAAQYILGPFGPQSALREYGLRLAADGTTRAKKRVVVAVARKLCVLLLSLWKNQTPYQPYPA

SEQ ID NO: 441488 - protein, 414 aa, unidentified
MEDILECCCGLDIHKESIVACLLKGPLGAELKPRSEVREFGTQLKDLVALRKWLEKHECHYVAMESTGIYWQPVYAVLETALSDEMHLLVVNARHMKNVPGKKTDMRDAEWIATLLRAGLLKGSFVPERDIRDLRQFTRYRKALIRDITSQKNRIEKLLQSNGFRLSSFLSDIFGSSGLAIMHQLVQVGSISSQSLDRCLKARARQKSGEILSSLNGTLSVPQRTLLKMQLAHLAALQANLREVEAEIHDGFSQFQGPIELLDSIPGIDLTAAYAILAEIGKEMSAFPTAQHICSWAGLAPGSHKSANKQKRQRVTQGNNYLKTMLCEVAWVIASHKKLYLSGWYWRLKQHTDAKRAVVALARKLLVIIYTLLKTNQPYNEQKFMERKNASEQKRVKRMMNELTKLGYAVSLAA

SEQ ID NO: 441489 - protein, 310 aa, unidentified
MGTEVFVGVDVSKDSLDVAIGAAKDIVTFTNDQKGADALVKKLSRINPALTVFESTGGYELLATSCLAEAGLAVVIVNPRQVRDFAKSAGILAKTDAIDARVIARFAEAVKPDVRPLKDQQTSELTALVTRRRQIIEMIVAERNRLRLANKRNKKDIEDHIRWLQKRLDKIETDIGKMIQSSPIWRCKDDILRSVPGIGPVTSASLICDLPELGALSPKKIAMLAGLAPLNCDSGKFKGRRRIWGGRASVRSGLYMATMAAIRCNPAIKGFYQRLTAAGKCHKVAATACMRKLLIIANAMLRDQTLWQQK

SEQ ID NO: 441490 - protein, 340 aa, unidentified
MNHYVGIDVSLEASSVCVVDGNGKIVREGKIVSEPDALIAWLGGLKLELTRIGLEAGPLSQWLYAAMRQAGLAVELLETRHVRNALKTMPVKTDRNDARGIAQLMRLGWFRPVHCKSIPAQETRALLTARKLVQVKLHDIEMSLRGILRGFGLKVGPTTPVRFEGRIRELVAGHPSLETIAQGLLAVRVALRREFDRFEKQVLAVARGDTRARLLMSVPGVGAIVSLTFAAAIDNPARFKSSKQVGPYFGLTPTKYQSGETDIDGRISKIGDAWVRAVLYEAANTILTKPLKGCTALKSWAMKLARRSGMKKAKVALARKLAVIMHRMLADGTPFTTQPA

SEQ ID NO: 441491 - protein, 326 aa, unidentified
MDVTFFKVEQPDVKHYQQFDNTEEGCKQIVKWVKEICCDCKKWLICGEYTGLYSMTAAMAFNSKGIDLWLENPQQIKLSSGIKREKNDKVDSNQIAMYALRFMDRAKLYKPNGDVLLKVRELVRYKDRLTKVRTQIVVPSHELKQVRKEWKEATFIYNQSGEVMKLLEKQIKDVERKMLALLATDPELKRLYKLVNSVVGIGMQTAIYLLIHTWGFTAFDNPRQLACYCGVAPFSKQSRTSLNGKNQVSQIANKKLKSLLHMCALNAVNFDPFMKAYYERKMEEGKHKMNVLNNVKNKLIYRICAVVSSGQEYDRSYSFHEVYNAA

SEQ ID NO: 441492 - protein, 485 aa, unidentified
MGSRRLVGIDLGIASDHTVRVLAEDGREVCRRRCRPTVESLTLIEKAALAGADPGTRLEVVFEPTGPAWLPIAVFFTGRGHLVFRVSSAKAADLRRFLSRHAKSNGIDADTLARLPLVAPEAVRPLQLPDVEVAALDRRVRAVDRLTRLASEHKVRVKDLVRQLMPMTPLTGDLGAADLAVLERWADPRALLKAGRARLTAVIAKASNNHLGAARAEQWREAAAAAVELYGDHPAIAWSDLAAEVVTEVALLRAVQAQLAVHAAAREEAYRWVDVGQLARTLPGVAEVSGPVLAAAIGDPRRFPSGRHFKSFAGLAPKASETGETDRKGQPMSKAGSSLLRVTLIRAADHARKHDPQLARVYYQQMVERGADHLKANCVVAGHLAERFWAVMRRGMPYVICDTDGTPVTPEKAKRIIAEQWTVPPEVRSRRRSKKAGKAPHHAPAGHAKPDTQRRRHTRRPSPPTILTPVVEEVKQPAPLTSDPR

SEQ ID NO: 441493 - protein, 322 aa, unidentified
MEAPLIFVGIDVSKAQLDVAIRPSAQSLSVTNDRAGIKSLIKHLKKLRPQLVVLEATGGLERQVLSALIAGEIPVVMANPRHIRDFAKSIGQLAKTDRIDASVIAHYAEAVRPKPRPLPDEASLELRALSARRRQVLDMIVAEKNRLATASKVVKKRITAHIAYLEQELNDADQDLDRFIEKNAAWKENQQILCSTPSIGPVSSRTLLVELPELGALDRKKISALVGVAPFPRDSGTLKGRRTIWGGRASVRSALFMATVVATRFNPVIRDFYKRLKAKGKPSKVCLVACMHKLLTILNAMIKNKIRWSENLLTRPLDMKHR

SEQ ID NO: 441494 - protein, 325 aa, unidentified
MFMLALILVKLHWIFCVVEPKRISFHKIKNNVAAIGKLLKTIKEIDPQAYLCMENTGYYNFNLYEVLEKFSFRTYVIDPKHIKRSIGLVRGKNDKIDAKRIAIFIERNHQDFESWKPIGESVKAIKILLSQRRFKIKQRTGLKQQNSDLKSVTFSKTTDKLIRINEKSIKEINKHIVEIETLIKKEINADHQLRTEINRIKTIPGIGDITAWTIAVKTEGFKRLCDPRKLACFAGVVPFEQQSGTSLRTKPRVSKMADMTLKSVLQMAAMRAVRMQNDLRIYYLRKVEEGKNKMSVLNAVRNKLIHIAMALIKNQTNYKNRLQLS

SEQ ID NO: 441495 - protein, 342 aa, unidentified
MAGIDVAQNELVVCLGRMYDDWTPELYAYKVFANTAKGIETFIEWVDKQTDITVGARFVMEATGVYHERLAYYLDANDREVSIVLPNKISNYMRTLDTKTVTDKTASQAIARFGLERSLDVWQRPRETYRSMRQLTRERDQLVAERSMLKNFLHAETSEAYPDQGSIGRIKERIELLDRQEREIMKEITVLVAKDEEAKASIELITSIPGVGLLTAAIVLAETNGFDLIVSRRQLASYAGFDVKDKQSGTSIKGQPHISKKGNKHLRKAMHLPAFSAIRHDENFKAIYARLISKHGIKMKAAVALQRKVLELAYTLYKTKTKYNPDYLNKEKDVEPKESWVA

SEQ ID NO: 441496 - protein, 361 aa, unidentified
MLEQKNELNFEGRNIYVGIDVHLRQWNVSIYIEELFHKTFQQPAEPMSLSHYLRQNFPGGQYHSAYEAGFCGFWAHHKLKELGIDNIVIHPADVPTTQKEKVQKTDAVDSRKIGRSLQKGELKAIRVPTKETYEDKSLLRARKSLVKALSKSKNQVKSMLYLFGIRMPERYMRTSAWTRNFSRWLKEEAIKGFSQESGRESLLLTVEKVERLRALLLRANRDLRELEKSDLYRHRMELLRGIPGIGLITGLTFLLEIEDIGSFNDTDQLAGFAGLVPKCHGSGDEEGKGEMTFRGQNNLRIELIESSRISVGRDPALGMAYLNYCRRMDANKAIIRIARKLLNRIYYVLSKDRKYETCVVK

SEQ ID NO: 441497 - protein, 355 aa, unidentified
MNDAKYIGMDVHQATISVAVRDSRGNLVMEAILETKAETILQFIRGLRGSLYVAFEEGTWAAWLHDLLQPHVARVLASDPRKNALLKAGNKSDRIDARKLSELLYLNKLSPVYHGEQGIRTLKELARSYITITRDLTRVMSRLKAIYRGWGIPCAGQQVYAPRYRAEWLAKISEAGVRRRAELYYQQFDALAALRQGTRRELLAEARKHPAMRLLRQIPAIGPIRAALLIALIQTPNRFRTKRQLWAYCGLALRTYTSGEYRFVGGQLKRSKKVLAVRGLNINHNHDLKNIFKGAATRAAATAGPFQDFYQATVARGMKPHLARLTLARKIASITLLVWKKGARFDAEHLKQQAA

SEQ ID NO: 441498 - protein, 411 aa, unidentified
MEPLYRWVAGIDVHKKMLAVVVRAPQGEYVQRKFGTTKTEIGHLAAWLQDHQVSEVVMESTAQYWRPVWYGLEAHFKLHLTHPLKTRAPRGRKADFRDARRLADRWHSGDLEDSFIPGAEQRSWRWLTRSRVHLKRMLGVIRNQVEGLLEQGGIKLSAVASDIFGVSGWAILERIAAGESDVDKLVDEARGVLKRKKSKLREALQGKLDPLYRLLLQQHLEQAQLIRQQVEELNQALAEALKEHVAVLCRLTKVPGINLYAAQELVAEIGPGAVAFPSAEQFASWVGVCPGSQETAGVNYSRRSAKGNRYLRRLLCQNAWGAIHTKNTFFAGLFARLKPKIKAKGAAWAVAHRIAKLVWLMLHEGVEYVEKGTAPLNPRTLVRKFRRLLREFDRHGIDAKSLLEQELVATS

SEQ ID NO: 441499 - protein, 417 aa, unidentified
MTKSKDNTFIQVLHPVCCGLDVHKNKISACLITIDEKGKEQFEIREFSAFTKNLIEMKEWLIKNDCPIVAMESTGVYWHPVFNVLEESTIGVLLVNARHVKNVPGRKTDICDSKWLAGLLRHGLVNGSFIPPANVRVWRDLTRMRKTYTESFADYKRRVHKLLTTANIKIDSVVSDLFGVTGRNLIDLLCSDDDLIIENIEKCLKGSLKKKTTELYDSLQGFFKEHHKFQLIGIMDTINIFEKRIVEINEKLDTLTEEYHGLIGRLDEIPGINKKSAQSIISEVGITLNEFACIAAFTSWAGLCPGNNESAGKRKSGSNAVRNHTLKTILVQVAWAAIKTKNSFYKAKYYKLKARRGAKKAIVAIAHKIAKAIYNIIKNGDSYRELGENYLTAQNQKKTLKNLRKKAEEMGFDLVAC

SEQ ID NO: 441500 - protein, 417 aa, unidentified
MLKIVNRNCAGIDVHKKIIVVTIAKTNEHDITDYQTKSFNTFTEDLIKCRDWLVSNGTLDVCMESIGKYWIPIFNILEEKCKCIITHPKYVRSIPGKKTDKKDSIWIADMFKHGLVEPSFMPPADIRQLRDLMRYRNKLVNIRSGEKNRFQNSLTMSNVQMANVVTDVFGKTSQSILKLMLSKPNLTLDDITPLLRKNLKSLPEEILKSINGNFDESQSSKMNIVLKHYDSINECIEELEEQILKLALKYSTEINLLLTIPGIKEISAIFIIAEIGTNMNTFVDDKHLCSWAGLTPRCNESAKKKKSVRITKASIYIKPLLVQCALCAIKDNSCPYIKVRYESLKRRRGHKKAIIAIARLLLTSAYHILLTGEVFDYQRFENLMDRNFKSHKNIQNTPEEMIPYLTNLGYNITLQNT

SEQ ID NO: 441501 - protein, 366 aa, unidentified
MTSVPSAAELIHLGMDTSVNEIVVAVLRPGQEIPVVDRIPGDEESVRRLIGRFPGRRLLSACYEAGPGGYELHRLLTSMGVACDVIAPSLVPKGSSDRVKTDKRDSVRLALTHRAGLLTAIRVPSPAEEAVRDLVRARGDLLDDRKRMQQRLNAMLLRHGRIWRGGAKWSYAHRAWVDRQVFDEPALAEAFSLYRGGLEAREAELAAAEARLAAWAGREPLAGPVARLGGYRGIAQLTGLTLAAEVVDWRRFACARAFMGFAGLIPAEYSSGSRSRRGHITKAGPEGVRTALVEAAWAYRYRPAIGATLRRRQAGLPPETLARSWKAQQRLHAKYKKMIARGKPPGVAVVAVARELAGFVWAEMIT

SEQ ID NO: 441502 - protein, 350 aa, unidentified
MVMIGTDSHKRTHTVVAVDDVGRRLATKTVRTNSDGHLDLVRWSTQFDDVVFALEDCRHLTRRLESDLLIAGYRVVRVPTRLMAAERRGTKEPGKSDPIDAEAVALAALRYPDLPVAELEGPAREVKLLSDHRRDLVVQRTRIASQVRWFVHELDPDRVVPSRGLRRQCVVIELQEALRGVGGVVARLARELLDRCAELNRQINQLEAELRRLVQVLAPSLLAIPGCGVLSAAVLIGETAGVHRFRNKDAYARFTGTAPIPVWSGASAGKVRLNRGGNRATNCALHMIAVTQARGIGPGHAYLAKQQARGKDKTASLRLLRRRLSDAVFAALRTAQTVAGDQPVPLPAAA

SEQ ID NO: 441503 - protein, 385 aa, unidentified
MFIVGIDVAKRSHEVCMITSDGQTVQRPFSIRNNCTGYNLMLEKIRKHTNIKSQIVFAMESTAHYWLALFTRLRKDGYHVILLNPIQTSAMRDMFIRKIKTDAKDSFIIAELIRFGRYAESNVAQDRLLALKELCRNRFYLVDMAGDLKRKLIALIDRVFPEYEAQFDTIFCKSSVAVLKKYPTPQKLSNAHLDKLTELLWNSSNGHFGEWKARELRELARNSFGVEDCDGAYSTLILLMLDQIQSLSGKADALEKEISRLFQSFDTTVTTIPGVGPIIGAVILSEVGDISRFSSADKLAAYIGVDPSVNQSGEFQAAHAHMSKRGSPYLRRCIWMASQVAVQRDPMFRAYYEKKAAEGLKYMTIIGHVTRKMTAVVFALSLIHI

SEQ ID NO: 441504 - protein, 374 aa, unidentified
MKEFSKYVGLDTHKETIAVAVADAMGGKSRFYGEIANTPEAIRKLVKNLCPDGEVISFCYEAGPCGYELYRQISQLGHHCSVVAPSLIPTKPGERVKTDRRDSEKLSRLDRAGELTPVWAPDQEQEAMRDLTRAREDMKGLERTTKQRLNAFLLRYGRIYERGKSRWTRAHFRWMEGLKFDVTVQQIVFQEYVDAAKQAEARVAGLEREMEKALENWALAPVVEALMALRGVKLISAMTIIAELGDITRFDSPRQLMSFLGLVPSEASSGLNRRQGGITKTGNGHVRRVLVEAGWCYRFPARKTAHLQRRAEKCSDAVQAIAWKAQKRLCGRYRHLIGRGKLKVQVCTAIARELVGFIWAIACQVMNRPVESAG

SEQ ID NO: 441505 - protein, 412 aa, unidentified
MDILVERCAGLDGHRDSVMATVRLPAKRRRQREQQTRGFPSTLGGLQALADWLESFGVTLVGMEATGIYWRTVFDALEPHFQCWLLNARHLRNVPGRKSDVIDSAWICQLVEHGLVRPSFVPPLEIRRLRDLTRLRKAQIEERTRAIQRLEKVLQDAGIKLTSVASQAYSVSARAILEALLAGVTEPAQLAELARGRMRAKIPQLQEALRSRFDLAHHGVLVASLLSQLDSLELSIANLDQRIAHQTEPLAELVELVCTIPGVGPRTGQVLIAECGIDMSVFPTVGHFASWAGICPGINSSAGKRFSGKTRRGSKWLRQALSESAQAAARTKGTYLASHYAQIRGRRGTHKAIGAIRHDILVAYYHIVQDRRPYRELGPDWLARRYSPEHRARRLLRQIEALGFNVSIEAAS

SEQ ID NO: 441506 - protein, 399 aa, unidentified
MIVSGLDVHKDTIFCAVYNGKTYGEVKEYSTTTGSLRVMGSDLKASGVVKIAMESTSIYWIPVWNILEESGFELTLVNPYLIKQMPGRKSDVKDAQWIAKLLHKGMLRASMVPDERIRMLRSYSRKYVKLQRRITSVLQDIERTLEICNIRITSLVSNIGGKSILEVVRKIVSGENSSKVLLSCIHGRIKNRNGTKVEKALEGFISEHHRFNLELLMEEHDLLLSQSQRVESEMKNICKTHYSEQLDLLQSIPGIKILSAMLIIAETGADMKAFENSSKFVGWTGLRPRNDESAGKYKSTAITKGNGYLRRILVQVAWAASRTKGSYFKEKFNHLAVRKSSKKALIAIARKLSVIIWNVLKYKQEYNPGRMEIYDPVKIQAKLNYHKMQFERLEKIIQS

SEQ ID NO: 441507 - protein, 317 aa, unidentified
MGVIIGMDPYKRSATIEVVDESGRRLAVGRFGMDRAGYVELLAAGREHPDRVWAVEGCNWIGRHIAHRLVHDGESVVDVPPKLSAHVRVLATGNGRKTDPVNAHSVALAAVYAAADPGLVQVVVDDDLVVMGMLVDRRDELGRARTQTVNRLHRLLLELFPGGAKQFLSAPQARSLIATTKPRDLVGKTRRRLAVELIVELEGIDKKIKTIKKELTGLVTDRGSTLLELTGIGPSAPARLLADVGDIHRFRDRDRFASWNGTAPWTRPPATRNATAYPGPGTGGSTGPCTSWPSSSCGTRPKVGPTTTPESARAPRR

SEQ ID NO: 441508 - protein, 353 aa, unidentified
MKTYYVGMDVHSATIRIVVLNGAGKVVMELVIETGAERVRSFLKQLRGKVYVTFEEGTQANWLHEVVRSLVTEVVVCDPRHNKLLQSGNKNDRVDAQKLAELLRLGSLKAVYHGDNGVGTLKELVRTYDCLVSDTTRVMNRLKAIFRGRAIACGGHEIYRQDQRGPWLAKLREPGAKQRAGFLYEQLAALKPLRRKAKLAMVKEARQQTAYRWLMSVPKLGSVSVAQLIAVVGTPHRFRSKQQFWTYVGLAVVTRSTADHEVVEGVLRRSKRPVSTRGLNRNHNHLLKRVFKNAATSACYSGPFKAGYDERVARGMAPSLARLTIARQLAATTLALWKRGEQFDPERKKQQAA

SEQ ID NO: 441509 - protein, 421 aa, unidentified
MQEQASEFAAFIGIDWADRKHDVCLQIPGAPDREASVLEHRPRVIDAWARQLRERFGGRPIAVCLELAQGPIVSALLEYEFFVIFPVNPSTLATYRRAFVPSGAKDDPTDAALALELLRRHPEKLAPLRRESDDMRALRRLVEARRDLVQDRVRGTNRLTFTLKEYFPQIVDWFRDKETEVFAAFLERWPSLQAAQRARRDTIVAFFHAHSVRRAAAIERRINAIQTERPLTTDPAVIQPSLAVVATLLPQLRALTAGIARLDADIATRCEALPDFRLFVGLPGAGPVFSSRLLAAFGERRERFADAAAVQKCVGVAPVTERSGNKHWVHWRWACPTFLRQTFVEWAASSISHSFWARAFYDSHRAKGSSHNATVRALAFKWIRILFRCWVDRTPYNESHYLTALQKRQSPLLKFAAAQPS

SEQ ID NO: 441510 - protein, 347 aa, unidentified
MSITMIGLDTAKAVFQVHAVDATGQVVIRRKLRHNELIAFFEKQAACTVVMEACGAAHHWARVLTGLGHDVKLIAPEAVRPFVKKGKKNDAADAAAICEAASRPGVRFVPIKSLEQQGVLALHSARSLLVKQQTMLANAIRGLATEFGLTAPLGMGKLGELMALVDADEAVPERGRQALTTLFDQCRALDESIETFEAEIVAHARRDDTARRLATIPGIGPITASLIAATVADIGAFKSARHFAAWLGLVPRQHSTGGKIRLGRITKTGNREIRRLLVLGATSMVYRAPQWNSAAGVWTRAILERRPVRLGTVALANKMARIAWALMTRSEVYHAKGRVAIAAEAVA

SEQ ID NO: 441511 - protein, 343 aa, unidentified
MDHFTGLDVSVNETSVCIVDETGKIVREVKVASEPDALLTVLKNRTYHFKRIGLEAGPLSQWLYSALAEAELPVVCVETRHMQAVLKAQINKTDRNDARGIAQMMRVGLYRPVHVKTLRSQKLRMLLTHRKLMLSKAIAIENDLRGTLRNFGLKVGMVGTVKFEARIKELIENLPDLAVLVEPLLVVRRVLREQIGILHRRLLVIVRDDAVCRRLMTVPGVGPVVALTYRATVDVPARFRNSKAVGAVFGLTPSKYQSGEINRTGAISKCGDEMMRVMLYEAAQVMLTRTNKWSWLKAWAMKIARHRGMRKAIVALARRLAVILHRIWVDGTDFRWTREVAAA

SEQ ID NO: 441512 - protein, 421 aa, unidentified
MTATRRCIGLDVHRDFAQVAIWQGGQVRQAGTFATTPEGVREFAAGLGPADEVALEATGNTWAIATLLASHAGRVVVSNPAKTRAIAEAKVKTDKVDAEILAQLLAADYLPSVWLPDAETSALRRQVLRRAHIVRQRTRLKNQVHAILARNLVPRCPAADLFGIKGRKWLAAQDLPADERAAAVALLRQLDFHAEELALIDADLGQAALGRPEVLRLMTIPGVDATVALSIVAAVGDFTRFRTPDKLVAYFGLNPRVRQSGGQPASHGRITKAGPAHARGMLVEAAWSASKAPGPLRAFYQRVRARRGMQVAAVATARKLAVLCWHLIIKGEDYAFALPSLIAHKQRKLELRAGAPPARGRKGQAARYSLAAVRAAERDLAAQGEAAYRTMVAAWQPARPERKKVTGAAASTGTRLIKPTG

SEQ ID NO: 441513 - protein, 342 aa, unidentified
MQITTIGLDIAKNVFQVHGVDAAEKVVVRKQVRRGQILAFFEALPPCLIGMEACATAHYWARELTRLGHRVRLMPAKDVKAYVKRNKNDAADAEAICEAVRRPTMRFVQIKSTEQQGRLMLHRARDLLMRQRTQVINALRAHLAELGIVAAQGREGIKELLKIIASEGDAGLPVDAHASLVVLAAELQAMQTMIGSIDKRIMAQHRSSEASQRLESIPGIGVTGATAIVATVSDPKVFRSGRDFAAWIGLVPREDSTGGKQKLGPISKRGDRYLRRILVVGACAVLRYARQQPQKYPWLTQLLARKPFKVVAVALANMMARIAWALLARGGTYQAPVLVAAA

SEQ ID NO: 441514 - protein, 375 aa, unidentified
MATIARLGIDTSKSLFQLHGVDEREEAVLRKQVRRGQFLGFVAKLAPTKIGVEACGASHYWARQLQALGHEVVLLPPQHVKPYVGLNKNDKIDAAAICEAMSRPRVRERFVAVKSAEQSAAQMLLGTRDGLLHRRTQLSNTIRGHAAEFGLVTPKGLAHIKPLLERIAADDTVPALAKELFATLGEEFAELAPRIARLDKKLKAFQRSDELCRRLVEVPTIGPVIASSMVVKIGNPAAFRSGRKCAAWLGLTPKDHSTAGKMRHGGITRAGDEGLRAALVSGATAYIQQVKRGRTRPSPWLAQLLKRKPEKLAAVALANKTARIAWKLMVSGERYDRARAEAREGLGATQHQGSTPSPSLHPHTADQGASTMTVA

SEQ ID NO: 441515 - protein, 360 aa, unidentified
MRIIGCDLHARQQSVAMLDTETGEAVNRRLMHEGQEVREFYSQLPRPVLVGIEAIGPMQWFLNLLEELKIECQVGDATKIRAAEPRKQKHDRRDAELILKLLVENRFPAIWRPSKEQLDLRALLLHRHHWVRLRTQIQNALQAIALANGLRRGPSLWSYDGQAKIAFLPLPPHASYRRSMLQALYRKMEEEIEQLTAQVAGQAEQRSGARLLMTHPGVGPVTALATDVFLGDPQRFADGKALASYVGLIPREYSSGAHQRLGALTKQGSPFLRFLWNEAAAHAVRRDPDLQRFYRRKLVQKGLGKSRVAAARKLGIRLWIMLRDQIDYEEFCRRGQKQSSAVCAGMLEVANGANCHRPVG

SEQ ID NO: 441516 - protein, 353 aa, unidentified
MDTQTHKEVILGVDTHLDKHVGVIIDEFGKYLGNLSIETNTAGYQQLLKWTQSFGCIQRAGIEGTGTYGAGLARFLFKQNIQVLEINRPDRSMRRFRGKSDPTDAESAARMVLSGNACAIPKLQSGPAEAMRIVSVARRSAVKARTQTINQLRGLLISAPDDVRLKLWSSKPAECVKNCAYLRTLGESSWLITLATTLHLLAKRWLYLTEEIKELDKTLERLTSGAAKRMRAQFGIGPQTAATLLAVAGDNPERLRSEAALASLCGVNPLEASSGKTVRHRLNRGGNREANNALWIIAMVRIRSDPRTRAYVERRTLEGKSLKEIHRCLKRYIIRELYPLILADLKDATFKLT

SEQ ID NO: 441517 - protein, 342 aa, unidentified
MQITTIGLDIAKNVFQVHGVDANEKVVVRKQLRRGQVLAFFAALAPCLIGMEACATAHYWARELTKLGHKVRLMPAKDVKAYVKRNKNDAADAEAICEAVRRPTMRFVQIKSAEQQGQLMQHRTRDLLMRQRTQLINALRAHLAELGIVAAQGREGIQELLAIVADHKDQRIPIDARASLMLLAAQLQAVQTVIGLIEKRIMAQHRSNEASKRLETIPGIGVIGATAIAATVADPSVFRSGRDFAAWIGLVPRQDSTGGKQKLGPISKQGDQYLRRILVVGAHAVLRRAKQSPEKYPWLTQLLARRPFKLVAVALANKMARTAWALLAHGGTYRAPELAATA

SEQ ID NO: 441518 - protein, 404 aa, unidentified
MFDTEDVGVFLGLDVGKTTHHGHALTPAGKKVLDKQLPNSEPKLRAVFDKLAAKFGTVLVIVDQPASIGALPLTVARDTGCTVAYLPGLAMRRIADLYPGEAKTDAKDAAVIADAARTMPHTLRSLELTDEITAELTVLVGFDQDLAAEATRTSNRIRGLLTQFHPSLERVLGPRLDHQAVTWLLERYGSPAALRKAGRRRLVELIRPKAPRMAQRLIDDVFEALDEQTVVVPGTGTLDIVVPSLARSLAAVHEQRRALEAQINALLEAHPLSKVLTSMPGVGVRTAAVLLVTVGDGTSFPTAAHLASYAGLAPVTKSSGTSIHGEHAPRGGNRQLKRAMFLSAFAALHDPASRTYYDKQRDRNKTHTQALLRLARQRISVLFAMLRDGTFYEPRDPKDVELAA

SEQ ID NO: 441519 - protein, 368 aa, unidentified
MGKSSKLFVGMDVHKESIDVATGEEAGGEVRHYGAIGGELAAVSRLARKMESTGRGLVFVYEAGPCGFGIYRLLRARGHECWVVSPGLTPRSNADRVKTDRRDCLKLARLARAGELTPIRVPDQTDEAVRDLVCAREDAVIMQRQVRQRLGALLLRNDIRYSRKTVWTAAHRRWIAELKLPHGAQQIAFEEYVQAVDEASRRIERLEAAIREELGRWRWAPVVEALQAFRGIRAIHAVRLVAELGDLTRFASARHLMGYLGLVPSEHSTGERRRQGAITKTGNSSARRALVEAAWAYRYGARVSVGIARRQSGLPKSVTELAWKAQLRLCTRFRRLSARGLHRNKIVVAVARELSGFVWALGQQVKPT

SEQ ID NO: 441520 - protein, 362 aa, unidentified
MKYFCGLDVGMDETAVCVVDDKGKVMLEAAVVTDPDAIKAALAPYLGGLRRLGHEAGSLSPWLHPELLQLGLPAVCLETLHVRAALKAQRNKTDRADALGIAHIMRTGWFRRAHIKSAACYRLRLLLTHRRNLKRKFLDLENAIRHSLKVFGIRLNRVGRGGFAQAVREAVAGDALVTELIDAMLTARAALWKQYCRLHDLVVKLVAGHALCRRFMQIPGVGPIAALSFMTAVDDPSRFKRSRDVAAYFGLTSRRWQSGSSIDVQGRISKAGDGDVRRALYEAASALLTRYKKKDKVKTWGMAIARRASHRKAVVAVARKLAVIMHAMWVDGTFYCGDPDASQADVDARTATKERKLLGAHA

SEQ ID NO: 441521 - protein, 392 aa, unidentified
MVCVGIDVAKDKHDCFILSSEGEVLADVFTIANNRDGFELLLQTIRSCARPTDNIKVGLEATGHYSYNILGFLLDKGLATYVINPLHTNLYRKSLSLRQTKTDRIDARTIASMLMSDVDLKSYTDTAYHNEELKSLTRYRFGKVNERAQLKQSVSRLVNILFPELETLVPSLHMSSVYAILSEFPSAKQIAGAHLTHFKTILSDASKGHYDRDKAAEIREAARRSVGSSMPAKSMELQHTIRLIRELDKEIDEIEVAIKAIIDEMAPPILTIPGISYRMGAMILAEIGDFSRFDSSDKLLAYAGLSPSTYESGKLKATGTYAHMEKRGSRYLRYALFNATKFVCHWEPSFAAYLARKRAEGKHYNVAISHAAKKLVRLIFALQTSGKAFQPA

SEQ ID NO: 441522 - protein, 357 aa, unidentified
MGKSIKNLSSVTIVGLDIAKNVFQVHGVDAKGAAIVARSVRRGGLLKFFASLPPCLVGMEACSSSHHWARALSELGHQVKLIPPAYVKPYVRRNKNDAVDAAAICEAVGRPNMRFVAVRSVENQAELMRHRARELLAGNRTRMLNALRGHLAEVGIVAAQGAQHAYGLKRLLADGCDENGEIVVADCVRKALAPLVQQIDAIDEEIEAIDDHIKAQVKADDTARRLARVPSIGPITASAIVATIRDPSAFASGREFSAFIGLTPRQSSSGGKERLGRITKMGDRYLRKLLVVGACSVLNHRKGHNDALRVWADQLLARKAVKYKFKLTAVALANKVARIVFALMTRGGEYDDRPLAA

SEQ ID NO: 441523 - protein, 349 aa, unidentified
MRFYNQQHRFYCGVDLHARTLSLCVLDAQGAVVHHDSHPATGSDFLAAVAPFRDGLAVACECLFAWHWLADLCAAEGIPFVLGHALHMKAIHGGKAKNDKIDAHKIAVLLRGGMLPQAYAYPKGMRETRDLLRRRTFLVRRRAEALAHLVNTNSQYNLPALTRKLCYAANRLELDLPARFADPSARANVEVDLALIDAYDEQIGRLESYLIKTAKVDDAQAYARLQSIPGVGKVLALVLLYEIHDIRRFAEVGHFLSYARLVRCVHESAGKKQGTGGNKIGNAQLRWAFSEACCLLVRASERAKRWLARREKRHGKKRALGALAARLGRAVYHLLRKGEAFDEGRFFAS

SEQ ID NO: 441524 - protein, 359 aa, unidentified
MQTKGNRISFKGQNIYVGIDSHLKSWKVTIMTEELLHKTFSQDPRPEILYYYLKNNFPGGNYYSAYEASFCGFWLHRQLTSLGIKNIVVNPADIPTTDKERKYKEDKRDSRKIAKSLRAGELTGIYIPTVKAEEMRSMVRYRSTLIKDITRCKNRIKMRLYFHGIEIPPEYLKRSNYWSNRFTDWVKALKLSTHQGTIVLQELLDTVLILRKKLLMINKEIRLLAKSKDYKKQFDLLTGIPGIGTITAMTLLTELEDINRFKNIDNLCSYVGLVPTTNSSGESEKVGGVTPRSKKGLRKTIIESAWIAARRDPALSLSFNILSKRMEHNKAIIRIAKKLLNRVRYVMINEKEYVFSVVS

SEQ ID NO: 441525 - protein, 346 aa, unidentified
MTHSTTVGVDLAKNVIQVSVVSARGKELLNRSLTRRKFAEFLGKQKPALVAFEACATAHHWARTAKRHGHIARIIPAKAVAPFRQGHKTDSNDALAVAEAARRPNIKEAPMKTIDQQGLQAIQRSRDLLVQESTALSNHMRGLLMEFGVVIPQGFAALRRMLPEILEDGDNEVPDMYRPTLHRLYGRFLELRDDIQSMNVEVKELVKQHPACKRLTALEGVGPISAVLLYASLGTGEAFSGSREFAAYLGLTPRQFSSGGKTNMVGLSKKIGNCRLRSVLIQGARAYVHKLKEPKTSKDRWLMELIERAGHGKAAVALANKNVRTAWAMLTQGTEYQRRPQLKVAA

SEQ ID NO: 441526 - protein, 313 aa, unidentified
MIYIGIDVAKDSLVGARVDRSFCVRETYLVPNTKEKIEELLTTITKRWRRITMASEATGQYHRLLAKMCVTRGIPFRLLNPIVTKQFTKATVRRRKTDLTDAVIIARLAIQGEGTLLTKESFSLAKQAVRTAVKLSQLEQTLHLMKQKLEMVEMDRSLIVQLDNCKRELSHAQASFKDHAVSNINPFLYKLLQSIPGVGVTISAILIAELERIEKFPNGDALVAFCGLDPRIKQSGGSLHHNTHITKRGSPTLRKTIFLAASIAQRHNKELKIYFKKKRNEGKFYKEATVAVARKLLYRVYAVWKRQTPYIPA

SEQ ID NO: 441527 - protein, 349 aa, unidentified
MRDYSAYLGLDVHKDTIAVAVAIPNGGEPIYRGEIVHTTKAFTKLLQRLTASYGENIAFCYEAGPTGYGLYRWLIKKGFYCEVIAPSLIPRKPGDRIKTDRRDAINLAKLFRVGDQTAVWVPDQEQEAMRDLTRVREDMKGMETQAKQKLNSFLLRHSRRFSGKSRNTPAYFSWLEGLKFENPTSQIVFQEYVNAVLTAQARVAGIEKEMELALPNWSLAPVVEALRALRGVDLVTAMTVMAELGDITRFTSPRQLMAFLGLVPSEDSSGLKQRRGGITKTGNGHVRRVLVESAWSYRYPARLTRHLRKKAENASPEVKTIAWKAQKRMCGRYRHLLDLGKCQNRWSQR

SEQ ID NO: 441528 - protein, 404 aa, unidentified
MEVLYKRCCGIDIHKNMMVACIFTSVRKKEIRQFSTITEDILQLVSWLKETDCEMAAMESTGSYWKPVYNIFEEEQIPIMVVNAQHIKGVPGRKTDVKDAEWIADLVRHGLVKASYIPNRDQRELREITRYRQEVIEERARELNRIQAVLEGCNVKLSSVITDISGKSGMTILKAIVSGETDPVVLSELAEGRARDKIPEMQKSLQGRISEHQQKMLKHQLGNIESLTALIMDLDADIKKTESINWAIEALDDMPGIGRKSAERILAETGVEMEHFQNESRFSSWAGLVPECKESAGKKMSTRIRKGNKYLKATLVECARAGIRNKQSYLYSRYQRIAARRGGKRALIAVAHTMLIAIYHILKEKVPYHDLGADYYSVINQEKIINRNIRTLEKLGVNVMIQPK

SEQ ID NO: 441529 - protein, 392 aa, unidentified
MPDVRSCVPDDVRSWVALDVHKLSIVAAVLPPAGGKPEVVELENTPRALRRLVGRLGGPEGLAVAYEAGPAGWSIHRQLADLGVACDLIAPALIPVRPGDRVKTDRRDAKKLVRLLRAGELSFCAPPTPEQEGLRDLIRCREDLRDNRTRARHRVIKALLRHGHVFHDGKHWTQKHERWLDRQRLEDPHAQLALETMTAHLRMIDTQIAQLDAQLERISIHEMWAPGVRVLCGFRGLSTLTALGLLLEIGDFRRFATPRELMSFLGLTPSEYSFGQQRHRGHITKAGPVHARRLLIEAAWHYRHPPRLSERHRKLAKDGLIAPTVAARAWQAQSRLNHRHRVLAQRGKPATVANVAVARELVGFLWAAMTEQPFRPDPAPTNATEKLEALAA

SEQ ID NO: 441530 - protein, 320 aa, unidentified
MLDKGCGLDVHKDMHLATIISDTRKETRRFENNLENINVLIAWLRENKCQHVAMESSGIFWIPLYSALEDAGFKVVLANAHEVKRTAGRKTDVSDSEWLAQLVRSGLIKPSYVPERRIRELRELTRLRVKLSQTRTSFKNRCHKVLGRVNIRLGSKLTDIFGKAGLEILEGLMSGKSIDAIIDQSGNRWLKRKRDEITEVVRGTLSGVDMFILEQCVGAVRYLDQMIRKVDERVWGLVNEEDLKIVATIPGVGGVHGAAILAEIGDVKRFEDSKNLVSWAGLAPSVYQSAGKTLTGSITKKGSKWLKAYHDSGGPCRQEG

SEQ ID NO: 441531 - protein, 320 aa, unidentified
MMTQNDLVVVGIDVAKDKVDACIRTVTERRTFPTTASGRRSLIAWLRKHQVGKAVMEASGGYERVWAKALRQTALEVRIVDPKRVRSFAESAGRLAKNDKIDAEMIAWFAETFSEAPSQVEDPAHEEIKALVKGRKSLIDLRARLEMQKEHEVPALVGKAHARLLKKLASEIAAIETAIGAKIKATPAFAVRAEIIQSVPGFAEATALTLLAGLPELGQVSNEVAAALVGVAPYDDDSGKRHGQRCIKGGRRWVRNALYMPCVGAATLNNPVFKAFYQRLIAKGKKPKAALIACMRKLIVILNTMIARGEKWDPKRYQVA

SEQ ID NO: 441532 - protein, 346 aa, unidentified
MVVIGVDSHKRTHTVVAVDEAGRKLGERTVAATAEGHLELLGWSRSWPDHVWALEDCRNLTRRLEADLLRAGEAVRRVPTKLMAGARRSAREPGKSDPIDALSVARALREPDLPVARLDGVERELRLLVDYRDVLISDRTGHQSRLRWFLVELGIPEPPARGLTVLVLTGLDLQLVARTEPCARIARNLVARILEMTTAIDDLARQIGELTETLSPNLMGLFGCGPLTAAKLVAETAAIGRFRSRAAFAAHNGTAPIPVWSGNLVRHRLNRGGNRQLNAALHRIAITQLRCPGLGQAYVAKRIAAGDTKTEAIRALRRRLSDEVYRRLQADEVARAGMEGLARVAA

SEQ ID NO: 441533 - protein, 333 aa, unidentified
MKDLSTKKHFVGCDVSKDTLDFALFERGKDYRLFEHIQVPNNTEGFQAMRKWLRSLKGKLSESAVAMEHTGSYSTALAEWCHKKGYTFVFLHPLDVKNAGARGRNKTDKIDAQFIADYLYTMREKLEPSTPESPIIKKLRMLRNERRLAVYARAAFATQSKCLDDTDSAKRTSKIISELNKQISAIEAQILDVIRSDESIRRNYGLLLTLKGVGMVNALTTIIATGNFTRFQTARQYAKFCCVAPLTCQSGTSVKNGDHISKAGHNDIKATLTEAARSAIQFDSQLKHYYERKRAQGKSHGCVMNAVKFKIICRMFAVIQRQTPYIDTDKYRS

SEQ ID NO: 441534 - protein, 352 aa, unidentified
MFKYHHTTTEYSCGIDLHSRMMFICLMDKEGNILVHRNIKGNSFEYFLELVEPYRHSLTVCCECTFNWYWLADACLDAGIEFVLGHALYMSAIHGFKTKNDKTDSMQIAHLLRTNLIPPAYVYPREKRAMRGLLRKRISFVWKRSAILTNLSMGVMTIGHSPLNSTNKTRDRWLGELKDVYTEPIDKISMEASMHMVQQFDIIIEKLDQTIAGHTRSNYFTEYNIIKTVPGIGRILALIIFYEVDDINRFSSDQDFLSYCRLVKGTIASAGKIKGSKGGKMGNGYLKYAFHEAAVLGKGRNPEMRKYYQRIEAKKGKFLANSILACKYGRAVYHMLKNKKAFEFNKLARRAA

SEQ ID NO: 441535 - protein, 416 aa, unidentified
MEIVYERVAGIDVGKKEIALAVRTPGEQPGQRRQVIRKYKTFWRALQDMTAWLVQEQVTHVTMEATGIYWRPVFHALCEAADVEVLLVNARHVKNVPGRKTDAKDAEWLAQLLECGLLRGSFIPPAEIAAIRDLTRYRKKLIESRSSEVQRLGKVLEDGGIKIDSVASSLTTLSARHMVEALIAGERDPKVLAQLAMSRMRGKIPDLEQACVGRFGDQHALLARLHLQHLDHLGMMIDELDHRIDVMTVPFATQTKLLTTIPGIGERAAQVIISEIGVDMSRFPTAAHLASWAGLCPGNNESAGRRISGKTRKGNREIRDLLCECAWSAGRTNTYVGARFRRLHRRFGKQGGGKAAIAIADTLIVIIWHVLHDNAEYRDLGADYFTRRYDNPEAKKNRLIRELQNLGLHVEVSPAA

SEQ ID NO: 441536 - protein, 354 aa, unidentified
MNGLKHQEEKRSMDHFAGLGVSVKATSVCIVDGSGKIIREVKVASEPEALLVVLKNPAYRFKRIGLEAGPLSQWLFGALAEAELPVVCVETRHMQAVLKAQINKTDRNDARGIAQMMRAGLYRPVHVKTLRSQKLRMLLTHRKLLQSKAIAIENDLRGTLRNFGLKVGMVGTVKFEARIRELVENLPDLAELVEPLLIVRRVLREQIVILHRRLLAIVRDDEVCRRLMTTPGVGPVVALTYRATVDVPARFRKSKAVGAVFGLTCSKYQSGEIDRSGRISRCGDEMMRVMLYEAAQSMLRSKKWSWLKAWAMQIARRRGMKKAIVALARRLAVIMHRIWVDGTEFRWTREVAAA

SEQ ID NO: 441537 - protein, 414 aa, unidentified
MSDQEQHHIFAGIDTHADTHHVAIITGYGKRVADQEFVATSSGHRTIVDFITSHGVPGGVGIEGTGTYGAALTKALRRAGIPVTEVNRPNRQQRRNQGKSDPLDAYQAAQSVLAGTSTAVPKAKDGPVECLRVLRAGRASAIKSRTATINQIRDLLVSAEDVVRAKYRGMPTLPMIAMMARSRPTGHTADPEYITSRVLRTLAQRYQYLTVEIEEASTSLQKILDLYAPLLCDLPGVGTDVASQLLVTMGDNKERINNEAQFAALAGVAPVPASSGKSTRHRLSRGGDRQANSALHHVVLVRMGSDARTKDYVDKRTAEGKSKREIMRCLKRYVAREVYRQITHPVPAPMITDLRLQRRELGITLQQVAEHLHQWPSYLSRLERGRTRNDLLAVRYRSWLNDQASAERRSSDRL

SEQ ID NO: 441538 - protein, 310 aa, unidentified
MDAVVVGIDVSQEKLDVHVLPSGEAFVISNDEAGIGDLADRLAGFAPSLVALEATGGLETLAAAALGGAGMPVAVVKPDQVRSFANALGQRAKTDPIDAAVIARFAAATGVAARPLPDAETRLLADLVTRRRQITAMIVAEEARLKRAANRQLKKSIARLLSALRRELESLDADLDDQIRRSPAWRVKEDLLSSVPGVGKAISRTLIAELPELGSLDRRRIAALVGVAPFTRQSGKWRGKSFISGGRASVRAALFMGALVASQHNPVLKAFRDRLVASGKPKIVAIIATARKLLTILNAIIRDQKPWQSA

SEQ ID NO: 441539 - protein, 324 aa, unidentified
MSKPILGVDISKLDLSISLLIDKKYYQTKIDNNQQGFKALTKWLQKHKVTKVVACMEATGSYGKSFADFLYNNNHEVSVINPSCINAFAKSKLSRHKTDKVDSMIIAEYASKNDLPSYAPKSKALQELQDLYRCSQNFKEQYVQTQNYLENKNHLSKSACSSYNRLAKHIMKEIANIELVIDNLLANNPQLKHQADTMQTIPGIGKTTAVAILAESPDLKSFSSARQFAAYAGLTPKHRTSGTSVKGKTSISKIGSSNLRKALYFPAIVAKTHNPLFKKFTHKMSSKGKPAKVIIVAIMRKLLHVVFGVIKNKTQFNPNLVLDG

SEQ ID NO: 441540 - protein, 329 aa, unidentified
MLFVGVDVSKNRLDCAVITDDTGKLLGQRSFLNASEGIDRLLSWLRRLSGAGGASIHVVVEATARYHELVANVVVAAGVAVSLSNPARVRSFARGIGILSKTDQIDAFVLARYGQLARPKLWHPPERDVAELQALLSRLDDLEGDLRRESNRHEQARARACPEAVARSFLASMQALKAQCHTLRKTIAAHLDASKALRDDLRRLLTIPAVGPKTAARMLVLLRSRHFESARQAAAFLGLVPVERRSGRSVHGRPRLSKAGNPRLRAALYMAAVVATKLNPDVRAQQARLLGRGKAKMSTLGAAMRKLVHLCFGVLKSGGDYRVGVAAPA

SEQ ID NO: 441541 - protein, 328 aa, unidentified
MFYLGIDVAKAKLDCCLLLDHDSMKRKSKSVANTKAGFATLLEWLIRKGVSLPQLHAVMEGTGVYHEQAALALVDAGVTVSIINPAQIRDFGRGLGVRTKTDGVDSFVLARYGALLKPAAWQPPAPETCVLRALLARREAIAQDLQRELNRLEKADATETCALIRQSIDDSIDFLRKQLAKLQQDIDHHIDRHPDLRRDMELLTSIPAVGRQTGTNLLAIVRGHRFDSAEQLAAYLGLVPVERQSGSSVLGRARLSKAGPPRIRAVLYMAAVVATKYNPHVKAVYDRLVAKGKAKMAAIGAAMRKLVHLCFGVLKTRMYYQADYVKIN

SEQ ID NO: 441542 - protein, 316 aa, unidentified
MSDKAQVVVGVDVSKATLDVAVLPSSEELQVANDANGIEALVKKFQSEAVDLVVMEATGGYETAVAAALVGSGLRVAVVNPRQIRDFAKATGRLAKNDRIDAQVIAAFGHAIEPEIVRLPDEDARELEALLVRRRQLVAMRVQEVNRLGLAQGAMRKNIKAHIEWLEKQIDRLDVDITAGLRKSPAWRAKDELLRSFKGVGPVTSSTLVIAVPELGQLDRRAIASLVGLAPFNCDSGVMRGRRSIYGGRSQVRTVLYMAATTAIRSNPVIRAFYERLKLRGKPHKVAMVACMRKMLTILNAMVRQSTPWTPETNPV

SEQ ID NO: 441543 - protein, 339 aa, unidentified
MQIRSVGIDLGKTTFHLVALGAAGKVLVRKKFTQKLLLAFTANMQSSLIGLEACSGAHFLGRALRKQGHDVRLIAAQFVKPFVKSNKNDFVDAEAIAEAVERKNMRFVPIKTDDQLDLQAIHRVRDRMISRRTAVINQLRAFLLERGMVFAQTPAKLKAGMADILENAEADLTPQMRNLIDMLWGEWKLVEQQVEELNDELERISAADAGCTRIRQIPGIGPVVATAIVAAIGNGAAFRKGREFAAWLGIVPRQHSTGGKAKLLGISKRGNVYLRKILIHGARAAVLRIKRDRAPIGAWLDALDPRAPKNVVVVAMANKLARIAWAVLSSGNDYRPVPA

SEQ ID NO: 441544 - protein, 391 aa, unidentified
MKSSHRIDTPAAGAKDGRLYVAFELSKSKWLIGILLSGESKLSRHLVPGGDTAAVLQLISKKRVQAEKKLGGPVRVVSCYEAGFDGFWLDRWLGEQGIENRVLDPSSIEMPRRARQAKTDRLDLERLMRVLIRHDGGEPRVCSVVHPPSPEQEDARRLSRERERLIGERTAHGNRIKGLLHGQGVRDVEPRRKDFHERLARARTGDGRALPDRLVAEILREHVRLKLIAEQIAEVEGQMKAEREAAAPDSRAARVNQLIELKSVGEVGGEGLVNEAFWRDFHNRRQVGAYFGLAGTPFDSGQSTREQGISKSGNGRARTLAIQLSWLWLRHQPDSALSRWYKERVGDQKGRVKRIAIVALARKLMVALWRYLTQGLVPENAIVRAAAPAGR

SEQ ID NO: 441545 - protein, 393 aa, unidentified
MYLVGIDIGKLKHSFCLLEKETGEILVEPVFFENNRDGFNVLLSSFKHLPQRDILIGMEDTGHYNLALLKFLLDRNYQVALINPVATNLTRKMQGGISKNDKLDTLTICDVLSSSQRVKSYRISKYSSFDLYEQKLLTREHHNLKEEENQLLNRLQKCIDVVFPEFNSLFKSKYGIVYMDVLKEFGSADAIAHADIRTLRKCFDTGRGKKIALTAEELKEAARNSIGFPSASEATQIKHLVARIELIKEQIAEIDKKIEEFSIQNNSPILSIPGISHFSGTSILAELGDIHNYSKPSQIIKFAGVAPLTYESSQFTAQHTAITKKGCKYLRKTLYQIITAVIQYNPVFRKFYLLKIAQGKGHRCAQGHCVRKLMRVIYHLLSTGTQFDPALLR

SEQ ID NO: 441546 - protein, 413 aa, unidentified
METVEFAQVVSRGCGLDVHKKTVVATIDGEGLQRSTREFGTFTSSLTELKDWLLENGITHVAMESTGVYWKPVYHVLEPSGIKVWIVNARHVKYVPGHKTDKKDSAWLCKLLLAGLLKPSYIPPKEQRELRDLTRYRKKLVQDIASNKNRIIRILEDCNVKLSSVLSDTSGVTATKLIDKLCEGKVVTMEDIDAVYHKKIEASKEELWEACNGIVEEHHIYLLQTIRENNRHIEHLIDELNQQIKKSLSPYDNALERLREIPGLSRKTVEDLIAEIGLDMSVFPTENHLSSWVGVSPGNNESAGKKKSGRTTHGNKQVKSVLTEAAWAASRTKDTFYTARYHRLAARRGKKRAIVAVAHSILKSVYHVLKDDVPYHELGAEYLNSRIEEKRRKYLQKELEKMGYEVQLELVSV

SEQ ID NO: 441547 - protein, 359 aa, unidentified
MADGVWVGVDVSKRRLDVHVHPAEVRLAVVNNAAGHAALVERLGGLQVHGIVLEASGGYERDVHTALAKSGLQAAIVNAARVRAFARALGLLAKTDRIDAAVLARYGAIMRPSPTALPDTARAELGELLAYRRQVVAEIVARRSQLEHYRAGPLEARAQRALAALRAERAALGQEIGRAIARDPALAEPFELLTSAPGVGPIVAATLLAELPELGQLDRRQAASLAGLAPVPKDSGEQRGKRLIQGGRAEIRQALYMAVLPGLKANPVIAAIYRGLVARGKPGKVALVACMRRLLVMLNAMLRSRTPWRAASEGVAWRRPHPRPTAAAAGVVKAAAGAAGGEARLEGAGRRRHPIAASP

SEQ ID NO: 441548 - protein, 405 aa, unidentified
MDIIVDKGCGLDVHKGTVVACIMGTGIRKEVKTYTTMTNDLLRLKEWLQENGITHVAMESTGVYWKPVFNILEDRLEVILVNARHVKNVPGRKTDVQDSEWLCKLLRSGLVKGSFIPPRDIRELRDLTRHKRKLIQAITAEKQRVEKVLEDANIKLSSIASDTFGASGKRIIEELIKGKLRAEEMAELSKGRLRQKREDLKEALVGEVREHHKFMIKASLRHIGAMEKVLSEIERRIQQKINRHYKEEYGLLQTIPGVKGEASTLIAEMGVDMERFPSEMHLSSWAGMSPGNNESAGKKKPGSTTYGNKCLKTMLTEFAWVASKTKDTYLRSKYHSLVGRRGKKKALVALGHKILIMCYHILKYRHPYKELGGDYLDNRRKDKITRSYIKRLNHLGYEVTLKEAA

SEQ ID NO: 441549 - protein, 344 aa, unidentified
MQIARIGLDLAKYVFEIHGVDARGKTIVRKTLRRHAVSTFFANLPPCLVGMEASNGAHFWAKALSELGHDVRLISPQFVTPYVKSNKNDRNDAEAICEAVGRPNMRFVPIKSAEQLAVQAVHRIRSRLVADRVRLVNQVRGLLAEHGIVVAKDIANLRRALARIVDDNEDRTLNPLVRGLMAELREELTELDTRIAGYDRKIRELYRNSQICQRLGKVEGIGPVTATALVAAVGDRRSFKNGRQFAAWLGLVPKQRSSGGRARLSGISKRGDRYLRTLLIHGARAALGRVRDKQDPRSLWLGKMRQRRHPNIVAVALANKNARIAWSLLTSDSVYDADLSVRAA

SEQ ID NO: 441550 - protein, 379 aa, unidentified
MEISSSTLPAVAAERATMFVALELSKSSWLVALHSPVADKVSMHRFVGGDVAGLLALIARKQTQAEARLGRTIRVLSCYEAGYDGFWLHRLLCARGIDNRILDAASILVDRRSRRAKTDRLDAAGLLRTLMALDRGESRVCGVVRVPSVAQEDARRRSRERTRLVVERGQHSNRIKGLLMTLGVRDFEPTRRDWQERLGGLRTADGRELPACLKAEITRECRRLHQVIVMIAEVEAEQAAALDAEEGRAAQLIRLRGIGLVSATVLADEVFYRDFRNRREVAGYLGLASSPWASGRVQRDQGITKSGNPRARRTAIELAWLWLRHQPGSLLTQWFRQRVGTTRGRMRRIMLVALARKLIVALWRYLSDGLIPDGAELKA

SEQ ID NO: 441551 - protein, 342 aa, unidentified
MKDTMIGVDLAKNVFQLHAASMTGHLKFRKKLSRPQFREFISAQPPAVLVMEASGSANYWARELTRLGHEVKLIAPQYVKPFVKRQKNDATDAEAIVIAAQRPEMRFVPPKSENQQARAILFRSRERLVNQRTELVNGLRSVLYEFGHTIPQGIGNLSRGNEILEDPNCDLPDLVRQECRDLFELIEEITVRIDAKLKRIKALSTETDTAKRLQTMPGVGPLSALAIEAFAPPLETFNSGRDFAAWLGLVPRQHSSGGKPRLGRMSKAGQPDIRRLLIIGAMSRLSWLGRKSIPKGSWLERMLARKPKMLVAVALANKMARALWAMQTKKENYRDPTQTVAA

SEQ ID NO: 441552 - protein, 345 aa, unidentified
MTEILKQAVGMDVSQNELVVSLGRVTRSLEPEIYAFKTFANKLSGFAALEIWVNKNTDQQVPVRFVMEATGVYHEKLAYYLSEQNREVSIVLPNKICNFAKTLETKTITDKSASQAICRFGLEKKLCIWQPPKKIFRDLKQLTRERDQIIAERTVAKNQLHAENAEAFPNKRSIARLNERIQLFNRQEKEIRYEIAEIIKQDEELVERIKNVTTIPGVAKLTTVIVLAETNAFDLITSRKQASSYAGFDIVEKQFGTSVKGKPKMSKRGNRHLRKAMHMPALAAIRHDERFKAIFVRLVSKHGIKMKAAVAVQRKLLELIYTVWTTNTKYDPSYLQKMIENDRAA

SEQ ID NO: 441553 - protein, 368 aa, unidentified
MMAGGTEDKEHAMSQKLDTSPAVIGIDIGKNSFHIVGQNQRGAVVLRQKWSRGQVEARLANLPPCLIGMEACVGAHHLSRKLQALGHQARLMPAKYVRPYSRGQKNDYRDAEAIAEAVQRPTMKFVATKTVDQLDLQALHRVRERLVSQRTGIINQIRAFLLERGIAVRQGLRFLRLELPGILATRADVLSPRMMRVLEDLSGDWRRLDTRIEGLTSEIEALARQDQHCERLMTVPGVGPIISSAMVAAIGTGDVFSKGRDFGAWLGLVPKQLSTGDRTILGSISKRGNRYLRVLFVQAAWVVLVKLGPEKWERYGLKSWIEAAKKRLHHNVLAIALANKLARIAWAVLNKGRAFACIKTDAMASCPA

SEQ ID NO: 441554 - protein, 347 aa, unidentified
MLHAGLDLSRKKLDVCLLSEQGEHLDQLVSPPDGDALGTLARRIGETHRQPVCAVIESMTGARFVHDTLEQAGWEVEIADAQKVKGLAPLACETDKIDSRVLAVLSQRDLVPAIWLPEPSVREERELARFRLHLVKHKSALKCRVHSTLINFGKPCPVTDLFGVEGRRLLERLQVPEPWRGNITASVELIDDLERQIAEINRRLKEGHADHRYIPLLMSAPGIGWVLAFTIAAEIGEIDRFASPEKLAGYTGLCPRVNQSGDKDRRGPLTKHGPSYLRWALLEATMQALKHPAYAQRYQRNKRRLGKQRGAKVAQIDIARRLTHAIWHMLSRNQQFAPRGAAFRLAA

SEQ ID NO: 441555 - protein, 400 aa, unidentified
MIDIDAVDVFLGLDVGKSNHHGHGLTPAGKKVFDKALPNAEPQLRAVFDKLKAKFGTVLVVVDQPASIGALPLTVARDTGCKVAYLPGLAMRRIADLYPGEAKTDARDAAVIADAARTMPHTLRSLELADEITAELTMLAGFDQDLAGEANRTSNRIRGLLTQFHPSLERVLGPRLDHPAVTWLLERYGSPAALRKAGRRKLVEVVRPKAPRMAQRLVDDIFDALDEQTVVVPGTGTLDVIVPSLAKSLAAVHEQRRALETQIEALLEAHPLSQVLTSMPGIGVRTAAVLLTTIGDGSSFPSAAHLASYAGLAPATRQSGTSIHGEHAPRGGNRQLKRAMFLSAFAALHDPASRTYYDRCRARGKTHTQALLRLARHRISVLFAMLRDGTFYQPRTPRLA

SEQ ID NO: 441556 - protein, 366 aa, unidentified
MNSISHVGLDVHKRTIAVALLRPDTGELIQWQIAHEPTALRRLIRKLKTHMPLSCAYEAGPTGYALQRQLEAAGIPCLVAAPSLIPVRSGDRIKTDHRDARKLAELHHAGLLTAVHPPTEDEEAVRDLCRCREDAQLDLVRARHRLGKFLLRRSLIFHDGHQWSQQHHYWLHGLKFSRAADRVVFEDYLLAVEQQEARVAALDERLAEAAGQEPYKTPVAHLRCFRGIDTVTALCLTAELHDVRRFQSAPALMAYLGLVPSEHSSGEHRRRGAITKTGNRHLRRLLIETAWHYRHKPAVGVRLAKRRREQPPAVIARADRAQQRLCRQYRLMTGKGKHHNTIVTAIARMLVGYLWETLREAQPGRA

SEQ ID NO: 441557 - protein, 330 aa, unidentified
MYLGIDTHKHYSQVAVVDDDGNLQDEIRLQNEDLATLAQEYAGGEAAIKASGTYRPIYEMLDEHLDVTLVNPAKTRIIADATVKTDRVDAKRLAHMLRADMLAESYVPPDEIRELRDLVRTRKSLIEERTAEKNRVRAVLTRTNNTYDSELFGPTGREFLAELSLSEADRTIVEAHLSVIEELTEQIEEIEDLIEMKVLEYSETQLLLSIPGVGNFTSAVIVAELGEIDRFDRHEEVVSYAGLDPTVHQSGETEVRGSISKEGPAVLRWALVQAATNAVRYDEYLGNFYTRLKERKNHKIAIVATARKLLVSVFYMLTRKETYNPPEVSA

SEQ ID NO: 441558 - protein, 390 aa, unidentified
MQVIADLPKTPSAIRSDLGAIFISLELSRSTWLITSLSPGGGEKMSKHSVPAGDICMLLARFSELRRKAFARTGKSLPIIVIQEAGLDGFWVHRLLQNEGIESHVVDPASIATSRRRRRAKTDRIDGEALLRTLLAYKRGEPRVCAMVKAPTPEEEDRRRLCRERKVLTNERVLHVNRIKGLLFSQGVSGYEPLRRDRRQRLDEVRTGDGRPLPKHLKAQISRELDRLELLIEQIKAVETERNALLAAQRVAAPAPAAMLLDIKGIGPEFAAVLWSEGLFRHFDNRRQVASYAGLAPTPWQSGSVAREQGVSKAGNPRLRTTLIQLAWLWLRHQPQSALALWFEERVRRNGGRLRKTTIVALARKLLVALWKYVTAGVVIEGAVMKTVGR

SEQ ID NO: 441559 - protein, 416 aa, unidentified
MNAVGIDVSSRKSTVAVLRPLGEVVCLPFDVSHDADGLASLAEKLKAIDGETRVVMEHTGRYYEAVEKALHEAGLFVCAVNPLLIKEYGANSLRRVKTDKADAVKIARYALDNWADLRDFTPMDAIRYDLKTLNRQFQLASKQRTASANNLIALLEQSFPGIRKCFDSPVRSDGTQKWVDFAHSFWHVDCVRKQPFPAFCERYRKWCKRHADLFKQSNAEEVYALAKRAVVLTPKSKVVKVLVQEAANQLISISRSVEVYRAEMDRLAAMLPEYPVVMAMYGVGKSYGPQLMAEIGDVRRFERKQALVAFAGIDPMPNQSGDKNVRSNKSSKRGSPYLRKTLFNVIRTYLQCAPQDEPVFQFLNRKRAEGKPFYVYMLAAANKFLRRYYAKLRDYFASLDTLQPVAPIPTILKAAL

SEQ ID NO: 441560 - protein, 339 aa, unidentified
MQANAVADPPQPPHFYMTKTSQMTPAAAPAVLGVDVASKHLDAAAYGSNGVVRFGNTDAGVAKWLRTLPAGSVIALESTGRYHERLALAAHAKGFVVYLLNPRDVRHYARAMGMRGKTDRLDAQILARYAAHERAELRAWVPPSPELRRLDDLVRRRGTLVKHQGAIKQSVVDCGELRASMKPLLAQFTKLIDAIDTQIAQAAADLNLDSEGFERITSVPGIGLLSGSVLLGLFQRLAQRGADAVIAFLGLDPRPMDSGQKIGQRRLSKRGPAEWRRLLFNAAMSASRTKAWKPHYDRERAKGLPRTAALNVLARKLVRVAFSLFKSNQHFDATKIALA

SEQ ID NO: 441561 - protein, 372 aa, unidentified
MNHNTIYVGMDVHKENFSLCAYTLEAEKASYHQRTEADYKEVLKYLEFLRSIYGNDVNFICGYEAGCLGYTLYHQLSANNVNCVILAPTTMLEQRSKKRIKTDKRDAEIIAKCLAQHNYSSVHIPTAKDEETKEFLRMRDDHKLALKKIKQQILAFCLRHSYRYDGKSHWTAAHLKWLRSLTPEALYKEILDEYLLTYQNLSDKLERMDKRIEELASLEEYREAIKKLCCFIGVRTHTALSVLVEVGDFKRFASAKNFASYLGLVPGENSSGENQTRLGITKAGNRHIRLLLTEASQCYARGKIGFKSKELKSRQSGNTPEIIAYADKANERLRRRYYKMILGSCKKHNVAKTAIARELACFMWGMMTDCIA

SEQ ID NO: 441562 - protein, 413 aa, unidentified
MILLQNSLLVGIDVSLNDNKVRILHPDGTSLSKFVVKNSVPGAKTLSQRVTGIAEKNNFDSIVIGLESTSVYGDPLVYFLKQDASVNRFNTKIHVLNPTQVNKFKLMYPDLPKTDDIDAWVIAEHLRFGRINKEVYMDDRYKALQKLTRARFHTVQNLAREKNWFLNNLFLKFSSLAQDKIFSDRYGATSSSIIEEFLSVDEISYMPIEQLVDFINKKGKGRFQNPEEIAAAVQKAARSSYRLPKTVTDSVNQVLAVSFQAMRAYKEQLKIFDKAIEEQAKLIPNPLPSIKGIGPVYSAGIIAEIGDIHRFKDQAALAKFAGIAWNKHQSGNFTAAHTRLIKFGNRYLRYYIMEATNKVRMHDHELKRFYDLKYSQTPKTPHKRALALTARKFVRLVYSLLHDNRLYTPPKGK

SEQ ID NO: 441563 - protein, 342 aa, unidentified
MQQAAGCYRLFVGIDISARTFTAASMPSGQTPSKGQTFNQTHSDFAQLQRHLLSLEPDPTAILVVMEATGTYWMRLALDLINAQIAVAVINPAQAHDFAKALLKRSKTDAIDAQSLAELAARLQPQPWTPPPAVSSELQQRLVHRDALVNVRTQFRNQLHALEQQPIIIERVRTRLQELIAHLDEQIAEVEQEIGAALEQDQAWASAAAHLASIKGLGMLTIAWLLTATSNFTLTTTPEAAANYAGLVPQLRQSGTSVRGRARIGHSGHARLRRALYMATLSAIHHNPVIKAFYQRLIAKGKAKKVAVCAAARKLLRIAWAVASKKHAFDPNYAQRHVARAA

SEQ ID NO: 441564 - protein, 342 aa, unidentified
MKGYHYVGFDVHKKTIAYCVKTVEGKILDEGVIPANRRGLSSLTQRLPRPWSGAMEATLFTGWIYDFLLPHAQELKVGHSYQLRAICASKKKNDRVDARKLSDALRCDLLPECYMAPAKVRELRQVLRYRNLLVRESVRFQNKTAGLLMEAGAEYNKGRLTGDRYFHELLAGLAEVPVSVKDLLGMAHESVKWFNSLQRRLVAGLREHPLLQDRVERLMSIPGVGEITALTWALEIGEPHRFGAVKRAVSYCGLCSGQNESAGKSRRGPLSKQRNKHLQTILVEAAKVGVRWNPQLAAVYEQARFRGSNQNEATLAVARKLVAYLLYVDKSGKLFVLNSDRA

SEQ ID NO: 441565 - protein, 405 aa, unidentified
MGDAIEAAWVGIDAGKLSHHATLVDAEGAIVWSRKVRNDQAAIEQLIAKATATAKTVRWAVDLTSAGAALLLALLMAAGQRVVYVPGTVVNRMSDTFAGEAKTDARDSFVIAETARLRRDFAELSTPNELVAELALLTGYRADLLADWVRGINRLRELLTRVFPALEQSFDYSTRSALILVSHYCTPDVIRDADTDELAAYLQREGAHRPSIPGMVAKAQTAAAAQTVALPGEATTAALITRQARKLLDIDREIKNLDKQLTERFRDHPQAHIIESMPGMGPILGAEFIAITAGDLAAFGTAARLATYAGLAPVPDDSGKRKGVMRRPRRYHRRLRHVFYMAAFSSLKSDGPSRDFYTRKRSERQRHTRAMIALSRRLVDVLWALLRDNRTWQTQPPTPLPATAA

SEQ ID NO: 441566 - protein, 421 aa, unidentified
MDDIGDELELVERVCAIDIGKTALVACVRVPHDTLPGRRVQEVREQATTTGSVLGLADWLRCQQVELVAMEATSDYWKPVYYLLEAQGLRCWLLNAKHVKNVPGRPKTDKLDAVWLAKVVERGMCRPSLVHPRPIRRLRDLTRYRRSLVRERSREKQRLEKVLEDAQIKLDTVVASLHSVSGRAMLEAMIAGERDPHVLAGMARGVMRRKIPQLEEALRGHFDDHHGFICATMLRRIDALAADIATLDAKITELVDPHLEAIQRLDEIPGVGARSAQELIAEIGVDMAAFATAAHLVSWAKFAPIDAQSAGRRKTSSTGKGNPWLAATLGEIVAALSRTDTFLGDRYRRLARRRGKKRAIVAVGNSVLTIVWHLLSDPTAHFHDLGSDYYESRINTQRRQRDLVRQLEHLTGQRVTLQPAA

SEQ ID NO: 441567 - protein, 377 aa, unidentified
MQANDTTYVGLDVHKNSIQVALLLPGEHEPTAWGEAHTTEAIRRLARKLRRRAPGALECCYEAGPTGYVLQRRLRDLQIGCTVVAPSLVPIRPGSRIKTDRRDAVKLAELFRAGLLTEVHPPSESEEALRDLFRCREDVRQDLGRARHRMSKFLLRRHFIYRQTKHHWGTRHMAWLRALRFEDRASQAVFESYLLSLDQLNERLDQLHRELGEMATQEPYAQAVSWLRCFRGIDTLTAIGIVAELHDFRRFHSPRHLMGYLGLVPSERSSGEHEQRGPITKSGNGHVRRLLVEAAWHHRYKPRVTGPLLKRRQGQPARILALADRSQERLYRRYLRMSARGKPSPKIIVAMARELVGYLWAALHPDAQLAYVENQTT

SEQ ID NO: 441568 - protein, 355 aa, unidentified
MNDSKFIGLDVHKTSISAAVLDHDGKLVMQSIFATHAAAILSFIHGVGGSLRVTFEEGTHSSWLYDLLRPQVSEVLVCNPRKNSLLKSGNKSDQIDARKLAELLRAGLVSPVYHGQTSTVTVKELGRTYTALTEDTTRVMSRLKALYRSQAIATEGKKLYTKRRREQWLKELTQAGRRYRAERMFEQLDALQGFRRQARRDLFVECRKHAATAILTSIPFLGPIRAALLIARVQTPFRFRGKRQFWAYCGLALETRSSADYHFIEGELRRAKKPVFIRGLNLNHNHDLKNIFKAAATTASACPGPFRDYYETLLGKGMKPEMARLTLARKIAAISLIVWKKGERFDPEHLKAQAA

SEQ ID NO: 441569 - protein, 338 aa, unidentified
MYEHYLGVDLHKRRTYLVLMDAHGQVKDQRRLANEAVAAYAAQLPSSTFAVLEATGNWSYMYDVLSRQVDQVVLAHPKQVRAIAAAKVKTDKIDATILAHLARVDLLPTAYAPAVGIRELRETVRHRAKLVRERTRHKNQIHRLLSLYNLQPPCKDLFGKRGREFLRQVREQLSLIHQHLLDDHRLLIETLDERIAAMNQSITLWANQDPRAQLLMTLPGIGEYSAAVIVAEIGAIERFPDAKHLCSYTGLVPSVRNSDSKVHHGHITKEGSPWLRWIMVNAAQRAPAASPYLAVFFERVAQKQGRKTARIALARKMLSIVYAMLRRSEPYREMNLPG

SEQ ID NO: 441570 - protein, 415 aa, unidentified
MEGLSPLHRRVAGIDVHRMLHVVTVLIEQPDGSVSKHSREFGGFRRDCRALAAWLAELQVQLVVMESTGIYWKSVYAHLENAGITAWVVNAHFIKHVPGRKTDMLDSEWLAVLARFGLVRGSFIPPKDLRELRLVSRYRRKLSATCASQINRLHKMLDDGGIKLGAVVADIGGVSARAMVRGLIEGQTEAVLLSHARGALKRKTEELAASLDGDLSARHLFVMRHLSDSIEQMQRQLADIDAYLMAAMQPYAWAHNLLQTILGIDEIAAALILIEIGDDMARFASPQRLACWAALSPGNNESAGKRKSGRTRHGNNVIRYILCECANAARMTRSTLAAKYRSLIVRKSHKKAIVAVAHKMIRLIYLLLSRRQPYIDQGIDYAAMSAKKNAPRWIKQLRAIGKWPTASAPAANAAI

SEQ ID NO: 441571 - protein, 351 aa, unidentified
MDKITRVGVDLAKRQVQVHAVDGGERVVLARAMGRERFAQWLAQLPAGCVVAMEACSGAHHWARRMAALGLAPRLIAPHFVTPYRMEGKGGKNDAADAAAICEAASRPKMRFVPPKSCAQQGVLAIHRLREGYKEERTACTNRVRGVLSEFGLVVAQSAEQLRCALPLLLEDASNELTADVRLGLERAMTHWRELDEQIAWCDQRIAAHAREDAQAREAMKIRGIGVTGASALVASVADFRQFERAAQFAAWIGLVPRQHSSGGKTQLGRITKRGDDYLRTLLIQGARSAVANAARHDDPVSRWIVQLLARVGWQKTLIAVANKNARMLWAVLARGRSFDLHHVPRHPHAA

SEQ ID NO: 441572 - protein, 340 aa, unidentified
MGDITTIGLDLAKSVFQVHAIDEAGKVMLRKRLRRSQVLAFFARVPPCLVGLEACATAHHWARELIALGHEARLMPPNYVKAYVKRNKHDVADAEAICEAVRRPSMRFVPVKMADQQSALMMHRARDLLIRQRTMLVNALRGHLAEFGLIEGQGLHKVTRLIAIVMDETDGRVPDIARQVLKVIVNQIEDTQTRIAGLETQVIAWHKSNPVSQRLATIPGIGPIIATAIAATVADPNIFRSGREFAAWLGLVPRQNSTGGKARLGGISKRGDSYLRRLLVNSAHTVLLCSKQARNDPWLTSLLSRKPRLVAAVALANKTARVAWAVMSRQDTYRHAAVAA

SEQ ID NO: 441573 - protein, 391 aa, unidentified
MSMYFIGIDISKYKHDCCIISAADQKVVSKVTIKNNKAGFNELLTIIHSLANPADIRIGFESTAHYALNLELFLENSLLTFMEVNPVLISEYKKSKTLRRTKTDSVDCESIARWLMTVEYKPHSKGFYHAYSLKSLTRLRDKLIRQRSFYLVKITNVLDHTFPEFKPFFNERLSKTALYLLENYGSAEKMARMNSASYEKLRSLSRGKFSPQQFLRLKELAANTVGVNNSIFDVELNSLLSLYKSLVKEIDTIEKEINKLIEEVHPHYMSVPGIGPLSAAVIYSEYGDISNFTNPGQMLAFAGIEPGINESGTESHGGKMVKRGSSQLRYTLINCCLPLIRFDMTFATYYAKKRGEGKPHRVAITHVAKKLIRVIYALESQDIDFNAQKLR

SEQ ID NO: 441574 - protein, 350 aa, unidentified
MEYIAFDAHKHYTLASVVTPDGQLVREERIEHDRGTLREFLERCERGSPVAVETIGNWYWIVDEIEAAGCLPRLVHARKAKLMMGEINKTDRLDVRGLNRLQRSGTLPTVWIPPGELRDQRDLPRTRMVFVRQRPQLKNRIHATLAKYALHDLDVSDLFGVRGRALLRERFELLPPHTAYASQQLLGQVEELGRQVHAFEQRIQATFKLTPAIQRLLTLPGVGYTLAVVIALEVGDVARFASAERLAAYAGTTPRVHASGGKSRFGRPRPDVNRYLKWAFVEAANAICLHRGRAADRHVSRLYERLARRKGHAKAIGAVARHLAEATYWMLSKEEAYREPKSVDRVVHGG

SEQ ID NO: 441575 - protein, 343 aa, unidentified
MNSTTIAVDVAKSVFEVAVSEQPGEVRERQRLSRERFRRFLAERPPATVLMEACGSAHHWARQAQALGHRAVLVPPHVVRPYVLRNKTDRTDTKGLLEAFRNEDVRPVPVKSETQQALAALHRLRSMWLAARTVRINTVRGLLREFGLIMPIGAHHVVPHVATLLEDADSAVPGLLRPALADATTDIREIEARLRAIEHQLESVASENVVVRQLRTIPGIGLLTATALVATVGNVARFPSGRHFASYLGLTPREASTALRRRLRTISKRGDTYVRMLLIHGARSVLCHAKTKTAPPPDRLRAWALQLERLRGHNKAAVALANKLARIVWAVWRHGQDYRMPVV

SEQ ID NO: 441576 - protein, 343 aa, unidentified
MDHFAGLDVSVKDTSVCIVDDAGRIKREVKVASEPDALLTVLRNPAYRFKRIGLEAGPLSQWLFSALAEADLPVICVETRHMRAVLKAQINKTDRNDARGIAQMMRVGLYRPVHVKTLRSQKLRMLLTHRKLLQAQAIAIENDLRATLRNFGLKVGVVGAVKFETRVKELVDNFPDLAVLVEPLLIVRRVLREQINILHRRVLVAVRNDEVCRRLMTVPGVGPVVALTYRATVDVPARFRKSKSVGAVFGLTPARDQSGESDCPGAISRCGDEMMRTTLYEAAQVMLLRSAKWSWLKAWAMKIARHRGMKKAIVALARRLAVIMHRIWIDGTEFRWTREAAAA

SEQ ID NO: 441577 - protein, 309 aa, unidentified
MTLPQNFIGVDVAKDWIDVFCFSTRKRERIVTTKPALARFARAARGCLVVLEASGGYERPLTEALARAGTDYARVNPRQAREYARASGRLAKTDRVDAEVLAGMGRALELKPTSPVSADRSRLADLVARRDDLVTTIRREKNRAGQTRDRWIAREIARLRKVLQGHLAAVEAQIETLVATCEGLAEQSRRLRSVPGIGPAVSAALLARLPELGQLDRRQIASLAGLAPHACDSGTHRGKRRIWGGRADLRRALYIAAFIASRYDPTLKAFRKRLQDAGKPFKLAITACARKLLTILNAMFRDQSDYRAA

SEQ ID NO: 441578 - protein, 387 aa, unidentified
MAQQLDDLSRSPTPLDQGSTIITVIEMSQATWLVAGIVPGIERDPLKKIEPNEVELLCLLMRWRAEAMKKGRTITRIVVAFEAGRDGFWLARWLRVRDIESYVIHPTSVAVSREHRRAKTDRLDTGLLKRVFIGWLRGEPDHCHMAAIPTLAEEDAKRPNREREGLVRERTRLVNRMKSCLVRFGVRTFKPTLRNAPDRLATLHTPEGVPLPPNTLLELRRDMARLRFVMDQIKEVEAARAQGLKQAPQEKTHAMVNLLARILGIGIDTADMLVHEVLARNLRDRRAVARYAGLTGSPDESGSRRREKGLAKAGSARVRRGMIQLAWRFLLFQKESALAQWYRARTADARGGTRKTMIVALARKLLIALWRMLTTGEVPAGVVLRAA

SEQ ID NO: 441579 - protein, 449 aa, unidentified
MSTLCSAEEKPSYAARIGLDWADQKHFWTMLTADGKRTRGELKHTPEAIEIWAVELARSFDGRPIALALEQKRGALVAILSKYAHVHLFPIHPTKLGHYRKSVCASGAKSDPSDADLILDYLVKHPEWLFCLMPDTVETRSLQFLVEERRKLVDQHTSQLQILIYWLKQIFPQMLEWFDGMSTPLVGDLLKRWPQLPALQKASQKTLRKFFAQHNCRSEERIQQRLDQIGQAVPATTDAALLNTGDLCIHIAVQLLAALRAGIAEFDRQIEAVYQTHPDRSLVASLPGAGPALEPRLIAALGTNRERFESASSMACCFGIAPVTESSGNSHWVHWRWACSKFVRQTFHEWANCSIRSCGWAREHYDKQRLKGKGHHASVRSVAFKWIRILFRCWRDRVPYSEQRHVEALRKHGASTSTPVAVIVNSTSMLSGVQWESCGGFSKLAKVSS

SEQ ID NO: 441580 - protein, 349 aa, unidentified
MQHYAGIDVSLELLSVCIVDAKGKIAKEAKVGSDPDTLVAFLRGLDLAIDRIGLEAGPLSQWLHAGLTSAGFEAVLLETRHVKAALSAMTVKTDRKDARGIAQLIRMGWFRAVHCKSAGSQEVRALLVARKLLLSKLLDVEFSIRGILRGFGLKMGMVTRKRFEARVRELYAGHAMLEQICSAMLTARSTLQTEYAKLHKALLVIVRKDEVCRRLMTTPGVGPLVAITFKTGVDDPSRIHKSKAVGALFGLTPKKYQSGETDVTGGITRAGDEMVRTALYEAASVLLSRVTRFSALKRWGMDVAKRRGTKRAKVALARKIGVILHRMWVDMTSFRWTKGAPTTMRLARV

SEQ ID NO: 441581 - protein, 360 aa, unidentified
MAKAKTVVGLDVHAAKIVAAVLDAETGQLNWFQISGDAVEAAGFCAGLPRPVRVAYEAGPTGYGFARELARRGVECVVAAPSKIPRASGDRVKTDRRDAEHLVRLLLAGKLHPVRVPGPEEEALRDLVRAREQVRVDLMRSRHRLSKLLLRHGIRFDDGKAWTDRHRAWLLTITLEWAAAQSTLLDCQGAIDALCHRRDALEREILALLPGSPWATQIGRLRCLRGVDSLTAVGLCSEIGDFERFAKPEQLMNYIGLVPCENTTGQQRRLGSITKTGSGHARRLLVEAAWHYRKRPAIGKALTERQDSQPPEVIAVAWSAQRRLHRTWTRLEARAKRRTIVAVAAARELTGFAWAICQIE

SEQ ID NO: 441582 - protein, 370 aa, unidentified
MPSMPQSLVLSQASSDPDEVVVGVDTHKDVHVAAVLTALGVLQETKTFPATAAGYQALLAWAGTFGILRRAGVECTGSYGAALARYLRAAGVEVIEVNQPDKATRRRRGKADTLDAESAARAVLSGRASGSAKAGDGPVEMLRMFKLAKASAVKARTQTINQLKAVLVAADPALREALSGLSTTMLIRHCAQLETTTPQDATDAAMDVTDAAIYTLRLLARRILALSEEVHDLEQRLTDTITSHTPVLLTHRGVGPDTAAALLIAAGDNPDRLRSEASFAALCGVSPQQASSGKTTRHRLNRGGDRQANAALYRIALSRLRWDARTRDYLARRITEGKTRREAIRCLKRYIAREIYQILTTPPEPQPSAA

SEQ ID NO: 441583 - protein, 347 aa, unidentified
MKFYTNTHKHYCGIDLHTKWMYLCILNQEGDVLYHRNLRTDREAFLRAIAPYREDLVVAVECMFSWYWIADLCADEGISFVLGHALYMRAIHGGKAKNDKIDSHKIAALLKGGLIPMSYVYPKQMRATRDLMRRRNHFVRKRAELLAHIQNTGSQYNLPPLGRIAKKGGRNDLVELFPAGCAQKNIELDLALIDAYDPLIDALEGYIVKTANGHDPVALALLKTVPGIGKVLSLVILYEIENLERFSRVQELVSYARLVKCARESNGKKSGSSGKKIGNAHLKWAFSEAAVLFLKGNEPAQKYRDKLANKYGKGKSLTLLAHKLARAVYFMLKNKVAFDQEKFLRPE

SEQ ID NO: 441584 - protein, 389 aa, unidentified
MYFVGIDISKYKHDCFITTQAGDVILNDLTFSNNRDGFNELLSVLTSLDHNQEIRIGFEATGHYALNLKLFLEETHYSFMEFNAVLLSKFNHSQTLRKTKTDAIDCSSIARWLMTVEYKPYPIGFYHMYSLKSLTRLRDSLVRQRSFYLVKITNVLDHTFPEFKPFFNNKFSKTAFFILKKYVSADRIASLTSRSYNDLHNISRGKFSLQKFIKLKELAKNTVGVSNSIFESELTTLLSLHQNLDSEISKLESQITTLVTVLERPTMTIPGIGPLSAAVILSEYGDVCRFSSPASMLSFAGLEPGYYQSGISSHSGHMVKRGSSLLRYTLMNCCMPLIQYNLTFAEYYHKKRLEGKPHRVALSHVAKKLIRVIYTLETNNIAFDSAKLI

SEQ ID NO: 441585 - protein, 400 aa, unidentified
MATRKYDRPRVLAHRRPSGHIEREVTYVIAGIDTHKDTLAVAVVDDSGRLVAGGDVPNTERGFAQLVDMFTAHHVQRVGIEGSGSFGRAVAVHLALCWQSGQPVAVVEVPTLMTSRERHGQLGKGKTDPVDALAIARITTREQQLPPVRLTVGAAADLRALLDYREDLVRERGALVNRAHAELGGLRPGYQQQIPILTTRARVRAAVDLLGDDSSIRATLCRRRLERVIAIDAETAELKRQITRLVAAADTTLTDLYGVGPLVAARFLAEVVDIRRYPNRNAFAAANGTAPLPASSGRTVRHRFNPGGNRQLNRSLYTIALTQIRGDTEGRAYYERKRAAGKTKREALRCLKRRLSDIVFTTMRHDAAGTDASSDQASPPVWPVLVGVGAVDANEARLTA

SEQ ID NO: 441586 - protein, 310 aa, unidentified
MDEVYVGIDVSKDRLDVHVAPRGEAFAVARNGKGLAELCGRLTVLRAAIVAVEATGGFETVVAASLAGARLPVVIVNPAQVRAFAKALGERAKTDPIDAAVIARFVAATKPPIRPLPDEATRLLADLVGRRRQIVEMLAAERQRQTRLTARHLARSLARLIAALERELDTVDAEIATAVQGSPAWRAREDLLRSVPGVGRVVAHTLIAELPELGSLSGKEAAALVGLVPYTRQSGRWKGKSFIGGGRKEPRRMLFLAALSAARHNPVLAAFYERLLAAGKPKLVALIAVARKLVTILNAILKSNTPWQIA

SEQ ID NO: 441587 - protein, 312 aa, unidentified
MADQVFAGIDVGKDKLFVNIYLDSQVRDFPNTHSGLERMSRFLIKNAVDLVVMEASGGYERKPASDLRACGLSVAVVNPTYVRRFAQGMGTLAKTDTIDARLIAHFASVKQPKPQAARTVEEEELAALVERREQLVSLLSVEKNRLSKASDYSKNSIQNSIQFLAGQIDTIETEIKVLVAKSPERQAKLHCMSSFIGVGDVTAVTLLTEMPELGNESREHIAALAGVAPINRDSGKMKGKRRTYGGRARVRRTLYLAALSASKHNPIIRAFYERLLAAGKEKMVALVACMHKILTILNAMLKKGELFNPISA

SEQ ID NO: 441588 - protein, 328 aa, unidentified
MQTQTVPLTIGADVAKDEIVVACEEQHFAPHGIANRRPALVAFLKTLPPGSRIGMESTGDYHELFATLAHKMGFVVYVLNPQDTRHYAKGVGQRGKTDRVDAKLIARFVDREHAKLHARIPPTTEQRQLDRLLKRRAKLSSIKAALGQSLKGLSGFSTELKALVERIQRVIVRIDANIKALIEASTERQQNYTRLLSIPSVGSVVGSGVLVHLERLPFANADAFVAFTGLDPRPDDSGRHHGRRRLSKRGPSELRRLLYLAAMSAAHTKTWKPLYEHYRAQGLPKTAALVVLARHIARTAWSIYTHKTTFDAQRLTKQPSTRNAPQRA

SEQ ID NO: 441589 - protein, 341 aa, unidentified
MNHYAGIDVSLEESSICVVDGSGKIVREAKVSSEPEALISWFGSLGLGLERIGLEAGPLSQWLFARMKKAGLAMELLETRHVRKAFEAMPVKSDRNDARGIAQLMRLGWFRPVHCKSMEAQETRSLLTARKLVQSKLRDVENSLRGILRGFGLKVGKTTEQKFAGRIQELVMGHPHLEMIAKALLAVHEVLRDEFKGFEKQVRKMARSDTRARLLMTTPAVGPIVALSFASGIDDPARFKSSKQVGAHFGLTPKKYQSGETDYTGRISKIGDSSVRTALYEAAHIMLTKPVKGCSALKSWAMRLARRAGMSKAKVALARKLAVIMHRMLVDGKPFNGVAEA

SEQ ID NO: 441590 - protein, 363 aa, unidentified
MTTIAQPAIEITGGVDTHKDTHTAAVIDAAGRELGSRQFPTTPVGYRALLAWLRSFGTLVMVGIEGTGVYGTGLARLLAQEDVPMAEIDRPDRKSRRWQGKSDPVDAYAAARAALARRRTGVPKQRDGRVEALRSLRVARRSAVQHRADLVRRIKALVITAPDEVRTALRRLADKDLLAVCAGFRPDAGRMAEPSVAAKAALRSLARRHRDLTTEIAELDELIAPLVEQAAPDLLALNGVGHEVAGQLLVTAGQNPERLKSEAAFAMLCGVAPLPASSGRTHRHRLNRGGDRQANSALHRIVICRLRWDQRTKTYVERRTKEGMSKKEIMRCLKRYVARDVFHALTRQNTRATTPDQPLRAAA

SEQ ID NO: 441591 - protein, 323 aa, unidentified
MAVVVGIDIAKRTFDLAMLQPNGKYRTKGKLANDKAGFTVLADWLQRHAEPEAWIVVEATGIYHEALAEYFHALGYRIAILNPAQVARYAQSQLQRSKTDKLDAKLIATYGQLHRDQLRAWQPEPLSVRQLRALTRRLEDLRSLRQMELNRLEVSPENVQDSIRAVLQRLDEQIAWTLEQIKRHIDDDPDLRGKRDLLVSIDGIADKTAALILAELGDIDRFTHARAVTAFAGLDPRLQESGTFHGRTCISRTGSARLRTALYLPAVVALSHNPAIKAQAERLKARGKKGKQTVCAAMRKLLSIAYGVLKSGKPFDPALAVAR

SEQ ID NO: 441592 - protein, 401 aa, unidentified
MKRLSGGIDVGSESHHITILDDEDHILYNQKVSHQLSEFAESIKLFKQIEKKEGGKLSFALEGKNGYSAPLDRILLDQGFTLYNVDNFKLKRFREAFAGEWRDDQRDALMLSKMLKLKEHINSPREKVFIKIEKPSLVTESLKLLSRHQQTLIDERVRLTNRLGKKLLEVCPQILRLGKLKNKKIIAVLTKYPDFSKYKRITLCSLLKIKGIGKKGAFFLLKKLNNIEYMPGLTDIYQTIILSYAKRILELQKEIEDLDKKLDEIGEESKEVKHLKTIPGVATKLASRLIGEIGDIDRFPSEKQLAVYCGVACVDNNSGKVTKARAVYKANKICKHTLITMAGGSIRFSFQCRDYYLKKRAEGKSHNHTLRCLARQLIRVLYKMLTEDRDYIVRKELRKVA

SEQ ID NO: 441593 - protein, 415 aa, unidentified
MKKVYDNCCGIDVHKKLMVACFIHGKGQEVREFGATTRELLELADWLSQGGCQMVAMESTASYWKPLYNILESSGLEAMVVNARHLKAVPGRKTDVKDSEWIADLLQHGLLQAGYIPARAQRELRELVSYRKSLAQDRTRELNRLQKMLEGANIKLSGTVADINGKSARNILDTVLSGTGVDSAKYDEMYSKNVIAHNLKASKEQIIDDLNGVMSPLQRKMMRELLAHVDELDAHIRHLDDDIDGHMKQDEKQAVDAIRPVTGPGAKSAQAVISVIGTDMGRFPTDAHISSWAGLCPGDNESAKKRRSGKTRKGNSLLRSTLIVCAHSAAKVKDSYFHAQFQRVSAHRGSKRAYVAVAHSMLIAIYHILKDGVEFKDLGADYYNQFNKERKINAYLKKLKALGWEAPTAMAGQPA

SEQ ID NO: 441594 - protein, 347 aa, unidentified
MNQIIRIGMDTSKHFFQLHGVDTAEQPVLRRKLRRKEMVGFFAKLPPTEIGMEACGAAHYWARVLRELGHTVKLIAPQHVKPYIKRNKNDGRDAEGLCEAMSRPTMQFVPVKTEEQQAALMLVGMRERLVARRTQLSNAIRGYAAEFGLTAAKGLDKIEPLLAGIAADEALPVLARDLFAMHGREYVQLQAELKKIEARLMAWHRANTDSRRLAQIPGIGPVVATTLVMKAPDPRLFPSGRHFAAWIGLTPKDHSTAGKTRLGTITRAGDEMLRSVLVAGATAVIQQAKQGRGHPSPWLLALLARKSSPKLAAIALANKIARIAWKLLVTGESYHAGGKPIASAHAA

SEQ ID NO: 441595 - protein, 447 aa, unidentified
MATRKRATTESAISLTHPNAAGIDIGSASHFCAVPADRDDEPVREFKSFTADLHRLADWLDACGVDTVAMESTGVYWIALYELLESRGFTVLLVNARHVKNVSGRKSDVLDCQWLQQLMSYGLLHGAFRPQEQVCVLRSLTRQRAMLLRSQGRFVQHMQKALTQMNIQLANVISDVVGETGQRILRAILAGERDGMSLGRLKNSRIHASEDEIAKSLQGNWRGEHLFALKQALDAFDFCGRQLAECDVQIEAQLQTLQSCQGEPPKGKKRSRARNAPRFDLRTQLYQMCGVDLTRIDGIDVTTALVVVSEVGADMGRFASDKHFASWLGLCPGTKITGGKVMSSKTKRCANRAAQALRLAAAALRSSKSALGAYYRRMCARMDRPKAVTAAAHKLARLIYAMLTKGEEYTDRGQDYFEERYRQRVLHNLAQRAKAMGMQLVPSESPA

SEQ ID NO: 441596 - protein, 427 aa, unidentified
MLNNDYNKQYERRQRIKKTTLVTGIDIGADFNAVGFMNKEGNVLGRLPKVYNSREGFDKFVRTTEELKAKHGLKDVLIGLEPTGHYWRKIAYFAKDQGYAVRFIRTTSLKHERELNESSSAKSDTKDALTLTNLTREGKYIDTVIEDGVSRQLRTLSKVREKILRQNTGAKNTLHAVLDDYFPELKQLFYAMNTKGLWAVLENCPFPEDVLKFEKTAIADIITKASRSKTDGTRKAAALYLAAETSIGLKRVGDADRYRLTVCLNEVKRTERMLQEIKKEMKELLKHLPAAQSLLSIPGVGHLSAAIFLGELGNPAYFHHAKQIIKYAGYDPQESDSGKRIGRKVISKKGRWLLRKYLYLMSVSAVNHSKFFRKYYQRRLKIKNRFGQLLKKKEALCAVAIKLIKVIFALLRDKREFQDTVSFALAA

SEQ ID NO: 441597 - protein, 410 aa, unidentified
MEPMHQRVAGIDVHRMKHVVTILIGQEDGAVSSQTREFGGFKRDMRALVAWLQTHHIQQVVMESTGIYWKSVFAHLEAAGIPALVVNAFHVKNVPGRKTDVGDSEWLAQLARFGLLRGSFIPPQDLRELRIVSRYRRKLTGMLAGEKNRLHKLLDDAGIKLGGVVADIDGVCASKMVEGLIAGGKPDELAALGRGKVRATTDILEAAMDGELSARHRLVLDMAYDHLRYLEGKLTALDRYLVAAMQPYAWAWRLLQTIPGIDAISAAMILIEIGDDPHRFGSSARLASWSALCPGNNESAGKRKSGKTRHGNPIVRYLLCEAANAARRTKTVFRAKYESLVIRRGHKKTIIALAHKLVRTIYFVLVRRKPYRDSTVDYEAASVAKNAPRWIRALKKYGYWPRSPLQTCQP

SEQ ID NO: 441598 - protein, 353 aa, unidentified
MMIIGCDFHPSFQQIAYVEQETGEYEERRLSHRGEAEAFYRSLAGKAVRIGVEATGNDRWFHKLMSELGHELLVGDASAIHASAPREQRTDKRDARHILRLLMENRFPAIWQPSVGNQEQRQLLLHRCRLVRMRTRIKNQLDSIAKNEGLTGSRVWRAKRRQQIEALPLTGWYAERRKDLLALLDEMDKLIEPLDEAVRAAAEQNAEAQLLMTHPGVGPVVSLSYVLILGDWRRFPRGKQVGSYLGLIPAEASSGKHQQQMGHITKQGNTLLRWLLVEAATKAQSKDPSWHRQYVRLSMNKHHGVAKVAIAHKLAVRLYWMLRSGQNYTQIVERGSHAGQSDLAGGCGLRPIN

SEQ ID NO: 441599 - protein, 450 aa, unidentified
MKLLYRCCAGMDIHKESVSVCVRRRVRGNSKVETEEAVFGTFTQDLERLRQWLKERKVKQVAMESTGVYWIPVWNVLESGKYKVEMTLVNPANVRALQGQKTDRIDARRIAEYLQYGLLRASFVPPRPVRQMRELTRMRVHIQQDRNRVINRIGRLLETVNIKLGSVAKKITCKSGRAILNRLAAESQQPEQLAKLALGRLKEKIPQLILALDGRPDEHFRWLLSRLLKKLESLDAELAGIDARLCEQTAEHEDLLRRLCTIPGVEITTARVLIAELGTDMTQFPSAAHAASWAGLCPGNAQSAGKRFSGRTRKGDRYVRRILVQSAWAAARTRDCFLAAVFNRVAHRRGMKKAAVAVAHRILAIAWSIIRNGTEYQERGGDHFDRLHPERTARKLLRRLERIASEIALKRPVGRPRSGPKEPIPLSSCERCWHFGIRDCIHLIKRSKKT

SEQ ID NO: 441600 - protein, 468 aa, unidentified
MRNAIGIDPDSKGFVCAYVKASEAKVLTRGYLATEADLGSFLKWIKKEGDLIVAIEGTLGVGKPIEKVLREAGVIFYSFPPADTDRFRKAVLGQNKDNQKDAESVARYAMAMEAQGKLERYRRVLFADLELQMLTRSFERRSQAVTVEVNRLWKLLRHVSPDLYLAIGGKHPEVELRANVLQNRGILALLSEKPNIGEWKKLSAEELLSAMGGNEKGRLSMIQELRKVAATMHPVTPAMALMIRTSAGQIERLKREQSEITKMLDSMTKDSRAVQALKEIRGIATLTATTMIAEIIDIRRFAGEDNLASYSGLGRRKYSTGETTRMIPTQSFNHRLKNIFMTAARNYVHYNPDSHLAGYHRNLVKAGMDPVEANKRVARALVRVIFKKLSSLVEEAGVENPVEEIIKAGESDMASGSLRSDRSHESNISLSSLKGRKTRRVTSVKRLGSRTSGRTRSKKKEAVSKKTS

SEQ ID NO: 441601 - protein, 387 aa, unidentified
MGRVVIGMDPHKRSATIEIIDDRETVLAGGRFGTDRDGYRAMLAAGRRHPERIWTVEGCYGIGRHIAQRLIADGETVVDVPPKLSARVRVFATGQGRKTDPVDAHSVAVAALRAKGLRQVVVDDETVALRLLVDRRDELGRARTDLLNRIHKLLLELLPGAAKTFLRADQARALLATIRPRDLVGRTRRRLASELIAELVGIDKKIRVAKKELTDLVKESGSSLQDLNGIGPSSAARLIGDIGDIRRFTSRGHFASCNGTAPLDASSGDQQRHRLSRAGNRRINRVLHIMAIVQLRHDTPGRAYYRRRLAEGKTAMEAIRALKRRLSDVVYRHMLRDIQRLETGPGGQAGATLQSSAADPNPEVNTSEQSLPGPAGHHPRTLNPDTA

SEQ ID NO: 441602 - protein, 344 aa, unidentified
MPSIVGGMDIHRKQVTFDYLDLVTGEVKCGQIAPADRAGLRAWLRRFDGVPGVAFAVEACTGWRYVTEELQRAGIDAHLAEPADTAAARGRKMRAKTDKADSRLLRDLLTGGRLPECWIPPAQVLEYRALLETYHDLRREHTAWVQRVHAVLFHHGAPVFHDLSRTDAPQELAALARAHLSPAGQQQIALYLRMLEVTGGEAGVLRAQLAAAAGQLRGAKVLAGQLYGVGPVTALALCCWLGGAGRFSSARKAVRFTGLDITVYSSDSKRSPGHLSRQGPPVLRWCVYEAGKTHARTGAPDHGYYAAVKDRKGGKRAALSEARKIVRRACHILGELGDDAFAAA

SEQ ID NO: 441603 - protein, 337 aa, unidentified
MEYFAGLDVSLEKTHVCVLDRNATVVFESAVVSSPGAILSALNQAPSCERVVFETGRMAPMLYHGLADLGVPVVCIESRQAYQALKTLATHKTDRNDARGLAQLARTGFFKPVHVKSLPAHAVRALIMARKKLVGQRVTLESQIRGLAVVFGSRLPRGLSPAFVEQVITMSDGIIGLSAAMRGLVAARDAVLGAIAAIDADMKRLVRASEACRRLMTVPGVGPLTALAFTAAIDDPTRFRRSRDLGPYLGLVPRRYQSGEIDYTGSISKVGDRRVRTLLYEAANVMLTRYKGELKLKDWAFAIAKRSNMRKARIALARRLAIIMHAMLRHGTEFKPA

SEQ ID NO: 441604 - protein, 409 aa, unidentified
MATDLPNVIVGVDTHSDTHYVAVIDEHGKHLAAEEFLAVGSGYRKILAFITHFGLVIGVGVEGTGSYGAELSRVLRTAGLPVHEVNRPNRQARRLRGKSDPLDAYQAAESVLAERGTSTPKTKDGPVECLRVLRAARSSAMKARTISINQIKGILVSAPEQVRSRFRALTSAQLIPALERSRPVGNLTDPDNATALTLKKLAARYRFLEREILDTDAGLAEILRDCAPLLRDVPGVGIEVASQLLVTVGDNPERIATEAQFAALVGVAPIPASSGKTSRHRLSRGGDRAANAAIHHVVVSRLATDSRTREYAARRTAQGKTKKEIMRCLKRYVSRELYRQLTNPQAAPSITDLRTARQELHITLREAPGHFNTWPGTLSRIERGLSRDDNLASQFRDWLHEQKETQNIN

SEQ ID NO: 441605 - protein, 415 aa, unidentified
MKKVYDKCCGVDVHKKVIVACFLNGKEKELRTFGTTTRELLEMADWLTAGNCEMVAMESTASYWKPLYNVLESSGLNAMVVNAHHMKAVPGRKTDVKDAEWIADLLQHGLLQASYIPSKDQRELRELVRYHKSLVEDRTRELNRLQKMLEGANIKLSGTVSNINGMSARNLLDFVLSGGTLTAEKYDELFMAGKISPMLKAPKQQIIDDLNGMLTAIQRKMLKELIAHLDELNQHIRNLDDDIDGTMKPDEKEAAKTIQQIPGIGETSLQVIISVIGTNMERFPSGNHIASWAGLCPGNNESAGKRKSGRTRKGNAMLRTTLVNCAHAAVKRKDSFFAAQFARIQVHRGKKRAYVAVAHPMLIAIYSVLKSGGIFRDLGFDYYNQFNRERKIAAYLKKLKALGWEQSTAITPAPV

SEQ ID NO: 441606 - protein, 465 aa, unidentified
MKTNPKRTKIKRTKINVDSGLSLINPDAAGIDIGHREHWCAVPADRSPAPVKKFGTFTGDLEKLAEWLQQCGIKTVAMESTGVYWIPAFQILEQRGFEVRLVNARQVKNVSGRKSDVLDCQWIQRLHSYGLLNASFRPADQMCVLRAYLRYRDELVCARSVQCQHMQKALQQMNVQLHQVLSDVTGVSGLRIIEAILAGERNARQLACLADRRVRASQATIEQALRGDYRIEHLFLLRSAFDLHQTYEQKIHLCDEQIIAQLAQLPTRVDLKEKPTPPRKPGRRLLCDLVAGTDLRVELYRCVGVDLTAIEGIGVLTAQVVISEIGLDMSRWRTEKHFTSWLGLCPDNRISGGKVLSSHTRHVVSPLSDALRIAATTLQNSKTAMGAFYRRMRARLGAASAITATAHKLARIIYRLLKHGELYVQQGMEAYERKYRERLFHNLQKTANSLGFELTPKHQLAKGVS

SEQ ID NO: 441607 - protein, 377 aa, unidentified
MTKYKLAFVAFDSAKEKHAVAIAEDGRDGEVRYFGEIENSADAVKKFVTKLSRRYDRLHFCYEAGPTGYGLHRQLTDLGHVCDVVAPTMIPKRAGDRVKTNRRDAVTLVKLLRAGELRTIWVPDTIHEAVRDLARARETAMRDLKVKRQQLLSFLLRHGRSFPDGRHWTKMHARWLTAQRFTHPAQQIVFQDQMEAINAAQIRLATLEQQLRDIVPTWTMAPVVAAYQALRGVSFLVATIFVAEVGDVRRFTTPQQLMAFLGLVPSERTTGDTVRRGAITKTGNSRARRVLVEAAWTYRYSARVSQTLQDRLKGLSPAVRTIAWKAQVRLCARYRRLIANGKKRAVATTAIAREIAAFLWAIGHQVEPQVATAVTSN

SEQ ID NO: 441608 - protein, 342 aa, unidentified
MLYVGIDVDKNKHDVTALNVQGKTVLKPLTFSNNKAGFELLDLSLRQLNQDCLIALEDTGHYAFNLLNFLHEQGYKVYTYNPLLIKKFAKSLSLRKTKTDKKDAHGIALKLLSDPNREQFQHNNRQVELKILTRHIHRLKKKQSDWKVQYTRCLDIIFPELDKIVGKHSEYTYQLLTRYPNPQKRIEAGFDKLIEIKRLTASKIQDILSVAPRSIGTTSPAREFEIIEIIKHYKRLIDKAETCVNDLMAEFNSVITTVTGIGGRLGAVILAEIRNIHAFDNPAQLQAFAGLDSSIYQSGQIDLAGRMIKRGSPHLRWALIQAAKACARFSPAFKAYLKTKLE

SEQ ID NO: 441609 - protein, 344 aa, unidentified
MNKLSRVGIDLAKNVFQLHGVDRQAKVAWRRRLMRDQWLKVLLGKVEPGCEIGMEACAGAHHWARELQAKGFTVKLIAPQFVKPYVKSNKNDANDAEAICEAMSRPSMRFVAVKTVEQQDIQAAHRIRAELIGHRTAKANQIRGLVAEYGLVAPQQLSRLRAALPDWLEDAENGLTSRFRGLLSGLWNDLMTLDHRVAELDHEIDLIAKSDPVAKRLQQLRGVGPMIATALVATVGNAEQFANGRQMAASLGLTPKQHSSGGKDRLLGISKRGDAHLRSILIHGARSVIRTAKLKDDRLSQWVTSLAERRHPNVAAVALANKTARIAWAMLRHGTDYEPDYIAA

SEQ ID NO: 441610 - protein, 310 aa, unidentified
MIIHPGYVGIDISKTHLDIFDASRGRQQRCANAAKDIASLIRSWKRQPPFILFEATGHYDALLRRTLAKAQIPFARVNPARARDFARAAGYLAKTDSIDAKMLAAMAQCLHPEPAQPVDIDRERLARLHKRRDQLVAMRQQERTRASECACPHTNTDISRHLTWLDREIDTIEARIETLIAASTNLAAAADLMRSVPGVGPVTAAALLALLPELGARSPKTIAALAGLAPFNVDSGQCRGLRRISGGRKRVRDALYMAAVAASRSKSRFATFYKTLRNAGKPPKLAFIALARKILTTLNAILRDQIAFQP

SEQ ID NO: 441611 - protein, 337 aa, unidentified
MNRNVVGIDIAKQVFHIFMMQDGKAVKKKLKRSELSAFVAQMPASLIAMEACGGAHHWARLFQSLGHEVVLLNARFVKAFVVGNKNDFNDAEAIYTAACQPNKRTVAIKGVEQQDLAMLQGIRRGKVDERTALVNQMRGYLAERGIVLPRSVNQLRKQLPSILEDGENDLSALSRKLFAEQYQALKALDEAISALDREINAVCQQNALARRLIEIPGIGPLTAILAAADVGDGKGYDSSRDYAASVGVVPRQHSSGDKQVLLGISKRGNRQLRTLLIHGARAVLKYCGDKRDPLSLWLKGLIERRGFNKAAVALANKNARIIWALATRGDDYVPQTA

SEQ ID NO: 441612 - protein, 355 aa, unidentified
MNEAKYIGMDVHQATISVAVRDSRGNLVMEAIVETKAETILQFIRGLRGSLYVTFEEGTWAAWLHDLLQPHVARVLSCDPRKNALLKAGNKSDRIDARKLSELLYLNKLSPVYHGEQGIRTLKELAGSYITITRDLTRVMSRLKAIYRSWGIPRGGQQVYASRYRAEWLAKISEAGVRRRAELYYQQFDALAALRQQVRRELLAEARKHPAMRLLWQIPSIGPIRAALLIALIQTPNRFRTKRQLWAYCGLALRRYTSGEYRFVGGQLKRSKKVLAVRGLNINHNHDLKNIFKGAATRAAAVAGPFQDFYQACVARGMKPHLARLTLARKIASTTLLVWKKGVRFDAEHLKQQAA

SEQ ID NO: 441613 - protein, 416 aa, unidentified
MIPETQTTKRVIGLDAHPDSFTAALVSGTTPASALVGKIFNQVPLGQLSGWAKKQTTAQDVMVLEASGNSFRIVRLLAGVERKAVVVESAQMGKLKEAHANNDKISAVRIAKAYLAGTAKEVWVPDPLTQERRDWFHAHRKAVKRTTQVRNRIRSYLSDHGVRLPRELRLASEAATTEMVRKSYSWTSREWQVVEGMLLELRHADEQRAHWRSLIAQEVLADEKLLSLVRLCGVRDVVAFAIGAIIGNIERFPNQKSLVKYIGLNPAFDDSGENTWSGGIGGHGRKDLRSLLIEAAQALMRSQHPLAKWGRKLMGRKGSLALAVAAVARKLAVAIWYLLKGRWTAVEEIEPSLALKVGKIVSQVGPAKIKALGKTRKDLREAAFQSLKNPRIYVLDPHKKMPARKAPLGDAVPQTP

SEQ ID NO: 441614 - protein, 342 aa, unidentified
MNATTIGLDIAKMVFQVHGVDRAGKTVLRKRLNRPQVLAFFANLPPAAIGLEACAGAHYWARELQQMGHDARLIAPQFVKPYVKGNKNDANDAEAICEAVSRPSMRFVPLKSPEQQDIQMLHRVRQNLVKQRTAAANQTRGLLGEYGLVVAQGLSQLRRRLPEILEDAENGLSPLARRVFADSYDRLVDLDRQIKAYQHQIETVCQQSPACQKLLAIPGIGPITATALVAALGDGQAFENGRQVAAWMGIVPRQDSSGGKPRLLGISKRGDTYLRTLLIHGARAVVRTAGRKDDAQSRWINALVQRRNANIAAVAVANKTARTIWAMLTRGEDYRAPLAQVA

SEQ ID NO: 441615 - protein, 491 aa, unidentified
MKEIINKRTKRKNLEKQTSSSYNTSRWSASGRELTLTRPMRTRERPVPPEAKRSESINRVPSFEDLYKATPERTRPLKFLHKEVLVMFYVGIDWACDHHNIFIADESGARIDSFRIPHSPKGMSLLRDKLRSLLTPKEQILIAIETPRNLLVEFLLNEGYTIYPINPKSVDRYRDRYRPSGARDDSFDAMVLANIIRTDREQFRAILPNSALARELKILTQDEQHLIHLKIRLVNQIQACLKDYWPTALELFSEIDQQVTLDFLLKYPRPEIIPIAELKEFLQKHHYPLSEEKAKEIHKKLSRPQIFVEDFTIRAKSRLLITLVGQLKALITQLDEYQREIAKLFNEHPDCPVFKSLPGSGPKNGPRLLAEMGDNRQRYSKAKNVQCEAGTAPVTDASGKSKIVKMRYSCRKPFRNTLYQFAFSTLTQSAWAKKFYDTQRAKGNTHTEALRALGNKWLKIIFRLWKDGTTYNEDRHLASIMRYQLNQGSAT

SEQ ID NO: 441616 - protein, 341 aa, unidentified
MESVIGIDAHKCTLTASAVDELGRELDSITAANDGRGFARIERFALRVGATRVGIECSGSYGLALAQHLAAVGLEVKEVPGQLVKQVRRAAARGKNDVLDALLIARVARREPNLPPPPRQGLSHDLKALVDHRETLLREAVRHRNRAHAMLTQLRPGYWRSVPGLTSAKRLEAARRLVEDDSGVRAELLRDALARVEELESSAKSLERQIQALVKASGTSLTDIVGVAAITAARILAEVRDVERVPSQSAFGALTGTAPVPASSGKTDRWRLNRGGNRQLNRAIHTIALTQISHDPRARAYLERKREAGKSRKDAMRCLKRHLARVIYKRLVVDGPVLPLT

SEQ ID NO: 441617 - protein, 362 aa, unidentified
MLTTERTTVGLDVHARSVVAEAVDWSSGQVFGRRLVPANDEVLSWVATLPGPVAVTYEAGPTGFGLARAFAAAGIRCEVVAPSKLERPPGDRIKTDRRDARRLARLLHIGEIGGIRIPTVVEEDARDLVRAREDARVDLMRARHRLSKLLLRHGIVYCGGRAWTGVHERWLRSQRFELPGTRAAFDEAFDAVLSTTARRDRLDVAITVTAGLPEWAPMVARLGAIRGIATLTGLGLAVEIGDWDRFTGASIGAYLGLVPSESSTGRSRSQGSITKTGNTHARRLLVEAAWHHQRLLRPASKAVTLRRAGLSPALRARGEAADRRLRRRWMALEARKKEPSVIAVAVARELAGWCWSLATMDG

SEQ ID NO: 441618 - protein, 496 aa, unidentified
MNTEARVVIGMDPHKRTVTIEVMTSQELVIGGGRFTTDAEGYAHLLGYARQWPLRIWAIEGCAGIGKHIADRLVTDGEDVVDVPAKLSARVRVLATGQGRKTDATDAHSIALVGVRMGGLRPVVEDEQLEMLRLCADRRDSLGLERTRKVNQLHKLLLELIPGGAKKSLTANQAKELLKKVRPTTAAGKIRKAHAVELVEDLAKIYARTKAADKELTRLLEATGTALLDLHGIGPAGAARLLVEVGDITRFPDRNHFASWTGTAPIDASSGDHTHHRLSRKGNRQVNRVLHTMAVVQLRTTTTEGRAYYDRKIAAGKTRREARRGLKRKLSDLVFRTLIDDLARHARTGPGGQMGDDSDSSATGSQPNTGSSDKPLPGPATTKPRNPPPSGLLTQRGADRLSPSGGSSVPDVTRAGQASAYDARPPRSDPAPAPARCSSAAIGSCAPAAPACRTSQEPSGHPGMTLRPPLGIATVGLAAPGIASVGLDRLRRSGAG

SEQ ID NO: 441619 - protein, 331 aa, unidentified
MTAEYIGIDLHKAFFQACALTPAGDRVWEGRFARTSEGVARFVAHGVGATHTIAVEASGPTWAFVDALQPTGARVCVVDPRKTRLKAGFAAKTDRLDARRLADAVRRESVVSIYVPPPAIRELREMCRGRHQVVRLRTRLAQMIRALLLRCDAGDPPGTRLWAPQALAWLAAVPVPADVDRTLRRLERLYRAVHAEAHAADHEVRQRARLDPIAVALDDLVGIGPVLAMTLRAEIGDITRFRSGPTLACYAGLVPRIDSSADRVYRGRITREGSPWLRWALVEAARHAIRRDDARARWARRLAVRKGLNKARVALARVLCDQVITTWRQAK

SEQ ID NO: 441620 - protein, 420 aa, unidentified
MNITCVGIDVSDGHSTVSAYAWGDKMVMKPHNVPHTVADLRGLVDEIRQLPSEVRVVMEHTGRYWLPIAGALHEAGLFVSAVNPKLIRDYGDNKLRSIKTDKADSRKIARYGLRYWNELWPYTPTEAVRQKLLEFSRQMDNSNKLLTAEKNNLQALVSVTFPGVRKLLKSRAREDGHIKWVDFVCDFYHCNVVRKLSATAFEERYRAWCKRKGYKCVRSGCNKIYRLACNCVPSLPCDGDTKLLIVEVARQLTAVSAAVEVYRTKIYSLASALPEFDCVMSMFGCGPTTGPQLMAEIGDPTRFRDRIVDGKRIRGKRQLAQFSGVAPGNNQSGTYEQQSVKASKKGSGHLRRTLFLVVSTYLQQKPDDPIFHFLDRKRAEGKGYFVYMTAAANKFLQRYYAKVRDFLAARTDDHSGTTAA

SEQ ID NO: 441621 - protein, 361 aa, unidentified
MKKPSQHLIAEVPRMQAKVEIKIGIDLGDVWSHYCTLNQDGGVVDRGRFRTTPKAIEKWFTDVAPARVAMEAGTHSIWISAQLQELGHEVIVANVRELRAISHSDRKSDQVDAEKLARYARLDPNILRPIAHRTVQQQEALTLVRSRALLVRLRTAAVNAVRGLTKSCGYRMPASATTCFAQRSLAVMPPGLAQALGPVLQQIADMTLKIKQYDRQIQQLGQTDYPETQALLKVHGVGHLTALTFVLTLGSKERFGRSRDVGCYLGLRPRRSQSGDHDPQLGITHAGNAYLRSLLIECSNHILRPHGRDSALRQWGLHLAARGGKQAKSKAVVAVARKLAVLLHHLWSTQEPYMPFYEQAA

SEQ ID NO: 441622 - protein, 349 aa, unidentified
MKKNHPAKIDQDEAIYERCAGIDVHKKVITVCLRIGRKTQVKEFGTLTCELREMAAWLKENKVQMAAMESTGSYWKPLYNVFEQEGIPAMVVNAGHMKSVPGRKTDVKDAEWIAKLLSQGLLKASFIPDREQRELRELTRFRKSQIEERARTLNRLQKMLEGANIKLSSWVSVIDGKSATQLLELIIGKENFTAEEVEKLRHFNMKASGEELFKSLEGIVTPIQRELFTHIMSVIKAQTAQIEKTESLISGYMTQAYQEAADAIDAIPGIGQTSAQQIIAEIGIDMSRFPSAAHLSNWAGLCPGNNESAGKRKSGKTNYANKALKSTLVQCAQAVKKTRIAFSMRNISV

SEQ ID NO: 441623 - protein, 437 aa, unidentified
MNHLRFQTNRQLLGGKIVIGIDPAKANHQAAVVDATGAQQGSSFTFPASAAGYGETLWRHLARIVTVHRPEDVVFAIETSCNLWETLAFYLHGRGYTVVLISPLSTHHARPVMNLEFSHTDPKDAFLVATIAQRGAFHRYESFSPHTNAMHQLAITYDKLRQDLAHNRARIRSLLDRLFPEFLRVLEPDTETAMHLLKSYLFPDEFLHLDLNAESLRIEQISRRQLGRSTLEALQQQARRTIGVSRQSHERLADRLTLDAYLALVETLQTHIDHVLDELIARSRELPQFARITSLSGVGNRLGALFLAEVRNLSRYTHYKHLEKLAGLNLRLYQSGRYTGSRRLSRIGNPRLRWIIYKMTEETARRVPEVRIKYLRRQLKRRRHVKNVVAASPQLLQLIVSMERHQHAYQLRKDTLEELQKLENQYAQLIAVRKSAA

SEQ ID NO: 441624 - protein, 336 aa, unidentified
MTKYIGLDAHSSTCTFNVTDERGMEVDTTTIESNGRLLVKYLRGIEGVKKLTFEECELSNWLYEILRPEVDELIVCNPVANKDYKRIKTDKMDARKLSKLLRGGFLVSVYHDGSKREQFRSIMSGYQDFIEEGVRLKNRYKSLFRKSGKKVKGEALYSDESFLEGLERTDFKFIGTQIYQLLEKMEGSRQEYVKELLRCSKGFKEIKYLKSIPGIGSIQAAKIVSQVIDPERFSSKYKYYSYCGLVRHKRISDGRGYGSEKIWGNRILKCVYKMAGHSVLKGNSGLRKYYDSLRLKGISHDNAYNAVCRKIAAISLSVWRKSKKYDDRLITGNLIK

SEQ ID NO: 441625 - protein, 397 aa, unidentified
MYIVGIDIAKRKHEAAVIDGEGTVIIKPFSFTNNCSGYNRLLAMLAKAKLPLDEVSFAMEATGHYWLALFTRLQKEGFRVQVINPVQTNSIRSFYIRQAKTDPRDALLIAEVIRFGHFSESTLHPENIYELRELCRGRHAIVSMQADVKRKVVALLDQVFPEYETAFTNMFGDTSMAILQTCPTPKELSEMRLEELCHLIEVSSHKRFRMAKAQELQELARNSFGFAMAGDVFSTMIRLYAKHLDFLKQQVREMDRKIAEIMDTLDTPITTITGIGPTLGAYILSEIGDISRFSSAAKLAAYAGIDPTMRQSGEYNGVRNRMSKRGSPYLRHAIWLAASSAVLHDPALKLYFQKKRDEGKPYMASVGHACRKMVSIIYAVMRDNKPYTPCIPNEISA

SEQ ID NO: 441626 - protein, 407 aa, unidentified
MTKVIIGVDPHKLSATIEVVDGRERLLGGGRFATDQAGYTAMRTYAKAWPERVWAIEGANGAGRPLAQRLLEAGEHVVDVPAKLAARVRLFDTGHNRKTDARDAHSIAIVAVRTTGLRVLRADGELEALRMLCDRREELTRLRVQTVNRLQRLLAELIPGQAKKDLTALQAKAILAGVRPRDIAGKTRRRIAADELADLIAVEAKMKKLSAELKVLVKARGSRLMDLHGVGPVVAARTLADVGDVARFTDRNRFASWTGTAPLDASSGEQNRHRLSRAGNRRMNHMLHIAAITQIRYDTDGRAYYRRKRAAGKTPLEALRCLKRRISDAVYRQLLTDAHRAALTTSPVEDQAGPGGHCGATLQSSAADLSPHIGTSDKPLPGPANPTLQASHPVWKRPPRKSPQTTG

SEQ ID NO: 441627 - protein, 349 aa, unidentified
MLADELDYVVGVDTHRDEHVLAVLAAATGAVVARKVLRASASGYREALGFAEQQAPGARAWAIEGAGHYGAGLARFLADRSETVLECSRAPRAERRLAGKDDALDAARTARAALASETLALPRSGQRREALRLLLITRRSAVDVRREALVQLRSVIVTAPDRLREELRGLPVGRLLERCRRLRRSSSASADELATRLVLRSLARRIEAATLEAADLEQEILAHVRALAPQLLDEPGVGPIIAAQLIVAWSHRGRVRSEAAFARLAGVAPVPASSGQTQRHRLSRGGDRQLNRALHTVVLHRRQHDPATKAYIARRIAEGKSRRDATRLLKRYLARHLYRLLENQEPRMA

SEQ ID NO: 441628 - protein, 389 aa, unidentified
MKIYVGIDIAKLNHFAAAISSDGEIIIEPFKFTNDADGFQLLVSKLESFDKNSIIIGLESTAHYGDNLVRYLVTELYQVCVLNPIKTCQMRKNNVRKTKTDKVDTFVIAKTLMMQDNLRFVSFFDLDMMDLKALGRFRQKTIKQRTRLKIQLTTYVDQVFPEIQYFFKSGLHQHAVYALLKEAPSPKEIASMHMTHLANLLKVNSHGHFTKEQAKELRVLAQKSVGANDSAISIQITQTIQQIELLDSQLEKIEAEMTDIMKFNDSVIMTIPGIGYINGGMILGEIGDIHRFSNPNKLLAFAGLDPSVYQSGNFQAKTTRMSKRGSRVLRYALVNAAWNVVRNNATFKAYYDAKRAEGRSHYNALGHCSGKLVRVIWKMLTDEVEFNLE

SEQ ID NO: 441629 - protein, 345 aa, unidentified
MSMVRMIVGGVDTHADTHVAAAVDSNGGVLGIESFPADRAGFEALLGWLTSHGEIQVVGVEGTGSWGVGLARFLHDHEISVVEVDRPNRQDRRRVGKSDPTDALSAARAALSGSASVIPKTRNGPVEEIRILMVARRSARSQRIETLNQLRHLVFTGPEEIRVRFKDRYKTGLITEVAKMRPRKGSDPVLFTTQVTMRGLARRIQMLNTEIKGLDARLVELVNDTAPSLVGLFGVGTDTAATLLVTAGDNPQRLHSERSWAHLCGACPIPTGSGKTSGRYRLNRGGNRQANAALYRIVLTRMSSDERTRTYVARRRGEGKNTAEIMRCLKRYVARETFKHLPRTT

SEQ ID NO: 441630 - protein, 389 aa, unidentified
MGYAAEKEFTTAQSHNQGGQVMRKSNTFIGLDVHKNSIDVAIAEAGRNAEVRHYGTIGGGLDDLDRLVKKLASPGKELHFVYEAGPCGYEIFRSLTDKGFDCVVVSPAHIPKSPADRIKTDRRDAMTLARLHRAGELTYVFVPRTDDEAMRDLTRAREDAKKAQRVAQQQLGGMLLRLGFRYSGNNWSQQHFRWLANHKMPTPAQQVVFQEYINAINDTTARVDRLAKQIESLVITWRMAPVVNALQALRGVSLIVAATMVAEIGDLTRFEHPKKLMAYLGLVPSEHSSGEKKKQGNITKTGNGHARRVLVEAGQAYRHPARITRPLLKRQEELGREVREIAWKCQVRLCARFRRMTAKGKNHNTIVTATARELAAFMWAIANQTPIAV

SEQ ID NO: 441631 - protein, 385 aa, unidentified
MTNEMLQSNATNTPARAPTRLLVAMEMSLKTWRLVMAPEGGTRKRVKTVEAGNYLAVEAAVVEAKARFQLLAETPVVFCYEAGRDGFYPYRRLTAEGHTVWVIDSASIEVSRRRKQAKSDGIDGDKLAELMQRQARGEPKALRIVRVPPPAVEDQRLLPRERERLLQDLGRLHNQIESILFAQGYREVPKTAGALRTWVAARPELPPHLRERLGREIERLALLESHCHAVETALAEQVRQDPSTGMMAVAWSLMQLCGIGLIGAWVLASEIFGWRQFRNRREVGAVLGLTPTPYSSGQSEREQGISKAGNRRARALLVELAWLWLRYQPDSALTRWFQARFGGGGKRLRRIGIVALARRLAIALWRYTAQGVIPEGARLKSAATA

SEQ ID NO: 441632 - protein, 397 aa, unidentified
MIAVGIDVSKGKSTVAILNGDGSIRAHPYEMNHSKAELEALIKYIKAVDDHPIILMEPTSHYHYPVLKAFRDAGLSPSLVNPYLLKKYGDAELRKAKTDKKDAMRIARYALEKWYSLVPYSPMDQKYEDLRFLSSQYRQRISMVVKSKNQLINLLDESMPGITRILALKSRNPEKCMLLQFIKRFHSFDYINSIGKTRFMNSYTTLARKVGERNAAAKGLAIYELSKASITTRSNSDYMDIALDQCVDILSDSQRAADEIMLQMQNIAETIPEYKVLLSMNGVGDRLGPVILAEIGDIRRFHSGKALNAYAGNDAPPYQSGQFESRNRHISKRGNPALRKACFEVMQALKLTKPQDDPVYLFMMKKEQEGKPYNVAKMAGVNKFLRIYYARAMELYR

SEQ ID NO: 441633 - protein, 405 aa, unidentified
MVRYIGMDVHREFAQIAIVEDGLLRDAGRIGVTPEALRVWADTLAADDHVALEATGNSDAIANLLTPLVGRVVVSNPSKTRAIAEAKVKTDKVDSRILAQLLAADFLPPVWLPDDRTRALRRQVMRRAHLVRQRTRIKNQVHAILTRNLAPTPPVSDLFGKAGRHWLAQQPLPADEQATVAALLRQLDFHGDELAIVDTELAAEALGDTAVAHLMTIPGVDAIAGIAIVAAVGDFSRFDSPDKLVAYVGLNPRVRQSGNSAPVHGRITKAGRAHVRGVLVEAAWSASRAPGPLRAFYQRIKTRRGFQKAIVATARKMTVLAWHLITKDQDYAFARPSLVQHKRRKLELAAGAPSRRGNHRLPRAAYNDRQRRTEERAEVERAEHAYRVLVAHWQPRPTPAKPRRS

SEQ ID NO: 441634 - protein, 451 aa, unidentified
MAKRGEKRERRSVVLEPDAAGIDIGAEEIYVAVPPDRDEESTRRFSSFTGDLHALADWLGRCRIQSVAMESTGVYWIPLFQILEERGFKVYLVNAHYLKSVPGRKSDVSDCEWIQYLNSVGLLRASFRPPEAICALRTLWRHRGSLLEMAAEHILHMQKALSQMNLQLHHVLSDITGTSGQAILDAILAGQRDPVALAQLCHCRVKSPRETVAQALVGDYRSEHLFTLKQSLAGYRYYQKLILELDQETARLMQALPSATEDPMPPRTKATAYHRKGNDPQFDLRSELYRIAGVDLTDIPGVSAATAQVILTEVGIDVGRFRNASAFASWLGLCPEKRVSGGKMLSCKTRKVKHRAATALRMGANSLCRAKGYFGEFFRRMRAKLGTAQAITAEAHKIARILYHVLLTKEPYAETVFHRCDEPAHRRAEMRLRKQAAQLGFQLLPIPAIGE

SEQ ID NO: 441635 - protein, 401 aa, unidentified
MKRLSGGIDVGSESHHITILDEEDNVLYNKKVSHKLNEFTKSINLFKQIEKQEGGKISFALEGKNGYSAPLDRILLAQGFTLYNVDNFKLKRFREAFAGEWRDDQRDSLMLSKMLKLKEHINSPREKVFIEIEKPSPLTESLKLLSRHQQTLIDEKIRMMNRLRKKLLEVCPQILELGKLKNKKIIAILVKYPDFSKYKRITLKSLLKIKGIGKKGAFFLLKRLNHTEYMPGLTDIYKTIILSYAQRILKLQKEISDIDKSLDEIGEKNKEVNHLKTIPGVATKLASRLIGEIGDINRFPSEKQLAIYCGVACVNNDSGKITKAKAVYKANKICKQTLISMAGCSILFSPQCKAYYLKKRAEGKAHNHTLRCLARQLIKVIYKMLTEDRDYIVRKELKKAA

SEQ ID NO: 441636 - protein, 399 aa, unidentified
MLAVGIDISKSKSVAAILNQDGSMHTGPFEFHHTQPELDAFIKYILNSNQSATILMENTGHYHYPVLKAFQEAGLPVCIVNAYQIKKFGDMDLRKAKTDKKDAVRIARYALEKSYSLVPYTSMEQKYEDLRFLARQYNQRMLTLKTNKVFLLNLLDETMPGITNILPLTTRTPETSLSVLFINRFKSYDRIEKMGKSRFLDAFEKIARKSRNRQTKTYGLAIYEAALLNITTRGENEYTLGAQDQCLELVCESQKAADSIILKMQTLAETLPEYAVLRSMAGVGDRLGPLILAEIGDIRRFHSGKALNAYAGNDAPPYQSGTFESHNRHISKRGNAALRKYCFEVMQALKLTQPQDDPVYLFLLKKEQEGKPYNVAKMAGVNKFLRIYYARAMETLKQL

SEQ ID NO: 441637 - protein, 404 aa, unidentified
MIFAGVDWAEAHHDVCVMAEGGRVLEQRQVAHSVAGIGELHALIGAHAADGEPVAVGIEVDRGLLVTALLAAGYQVFAVNPLASARYRERHAVSGAKSDRGDARVLADLVRTDRHNHRQAAGDTDLAEAVKILARAHQSAVWARQRQVNALRSALREYYPAALAAFGTGLADRDALAMLAIAPDPGAGRALSRSKIAAALRRAGRQRNNDQRAGEIQAALRGDYLQAPAAVTGAYAAAARSAIRLINAHTAEIAELEEALSEHFDQHPDARIVRSLPGLGTILGARVLGEFGDDRTRFASPQSRKNYAGTSPITRASGRSRIVLARYARNRRLADALQQWAFCSLTQSPGARAYYDQVRRRGKTHQQALRQLANRWTGILHTCLDRAQLYDENIAWAHIQAVTA

SEQ ID NO: 441638 - protein, 390 aa, unidentified
MILVGIDVAKDKHDCCIINSDGEFPEEVFSTLNNREGYETLYKRICSLAVDLAKVKVGLESTGHYSSNLLAFLLDKHLTAYVINPLRVNLFRKGQSLRRTKTDKIDSRNIAHLLMADSSLKPYSLSSYHMEELKSLTRYRGTKVRERTKLKTSIARLVTILFPELEQLVSSIHIHSIYAMLEEFPGSAYISSAHLTRLTALLLKVSRGRFGRETAIRIRDTARRSIGAVSPAKSMELQHTIAHLRVYDQEIGEIESEIEKIMDDVNSPITSVPGIGMQMGAVILAEIGSFRRFDSPDKILAYAGMSPSTYQSGKLTGSYSRMEKRGSRYLRYALFNVTRYVCHYDPGFTAYLSKKRKEGKHYYVAISHAVKRLVRVLYAMEISGNRYKTA

SEQ ID NO: 441639 - protein, 379 aa, unidentified
MTSTHAAADTRETVYAAIELSKKTWVLGIAPPDRDRPSIHRIGGGNIAELVSRLRVACRNNRRIVVCYEAGYDGFWLARALVKIGIECRVLDPASIQVNRRARRVKTDRIDVLALLRALIATDRGERHVCAIVRVPSIEEEDARRSHRERQRLVRERTGHINRIKGLLFAQGIRDIKPKLRRTRIDFAALETAEGHPLPDRLRRELEREYTRLALIETQLREVESERDTADAQDPVVEQKRQILVALHGVGSTSAAILAREVFARSFASRRQLGSYLGLTPSAYDSGSTTRCQGISKAGNSWARRILIEVAWLWRKYQPASPLSNWYIQKTTGQSSRIRRIMLIALARKLAISLWRYVETGLVPEGVVITRSESQCGLA

SEQ ID NO: 441640 - protein, 385 aa, unidentified
MTATTRTFDPTALENTLCLSLELGEGRWKVTSSAGFGGGIVRWSVAARDGEALLRRIAWAKERLGEDAGARVVSCYEAGRDGFWLHRFLVAHGVENLVVDSSSIEVSRRKRRAKTDRLDGEALLDLLQRHLAGGRKKVWSVVRVPTVEQEDQRHLHRELQSAKRDRTRVTNRMKGLVANHGLTLDLKREVPAQLAALHQWDGSPLPAGLRARLAREWERVVFYTELIEGLEAERRELFRHSPDPAVEKARQMNLLRGIGMNSAWLYAMELFGWREFRNRKEVGAIVGLAPTPNESGQQERERGMSKAGNRHVRAMAIEIAWGWLRFQPNSELSKWYQRRFGSGSKRVRKIGIVALARKLLIELWRFLETGVVPEGAELKTDVRIR

SEQ ID NO: 441641 - protein, 310 aa, unidentified
MNSEAYVGVDVSKSSLDLNVLPSNQTKQFSNDDKGVTQLVKFLRKIDPTLIVFESTGGLEMLAVSSLVQHQLPVVIINPRQVRDFAKATGRLAKSDAIDAGTIARFARDIRPEIRPFKDEQTQVLSALNRRRRQIVDMLVAEKNRLYTALKPNRKSIEQHIRWLEKALKDINNDIDQMIKRSPTWRKDDKILQSFKGVGPVTSTTLLCALPELGSLDRKKIAALVGVAPLNCDSGKYRGRRRVMGGRSDVRRSLYMAAVASLRYNPMIKAFYDRLINAGKPPKLALTACMRKILVTLNAMMKNRSYWIAS

SEQ ID NO: 441642 - protein, 398 aa, unidentified
MDLPVYYELETNNGNRDYRIQIGGHYMNYNTVYVGMDVHKESFTLCSCKYEDEKASHYQRTPASYKNVLRYLAFLRTIYGEDTRFVCGYEAGCLGYSLYHQLENFNVECVILAPTTMLEQRSKRRIKTDKRDAEIIAKSLVQHNYSPVHIPTKMDNQTKEFIRMRDDHKAELKKIKQQILSFCLRQGYQYDGSGNWTAKHVKWLRSLKPAGLYKEILDEYLLTYTILTDKLNRLDQRIEELASKEEYTESVSKLTCFLGIKTHTALSVIVEVGDFQRFVSARKFAGYLGLVPGQHSSGDDRNGLGITKAGNTHVRRLLVESAQSYTRGKIGYKSRVLRSRQAGNSPQVINYADRANERLRRRYYKMVLKDGKKYNIAKTAIARELACFIWGMMTDNIY

SEQ ID NO: 441643 - protein, 265 aa, unidentified
MCLEESCICVIDANGKVVREGKVSSEPTALIAWLSEVGVTLTRIGLEAGPLSQWLYAAMRQAGLAVELLETRHVRNAFKIMPIKTDRKDARGIAELMRLGWFRPVHCKSMEAQEMRAMLTARKLVQKELMETESSLRGILRGFGLKVGKTTPVAFEGRIRELAAGHPNLEVITSALLSVRAVLRRQFNDFEKRLRTIARTDTRARLLMTTPGVGVIVALTFACAIDDPSRFKSSKSAGAYFGMTPTRYQSGETDSSGRISRNGDA

SEQ ID NO: 441644 - protein, 343 aa, unidentified
MQAITTIGLDIAKSVFQVHGVDADGRVVLRRKLKRRYVLAFFEKLAPCLIGIEACASSHHWARQLQALGHNVRLMPPAYVKPYVKRQKNDATDAEAICEAVSRANMRFVPTKTPEQQSGLVLHRTRHLFIRQQTSVINAIRAHCAEFGITAPVGRRGVEELLRVVADPSDKRMPEVVRACLAALGNQLLNLKKQILDFDRMIMAWHRSNQTSKRLNCIPGVGPLLATALVASVADPKTFRSGRNFSAWIGLVPKQHSSGSREKLGSISKQGDRYLRSLFVAGAFAVIRYAKIHGTKHRPWLTALLTRRPTKVAAIALANKLARMAWAMMATGARYNYPASLKV

SEQ ID NO: 441645 - protein, 369 aa, unidentified
MMQHRYIGLDVHQASISIAVADEDRVPTSYGTIPNDPSAVRKLIARLGGCDVRLHVAYEAGPTGYGLYRQLSGLGIECMVVAPSLIPRQPGNRVKTDRRDALKLARLLRSGDLTPVWVPDQEHEALRNLVRARADAKVDQLRAKHRLSKFLLRQDCRPPLGVRNWCKRYLAWLHQLVFEHLADRAVFADYLAEVTAATERVKRLEAALRQCAQTTRQKRLVDALQAIRGIGFLSAVTIVAEAGELRRFPTAAQFMGYTGAVPREASTGPTHHRGRITKTGNRALRHVLGEAAHHARRAPCLSDQLKRRQKDVPQAVVDLAWQAQLRLHARYRHLSARLGPPKAIMAVARELAGFVWAVGQALPEASATA

SEQ ID NO: 441646 - protein, 341 aa, unidentified
MTNTTTIAIDLAKDVFQVAVFSKYGKPLVNKTISPSRIVQFILQYPEAAIYMEACGSAHYWGRRFKQLGRSVHLIPPHLVAKYRTGNKNDKNDACAIYEASKNPHLYFVTIRTLEQQDLAVQHKLRAGYVKQRTQLGNRIRGFAMEYGVKFPLGIQRLRKQVPRALEDAENELTTIARACLSQLLDQLIALEQIIKQITENLVNHAKQIDACVRLVKIPGVGWLVASMLYARLGDGSAFRRGRDASASLGLVPGHTGSGGKNRLGKITKRGDKYLRCLVVHGARSTLHRVDGKCDGLSQWVRRQQLTKHANNTAVALANKIVRMAWSILNTGNEYRPPVAQ

SEQ ID NO: 441647 - protein, 431 aa, unidentified
MDTQQFEVIRPKCAGLDVHKKSVVAAVCTSDPVTLTASYKTKVFNTTNSDISALRDWLLAQDCRDVCMESTGKYWIPIFNILEPHMHVILTHPKYVKAIKGKKTDKRDAKWIANLFRFDIVKASFIPPADIRALRELSRYRLKLSYMRTAEKNRYQNSMTISRIRIDCVLTDPFGLSATRIMDYLLSGEPFDEEKCRSLIDRRVKASKDEVMDTIHGYHILEEQKFKMTHAKAHMDFINKSIDEIEAELFLRSRQYDVQVKRIATVTGITELSALFILSEIGADMSVFESDRHLCSWAGLTPANNESANKKKSTRCSKAGQYLKPLLIQCALAAVKSKKEPYFAIKYQRLSKRRGKKKAIIAIARMMLTSIYHMLSDNEDFHPDDYEATINPPKQKPVVLTLDNTLQFLREQGADPETLKLIQQQCVAQVG

SEQ ID NO: 441648 - protein, 426 aa, unidentified
MEVPHAGDATGEEVMEVMYPRCAGLDVHKETVVACVRIVAGGEVSRSVRTFATTTASLIELGEWLEVNGCTHVAMEATGVYWKPVWQVLADGAFELVLANAAQVKSVPGRKTDVSDATWLSELLAHGLVRASFVPEPAIQELRGLLRTRKQLVREKASHVQRLQKTLEEANIKLETVLSDVMGRSGRAMIQALIDGETDPAKLAALAHWKVRASAATLREALHGRIKRHHRFLLRLHLQQVDALDAAIAEIDREADAGLACFRDAVKQLSTIPGVSELSAQVILSEIGTDMGRFATAAHLRSWAGLCPRNDESAGKRRSTRLRRGAPWLKAMLVQCAWAAARTKATYLHAQFVRLRGRRGPKKAICAVAASILTAAYHMLKDGTFYEDLGAAHFDRRRPETQARRLVKRLAELGFSVELKPVAAVA

SEQ ID NO: 441649 - protein, 427 aa, unidentified
MPYQIAGIDVHKKMLAVVVADVEVEGDYHFERLKVGTSPAQLCAFADCLVEREVDEVVMESTAQYWRPVWEALEQYWRPVRRTRAGASPVSGTLHLAQAQSNRGAGGRKRDFPDAERLVKRLAAQELTLSFVPDAEQRLWRTVMRRKYQVTRNRVQLHNRLESLLEEAHIKLSSLVSDLLGTSARRMLQALADGESDPATLASLADQRLRATAAQLCDAFRACTTLNPVYRRLVKLTLEELRLIEDHLAQLDHQMAQLLAQHHDAVQRLAEVPGLGADSAQQLIAEVGATAATFPSPKHLASWMGACPGSEESAGVNYSHRCPKGNRQMRRVVNQAANAAAKAKGTIFAIVYRRLVPRLGHAQAIGAIAHRLCRLIWKILHQGIRYEERGPAVSAEAKNVRARKMIRELRSLGYRVEQLPAPSSSPA

SEQ ID NO: 441650 - protein, 317 aa, unidentified
MAQKGTIVGIDVAKGKIDAAIRFGAEASFANSAEGRRELLAWLKEHGVCKAVMEASGGYEKSWATLLRGAAVEVVITDPNRVRHFAKSAGQLAKNDPIDARMIAWFGEVFGHVSGQPHDEERQELDQIVTARLGIGRLKEQIENWGEHEQPKAVQKAQQALLKAVATQLAKLETIIAAKIDKTERFAQRAEIIQSVPGLAGTAAAGLIAFLPELGLVDRQAAAALLGVAPFDADSGQRRGERHIQGGRHKLRKLLFMPVLSAATQHNPVLKACYQRLIAKGKKAKVALIACMRKLIGILNTMLARGEKWDPAKHATA

SEQ ID NO: 441651 - protein, 417 aa, unidentified
MRTLRGSSLEWTARTEEVALRELVAVPVDVGKSSAMVMACDFTGRVLLPAVEFPMTCEGVAQMLARVQAAVPAGAQLVRVGVEAAGHYHLPLIAAGVWPGGWQVVELNPAHVSAQRRVNGQRGVKTDRVDLVAIADLLLAGRGSAVVACGEPLIELAAWVAHRRRRGEVRTATKNQLLAQLDRAFPGLCLALTDVLGTKVGRLVAAHFADPVRLARLGPDRFREFAARRGVRVNRPVATRLAQAARVALPTGQAVIARQILQADLALLSDLETQIAAAEEQIAALLPATEYHVLTTTPGWGVTRAADYAAALGPHARWGSPAKVYRAAGLTPIVYQSAGRRRDGTISREGSVHLRSALLGLGMGLWQKDPAARVYAHGLRERGKPGGIIACALAHRAGKIAFAMVRDQAPYDPARWS

SEQ ID NO: 441652 - protein, 345 aa, unidentified
MSNNIHFSCICGIDIAKKVMQVFKVTSDGVVTNTSVSRKDFLEHFRNIPPALIGMEACATSQHWGRELQGLGHTVKLLSPKAVKPYVKGLKNDRNDAEGIYRALIMGVREVSIKSTAVRDLSLLQTMRAKRQRDKVATINHIRGILAEYGLVMGKSVRAFLSNAGTLIARLKESETTSQLVISELEKLLKEVKEIVSRIEELESSIKKIASENKNYDLFRSAPGVGPITAAMMVVLLCNPTVFKNGRDFAAYLGLAPISFGSGGRNQVTGIPSKYRCHNEARSLLVQCAHSITRLKYKSDWVASILSRKPKKVAIIAIANKLARQLWVMAKKGDKFEKRLVLAAV

SEQ ID NO: 441653 - protein, 345 aa, unidentified
MGQKQSAATAPSVATQWIGIDVSKDTLDVCLLRAGGKEKHKTFANDAAGHSKLLRWVEHLAPGELYHFCLESTGSYSMGVAHFLAEASQRVSLVNPARIKYAGLAQGVGNKTDRADARLIADYCRKEEPALWRASAPEVRLMVALVRRLHSVQGLLVQEQNRLGAPELPREVQSSLRKMIRVLEAEIKRLQKQIKDHINGHPGLKADKELLLSIPGIGETTAHELLGELPDVMQFSSAQSVAAYAGLAPREHSSGASVRKRTRLSKRGNSHLRKALYFPAVSAVQWNAPVKAHYERMREKGKGKMVCLGAAMRKLLMICYGVLKSRQPFDPNWQQNKPQSQIVAT

SEQ ID NO: 441654 - protein, 400 aa, unidentified
MISVGIDVSKGKSTVCILKPYGEIVSKPFNITHTHKDLSELSSMLFRLNDEVKIVMEATGIYHLPVLTYLQEKGFFVSVINPYLMKSYRNESLRKAKTDKIDSRIIANYGIDHWFKMKEFQTSGEIYEELKLLGQQYQHYMKLHLLSLAELTHLLDLTMPGIKNLLASWNETNRKDKRSDFVERFWHYDVITSMSEQEFTEEYILWAKEKKYVPSQEKAKVIYTLAQESIPTLPSETSSVKMLVTEAVRVLKEVDATLGLILSRMQEIAKTLPEYSVVREMGGVGNTLAPKLIAEIGDVRRFRNGKALVAFAGIDPPPYESGQFVGCNRKISKRGSASLRKVGYETMRSLKMRSRPEDPVYRYVVKKESEGKSKKAAKIAGLNKFLRIYYARVTELYKNI

SEQ ID NO: 441655 - protein, 341 aa, unidentified
MSTATLVGIDLGKHSFHLHGQDKAGREVFRKKTTRQQMMRLLGNLPSCTVVMEACAGSHFLARQLMAFGHEVKLISPQFVRPFVKGNKNDFIDAEAICEAASRPTMRFVTPKTETQQTLSVLHRMRESLVRDRTKTANQAHGFLLEFGISLPKGLSLVRRLPCTLGEHELPPRLATLLKRLHEHFCYLDEQIRALDKEMDNQLAADDLGSRLLSIPCVGPITASLLCAEMGDGKQYGGSRDFAASVGLVPRQYSTGGRANLLGISKRGDKNLRRLLVQCARVYLQRLAFQQGALADWVRSLRERRHSNVVVCALANKFARIAWAIAANHSEFEAGPSALAA

SEQ ID NO: 441656 - protein, 377 aa, unidentified
MKKELYLGLDVHSEWILSAVAEQGRGGEVRDSGAISADLQAVEKWVGRLRKAHGKEVILRACYEAGPCGFGLARRLQQLGVECEVVAPSMTPTRAGDRVKTDQRDARKLARLLRAGELTAIYIPEPTDEAMRDLCRARTDAVDDRRRSRQRLKGFLLRHGYRYQGKSAWTEAHLRYLRELVLPHPAMKAILEEYLMAISGASEGIARCEVAMRDLLPQWRLEPAVKALMALKGFQTVAAMIVVSELGEVHRFAHPRRVMAYLGLVPSEKTSSDKRRQGAITKCGNAHARWLLVECAQHYAAPPKVSKELSRRQEGQSREVRALSWKTQHRLHSRYTRLAARRLPRNKAIVALARELCGFIWELLRRQGCYQEQPSLV

SEQ ID NO: 441657 - protein, 420 aa, unidentified
MPNIEIGVDFMVKENFIYVGIDLHKETHTAVMIDCYNQKLGEITFPNRPADFPKLVTKVKKCNTDAKEVVYGLENAYGYGRPLAVWLIDKGYFVKDVNTAISHRQAKHRGAMYRKSDSDDAEAIALATLNMLDKLPDACPTDAYWSLGQLVHRRDNIMKQRARLVNQLHEQLCIAYPSYKSFFNDISRPTALYFWEHYPSRKYLKGKTVEDLRAELVPVSHNRCSAKTCEKILDAVASDKVKNNAYQDARDMVTLSIVSDLQHYDSQLAEVDKMLEQMYKMLGCTLTTIPGVNVITAVKILAEIGDIKRFSNANKLAQFAGIAPLHLSSSGKGKDVATKQGNRRLQATIYFLAIQMVQVSSKGTPRNSVVRAYYEKRKAEGKTSQQALICISRRLISIIYGMLKHGTEYRMPVVESAGEK

SEQ ID NO: 441658 - protein, 404 aa, unidentified
MWYAGIDWADDHHDIVVIDEQGQRVASCRVPHTPEGLAQLVTFLQGTVAAPTPQELACLIETTHGLLITALLDAGLAVYPVNPKTVDRRRKPSGAKTDAIDAYLLAKTGRSDLADLQRLTPDSPLVHELKALTRDQDGLIQSQTRLVNQLTACLKAYYPVALDLFTKLQQPLTLAFLQAYPTLEATRCASVDQLTQLLRQHHHPTPLPTAEALREQLHRPQLQADDITSRTKARLMLALVSQLAPLLAQIKQYDAEITHLFLSHPDSPIFASLPRAGKRLAPRLLAGWGDDRERYASAASVQALAGTSPVAYQSGKYVKAHRRYACIKPFRNVLFQFAWQSTFRESWAQAYYHRKRQEGKSHSMAVRALANGWVRIIQAMWLNHRPYVVETFLTAQHAHAGQAA

SEQ ID NO: 441659 - protein, 480 aa, unidentified
MNVKARRTKKQVNVENQAINLLSKEELNKKIEVIKKELRAYTWRDLETNGKFAKNDKLSFITDDMLIAGCDIGSETHYIRAIDVRGRELSRGAFEFSNTSEGFANAKEWVLALAAKNDKKQIVLGLEPTGHYWFALAAWMISNGISVVQVNPYAVKQSKEIEDNSQRKDDRKDPKLIANLVKDGNYGMPYLPEKVYADMRRLSMFRDQLTEDRIRNINRLHRELKIYFPEYMDAFGKIDGAFTLEVLKVSAIPSDITALGAEGIRNIWHNAKLRGRGYNRANEIVSYAEKSVGLTDGTDAGREAVKWYAEQILKLDEQLAEIESALHEKCREIPYAENILAINGVGENILAGTLAEMGDISRFDDVKEIQKLSGMGLVACSSGKHKGQTKISHRGRKRLRYWLFQAAKSAVSHADEFKQLHEYYTTRSNNPLKKMQSLVVIACKILRVIYTILKTGTTYDPQKLLKDIKHPAASQAPMAA

SEQ ID NO: 441660 - protein, 335 aa, unidentified
MNNVPLLLGLDYSEASVQLCAMDEQAKVLVNRACRNDWRELVRAVQGKGIVRRVAIEACSGAADLAEELVSRAGWHVELAHPHYVAKLKGSPDKSDYSDSRLLADLTRVGYLPRTWLPPLFVRELRQLVGYRQQLVDQRRANKLRVGALMREHRVKAPKELSRWSRAWVSFARNTPQLSEQGRWIVNQVLDQVVDLDRRITVAEQRLRTTTDGDVMTQKLMHQPGVGEVTAWVIRAFIGRFDRFHSGKQLSRYCGLSPKNASSGGREADGGLIKSSNKILRATLVQAAHRLIRTCPRWSGLAESLRRRGKPACVTVAAVGNRWMRRMFHEMKAMS

SEQ ID NO: 441661 - protein, 335 aa, unidentified
MDNHTQYSGFAGVDLAKKVMQIHFVTGDGEITDKQVKRAEFLDFFRNRTKCLIGMEACGASQDWARKLEAMGHEVHLMSPKAVKPFVSGQKNDYNDAIGIYKAMFNGVRRVPVKSTEIRDLQTLRRIRSQVTKDKVKEINHVRGLLAEYGIVMGKSITAFNKGISSALESLKERGDVSPLVAEELQTTVESIKTKIERQKRLDREIEQLARGCKNYENFLKTPGVGPFTAAMLCVLLCDPAIFANGRQFAAYIGLAPRSRGSGGKNFIIGIPSKFNCDSESRAVFVECAQALARYKNKSPWVDGILRRKPKKVAVIAIANKLARQVWAMAQGERT

SEQ ID NO: 441662 - protein, 345 aa, unidentified
MEHYAGIDVSLECSSVCVVDAQGRIVREAKVASEPAALTKWFKDLGIELTRIGLEAGPLSQWLYAGMSRAGLAVELLETRHVRTAFKIMPVKTDRKDARGIAQLMRLGWFRPVHCKSLPAQEMRALLTARKLLQGKLHDVELSLRGILRGFGLKVGKTTPRTFDGRIRELVTGQPTLQVMADALLAARTVLAREFAGLDKRVHTTARQDERVKLMMSAPGIGTIVGMAYVAAIDDPTRFKSSKDVGAHFGLTPRKYQSGETDVTGRISKCGDAGVRALLFEAAHIVLTKPVKKAGALKRWAMALAKRAGQRKAKVALARRLAVILHRMWVSRTLFDASKTAAAIA

SEQ ID NO: 441663 - protein, 343 aa, unidentified
MEKRHIGIDLHRNRFTCCVRLENGRNYLSEWQLEALPRFVKKLRPSDEVAVEVTGNTRLFYEAVAPQVARVVAVDPNQFRVISHSVKKTDPHDARNLALYLSKGLLPEVRMKEKTQAQIASLTQTRDTLVKLRTALKNKVNNLLSAHGINLAKEALSSEKKLDEVLAMRFDPMVRTELRVIVEQIRSLNQSIAELEKTITEEGQKLPGHQNLTSIKGIGPLSGSILLSVIGNIQDFSEEGKLAAYFGIVPRVSNSNETERSGRITKRGSKLGRTALVQCALVAQRYSPYLKRFYEKTKARRGTGKAIIALARKLLGIIYRTLKNNWVFEDFPNFVLAGVDKTS

SEQ ID NO: 441664 - protein, 359 aa, unidentified
MKIVGCDFHPAWQQVAIFDPETGEIAEGKLLNGDGEAERFYRALEAPALVGIEACGNSQWFIELAERLGHLVWVGDAAQIRASYVRRQKTDRRDAGHILKLLMENRFPRLWVPSAEQRDLRQLLIHRHKLVEIRTRVKNGLQHLALNRGLQKKSSLWSVRGRACLKELPLSGWTARRREDLLKLLGELDRDLDGLDEAVQRAAEEHEQARLLMTQPGVGPITSLAFVLTIGDVSRFRHSSQVASYVGLIPREHSSGGKQRLGAITKQGNRFMRQLLVEAAQSVTRLDEGFRREYAARCHHKPKGVAKVAAARKLAVRLYWMLRQNVGYPEIALIESSPRVPLAGKNHADGLIGRSRIQQ

SEQ ID NO: 441665 - protein, 407 aa, unidentified
MTTYFAAIDWASHVHALCVVDERGAIRLACEIEHTAEGLARLLRELKRFERGEQRLRVAIERPSGLLVDTLVEAGLTVVPVHPNILKAARPRYRSHGGKSDASDAYMLADLLRTDGHRLRPLAPQSDAIRALRSLVRVREDLQRTRTRLTNQLRDLLLSFWPAAADLFHEIDSPIPLAFLERYPGPQAASRLGPKRMAAFLATHRYSGRKTPEALLAHLHQGAPGHAGELLAEADAELVQHLVALLGSLAARMKLLDARIEHTVADAPDGPVIMSFPRAGRLCAAQILAELGDVRERFPDDAQLAAEAGVTPVTHASGKHRAVVWRWACNKRLRHAITILADNSRHDSPWAAAVYARARARGARHTHAVRILARAWIRVIWRAWTDRKPYDPALHNSARLAVQSTGG

SEQ ID NO: 441666 - protein, 315 aa, unidentified
MTNTPVFVGIDVSKGQLDIALRPGGILSVPNTETGFALILERLRANPPTLVVLEATGGLEIPLTGTLAAAGVPVVVVNPRQMRDFAKATGKLAKTDTLDAQVLAQFAEVIRPEPRPLPDEQTQRLAALLTRRRQLVEMLTAEKNRLASARQPIRKNLRAHITWLERALQQADTDMTEAIRQSPVWREKDELLRSVPGVGPVLTTTLLANLPELGTLTHKQLAALVGVAPLNRDSGTLRGTRTVWGGRAQVRTALYMAAIVAARFNPVIRSFYRRLCAAGKAKKVALVACMRKLLTILNAMLKHHTPWHTEVIHHA

SEQ ID NO: 441667 - protein, 359 aa, unidentified
MMVLGCDPHKRSITCGAVEAATGVARGVRTAAAHADGFDVLVRWARGLGSERVWAIEDCRHVSGRLERFLVARGERVVRVAPKLMAGAREGARTRGKSDPIDALAVARAAVREGVGTLPTAWLDERALELRLLVDHREDLVGTRTRDQARLRWHLHDLDPTFTVPPRALDRAVWWQRVRARLEQEPTGVRVQIALELLEQIRGQTASIRALEAELARRVHAYAPRLLAERGCGPLTAAKLIGEIAGIERFATDAKLARNAGSAPIPASSGNRTRHRLDRGGNRQLNCALHRLAVNKGLWDPDTAAYLARRQADGKTRKEALRCLKRHLARRVWKLLRTPAPSHTPTVTIHCNMPTHALT

SEQ ID NO: 441668 - protein, 345 aa, unidentified
MTNIVKQTAGIDVAQNELVVSLGRMNHDTGTDIFAFKTFTNNAKGFNDLVTWVEKMATKEIRVRYVMEATGVYHEKLAYYLSDQGQEISIVLPNKISNYFRTLDIKTITDKTASQAICRFGLERKLEVWQKPKKIFKDLKQLTRERDQLITDRTILKNQLHAEQAEAFPNESSIKRVTKRIQLIDKQELEIRAELAAIVKTDTELVKKINTITTIPGVGKLTAVIVLAETNGFELIKNKKQLVSYSGLDVKLKDSGTSVKGKPKISKKGNRHLRKAMYMPALSAMRFNDHHKAVFVRLVSKHGIKMKAAVAVQRKILELIYVIYKTNKAFDKDYIKKQVAEIQNS

SEQ ID NO: 441669 - protein, 335 aa, unidentified
MQIYGIDLAKEKFDVSFFDLTSKKVSNQPSHKVVKNNFKSIGRFLETLPSDAVLVAEHTGVYGDTLLKCCMDSNVKIAFVGGYVIHRYRATPDRAKTDVLDCALLRDFGERYPDKLKYKTFPEEALYELRQLARHREMLVEQRKQLITADKSEDCRPIRSLAVKRSMDRIKEMLDTEIAETEKEMLKVINGHESIRHNYELVKSVDGVGLITAVELLVKTENFTKITTARQYAAYAGTAPYEKSSGKMDKGAHISKIGNRRSKTLLYICAESARLHNKEIKLYYERRTLIDKRPRHYVLNAIANKLLRIIFTLVEKGEYYDANFIRQDPRVVKYN

SEQ ID NO: 441670 - protein, 374 aa, unidentified
MSIQFVGQMDRPSTSLNSNRSRNGATLRACVITSPSREGHAHHKLSSYSYEEVSMEQYIGIDVAKEELSVFDGTNERIFQNRQGLSTFRAYLRKAFPDLCKVVLIFEATGPYSQYLIELCASHGIKAWVVNPKKSSHFAKALGNRSKTDPIDAKTLYTFSKVVDPKDILVPQIDHVREELSLYLSSYDFVIKTQTAIANRIEALSHHPHTPKELLVLLRHGLARAEKTEARLLARMEELIKADGDLSRDYENLLTIPGIGKICAITLLAFFRTYGETKRSEITALVGLDPTRKESGTSVNGRRKISKGGNKRVRKVLYFPTLSAIQHNSNIRTFYERLVANHKPKKLAVIASMRKLVLIAHAVYKNKTPYQEAA

SEQ ID NO: 441671 - protein, 342 aa, unidentified
MLDTETGELVEKTLQHDGDEVRRFYSALPGQVLVGMEATGSMHWFLELLDELGIDHQVGHPSEIRKAEARKQKHDRRDAVLLLKLQVENRFPSIWMPSTALRDLRTLLLHRHQWVRMRTRVQNALQAIALSRGLRRGKTLWSQGGQHSIESLSLPPNAAHRRTELQRLYRNLNEQIDERDKGVNDQALQRPGAKLLMTHPGVGPVTALATDVFLGAPARFEDGKAVVSYVGMIPSEYSSGGQQRLGGLSKQGNPFLRFLWCEAAVHAVRRDPELQRFYRRKLAQKGLGKARVAAARKLGIRLWIMLRDQIDYQEFCRRGQMRQKNGGACAGMPEVGHSPAMQ

SEQ ID NO: 441672 - protein, 411 aa, unidentified
MTKIIRIGIDTSKSVFQVHGVDAAEQPVLRRQLRRRQVLEFFAKLEPTKVGLEACGASHYWARELIALGHQAVLLPPQYVKAYVKRNKNDAADAEAICEAMSRPTMRFVPVKTAQQQADLMLVGIREALIRRRTQLTNTIRGYAAEFGLIAAKGLDKIGPLLARIATEERLPVSARELFAGLGDEYDRLKSQLRAIESKLMAWHRCNELSRRLAEVPSIGPIGATLAVMKVPDPRAFRRGRDFAAWLGVTPKDHSTAGKTRLGVITRAGDETLRSILISGGNGGDQASRAAGKQTSLTLAGRTGQAQGTQACRRGAGQQKRPCPVEADGQRGALQCGALQVPASAGDGHNPRGARRCATQGSAPRPSLPSWQVAANRHDDPQPITSSAREQPRAEAGACSRRDRWCDPIDH

SEQ ID NO: 441673 - protein, 408 aa, unidentified
MKTLHRRCAGLDVHSDSVVACARLTVRTKATHEVRRFSTTTRDLLELADWLAAQGITHIAMEATGIYWKPIWHVLEGRFELVLANAAHIRNVPGRKSDVNDAVWISDLLAHGLIRASFVPPTQIQEVRDLTRTRTQLGREVGQHIQRIQKTLENANIKLTSVISNIMGTSGRRILKAIIRGETNPANLAELGSTGLKCLRTDLTAALDGRVTAHHRFLIAHHLRLIEELEKHIAAFDARIEELLAPLGNAVAQLITIPGVSRVSAQVILAELGADMTAFPTSGHLLSWAGLTPRLDESAGKRRSTRVRKGAPWLKPVLVQCAWGSARTKGTYYQAQFFRIKARRGPKKAAIAVAASLLTAAYHMLKNGTFHQDLGADFLVQHDKARIATKLANRIKDLGYDVCLTPVA

SEQ ID NO: 441674 - protein, 346 aa, unidentified
MKHYAGLDVSVKETAICIVDETGKICREMKVPSHPEDLVRVLSDPAWTFERIGLEAGPLSQWLFSGLAEAGLPVICIETRHTKAFLEAQPNKSDRIDARGIAQMMRVNLFRPVHVKTLTSQKRRALLTARKLLQDKAIAIENDIRGLLRNFGLKVGMVGAVKFEHRIRELTEGMPDLAEIVEPLLEARSKLRENFAALHRKLLAIVRDNEVCRRLTTIPGVGPVVALAYTATIDIPARFRNSKAVGPILGLTPVLHESGESRRIGRISCCGDGMMRTLLYEAAQTLLTRVTKWSWLRAWAMNVARRRGRQKAIVALARRLAVIMHRMWRDGTEFRWTRQDIMPKAA

SEQ ID NO: 441675 - protein, 426 aa, unidentified
MSEPVPIPSVFSQLTHFGGFDWAQCVHQLVVVDPQGNIVLSLRFANDAAGWALFREKIAAFPKLGIAIETNCGPTVERVLDTGLTVFPMNPKAAERYRDRKAPSGAKDDERDAWSMGDGLRTDGHGWRPLLAQDPLTTELRLLCRDEISLIEQRTALVNQLKATLHEYYPAALEAFDEWTSVGPWQFVITFPDPHRLASAGKRKWERFLHAHKLYRPQTVPKRLETFAAAAKFANPNAAVTKAKTLLAVSLAKQLCLLESQLDEYRSRIVALFNDHPDNGCFGSLPGAGEKIAPRLLSELGSNREVFASAEALQSYAGTAPVTKKSGKRRSVCMRHACNKTLRATIHLWTDLSRKSCTWAQAFYEKKKADGMSHANALRCLGQRWMKIVWKMWQTRTPYNEALHMKNQVKHGSWVIKLLPSTAAPT

SEQ ID NO: 441676 - protein, 421 aa, unidentified
MSKRRYSTVNCKQVDWAALAAAIAGQRAVLAVDVAKVRFVAALQVDGGETLVRVSWAHPFDTAELLAGLAVLAAAGTVEVIMESSGVYGDALRWQLHQRGIGVYRVSAKRVHDSAEVYDGVPSLHDAKATELIAKLHWAGCSARWDILPAARRDQLAELRRLRQAKARAQAERSRLEALLARHWPELPHLLGLGSASLLRLVGAYGGPAPLALLAHPARQLLRDTGGRLLAEEKIDAVLASARTTLGMPCTPQESAQLRWQAEQVIAAQREKRQAERQLAHTIAREDDFAPMRKHLGEVTSAVLLATQGDPKHYPDAASYCKGIGLNLKEHSSGQHQGQLSITKRGPALARFYLYFAALRLIRRDPVIKRWYELKAARPGAVKQKQVIELMRKLAKAFWHQANGHDFDVNRLVNLKAVAGA

SEQ ID NO: 441677 - protein, 314 aa, unidentified
MERKRVGVDVASRTLEVCWSDGTREQVANEESAVKAFSLKAAAAGVELVVLEATGGYHLELLLALHDAKVRVAAVNPRQVRDFAKAQGKLAKTDRVDAQVLCDFATKMSPRPSAAVSDEQLELEALLRRRNQLIEMRTAEKNRLQQARFKSEKKNLEKHIAWLNRELKDVDKNTNKHLRSNAEWDKTVELLEDVKGVGNTLLATLVGRVPELGQLNRKQISALVGVAPLSRDSGEYRGLRSCYGGRADVRRVLYMATLTAVRHNPALKAVYEHLVKGLHKPPKVALIACARRFLTWLNAMVRDGTPFNPAATTA

SEQ ID NO: 441678 - protein, 347 aa, unidentified
MQILSLDLGKNKTVGCDYERESGKHRFKTAFSTRAGLAQLVKEVKPDRVVIEVCSIAGWVCDLLREMGIEVQVANTSDDAWRWRKVKKKNDRCDALKAAQLSAVNQIREVHIPTIDVRQWRALIAFRQQLVQRRTRVKNHVRDLLLREGQILPGGGKCWTRLGMAGLEAMAQPLSEVGMNELWRGELAIELRQLRAVQEEIEVAEEKLDAIGAADPRVRLLRTIPGVGPRLAEAIVALLDRPERFRKGSEVSAYIGMVPKELDSGETQRRGKITRHGSRLVRSLLVEVAWAGLRHNPWVRETYQRISGGKKSRKKIAIVAVGRRLLVRCWAMLRDGTSWQSPATKVA

SEQ ID NO: 441679 - protein, 354 aa, unidentified
MLIIGCDYHPGFQQIAYVDTETGELQERRLVHRQEAEEFYRALKQRQIAVRVGMEASGQARWFERLLAELQFELWIGDAAKIRTKRVRKQKTDRQDAQLLLGLMLENRFPRIWVASWENRDLRQLLWHRHRMVQMRTRLMNQLQAVALNEGIRRKKGLWREAGRKQLESVALAPWASQRRHDLLELLDRLSPRIAELSERVEQEAGKCPAAQRLMTHPGVGPLTALAFVLILGQAERFRCGNQVASYLGLVPEEDSSGEHRRLGHISKQGNSLLRFLLVEAAQVTVRSDLEWRRKYFHLALRRGRKIAKVAMARRLAVRMYWMWRKEWDHEQWRKFGPHAGQPGTGVGVKSNTE

SEQ ID NO: 441680 - protein, 346 aa, unidentified
MLHAGLDLSRTRLDFDLRDADGALVEAGATTPDAAGLARLVQRVARYRQPVSAAIESMTGARFVHDQLEVLGWTVAIADALKVKGLAPLACKTDRIDAHVLAELSRRALVPAIWLPDPTVRAERERARFRLHLVKQRTRLKHRIHAALLAHGIPCPVSDLFGVRGRAVLVTREVPPPWRPHIETAVALVDELTRHIDALERELRRLGTDHRYVALLVTIPGVAWVLGYTIAAEIGDIGRFPSPHQLTGYTGLCPRVYQSGERDRRGRLSKLGPRYLRWALLEAAIHACRHPVYRGRYLRMKRRLGKQRGAKVAQIDIARRLAAAIWHMLTREQPFAPAGARTPLVA

SEQ ID NO: 441681 - protein, 432 aa, unidentified
MKYALNQVLPDVPAGQVFAGIDWATADHVACVVGMAGRVIDRFGAAHDKAGIDALISRLRRGGVSEVAIERGDGVLVEALLAAGLTVVVVTSRQVKNLRSRYGAAGAKDDRFDAFVLADTLRTDRARLRPLIPDMPATLTLRAAVRARKNLVAHRVAACNQLRAHLAVAFPAAVGLFRDLDSPISLAFLTRFGSHDAAAPLDEQAIAAWLKTIPVRGRPAPVSVLCTRLRAAPGGATGQDGAAQAAITAALTATVTMLAAQVKILETGIGVQLAAHPDAHIFTSLPRAGTLRAARLLAEIGDCRSRFPGPQALAALAGVAPVTRQSGIHLSHAFRWAVSRQLRDAVCDFANDSRHDSAWAASIYDAARARGKDHPHAVRILARAWIYVIWRCWQTGTAYDPAKHNALQAILAARDQASEPAAAGTPAPGKDR

SEQ ID NO: 441682 - protein, 369 aa, unidentified
MPHVTSIGLDVHARSVAAAAFNPFTGEVVHRDFGTDAAEIAEWALGFEEPRACYESGPTGFHMARELRALGLDCAVAAVSKMQRPAADARRKNDRRDAEFIARMLATHNIVEVPLPDAAVEAARDLDRALDDATAECRRARQRLNMFLIRLGHVWDERNADGARKGSWTRAHWRWISGSRLEGPQRDVLEYYVTAARCAESDRRQLEKKVLALARTDRWRPAVEALSCIKGIDTLTAFRLAAEAGSFTRFRTAPAFASWCGLVPSERSSGETERRGGITKTGNRLARTALVESAWHYLTCTPRPKAPAPGADVPAAIRPRADDCTARLCRRREALAAASKSSCKANAAVARELACWVWEIGCRAEGTLG

SEQ ID NO: 441683 - protein, 386 aa, unidentified
MIYVGIDIAKETHVAAAMSTDGVVLLEPFAFQNDHEGFKLLKSKLDTLNGNILIGLESTAHYAENVIFFLHSQQFKLAVINPVQTAAMRKTGIRKTKTDKVDSLLICKTLACNSFRLYSDTDVKTLQLKSLCRFRQNLKKSKARLKIQLTSYVDTLFPELQFFFKSGLHIKTCYELLKSYPSPDDIAALHLSKLSNFLSKASRGRFGKQDAKSLKSLAKSSVGVKNTYISIQITQTIAQIELIESQIDDLEHIIEKAMDELDSVIMSVPGIGKINGAMILGEIGDIKRFSHPSKLLAYAGLDPVVNQSGKFNAKHTRMSKRGSKMLRYALINAAWNVSLNNDTFKCYYDSKIAQGNSHYSALGHTAHKLVRVIFKLLTDNVAFALV

SEQ ID NO: 441684 - protein, 363 aa, unidentified
MKKVSKQMWEKEVSSPPKPAMTVGLDLGDRFSHYCLLNADAEVIEEGRIRSTEAALRLHFEGEPRQRIALECGTHSPWVSRLLKQLGHQVLVANPRKIPTITGSESKNDRNDAEALARLAASDPKLLAPVQHRSQQRQLDLNLIQARAVLVRARTMLVNALRGLIKSGGGRLPACSTEALPSRAPAAVPPFLAEVATPLIDQIALLTTQIAGMDKQIDKLGAKYPEIAVLRTAPGVGPVVAATYALTLDRVDAAPSNRSAGAFLGLRPGQGQSGDSNPQRRISKCGNTYLRSLLVQSAQYILGRFAPDTALRRWGLKLAQSGGKRGKKRAIVAVARKLAVILHSMWRSGQPFQDFPQPVRAAA

SEQ ID NO: 441685 - protein, 361 aa, unidentified
MTGTMTWVGLDVHARSTHCAAIDSLTGELSRARFGVGVEPVVQWLGELQGPIRAVYEAGPTGFGLARAAQRAGIDVMIAAPSKTPRARGDRVKSDRKDAELLARLLLAGQLKPVTVPPDWLESVRHLARVREAVRRDLGRGRQRVSKLLLVEGRVYPGATTWNREHRRWIASQQFQHAPTELALIDLLAAVDGLTARREALDERLSRLAQDARLWPTVARLRAFRGIDTLTALAVHLELGGNWQRFRSPAKLASWLGLTPSLEQSGESKTQGQITKTGSAIARRLLVEAAWHYLRQPRIGVTLRNRQVGQSDHILQIAWRAQCRLHRTHQRLREREKPGNVATVAVARELAGFLWAAATAP

SEQ ID NO: 441686 - protein, 342 aa, unidentified
MTVMIGIDPHKASHTAVVIDNTECVLDELRVRACSKQTDQLRAWAAPFPDRVWAIESARGLGYLLAQQLVAAGETVIDVPPVMSTRTRLLGSGRSQKNDPNDARSVAIAALRNDGLGRVVLDDHARVLKLLVKRHRDLGRLKNKSACRLHALLMELEPGGMAKRMSVTRANEILDRIEPATQMTEHRLAVARETLADIVHYETQMKASMKRLRTAVAASGTSLIDIRGVGVVVAAMIIGHTGDVSRFASAAHFASYNATAPIEASSGENKRHRLNQRGNRQLNWAIHVAAVTQLRQPCAGREYYDRKRAEGKNSKEAIRALKRQLSNVIYRTMVADARRLEQ

SEQ ID NO: 441687 - protein, 370 aa, unidentified
MDVHTTNYTLCAMEPIIGEDDRVFATIKVTPDYKNILMFIENLKLKLGLNDEYDIQCGYEAGCLGYSLYNQLTAAGIKCVILAPTTMLTPQGVRIKTDMRDAYMIAQCLSYGGYHAVYIPTEDDDSVKEYLRMRNDHKLALKKIKQQINAFCIRHGFCYDGTKWTLSHLKWLKKLEITNGLYRETLDEYMASYEEQEAKIERYDKRMGEIAEQTRYHDKVKKLGCFLGIKTHTALSLIVETGDFERFAKGNQYASYLGLAPGENSSSDNIHRLGITKAGNSHLRQLLIEASGGICKGAVGHKSKELRARQNGNTAEVIAYADKANTRLRSRYYKFIRHGKKRNVAVAAIARELACFVWGMMTDNIEMKAA

SEQ ID NO: 441688 - protein, 312 aa, unidentified
METKFVGIDVSKLTLDFDGLPVSAAQQFANDAAGIAALVALLQGSGVERIVIEATGGYETAVASALAVASLPVVVVNPKQVRDFAKAMGHFAKTDRLDAKVLALFGERIKPPLRTIPDEAQRALADVLGRRTQLVVMRAQEKARLATVAAVARKNVEQHIAWLDKCIGKLDTDLGDRLRNSPVWCHKATLLDSVPGVGTVTTFSLLAKLPELGTLNRQKISALVGLAPFSDDSGKRQGARYIRGGRAEVRCVLYMATLSAIKHNPPIKTMYERLTKAGKPFKLAMTACMRKLLTILNAMLKTNQTWKIQPSS

SEQ ID NO: 441689 - protein, 434 aa, unidentified
MEEVTDEPLYRDRVCGIDIGKAELYATIRVPSDKDPARRASETRRFAATKRGVLALADWLRCWQVPAAVMEATGDYWKGPFYRLEAEGFECVLADAKQVKHLPGRPKRDPSDSSWLAQCFERGAVRPCFVPDPEFRIIRLHTRYRRDLTDERTREKNRTEKLLESAAIKLSSVITDLHGVTGRDIMNHLIAGERNPKVLAQLARARARRKITELEHAVEGAEFFTAEHAALLKAMLERIDGLTAEIGKLSEVIERLLAPYEEQLQQAESMPGWGRRSAQDAVAETGADMTKFPTGGHLSSWGGKTPLDHQSGKRAGRARHKKGNKYLAAVTGETAVAAGKTATREGARYRKLARSRGKAKAQVAVGNTQLKASQLLADPGMRYQDLGPDYYERQAATRRKIAYHVREIEALGLEVTLARIPEPDPDGPASTQAA

SEQ ID NO: 441690 - protein, 347 aa, unidentified
MLHAGLDLSRRKLDVCLLSDEGRHLDQLAVPPDVDSLRTLARRIDEVHGEPVCAVVESMTGARLVHDTLEAEGWDVEIADAHKVKGLAPLACKTDKVDSLVLATLSHRDLVPAIWLPDPRVREERELARFRMHLVKHKTALKCRIHSTLINFGRPCPVTDLFGAEGRRLLAKLDVPEPWRGNVTASVELVDDLERQISAINRRLKEGHADHPYVPLLLSVPGIGRVLAFTIAAEIGEIERFSSPEKFVGYTGLCPRVNQSGDKDRRGPLTKHGPTYLRWALLEATMHALRHPAYRERYQRNKKRLGKQRGAKVAQVDVARRLAHAIWHMLTRNQEFAPRGAAFRLAA

SEQ ID NO: 441691 - protein, 387 aa, unidentified
MAEVLGKLTGKLDAPTVSTSAQENRRGNTVGPNRDRLTVGVDLGDRWSQYCILGLEGETLAEGQLRTTQEDVGEFFRGLTTARVVVEVGTHSAWVRDVITECGHEVLVANPRLMEGSKRRKRKSDRIDANKLARLGRVDPQSLYPIRHRSREVRQDLVVLRARDALVSVRTELINTTRGLVKSMGTRLPRCSSPSFAEKVKDAIPVEVGEALQPLVQLVETVNECIERYDEKIEELGRKKYGHTTLLRQVKGVGPITSLAYVLTLEDPQRFASSREVGPYLGLVPKQEDSGDSQPQLGISKAGDRMLRRLLVGSSQYMLGAFGPDTDLRRYGLRLCERGGKNAKKRAVVAVARKLAVLLHHLWVTGDVYEPLHRTETGTGTAQAAAA

SEQ ID NO: 441692 - protein, 282 aa, unidentified
MPHYVGLDVSQKTTAICVVDEQGRRLWRGACVTDPGAISARVLRHAGVVDVKVGVETGSMTPWLVHGLRSAGLDVECLDARRVKAALQMRLNKTDENDAEGLAQVLRTGWYRPVHVKSFDAHRARALLGARAQLVGMTTRLSNMIRGVLKTFGLLPGAGRGLRFDRSVETLLEGAPEIGLIVRPLLATWRQLREQIAVFDKAVQQRVRADPICRLLMTVPGIGALSSLVYVSTVEDPGRFSRSRAMGAHLGLTPRRYQSGETDTSPGVATVSRARSCTRPRW

SEQ ID NO: 441693 - protein, 356 aa, unidentified
MAEGTWVGLDVHARKVVAGVLDGASGELRGWRAPLVPAETAEWLSQFPAPIRVAYEAGPTGYGLARACAAVGIACTVAAPSKIPRASGDRVKTDRRDTERLARLLRLGELVAVRVPEPHEEAARDLVRAREDVRGELMRARHRLSKLLLRHGLVCDSSAWTGAHDAWLRRQQFESRPLAVAFDECYGAVLQAKTRRDALDQAIAELAAAPPFAEIVGRLVCLRGVSTLTALALTVELGDWTRFRPQSLGPFLGLTPSEDSSGERRRLGAITKTGNTHARRLLVEAAWHQRRPLRASATLERRRQHQPAAVRARADQSARRLHQRWHALESRGKRRTLVAVAVARELAGHCWALATM

SEQ ID NO: 441694 - protein, 350 aa, unidentified
MAILAERFVHVIGVDTHKRSLTAAVLNSLGGVLESCEVPANNAGHRHLLAIAARYSGPVLWAVEGTGSYGASLTEQLVGAGYAVTEVDRPKRPARKRGKSDEIDAVRAGREALAMKQLNPPRRRGVREQLRVLHVTRAEFVRTNTALANHLQHLVVTSSETLRLRFLEFNPRSHASERLAKKCAAARVGRLTSEDQTRLRTMRDVSRLIVDLSRQADAYEREMKRLVEAMAPGLLGQPGVGTLTAAQILVSWSHPGRIASEAAFASLAGVAPIPASSGQTVRYRLNHGGDPKLNAALHMVVLSRCRYDQGTRDYVARRTAEGKTQRDIRRCLKRYLARQLFRFLSALDKG

SEQ ID NO: 441695 - protein, 405 aa, unidentified
MNAVGIDVSKGKSTVTIRKPGDVVLMSPCDIPHTQSAINDLIKQIKSLEGETKVCMEHTGRYYEPVATWLSDAGIFVSAVNPILIRDFGDDSLRTPKTDKADSKKIARYTLDRWAKLKQYGIMDKTRNQLKTMNRQFGFYMAQKTAMKNNLIALIDQAYPGANDFFDSPARNDGSQKWVDFIHTYWHVDCVRSKSLNAFTEHYQNWCKRKNYNFSAEKAAKIYQISSDLIAVFPKNDITKMLIWQAVALLNTASKTVESLRSKMNELASTLPEYPVVMDMNGVGATLGPQLIAEIGDVSRFTHREALTAFAGVDPGKNDSGKHIQNSVRTSKKGSPYLRKALFQIMDSLIKRSPVDDPVYAFMDKKRSEGKSYYVYMTAGANKFLRIYYGRVREYLSNLSNNEII

SEQ ID NO: 441696 - protein, 346 aa, unidentified
MSHKTAAAVAHTIGIDTGKNTLHLIGLDDKGAIVLREKISRGRITGRLANVPRCLIGIEAGMATHYVARQLSALGHDVKQVPPAYAKPFRQGHKNDFRDAHAIAEAVQRPSTRCVPVKTDDQLDLQALHRVRSRLVGQRTAVINQIRGFLLEHGIAVRQGLRFLRQKLPDILAKRSDVLSPRMIRIMEDLSGDWRRLDERIQHITEEIEVLAHGSESCRQLITVPGIGPLIASAMVAAIGNGAAFAKGRDFAAWLGLVPKQMSTGDRTILGRISKRGNRYLRTLLMQGARVILLRPANWAKHSFGPWLTAAANRLHHNVLATALANKLARIAWTVLMQARSYEARV

SEQ ID NO: 441697 - protein, 425 aa, unidentified
MNYKQNEKINQVKESTLVVGIDIGSTTQYARAFDWRGIELGKVFTFSNSREGFEAFKAWMQHLQDKYKKSDVIVGIEPTGHYWFDLGAYLEDEGILLVMVNPYAVKQSKELDDNSQSKNDRKDPKVIAKLVTEGRYSAPYTPDGVYADLRIMVANRKRLIREITQIKNRFARWFAIYFPEYADVFGDYEAQSSMLLLKKACTPEAIVELGAEKINQIWRDAKLRAVGMKRATTLCETAKRSIGLRKGSSAAKYEMKLLLEDYEYKKAQLDSVMEEIESLCKKIPESEQMLAIKGIGVITVAGFLAEVGDVRRFESPRQIQKLAGLSLRENSSGKHKGQTTISKRGRSKLRAVLFNAAIPLIAKNPEFRSLHEYYTTRANNPLKKKQSVIAISCKLIRVFYAILSNGVTYDPQKMLSDIHRPSQAA

SEQ ID NO: 441698 - protein, 339 aa, unidentified
MSEVYAGLDVSDKMTHVCVMDGAGVIVWAGACATDPEVIARTLKARAPGLVRVILETGALSTFLYHGLAERGVPVICVCARHAKGVLSTRVNKSDPHDAEGLAQMARTGWFKAVRIKDEATHMDRARLKIREQLIASRLAMAGQLRGLLKLFGLRLGKVTTPGKRRERLACLFAQKPELEPILAPLIQSLEALEIQIDRSLKQLATQAAADPVAVRLMTAPGVGPITALVFKSSIEDPGRFARGEDAGAFAGLAPRRNQSGERDHKGRISKAGDPMLRSALYEAANCLLVRVKRPCALQAWGKRLAETKGPKRARVAVARKLAILLHRLWLSQTEFRWA

SEQ ID NO: 441699 - protein, 343 aa, unidentified
MSISTIGIDIGKSKFHVSALDERGHVQTRKAFSRSGLVKFLANTPPARVATEACAGAHFVGRKAESFGHDARLLPAQYVKAYVKSQKNDFADAEAIAEAATRPTMRSVPVKPADRQALQFLHRQRSGWIAERTALANRIRAMLLEFGITIPKNLNQLRKNLPFVLEDAENGLPDRLRQLLSELWEDLARLDERLKAINAELDTYSRTDPQTQLLLSIPGIGPIVATALMSGIGDASAFRKGRDLAAWLGLVPRQYSTGGQTRLLGIGKRGNRHLRMLLIHGARAVLRVVSKRSEEEGLRRWVERVTARKHPNVVAVALANKMARIVHGVLRHKTPFEARLMSA

SEQ ID NO: 441700 - protein, 373 aa, unidentified
MKYSTVYVGMDVHKETFSLCCYTNEKEQAEYPQKVDGHYSKVINYIEAMRFHYGDDALFICGYEAGCLGFTLYHQLTDHNVKCIILAPTTMLQQKGRKKVKTDKRDAALIARCLAHHDYSPVHIPTEQDEQTKEYIRMRDDHKLALKKVKQQILSFCLRHNYRFDGTTNHWTQAHLKWLRSLKPEGLYAEILQEYLLTYDNLTDKLERFDKRIEELASDETYQENIHKLSCFIGVKTVTALAVLTEVGDFKRFASAQHFASYIGLTPGEDSSGDDQNRLGITKAGNRHVRSLLVEAAQSYSRGQIGFKSKALKARQAVNSPEVIAYADKANERLRRKYYRMVLRNNKKTNVAKTAVARELACFMWGMITDNVA

SEQ ID NO: 441701 - protein, 342 aa, unidentified
MKEFIRIGVDLGKRYIQIHALESKDGRAVKRKLPRSKFLEFFADVAPCLIGMEACGSAHYWARQLRAMGHDVRLMPPAYVKAYVKRGKNDAVDAAACCEGVSRPDMRFVPVKSEEQQATLTLHRTRELLVRQRTMCVNALRGHLTEFGLVAAKGIGRAGELINMAGNDAELPEIAKSVVKIFAEQLAAIQALIAALEKQIAGVHAQSPMSQLLAGIPGVGKIIASAIVASVPDPQVFKSARDFAAWLGLVPRQNSTGGKTKLGPITKKGDRYLRKLLVLGATSALRVAGRRKGALRDWLAALLEKKKSARLASVALANKLARIIWAMMTSGETFRKDMYEPA

SEQ ID NO: 441702 - protein, 326 aa, unidentified
MKKGYFVGADVSKEKIDFCFLTSNEDTKPKFVSLPNEINTIKAYFQSFVKDDIYVVFEHTNNYHLPLQSALSDLKIKYSALSPAKTSYFLKHLTLQKSDITDAYGLALYCKIFKADLNPSTHNREYNLIKSYNSTILLLSKIKVQLRNFKKSQDFVADTELSEIIKSLTLQVQKTQEKLKLIAFEILKSFVPNCEQIIKSNKGFGIDLALNLFPQLHFNRAKSEKQFISFLGLSPRIYESGSSVHKSPKINKRGSSAIRRILFLNAFSCVRFNDKFKKRYDHLISKGKSKKVALVAVMCAIVRYLKSLFPLNESYINESIYNAHTS

SEQ ID NO: 441703 - protein, 318 aa, unidentified
MTVSPMVGVDVAKDRLDVAVRPSGEAWSEANDDAGVRALVARLRPLGPALIVCEATGGFERAAIAALAAAGFPVVVANPRQVRDFARATGQLAKTDQLDAAILALFAERVRPTPRPLPDAAAQLLDAVLTRRRQLLEMLVAEKNRLGFAPKPLHRGIQAHIRWLERQVDDVTKELAGLIEASPVWRAKDDLLQSVPGVGPIVSSTLLGELPELGTLSHKQIAALVGVAPLARDSGTLRGKRLVWGGRASVRTALFMAALCGRRWNPALKRFYERLKAAGKPTKVALIACARKLLTILNAMVRDGKRWAVPAPSVQYSC

SEQ ID NO: 441704 - protein, 391 aa, unidentified
MIYVGIDVAKDKHNCFIMNSDGEVLFQVFTFQNYRDGFDGLFSRLQSASPDMFKIKVRLEATGHYSYNLLGYLIDKGLTTLVINPLHTNLYRKSLSLRKTKTDKVDARTIAMMLMSDVNLKSYSDTSYHNEELKSLTRYRFDKVQERAKLKQSVSRLVTILFPELEKLVPTIHIASVYALLSELPSAGKIASCHLTHLTKLLENASRDRYSREKAVQIREAARVSIGSNMPAKSLELKHTLKLIGELDSEISEIESEIKRIMDQIDSPILTIPGIGYRMGAMILAEIGDFSRFDSPDKILAYAGASPSTYQSGQLESSYSHMEKRGSRYLRFALINAAKYVCHWDETFGAYLQKKISEGKHYNVAITHATKKLVRLIYAMEKSGKPYIKAE

SEQ ID NO: 441705 - protein, 456 aa, unidentified
MSKLSKANVGLAEARPFAGMSQVHEHAAGVDVGAHEIMVCVSGAEGMQMVRSFGSYTVDLQAIGKWLAEHGVETVAMESTGVYWIPLFEELEHRGFHCHLISSRSLRRVPGRKSDVVDCQWIQTLHSYGLLESSFRPEADLVALRTLLRHRAQLIQHRAPHILHMQKALLQMNIQLSQALSDVSGETGQAMIRAIVAGERDPHKLAALRNYRCKKDEQEIAKALTGTWREEHLFILKQSLELYDFYTRQLEACDAEIEHAYSLVRPEWEVEEKQDMPESKRNSHSKNAPKKVQVRKHLKRICGVDLTAVHGVSASLAQTIVLEVGTDMSKFPNEKHFCSWLGLAPKKEISGGKVLKNNTLKTHNRAGQAFRMAAGSVMRADCAFGAFYRRQKARLGPAQAAVATAHLIARIVYRMLKHKVEYEPLSLAQYEQHYREQQLKYLHKKAAKLGIQLTPI

SEQ ID NO: 441706 - protein, 318 aa, unidentified
MQNTKTDGTVFVGIDVAKHSFDVALLPTEQSASFSYDRDGLAQLVEWLKSQGTCFVVLEATGGLERRLAGELIEAGHPVAVVNPRQVRDFARGTGKLAKTDRIDALVLAHFAWQVQPRPLEKASEKQLELAALVTRRRQLQTMVIAETNRRESASTVQARRHIDKHLEWLRKEVARIDAAIAKLIASDEDWRDQAQRLKSVPGVGPTTSAMLVAELPELGRLNRREISALVGLAPYNHDSGKLRGKRSIWGGRISVRSALYMAALTARRCNPVIRVFAQRLEQAGKPFKVVLTACMRKLLIILNVLTKKRQSWSPIIP

SEQ ID NO: 441707 - protein, 482 aa, unidentified
MKKRNVFQNQSQEILTLFEVAQDRSKVMCIPIDYAKKDHVVMFCNGNGKIIRKPFSIKNSPEGKDYLIDQVRKSCRHHGINLQHVFYGGEDCGAYADNFIAALRLENYLVAGVNALDAKKHRENVQASTDRLDLLGISKVLLNCRGNCSPAQSGIYWNLRALVRERRKLVHIATGVRNRIHNIVDRIFPGFLNEKKSGIFPFSKGSLALMENRFSVNQIRRRRRSTLAKFLARQLVHHSDHCAEKLQQYASQVLQPPTDRIATLQITLKQQVKLFNCLQESILHLNKEIAEHLAQTPGVLLTSIRGIGITLAAGVSAEIGDPNKQGSLSNLVSYAGIIPRVKQTGGIQGKTLVKKVGKRCNRILKDYVVQSANHIGLYGPDDLKMDYKRRDAKGQHADFGMARRYLRMAICLMRTEQTYLPKILRSTRSNMKERAEYYITSWPTFHSKWKRSGALDLAFDKDMWLGQWRNMIQELYGIELTL

SEQ ID NO: 441708 - protein, 316 aa, unidentified
MTEAGGFVGIDVAKAELEVVVRPSGARWTVTNNAAGLAQLQERLQASAPSLIVLEATGGYEVAVVAVLATAALPVVVLNARQVRDFARATGRLAKTDAIDAGVLAHFAEVVRPPVRPLPDAMTQSLQAWLMRRRQLVEMLLAEEQRRSRAPRPIQRQIDQHVRWLRAQLGAVEKDLAQTLRESPVWREKDDLLRSVPGVGPVLTTTLLGDVPELGQLNRKQIAALIGVAPLNRDSGTYRGRRAVWGGRARVRATLYMATLTAARYNPVIRAFYERLVAAGKPKKVALTACMRKLLTILNAMIARRTAWKPPAAVSA

SEQ ID NO: 441709 - protein, 519 aa, unidentified
MNLIQEQGSVVGCSVAAFSFGAFWYSELPAGETGSVRRHAYYLVTPLVRCSRWGGLSFLMASGHPAADTFGPFLTIMKALPILDPKAAAIDVGSEKLYVSIAGDTPKVFGTFTGDLESLCAWLKLAEVHSVAMEATGVYWMYLYEVLEGAGLEVVVVNGRHVQNVPGRKTDMADCQWLATLHAHGLLRGGFVPTAEIRQLQDYQRLRGDHLIGAASQVQKMQQALERMNIKVHDVISDLVGVSGLKVVRAILRGERRPGELLGLCDVQIQKKKAAAVKESLRGCWKKEQLFTLQQALELWETYQQKIAACDREIEALLPQLAGPQTPGGGVGVGPIQLAPAKKPGKNAPVMERFQELLARVCGGRDATQIPGMSTYLVLQLISEVGTDMLRWPSEKHFVSWLGLAGGRKQSGKRKGSVKAHRNRAGRLICAAARALAQSVDKALGGFYRRLRGRIGGLAANVALARKLALLFYRLLRHGMEYVEKGLKNYEAKVLETETRLLRKLAKKQGFTLLPTAPN

SEQ ID NO: 441710 - protein, 339 aa, unidentified
MQTVTTIGLDLAKSVLQVHGVDGEGFVVIRRALRRSQVLDFFRRLPPCLVGLEACSSSHYWAREIGACGHQVRMIPPIYVKAYVKRGKTDAADAEAICEAVTRPTMRFVPIKDVKQQAAGMLLRTRDLLVRQRSQLANAFRAQMSELGIISALGMASIAKLAGKVRDPDASLPPVARLALLEMAEQIDVLSDRIEHLGKEIQATVKADETARRLTSIPGVGPLIAATVRATVNDIAGFKTGRDFAAWLGLTPRLLSSGGKEKLGSISKQGNRQLRTLLVVGATSIIKQAKRGVPLPTWLSGLMARKPYKLVAVALANKTARIIWALLAKGGFYRQPVAA

SEQ ID NO: 441711 - protein, 352 aa, unidentified
MHARSVAAAAIDGVTGALFQAKLTPSFDHVRSWIAGLPGPVAVAYEAGPTGFGLYRNLTGAGIRCEVLAPSKLQKPAGDRVKTDAKDAVHLARLLRIDEYTPVAIPTIDQEAARDLVRAREDCRGDLMRARHRLSKLLLRHGIVYYGGRAWTGRHDSWLRSEALGQLSQRATRLAFDSDYETVLVTKARRDRLDAAIEQMAADSEFTPLVQRLGCLRGIGTLTGFGLAVELGDWHRFTGNTIGSFVGLVPCEHSSGGSRVQGSVTKTGNGHARRLLVEAAWHHRPRYTVGKTLRERWDLAPAAARARGDEGNRRLHHRWVRFIDHRKRGTVANVAIARELAGWCWSLAVMED

SEQ ID NO: 441712 - protein, 441 aa, unidentified
MGNLEKIHDNAAGIDIGSEKIFVATDKQPVKSYRTFTNTLQECVKNLQSQNIRTVAMEATGVYWITIYDMLEKAGMDVWLVNPADSKNLPGRKTDVQDCQWIQQLHSFGLLRRSFIPKEVFRQLRTYNRLREDHIQMASSHIQHMQKALISMNIRLPEVLSQVHGKSGMLMIESILSGNTDAKHLLSLCDFRLRKNKGEEILQALQGFYSEEHLFELKQAYDAYYFYQKQIQDCDKKMEIILEKMSSENSISDEEILQKANKETKRVRHHNPQIDKLHYKLIRITEGRDATTLPGFTDYNYLRVLSELGNDISRWPTEKHFTSWLGLAPGQNRSGKINKRTKKRSSTKAGQVFKQAAQTLLISKHIALGAFAKRIKAKRGPAIAIKATARKLAVMYYNLMKYGADYVEAGTKKYEEKYRSQLIKFMQKKAAELNLQVIDIQ

SEQ ID NO: 441713 - protein, 416 aa, unidentified
MNAVGIDVSSRKSTVAVLRPLGEVVCLPFDVSHDADGLASLAEKLKALDGETRVVMEHTGRYYEAVAKALHEAGFFVCAVNPLLIKEYGANSLRRVKTDKADAVKIARYALDNWADLRDFTPMDAIRYDLKTLNRQFQLASKQRTASANNLIALLEQSFPGIRKCFDSPVRSDGTQKWVDFAHSFWHVDCVRKQPFAAFCERYRKWCKRHAYLFKLSNAEEVYALAKRAVVLTPKSKVVKVLVQEAANQLSSISRSVEVYRAEMDRLAAMLPEYPVVMAMYGVGKSYGPQLMAEIGDVRRFERKQALVAFAGIDPMPNQSGDKNVRSNKSSKRGSPYLRKTLFNVIRTYLQCAPQDEPVFQFLNRKRAEGKPFYVYMLAAANKFLRRYYAKLRDYFASLDTLQPAAPIPTILKAAL

SEQ ID NO: 441714 - protein, 344 aa, unidentified
MILIGCDFHPSWQQVCWVDTETGETEEHKLAHAPGEAEKFYRRFAAPALIGMESTGNCQWFVEMAVGLGHQVWIGDAAKIRASDVRQQKHDRRDAALLLQLLVEGRFPRLWTPSNEQRDLRQLLIHRHKLVRLRANVKNELQHLALNQGLQKKRRLWSAAGQKLLREISLKPWAGRRREDLLRLLKMLDEQIAPLDQAVQQAAEENSNARLLLTQPGVGPITSLAFVLTMGDVSRFPRGKQVASYLGLIPREYSSGGHQRLGSISKQGNRFLRMLLVEAAQVAVRCDPQLRNEYLHRCHSKPKGVAKVAAARKLAIRLYWMLRTQKPYPEIVRIESSSRVPLVG

SEQ ID NO: 441715 - protein, 346 aa, unidentified
MMIIGCDFHPSWQQVAWVDTETGETGEEKLVHAQGEAARFYQRIPGPALIGMESTGNCQWFLEMATVAGHDVWVGDAAKIRASDVRQQKHDRRDAALLLKLLLEGRFPRIWTPSSQQKDLRQLLIHRSRLVGLRVRVKNELQHLALNQGVQKKRKLWSAAGQKVLREIPLRPWAGRRREDLLQLLEMLDEQVAQLDEAVRRAAEENENARLLMTQPGVGPVTSLAFVLTMGDISRFPRGKQVASYLGLIPREYSSGGQQRLGSIIKQGNRFLRMLLVEAAQIAVRCDPQMRNEYLHRCHRKPKGVAKVAAARKLAIRLYWMLRTQKPYPEIVRSESSSRVPLVGAS

SEQ ID NO: 441716 - protein, 409 aa, unidentified
MHVLYPRCCGLDIHKKTVVACVVLTDPDGSDHRFVRTFGTMTADLLALGDWLDLHAVTHVAMESTGVLWRPVFTVLEEGRTLILVNAQHLQAVPGRKTDVKDSEWLADLLRHGLLKASFVPPPPIRMLRDLTRYRKTLVELRTQEINRVHKVLDTANVKLGVVASNVVGVSGRRMLRAIEQGESDPAVLAELAKGRLREKLPALRLALAGRVQPHHRQLIGELLDHIAYLEQAAHRVEVSIADRLAEQERAVQLLLSLPATGPVTAAAILAEIGTDMARFPSAPHLASWAGVCPGNKRSAGKQLSGATTKGNTQLKTILCEIAATIARSPGTYLHAFYHRIARRRGKPRAMLAVAHSLLVSIYHMLRDQVPYQDLGPDYFDHLQAHRLERHYVRRLEALGFQVLLTLAS

SEQ ID NO: 441717 - protein, 344 aa, unidentified
MSIKVVGIDIAKNLFQVCVLGTNGQILSNRKVKRDKLLDTVRQLPEQTALAMESCATSHHWGRIFQELGYTVALIPAQHVKPFVGRQKNDANDARAICEAYSRPNLHFVPVKSVEQQDLKAIRSVRKRLVENRTALANQIRGLAAEYGVVFPLSIKALRSHLPLALEDAENALSPVMRNLLQTLYCDFVSLSEEIDEMTQSVTMLSQQNPKYEAIRNIPGFGPILTAALISEVGVGNQFQNGRQFSAWCGLVPKQNSTGGKSSLGSLSKNGNRELRALLIHGARVVVRCGANKADAMGVWLRGLIARRGKAKAIVALANKLGRVTWHILAKNSEYDINQAVKPV

SEQ ID NO: 441718 - protein, 419 aa, unidentified
MKPTDTQPFTAYVGIDWGDAKHDICLQAAGNDRREFDSIPHKVPRIDEWAKALHQRFGGPIAVTLELTKGPIVYALQKYDFFVIFPINPSTLAKYRVTFKPSRAKDDPTDAEMALDLLLHHPERFKPLQPQSVAMRTLRSLTEHRRELVDDKTRLTNRLTDTLKQYYPQALDWFEQCDTILFCDFLSRWPTLTQVKRARQASLKDFFYAHNGRRPQVINARLDSIKAAGSLTDDPGVIVPCKLRTLSLVEQLRITLQAIDRYDREIAGLATKLPDYALFQPLPGAGPHLTPRLLVAFGEDRARFQSADELLKYSGIAPVTERSGKKHWVHWRLQCPTFLRQTFIEWAGQTINKSFWAGAYYRQQREKGSSYQVAVRALAFKWIRILYQCWKTRTPYDETTYLNALRKRGSPLIKNLSLN

SEQ ID NO: 441719 - protein, 372 aa, unidentified
MQQESAVFVGLDASKMKISVALAEEGRQGEVRFLGDIDHTPEAVRRLVTKLVGRYGRLLFCYEAGPTGYGLQRQISALGHDCAVIAPSLIPKRPGERVKTNRRDAITLARLHRAGELTRIWVPDPGHEAVRELVRAREAAMADLRTKRQHLQSFLLRHGRIYRGSRPWTQVHARWLSNLSFEHPAQSLVLREYRQAIDDAETRLERLTQQVAEVVCSWSMAPVVEAYQALRGVAFLTAVTFVAEIGDVRRFETPRQLMAYLGLVPSERSTGEQVWRGSITKAGNPRARRVLVEGAWTYRYPARLSRTLQVRQERLSTVVRAIAWKAQLRLCARYRRLMAAGKRQTVVTTAIAREMAAFLWAIGHAVEPRPAA

SEQ ID NO: 441720 - protein, 370 aa, unidentified
MPSIKQPTAPCHVPADAAEEVLLGVDTHKDFHAAAIVTVLGAALDGRSFPATTEGYHQLVSWARSFGALHRAGVECTGSYGAALARYLRTEGIEVTEVNQPDKAARRRRGKTDAVDAEAAARAVLSGRATATAKTSDGPVEELRLLKLAKASAIKSRTQAINQLKSVLVSADTALRESLAGLSNPHLFKRCAELDDSQECGPAGTARHVLKLLAGRIQHLTREIDDLNKRIAAGVEANFPGLPDTHGVGPDSAAALLISAGDNPDRLSSEASFAALCGTSPVEASSGKTQRRRLNRGGDRQANAALYRIVLSRLRWDDRTQDYLRRRLAEGKTRREIIRCLKRYVAREIYRLIAPIRTAACPAEPNGTAS

SEQ ID NO: 441721 - protein, 341 aa, unidentified
MNNVAIVAIDLGKHTFHLHAQDDRGHELYHKKFNRTGLARHLAGLEPCTVAMEACGGAHYMAREAAKWGHVPKLIAPHLVRPYVKSNKNDFADAMAICEAASRPTMRFVSPKTEAQQALAMLNSQRDAYIKERTASVNRIHAGLLEVGISLSPGFHAIKELPALLEECSFSAQIKQLLLGLRDHFNYLDGQVKALDKQVERQAAEDDLASRLMTIPCVGPITSSVLAAELGNGQQFKCGRDYSASIGLVPKQHSTGDKTVLLGISKRGDRNQRRLLIQCARVYLMGLERQTGALADWVRQLLARHHSNRVVCALANKLARIAWSIAAHHDEFKAGPSAMSA

SEQ ID NO: 441722 - protein, 392 aa, unidentified
MFFVGIDIGKNNHVASMMDDTGKVVFKAFSFPNTSDGGNALFSKLASYSLNPSDFEIGMEATGHYWLSVYSFLFEKSFLLHVINPIQTDGWRRGTEIRKRKNDIIDSVLVADLIRYGRFVETRLADEDLFSLRTLTRFRAYLVESISDLKRKVVCVLDQVFPEYQSIFSNIFGKASKEILLQFSSPIDFESVSSETLAQLLAQLSRQKVGAAKAEQLKAAASSSFGVTFAKNSFTFQLKTLIGQISFIEKQVKETEAEISSIMGKLDSPITTITGIGTVTGAAILSEIGDIYKFDSPRKLVAFAGLDATVTQSGEFEAAHNVMSKRGSPYLRKAIFQSALIASFKDPVLSVYYQKKRAEGKHHLTCVGAVARKMCNIIYAVLKNNQPYVPKA

SEQ ID NO: 441723 - protein, 338 aa, unidentified
MAIVMGLDQHRAQITAEWIDTDTGEIGRARVSPAHREDVRRFLQRFAGKQLEAALEATTGWRFVIEELLAVGAEAHLAEPAETAARRGNKKRAKTDRADARHLRELLMIDRLPESWIPPDHLLDLRAKVRLRHTLVDQRGEWQQRIQAVLYHHGFPQRHGLLTGENRAWLEDLDLPETAREQITVALTMIDALDAQSAPITRELRLYARRQLGCKALMKHYGIGELTAVTILAELGDARRFSSSRHAVRYAGLDITVHQSDQRRAPGHLSRQGPPALRWALFEAAQAARRPGSPDRGYYDQAADRLGGNRACLALARKLLKRSFHTLRELGDDALLPV

SEQ ID NO: 441724 - protein, 352 aa, unidentified
MDRYVGLDAHAESCTLGVLGPSGKRLKSMVVETNGQALLEAVRSIPGRIHLCLEEGTQSAWLHELLSPHVEELVVVMPPESKRAKDDLRDAWMRAEELRTGTIETRVYKAPQHLAALRNAVRAYGFAVRDVVRAKNRLKSAFLSRGIATDAGIYAAARRRKQLEKLTRPHRQLADWLGRQLDELTPLRDEAEEWLLKEAKTHPIIRTLATAPGMGPIRTAQLVAIAANPERFRTRRQFWSYSGLSIVTRSSADWMRGKDKRWERSQVQQTRGLTRKRHPLLKSVFKGAATTVIAQMPAHPLHKDYERMLEAGIKPNLAKLTLARRIAATVLSMWKHKEVYDPERHKGVTDKA

SEQ ID NO: 441725 - protein, 396 aa, unidentified
MRNDVTIYVGIDFSKEKFNACLLMEQGVMGESEFPNSKTGYLKLTKWVKNTSELGRSFDSSLVLFCGEHTGTCSIGLCEYLYAKGMKIWLESALKIKYGSGLKRIKDDKADAEMIAYYAKRFYEPGSCALFEPDSADLKTLRTLYQFRNRVVCDRVAIGNRISSGAFDCSTLVRNRMVKHHKEAQKDEKDIEKEMVRLMETSEELASNYQILISFKGIGPITAAALIIYTSNFKKFDNPRKFACYCGIVPFGKQSGTSINTKPHVSLFAHIGIKAAMVQACKSAMQHNAVIKAYAQRLYAKGKHEGIVMNNVKNKVMHIIFKMIQTQTLWEQEYQQKHMKECKAIPGKNGIGATEAAPIINATLKTSSSVVECTFLEEHSFQKNCKKTSSFSCVET

SEQ ID NO: 441726 - protein, 315 aa, unidentified
MNSKEVFVGIDVSQDHLDIGVHPTGKTWQLVHDEAGKEQLCQELRKLKPDLIVMEASGGMEGALAVKLQEAKLPAVVVNPRQVRDFAKAHGILAKTDRIDAQVLARFAERIRPEVRPLPDEAQRALGGLMVRRRQLVIMMTAEKNRLRRASKEVAQGIQDHIEWLKRQLDEVDREISRRIQHNDVWKQKEKLLKSTPGVGPVVSRSFLSGLPELGTINGKKISALVGVAPFNCDSGKFKGRRRIWGGREHIRSILYMGTVAAVRWNPIIRSFFLRLVKAGKSKKLALTACMRKLLVMLNAIIASNKPWKYGKVVY

SEQ ID NO: 441727 - protein, 339 aa, unidentified
MQVTTVVLDLAKNIFQVLGVTENGEVAFNQALRRAQLFAFFEKLPPCLVGMEACGSSHYWARQLSKLGHDVRLIPAMYVKPYVKRGKSDAVDAAAICEAVTRPIMRFVAIKSEEQQGVLFLHRARDLIVRQRTQLSNMLRGLLGEFGIVIVQGIGSAIKFAKGVLDGDKPGIPEVAIDVLDNLSNQLVALHLRVRRYEMRIRLQAKQDLRVTLLRSIPGVGPVTASAIVATAGDASQFKNGREFAAWLGLTPLNRSSGGKEKLGLITKMGDRYIRRLLVTGITSRLRQMKTHPERVDPWSRALLDRKPTRLATVAMANKTARIIWAVLSKNEYYRPHTI

SEQ ID NO: 441728 - protein, 345 aa, unidentified
MIIGCDFHPSWQQVAWVDNESGECGERKLVHAAGEAKMFYQQLGAPALIGMEATGNSQWFLELVEDLGHSIWVGDAAQIRASYVRKQKTDKRDAAHILKLLVEGRFPRLWTPDREQRDLRQLVLHRHKLVEIRSRVKNELQHLSMNKGMQKRATLWSQAGQKMLRELPLKPWASCRREDLLGLLEMLNQQIGKLDQAVQKAAEEHAQARLLMTQPGVGPNTALAYVLTIGDVTRFRRGKQVASYLGLIPREESSGGRQKLGAISKQGNRLLRSLLVEAAQIAVRFDPGFRKQYLHRCHQKPKGVAKVAAARRLAVRLYWMLRTETAYPEIVRIESSPRVPLVGAS

SEQ ID NO: 441729 - protein, 427 aa, unidentified
MSEVRSTQTEPEFAAFIGIDWADQKHIWSLQTANSEQRESGELEHTPEAVESWVAHLYQRFAQRPIAVAVEQSRGALVFMLSKYEPFHLFPVPAQMAASMRQALYPSGAKDDPRDADLLLDLLVQHRNKLRRLSPDSEATRRVQNLVEERRKLVDEKTAQINRLTDHLKVYFPQVLEWFGRLDTELVCALLVRWPALEELQKASPASVRAFFRKHRCRDRERIEHRMEAIRRALPAIQDRAVIEAKSAVVKVIVQLVRILVEGIEDLDGQIEEAAAAHPDFFIFNSLPGAGPVMAPRLLAAFGSQRERYRSAREIQSFSGIAPVTESSGKRKWVHFRWACPKFLRQSFHEWAGHSIVQSEWARVYYHQQRSKGNTHHAAVRALAFKWIRIVFRCWQDGVAYDENTYMAALVKRGSPLGAGVATGKTL

SEQ ID NO: 441730 - protein, 417 aa, unidentified
MAEDNSVAYKAFVGIDWADQKHDICVQSSNNSKREFSVLKHDVKAIEEWALNLFNKYKGPIAVALELTKGPIVYALQKYDFIVLYPIDPTTLARYRTAFKTSRAKDDPTDAELALELMLRYPKKFKPLRPQSEDMRKLMYLVEFRRKLVEDNKRFGNRLVNTLKQYYPQILDWFSHRNTEIFCKFVIKWPSLQKIKRAKEDTVRDFFRKHSPRSLPLLEARLQCIRDSTPLTEDSAVLSTHQLQTISIAEQMLATIKSIRKFDKQIHDTFYSLPDAKLFDCLPGAGPKLAPRLLAAFGEQRERYSSARGIQQHAGIAPVTERSGKKEWVHWRWTCSKFLRQTFIEWANKTRLSSYWAEIYYQKQREKGNPHNVAVRALAFKWIRILYSCWKNKVPYDEVKYLNSLKRNGSPLLVKTG

SEQ ID NO: 441731 - protein, 409 aa, unidentified
MRVIGLDIHRAFAEAVAWDEGKLKRLGRVDMRRHLLEAFAKKLAKEDVVVVEATGNAASVAAVITPHVKRVVIANPKQVRVIAHAKIKTDTIDASVLAQLYVSGFLPEVWVPGEPTQALRRQVTRRNQIVRQRSRLKNIIQSILHSHLIPSCPHADLCGASGRAWLFHQVLPEDERLAVERHLREFDRLGEDLKVIERDLARSALANEGVKRLMTIPGVDMVVALAIVAAIGDAGRFERPEKLVSYLGLNPSVRQSGPGPAYHGRITKQGRGHARGMLVEAAWAAARAPGPLRAFFLRVRARRGQHVAAVATARKLAVIIWHLLRKGESYAWARPALHAKKLRDLELKAGYKAERGQRGAAHVYNVKSHRDQERRWVEQAETAYARFVTGWSPRGPKRARTGAANEGRQ

SEQ ID NO: 441732 - protein, 340 aa, unidentified
MSELYVGLDLHSGNTYIGLIEKGTMKRVFEKRVRNNLEEVVWTLAPYREEIRGIAVESTFNWYFMVDGLNDAGYDCVHLANPSAIQQYKGLKYADDRHDAFWLAQMLSLGILPEGYIYPREERPVRDLLRKRSFLVKQRTAHILALQSMIERNTGVHMSANALRKVKAEDIRRILKEDHLVLLGTTSLETIAFLGKNIRNIEKTVKREVKTREAFEKLHMVPGIGDILAMTIMLEVGDISRFARVGDFTSYCRCVPTGRLSNGKSKGKGNAKNGNRYLAWAFIEAAYLSMRQSPKIAGYKRKASRTHKMVAAKTIASKLARACYYILRDGVEFKEEMLFC

SEQ ID NO: 441733 - protein, 340 aa, unidentified
MKITTLGIDLAKSVFQLHGVDAAGAVVLQKKLRRGSVLDFLGKLEPCLIGMEACATSHHWAREIAALGHDVRLIPPAYVKPYVKRQKNDAADAEAICEAVSRPNMRFVPIKTEEQQSVLVLHRSRDLLMRQRTMMLNAIRAHLAEFGTITAQGPSKVVELVAKLGSEETFAVPEIARVGLLALAAQLDSLATAIRDIERQLLAWHRQNAASQRLETIPGVGIITATALAASVPDPSVFKSGRQFAAFLGLVPRQNSSGGKDRLGHISKMGNGYLRRLLVVGATSVTRRAETNDTRTGAWVRSLLGRKPTRLVTVAIANKTARTAWAMLARNEDYRASAMA

SEQ ID NO: 441734 - protein, 416 aa, unidentified
MKKGQDTRGYERYLAFDIHREYLLVGAWNEEKDWVLTPRRVSIEKFPEWAKKNIRSGDIVVLETTTNVWTIYDIVAALASRVLVANAAEVSEIANARVKTDKEDIKRLLKLLVGGIVPEVWVPPMYVRELRAFTSYRARLVKTSTMIRNRLQSLLHKHNLRLSEAGLLDQTWWEAQKNISALEKLQIRQELTLLQEVEKLKVAVDEELQRQSTSATWGKQALQLMQLPGVGFVVAMTVLAAVGDISRFENASKLVGYAGLGAGVHDSGKTHKEKKITKKGRRELRWAMVEAAWRAVGMSPFWKAEYEKYLDRMRKPNQAIVVIARKLLIAIWHVLSKAETDIHASEEDLAYKMLLLSWSLSAEVRLGLTYKQFAKYALMKLGVETDITRFVRKNVPRRLASRQEVLTRMTELGLNA

SEQ ID NO: 441735 - protein, 418 aa, unidentified
MNVKTRRTKKQVNVENQAINLLSKEELNKKIEVVEKELRSYTWRELETNGKFAKNDKLSFITDDMLIVGCDIGSENHYIRAIDVRGRELSRGAFEFSNTSEGFENAKAWVLALAAKHDKKQIVLGLEPTGHYWFALAAWMISNGISVVQVNPYAVKQSKEIEDNSQLKDDRKDPKLIANLVKDGNYGMPYLPEKVYADMRRLSMFRDQLTEDRIRNINRLHRELKIYFPEYIDAFGKIDGAPTLEVLKGSAIPSDITALGAEGIKNIWHNEKLRGRGYSRANEIVSYAEKSVGLTDGIDAGREAVKWYAEQILKLVACSSGKHKGQTKISHRGRKRLRYWLFQAAKSAVSHADEFKQLHEYYTTRTNNPLKKMQSLVVIACKILRVIYTILKTGTTYDPQKLLEDIKRPTASQTPMAA

SEQ ID NO: 441736 - protein, 457 aa, unidentified
MSQTKKSRARRHWSPVHAAAAAIDIGATMHVAAVGPDRDERPVRTFRTFTDDLERLADWFARCEIKTIAMESTGVYWIPVFEILEQRGFEVMVVNARDAKHVPGRKTDVSDAQWLQRLHEYGLLRASFRPQAEIAGLRAYLRQRERLLDYAASHIQHMQKALMQMNLQLHHVVTDITGATGMAIIRAIVAGEHDPTVLALHRDRRCHATVETVCQALVGNYREEHIFALTQALELYDVYQTKVAACDKQIEDILKRLRQTAAPPANKLLPARQRARQPNAPTFDARMALHAILGVDLTLIDGLGPSLALKLVGECGTSLVAWPTAKHFTSWLALAPHNQISGGKVLSSRTRRTGNRAASLLRLAAGTVGRTDTALGAFYRRLSARIGKAKAITATARKIAVLFYNTLRHGMAYADPGATYYEDRYRQRVLHNLQRRAKSLGFVLQPLEPNAAQAGVS

SEQ ID NO: 441737 - protein, 408 aa, unidentified
MKSYRFYVGIDWADQRHQVSLRETGSERIEERLFDHTGAGLRAMVEWLIKRSDGRPDEIAVAIEITRGAIVEALMERGIAVFAINPKQLDRFRDRHTVAGAKDDRRDAFVLLHSLSTDPRAFRDLRIEDPAIMSLREHLRMYEELKEDLRRLTNQLRAQLHRYYSQMLELSSGSDEPWVWDILERAPLPAQGARLKERSAEAILRDHRIRRISAAKVVEILRAPSLPVAPGAAEAARAHVAMLLPRIRLARAQFDEVHATLERLLDGMETTEEEIGGHRDVKITRSWPGQGVVIAATMLAEGLRPLENRDYHWLRALCGVAPVTKQSGKSRHVVMRQACNERLRVAVHWWAGSAVRHDPKAKALYAVHKSRGHSHGRSIRGVADRLLRDLVVCLVKQEPYRPELRVVA

SEQ ID NO: 441738 - protein, 346 aa, unidentified
MKYYAGIDVSLESASVCIVDERGLIVREGKVASESEALIGWLVKPGAKLELIGLEAGPLSQWLHAGLSQAGLKVELLETRHVRAAFKAMSVKTDRKDARGIAQLMRLGWYRPVHCKSLPAQEMRALLVARKLLQKQLHAVEMSVRGILRNFVAKVGQTTARCFEGRVRTLVEGQPTLQAIADALLAGRTVLVRELAALEKRVRSAARHDDRVKLMMTAPGVGSIVGLNYVSAIDVPQRFRSSRSVGPHFGMTPTRYQSGETDISGRISKVGDGSVRSALYEAAHIILTKPVKNAGALKRWALAIAKRAGKKKAKVALARKLAVILHRMWMDGTPFDPTKAVGSATA

SEQ ID NO: 441739 - protein, 422 aa, unidentified
MQTLLSQSFTAYIGIDWADAKHDICLQIAGEAQRSFEVIDHKPESIDRWAKSLHQRYGGPIAIAVELNKGPLISALQKYEFFCIFPINPSTLARHRKTFVPSGAKDDPTDAQWALELLLNHPERFPQLVQQSSAMRSLASLTEHRRGLVDDRVKLSNRLVCMLKQYYPLALELFHDHDTLVFCDFLARWSTFEVLKHARPASVLKFLHAHNVRHSELNQQRLALIAKAMPLTEDPGVVSPSALYVLALVSQLKGVITAIKDFDREIEKTANTLADYRLFKALPGAGQQLAPRLMVAFGEQRDRFKDASAVQRYAGIAPVTERSGKKKVVHWRYQCATFLRQTFVEWAAHSINQSVWAEAYYRQQRAKGSSYQAALRALAFKWIRIVYRCWKTSTVYDEKVYLQALLRHGSPLTSELDTAKPR

SEQ ID NO: 441740 - protein, 340 aa, unidentified
MNEITTVGLDLAKHVFQVHGVDAEGATVLRKQLRRAQVLAFFSRLPRCMVGMEACATAHYWARELRALGHEVRLMPAQYVKAYVKRNKNDAADAEAICEAVVRPTMRFVPAKTAEQQAAVLLHRGRERLVRQRTMLVNALRAHLAEFGVIAPQGLRNVGKLIAIVRDEGDARLPDLARQVLQVLATQIEQIEAAVATLEKQLMAWHKANPVSQRLATIPGIGPIIATAIAAIVAEPSGFRSGREFAAWLGLVPRQNSTGGKTRLGGISKRGNRYLRRLLINGASANLLRSKATNADPWVIGLRRRRPGMVVAVALANKTARIAWAVMHRQENYQRMAAAA

SEQ ID NO: 441741 - protein, 344 aa, unidentified
MIPQGVPQSNLPCWTGIDVAKSSFQAALLIPGRNRPQPPLRDLATCSFPRTPDGVKAFCAWLDEEGAGPDTRAVMEATGIYSEELAIMFLQYRPELVPAIANPQQTSAFTKSLGLRNKTDALDARALARYGAERNPAPFEPAPPEYLALRRLVRHRQQLVEQSLSLGNIAGEGTDDKFVAQSRKLLLGSFAREIAKVEKKMRALFGQYAKLKADADLLESIYGVAFLTASTVIAELGDLRRFARARQLVAFVGLSPRQHQSGSSIDRPAHLCKRGNSRVRKSLYMAALTAIRDQGPMQRTYERLVASGKAKMSAIGAVMRKLLVLMRAMLISGKLYDRLWKTCA

SEQ ID NO: 441742 - protein, 402 aa, unidentified
MIDISGVGVFLGLDVGKSTHHGHGLTPAGKKVFDKPLPNSEPKLRAVFEKLAAKFGTVLVIVDQPASIGALPLTVARDAGCQVAYLPGLAMRRIADLYPGEAKTDAKDAAVIADAARTMPHTLRSLELTAEITAELTVLVGFDQDLAAEATRTSNRIRGLLTQFHPSLERVLGPRLDHQAVTWLLERHGSPAALRKAGRRRLVELIRPKAPRMATRLIDDVFDALDEQSVVVPGTGTLDIVIPSLARSLAAVHEQRRALEAQINELLGAHPLSQVLTSLPGVGVRTAAVLLVTVGDGTSFPTAAHLASYAGLAPTTKQSGTSIHGEHAPRGGNRQLKRAMFLSAFAALHDPASRGYYDRCRARGKTHTQALLRLARQRISVLFAMLRDGTFYESRLPEAATA

SEQ ID NO: 441743 - protein, 461 aa, unidentified
MTVARKHKQRNSDKQGVMPVMRPDAAGIDIGATEIFVAVPPDRAEENVRSFPTFTQDLYALADWLKQCAVKTVAMESTGVYWIPLFQILEERGFEVYLVNARHVKNVPGRRTDVSDCQWLQFLHSVGLLRASYRPEQEVCAIRSLLRHRESLVQMAATHVNHIQKALDQMNLQVHHVISDIMGQTGLAIVDAILGGERNPRVLATLRHERIKASEEVIAKSLVGDYRPEHLFTLRQSLTAYRSYQDLIAECEREIRQALQQFHPPSSPPAAIGELETESTARKTRSSDGILRAELRQAFGVDLTQIPGIRTGIAQTLFGEIGPDFRKFRSASAFASWMGLCPDNEISGGRVLWVGTRKVNCRAATALRMAAQSLHHSKSALGDFYRRMRGKLGAPKAITAAAHKLARIIFHLVTTHQEFDDSRFAADQLRFHKHQEAKFRAKARALGFQLIPLEPVPTTVP

SEQ ID NO: 441744 - protein, 391 aa, unidentified
MVYGLFRALVSAKSARMCERAVLTNRPSLDLSPFVLKGPESLSGSEGQIRCLPQPEQLHGLRARTEQGREWMMAQNEVVVVGIDVAKDKVDACIRSLSQRQTFPSTAEGQRALIRWLRKHKVGKAVMEASGGYEREWAKALRNAKIEVRIVDPKRVRSFAQSAGRLAKNDAIDAEMIAWFAETFDEARGQAYDAAREELVQIVNARQALLEQQTQMQNRCEHTVPIPVRKMHERLLKAIALEVTKLEAVIAALTKASPHFAETAEIIESVPGLGKITSAGLIAAMPELGQVSNEAISALLGVAPYDDDSGKRQGERQIKGGRRKVRNLFYMACMGAATQHNPVLKTFYRRLIAKGKKPKVALVACMRKLIVILNIMIARREKWDASRYAVS

SEQ ID NO: 441745 - protein, 458 aa, unidentified
MRKKGKRTKGIEEAHPFAGMSKVNANAAGVDIGAIEIVACVAGDESTQIVKAFGNYTVDLQSIGKWLHEHQIKTVAMESTGVYWIPLFEELERQGFECLLISSRSLRRVPGRKSDIEDAQWIQTLHNYGLLESSFRPQADLVALRTMLRHRSQLLEHRAPHIQQMQKALLQMNVQLSQALSDVTGETGRAIIRAIVSGERNPQLLAAFRDPNCKKSEGEIEKALTGTWRAEHLFVLKQSLELYDFYTQRIEVCDAEIDRMYALTRPDWEAGELPPIPQKKRNSHSKNAPENAREIRQHLKRINGVDLSLVDGFGVSLAQTVTMEVGTDVGDKFPTEKNFCSWLGLAPKHEISGGTVLKNKTLKTKNRAGQAFRMAAHSVKKADCVFGALYRRLRSRQGPAQATVSTAHAIARVVYRMLKYQVEYETISVNEYEKKYEEQQVKYMKKKAAKLGFQLVPA

SEQ ID NO: 441746 - protein, 347 aa, unidentified
MTIDTIGIDLHKRESQICILTADGELIERRIATTRGRFTEVLGSRPRARILLEASTESEWVARHLESLGHEVIVADPNYAPMYATRSRRVKTDKRDARTLAEACRLGAYRAIHRVSDAQRHVRAELTVRDALVRTRTRYVAVIKARVRSEGLRLTQGDPEFTARKLAALTELPDSTRAELAPLVALLEPINRELKAADSRIAALVATDATVRLLTTAPAIGPVTAAAFVASLDDVTRFPSADHVTAYVGLVPSEHSSGERQRRGRITKTGDARLRWLLVEAGWRILRSTSPDAAGLKAWGEGIAARRGKRVAVVALARKLAGILYAMWRDTRAYRAATARGEEEVAA

SEQ ID NO: 441747 - protein, 364 aa, unidentified
MPSMTQPTRPRHHTPEPLEDVVLGVDTHKDIHVAAVITTTGVLLDTRSFPTTENGYRQLLDWASAFGRLQRAGVECTGSYGAALTRYLHHEGITVTEVNQPDKATRRRRGKTDAIDAAAAAQAVLSGRATATAKTSDGPVEAIRMFKMAKVSATKSRSQAINQLKAVLVAADPALREALSGLSNPKLIRKCSELEAADDTAPAAAARHTLRLLARRIQHLTEEINDLTTRITGAIAVCAPRLLDRYGVGPDTAAALLIAAGDNPDRMGSESSFAALCGVSPVEASSGKTQRRRLNRGGDRQANSALYTIVLARLRWDARTRDYVERRVAQGKTRREAIRCLKRYVAREIYQTINPPKSTAAPAC

SEQ ID NO: 441748 - protein, 413 aa, unidentified
MDVLYERCAGLDVHKKTVVACRIVPKNGGGWQHERRTFDTMTGDLLLLADWLRAAEITHVALESTGVYWRPVFNILESDFEVIVVNAQHIKQVPGRKTDVKDAEWIADLLQHGLLKASFIPEAPQRALRDLVRYRTALIQERSREINRVQKVLEDTNLKLGSVVSDVMGVSSREMLMSIIEGKEDPTALAQLAKGRMRSKIADLERALTGYVQDHHRLMLKLHLEHIDDLNAKVEQLNQEVERCVVPFDQADEIERLDTIPGVGPLVAQGILAELGIDMTRFPTAAHAVSWAGLAPGKNESAGHNRSAKTTKGNRHLKALLVQAAHTVARSKDNYLGAQFRRLAARRGTRRAAVAVARSILVIAYHLLRNGTQYIELGADYFDKRNQEQVERRLVKRLQQLGHKVTLEPLSAA

SEQ ID NO: 441749 - protein, 343 aa, unidentified
MLKLQYPICCGVDVHKKLIVATIVFTDSNGISEYEQKTFSTINSDIQKLHDWLLENDCYHVCMESTGKYWIPIFNYLEADMDVCLTHPKYVKAIKGKKTDKKDSRWIADLYKFDLVRSSFIPPRDFRQLRELARYRFKLVCMKSSERNRIQNCMTVSNIGIGNIFSDPFGKTATEIMSYLLENTSESIEDKVVRKLIRKNTKASSDEIFAAISGYKIESDQAKKLTLARGHLEYLEDMVTQTEVELYVRMKPYWTFVELIAALPGMSDISATIILAEIGVNMDVFEDTKHLSSWCGLSPANNESAGKKKSVRIAKAGAYLKPLMIQCALAAVKCKKEPYFAVM

SEQ ID NO: 441750 - protein, 273 aa, unidentified
MDQYFVGIDLHRQYFTYHATDKKGKDLLREKLPNSFDALDYLMRQFPSPPKVVIEATRNWMWLVKALKERGCKVTLAHPLRTKAIASARIKTDSLDAKTLCHLLRSNLIPCSYIANEKEQDNRELGRGRIALVHYQTMIKNRVRAILGKENLNYPGSDLFGKKGRAWLKRQRLSETKRQMVEIYLSYLDNLVKAINQVENLIQNKSSRLLEVKLLTSIPGIGTTTAFLLASEIGDIQRFNTAKQFASYFGLVPRLNQSGNHRYYGRITKLGNP

SEQ ID NO: 441751 - protein, 407 aa, unidentified
MIFVGVDWAEAHHDVHIADEEGKRLAKARLPEGVEGIARFHELVGAQVEDPAQVIIGIETDRGLFVTALVAAGYQLFAVNPMSTSRYRDRHSTSGAKSDAGDAQVLSDMVRTDRHNHRLIAGDSEQVEAIKVLARAHQSMVWSRGRQSNHLRSTLREFYPAALVAFEDLTSTDALAVLRAAPTPELGKRLSRAKIASALARGGRQRRIEERSIEIQAALRSEQLAASGIVSAAMGASVAASVAVISEMGTQVACLAEELASGFKAHPDAEVILSLPGLGTILGARVLGEFGDEPDRYANPKSRKNYAGTSPITRASGTKSAVLARHVRNRRLADAIHQWAFASLGASPGARAYYDARRAVGDGHHQALRALGNRLVGILHGCLVHHTVYDETIAWAHRPENELAAAA

SEQ ID NO: 441752 - protein, 484 aa, unidentified
MKKPSNKARRPAPPIVARGKGPIRPATSLPVVHPHAAGIDVGASELYVCVPEDAVSPGESPVRRFGVFTGELDKLVEWLQSCGVKTVAMESTGVYWIPPYQKLEAGGLEVVLANARHLRQVPGRKTDVKDCQWLQRLHSYGMLQGSFRPAEEYCRLRSLMRHRENLVDGCVQQVQYMQKALDLMNVRLHQVVSDLNGETGLRILDAILAGERDPKKLTSLRDERIKRSTPPEMEAALQGDWREEQLFILQQARETYRFVETQLARCDAQIEKVLQQIVVVAERRPSLETPPNPTAAPTPRKKKERRPRKTGHGLKRDLRAELQRICGIDLTRVIGLNVLSVLIIISEIGVNMSRWRSAKAFCSWLGLNPGNKISGGRVLSSRTPHVVNRVSLLLRTLATAVGRSETWLGIFHRRMKARLGPAGANTATARKMACLIYHLLKYQEQYIDVDTLIYAEKIQRIRLNKLRKTAQELGFELLPIKEAA

SEQ ID NO: 441753 - protein, 413 aa, unidentified
MDVMHPRCAGLDCSKKDAKVCIRTQGRGRRATSATVTTWGATTSQILALREHLIAAKVTCVVIESTSDYWKPFYYLLDDGLDVVLVNAASVRNLPGRKTDVSDAAWLADLGAHGLVKASFVPPVPIRALRDLTRARTVITRERTREVQRLEKLLEDAGIKLSSVASDITGVSGRAMLEALIAGQRDPTVLADLARRRMRSKIPALTEALTGRFTDHHAFMVRLFLDRIDAHSADIGRLDERIEDAMEPFRPARDLLISIPGFSRIVAEVFIAETGADMGVFPTAGHLASWAGVSPGSNESAGRVKSTKTRPGNRYLKGALGIAALSAARSKNTYFSAKYKRIATRRGPMRALVAVEHAMIIAAYNLLTNGDFYRDPGADYYTAHQPARTKSRAINQLQSLGYHVTLEPLTESA

SEQ ID NO: 441754 - protein, 342 aa, unidentified
MTTYHIGADVDSRITELAVLGGRTIKHFTVPTAIPPLLEVLKAVAGHKVLVIEEGPMADWFCRHLRPVVDELVICDPRRNKLICQDGDKTNRIDARKLAELSLAKMLRPVHHTDDQDRVCLKQWVSLYLDRVAQGVREINKLRARCRMWGVHPPAGALRNLKRREPWLKALEPALAGQLRLLFMAFDGTNEIVRRCRQELARRAKAYEVVSRWQEMPGVGLIRAITFLVYVDTPWRFASRKKAWRYCGVGLQRYASGTDRWGREKPGTVRLAWAINKRLKNVVVGATMSAIHQGDNVLAQGYRQRLAAGMSPGNARHAMARKQVDRMMAMWKSGSQYCPELA

SEQ ID NO: 441755 - protein, 485 aa, unidentified
MTTVYLGIDVSKGYADFVAMNEAGSELGGWGRFDDTRAGHDQVQARVAAVLARAPETQVVVGVESTGGYERNWLGLCHRLSRSGWALTAYRLNPLVVKRYHERQLHRTVTDRVSAAGIAAYLRAGRRRQDQLWVAGELEGALTLYRTVRRLVRLQADLQNQLQALLSRCHPELVAFLRGGLRQWVLALLRQYPTAAALAQADPAAVARIPYVTPAAATRLVAAAAASVADQTDPATGRAVMVLVDEIAHLRLQVRRLQTELAEQLRADPGVQIIDSIPGFGIWSAICLRLELGDIHRFPRPAELVAFAGLDPQHHQSGDTTINRGISHRGQAGVRAILYPVVRAAIRCNPAVGALYTRLRARGKTDAQAVVAGMRKLLHLVFACWVQGVAFDPSRWEQVAGKAQEMAQRAAMALTPAVAVPLATSLAAPVSKREAKRRKAAHSPQGPCGVAPQKRPEFERPPSAPIIPIRTPSCQGDHAPDFSSY

SEQ ID NO: 441756 - protein, 358 aa, unidentified
MNNITRVGVDLAKNVIQVCAVDAAGKVVLNKPLPRDRFLTWCAELPKGCLIAMEACSGSHHWARELNKLGLNAKIIAASHVSPYRMEGKGGKNDANDAAAVCEAASRPNMRFVPVKTSNQQGILCVHRLREGFKEERTGCINRIRGLMAEFGIVVSKSPNKLREKLQDILEDAENGLDWLARLAIQELYTHWSAIDEKIDWCDKRINAHIADDMQAQSAKQLIGVGALTASAAVATVVDFKQFKNGAQFGAWLGLTPKQSSSGGKTKLGRITKRGDTYLRTLLIQGAKAAVMSAHKRKDPISKWLFQLKEKSGWQKAAVAMANKNARILWAVMTKGINFDPAYVSVKPGGSIGAALAV

SEQ ID NO: 441757 - protein, 349 aa, unidentified
MKSTLIAVDTAKLVFEVAEADDGGKVVRRRRLNRPQFAEYLGTRAEASFVLEACGGAHHWARVMQRCGHSVRLLPVPYVRAYRRRNKTDRADCLAMLEAARNPEILPVPVKSPEAQAIQGLHRIRSQWMATRTSRINTLRGLLREFGVILPVGAIAALKLIPEAIDDDAVPPVLRPGLQSLLAEIRQLGEQVLEIERQLGSLAKQVPDIERLRQVSGIGLLTATALYASAGDARNFRSGRHFASWLGLTPREHSSGSIRRLGGISKRGDRYVRMLLTHGARAVLARARQMAAAGQPLNRLQQWAVDLDGRTCHNKATCALANKLARIAWATWYHQRDFEPDHAAMAVAV

SEQ ID NO: 441758 - protein, 352 aa, unidentified
MVVLADLVDHVVGVDPDRDRVTAAVVSVTTQGELASETFPATRRGYGQALRWAKTFTIDERRAWAIESTGSYGAGLAATLAEKGEFVIEFDHPSTRASKDGAKSDALDAVRAARETLGRKTWATPRSRGLREGLRTLIVARDSAKLARVAAINILKALVVTAPVDLREELRGHTLGQLVDRCMRLRPDTATDPEHAATKLSLRSTASRIKHLTIECRELEDAMLPIVREICPALLAETGVGTLVAAQILISWSHAGRCRDEAAFARLAGVAPLEATSGQNQTRHRLSRGGDRQLNRALHTAIMARAKVHPETREYLTRRTVDGKTKREAMRCLKRYYARHIFRLLESTATPT

SEQ ID NO: 441759 - protein, 418 aa, unidentified
MKVVYERCAGLDVHKKTVVACVLTPDEAGGWRRETRTFSTMTAELLALSDWLQSWGCTQVAMESTGDYWKPVFNILEATVEVLLVNAQHVKAVPGRKTDVKDAEWLAELLQHGLLRASFIPPVAQRELRDLTRYRNTFIRERATLVNRVQKVLEDANIKLGSVASNVMGVSGRAMLEALIAGDTNPERLADLAKGRLREKRPQLIQALEGRVKPHHRFVLTELLCQIDSLEETLARFGEQIQQQMSQADLPFESVAGLLDTIPGIARQAAEGIVAEMGVDMSRFPSADDLASWAGVAPGNAESAGKRRAGKTRKGNSTLKTLLVQVAHAAAHTKNTCLAAQYRRLAARRGKKRAILAVAHSILVMAYHMIRNNEPYREAGADYFDQLRPTDTANRLKKRLEALGYQVTLEKQASAMAV

SEQ ID NO: 441760 - protein, 352 aa, unidentified
MDKITRVGVDLAKNVMQVHAVDGAGRVVVRKAISRERFVSWFANLEPCLVAMEACGAAHYWARKLRALGHDVRLIPPQFVAPYRGGVHVKNDALDAEATCEAASRPHMRFVPVKSPAQQSVLVLHRMRTGFVEERTALVNRLRGLLAEFGVFLPQGIDQLRKHFVDRVEDGNNELAGPARQALMHGWAQWQALDEEIAWFDRQIAEHASHDPQAQRCMDVCRVGRLTASAAVATVVDARQFKNGRQMAAWLGLVPRQKSSGGKQRLGRITRQGDDYLRTLLFQGARSAVLTAHRRDDRLSRWIVQLQARVGYYKTLVAVANKHARILWAVLAKAERFDPSHAPARYSRAAGA

SEQ ID NO: 441761 - protein, 347 aa, unidentified
MNFYTQQHKHYCGIDLHAKAMYVCILDQSGTKRVHKNLPTTPEAFLRVIAPYREDLVVGVECMFTWYWLADLCQKEGIAFVLGHALYMKAIHGGKAKNDKIDAQKIAVILRGGMFPQAYVYPSEMRATRDLLRRRCHLARKRAELLAHIHNTNSQYNLPEIGKRLANKSNREDVADHFPDPSVRKTIEVDVSLIDHYDQVLGEVELYLTRSAKTDDVQTFARLQSVPGIGQILALVILYEIQDIHRFPRVQDFVSYCRLVKCAKESNGKKLGTSGKKIGNVHLRWAFAEAAVLFIRQSQPGKEYFTKLEHKHGKAKALTVLAHKLGRAVYYMLTREQAFDLQRFVSA

SEQ ID NO: 441762 - protein, 389 aa, unidentified
MMIFVGIDIAKLNHFASAISSDGEILIEPFQFTNDGDGFQLLISKLDSFDKDSLIIGLESTAHYGDNLVRYLVASFYKVCVLNPIKTSSMRKNNIRKTKTDKVDTYIICKTLMMQDHLRFVTFYDLDLMDLKALGRFRQKTIKQRTRLKIQLTSYLDEVFPELQYFFKSGLHQKSVYALLKEAPTPETIASMHMTHLAHLLKSTSHGHFDKETAQQLRVLAEKSVGASDSALSIHVTHTISQIELLDSQLERVEAEMTEIMKFNDSVIMTIPGIGYINGGMILGEIGDIHRFSNPNKLLAYAGLDPSVYQSGNFQAKKTRMSKRGSKVLRYALVNAAHNVVKNNATFKAYYEAKMAEGRTHYNALGHCAGKLVRIIWKMMTDNVEFNLD

SEQ ID NO: 441763 - protein, 354 aa, unidentified
MPSKVTKPYTSAQPKLMSIGIDIGKDVFHIVGFDHNGKVVLRRKFRRLELDAVFEKLPRCIVGMEACLSAQFVSRRLRALGFEPRIIPAIYVKPFLKGQKNDYNDAEAIAEAALRPNLKLVKEKTQEQLDLQACHRVRSRLVSRRTATINQIRAFLIEHGIAIRTGANSLRRSLPEILLQRADELSPRMRVLIEELHGDWLRLDARIEALNEEIEEISRQEKSCQNLMTIPGVGPLISTATVAAIGNGEAFERGRDFGAWLGLVPRQYSTGGKPILGRISKRGSKYLRTLFIQAANVILMRPQNWPRYSFGGWLVTAATRLHRNKLATALANKLARIAWSVLRYNERFDDAQTV

SEQ ID NO: 441764 - protein, 311 aa, unidentified
MEHTIGIDISKDELHVHRLPDGKQRCYRNNRTGHRALIKWLRASPVERIVYEATGPYHRALELALGTAGLPLVKVNPRRARRFAEAVGTQVKTDPLDAAMLARMGVAIEPECRPVPGPEMADLKDLRRAHQALIKDRTAAKNRAKHLRLAILRRQNANRLKQIEDDIEAIEDAMMAIVRQDQAFSERFDILVSIPGIAKRSALAILIDMPELGAIENKSAASLAGLAPVTRQSGTWTGRAFIKGGTANLRQALYMPALVAIRFNAELKAKYETLVAAGKPPKVAITAVMRKLVVLANALVRDQRKWSPNLP

SEQ ID NO: 441765 - protein, 410 aa, unidentified
MAWHEVACGLDVHRSSLVACLVRGGPGSEREVEERRFGTTGREVAGFRAWLEAAGCQALGMEATGVFWRPVFREMEGRMRVVVANPAHVKAIRGRKTDRKDAAWLAGKVQEDGIPSSFIPGLEVREGRDWARLHTNLVQARTQARNQTLKLLLGAGIPLSAVLSDVFGVSGTALLEALSEGRTAWEELEGSLRGKARLKADQIRLALEVTLREGEREQLSFHLKRLKVLDEQVVEANEHLKAWSEQFRGKRILLTTIPGIGELAAQLILAEVGPDLSAFPSAKHFAAWLGLAPASHESGGRSRPAGTRKGNHRLQSLLVECAQASARTKGCSLRTKYLGLKARMPAQKAIVAIAHKLALIIYRVLMDDAPYQEREQDSAPSPARARQLRQAIRLIQDCGGAVQMPQKDSV

SEQ ID NO: 441766 - protein, 394 aa, unidentified
MKNRSNVGRRRSKTKTKAKKATLQEIAELSGKEDVTVGIDIGDRSSRYCIVDSSGSIVIEGKLETTREGLKTGFAGFAPTRIALEAGTHSPWISRQLTELGHDVIVANPRKVGLIGQSSRKNDQADAAKLAMLAHANPDLLYPVQHREEQAQADLAVIRAREELVKLRTSVINMARGQAKAVGHLLEHCDADAVDADMADKLPEVLRVSVRMLLVTAAQLTVQIKAADQHIHQIIVRYPEISLLTPIKGVGELTALAFVLTIDDKERFGTSREVGPYLGLVPGQDQSGQTDRPQRITKEGDRLVRWLLVQCAHCILRKNAPDTDLKRWGQQKIDEQVKQQQGKKKRPNKKKVLVAVARKLAVLMHRLWVNGEVYDPLYNARQQEASAQSKKKAA

SEQ ID NO: 441767 - protein, 359 aa, unidentified
MREQRNKISFRGQKIYVGIDVHLKSWSVTVLSETSVLKKFSQHPSPEALYGFLTRSYPGAEYHSVYEAGFCGFWIHERLTALGIDNIVVNPADVPTKSSEKLRKTDTVDSGKLARSLRANELKGIYTPDSVSLEMRSLIRLKNSITKDTTRQKNRLKSQLRYLGIGIPQEFLEPFSNWSKRFFAWLKEVETLTPSGRQALDIQIRHWEELRRQKLEMTRALRTLAKTDRFREPLRLIMSIPGFGQATGMAFLSEICDITRFRNAEQLAAYIGMIPMCHSSGEKDGTGDITLRKHAVMRCNLIEAAWVAVRQDPAMNLFFTEQCKRMPKSKAIVKVARKLVNRLYFVLKHQTEYVNSVVS

SEQ ID NO: 441768 - protein, 365 aa, unidentified
MTPINHELLHTMKYYTSTTEFNCGIDLHARQMYVCVMDRTGKILVHTNIRNNDFAYFLKLVAPYRHDLTVCAECMFGWYWLADACADAGIHFVLAHALYLKAIHGGKNKNDRIDSEKITHLLRSNLIPPGYVYPAEKRPLRALLRQRLLYVWNRSELLSRLQSHQLAYNRPTCRQNIYNREPWAEQLLAQEPDHVRQLALQNDLALVGHYDTQLACLEKELLKLTKQTASRDFTLLQTTPGIGDYLGLTILHEIGDIARFPTVKDFLSYCRLVKGTVASAGKIKGLRGAKLGNPYLRWAFGEAAVVAKRDPLVIGPLAQRLEARLNNKFKANTVLAIKLARAVYFMLKTKTVFDPERLVAALSRN

SEQ ID NO: 441769 - protein, 341 aa, unidentified
MEQATTIGLDIAKYVFQVHGADSAGHVLFRKRITRGKLLGFLAAQAPCVVAMEACAGAHYWAREIAKLGHHVRLIAPAYVKPFIRRQKNDAADAEAICEAAQRPSMRFVPVKTREQQANGIVFRARDLLVRQRTQCVNALRGHLMEYGYVFPKGITHVETLAAVVEDLQSSLPDRVRVILQLLVDTFTALEAQITALDAEINQRSKSDPTARRLMTIPGVGPITSTAITALVPAAEGFPAGRDFAAWLGLTPLQKSTGGKQKLGAVSKRGERTIRRLLIIGASAVVQQASRRGAPKGSWLAQMLARKPKMLVTVALANKMARIIWALLVKGGTYRTPTAAA

SEQ ID NO: 441770 - protein, 316 aa, unidentified
MNEMIVEKFVGIDVSKSTLDVCIEPAVQTLHVAYDEAGIKQIAVRLKEVNPTLIVMEATGGLEVRIATELAGQGLPVAVINPRQARDFAKATGQLAKTDKVDAAVLAAFAQAIRPQVRPLKDADTRALDDMVTRRRELIDMRVQETLRLGTAASKPLEKSLNKHIVWLDKRIAEIDTDLAQRLRKSDVWRTKDDLLRGIPGVGPVTTLTMLAKCPELGLLNRREIAALTGVAPLANDSGKHRGKRFIWRGRADVRAVLYMAAISAIQHNDAIKAFAERLKKAGKLPKVVIVACMRKLLTIMNSMLKNNTPWNPKNA

SEQ ID NO: 441771 - protein, 340 aa, unidentified
MEAIAVIGIDLAKSVFQVHGVDAQGQVVVRKRLTRAKLLPFFTKLPQCLIGMETCASANYWARELMALGHEVRLMPPQYVKPYVKRSKNDASDAEAICEAVTRPTMRFVGVKSTEQQSVLVLHRTRLILTRQRTQTSNAIRAHLAEFGIVAPIGRLGLDRLIAVVGNEQDSRLPMPARRCLAMLVEQHRLVLAHLLDADRAIRAHSRASEIGRRLQEIPGVGPLVASALVATVPDPHVFRTGRGLSAWLGLVPRQHSSGGKERLGGITKAGDTYLRKMLFVGAMAVIRHAERYGTRRPWLTKLLSRRSPRVAAIALANKIGRTAWALMTSGERYREPVVA

SEQ ID NO: 441772 - protein, 323 aa, unidentified
MGVPTVSIDSTTIIVGIDVSKEYVDFFVLNRKGDPSGRRPRRLKDLTMLAAELAALKPQLVVMEATGGFETVVWAALEAAGLSVAVVHPKRVRDFARSLGLLAKTDRLDARVLARFGELLGPAPTPLPSRAAREGRELLRHLNALVDMRAQQRTRKRQLEGEGVLASVERVIASLSEEIALLEQQVEHALRARPAECERAARLRTAPGVGPKTSWALVAELPELGQLSGRQVAALAGLAPMARDSGRFRGRRRIIGGRARVRTALYMAARAAVRCDPQLAAFRARLLAAGKPKQVALIAVARKLLVALNAMIRDQRPWIPLPA

SEQ ID NO: 441773 - protein, 341 aa, unidentified
MEQFIGLDVSLANTFISVREGGQRVWRGKCPSDPKLIAEVIRKRAPSVQRVVFETGPLSIWFYHALTLEGLPAICIDARHAKAALDMARNKTDANDADGLAHLAEVGFYRAVRVKSFDSMLTRTLVAARNQLIKATTQLSNQIRGQMKTFGLIIPKGAGRVFEGHVRSLLASNAGLEQIILPVLEAWRGLRTRAAELSKQLVASARISEQCQLLSSIPGVGAVTASSFVAAIEDPENFKKSRSVGAWVGLTTRRYQSGEVDYDGHISRRGDNHLRGMLYEAAVVILTRTMADSALRIWGLKLKEKIGFKRAAVAVARKLAVIMHTMLRTGELFDRSIPAKA

SEQ ID NO: 441774 - protein, 475 aa, unidentified
MNVKGTKKKNQVATANIFEQQELLKKAEVIKKNLTASTWRELETNGKFDKNEKLSFISDDMLILGCDVGSETHYLRAIDTRGRELSKSAFPFSNDSAGFQSAKEWAVRIAAEHEKKQIVLGLEPTGHYWFCLATWMIFNGISVVQVNPYAVKQTKEVEDNSQLKDDTKDPKLIANLVKDGNFGMPYLPEKLYAELRRLSMFRDQLNEDRIRAINRMHREMKIYFPEYKDAFGKVDGAFSLELLKSAPFPDDLKALDEDGIRQIWHEAKLRGRGYIRSGEILGYARSSVGIRDGADAAKIAVQWFVKKIMELDEELAVIENLINHKCKEIPHTGNILEISGIGENTLSGILAEMGDISRFDDVKEIQKLSGLGLVACSSGKHKGETKISHRGRKRLRYWLFQAAKSAVAHADEFKELHIYYTTRTKNPLKKMQPLIVIACKLLRIIYTIMKKGTAYDPKKMLTDIKRQEKQEALAA

SEQ ID NO: 441775 - protein, 336 aa, unidentified
MEHLAIDLGGKESQICIRDEQGTIVEEMRVRTQSLAAYLKKRPPSRVVVETCAEGFAVADAAVACGHQVRVVPATLVRTLGVGARGVKTDRRDAQVLSEVSTRIDLPSVHIPSEEARRRKSVCGMREALVGSRTQLVNNVRGWLRTQNQALKKGGVESFVQRVKDVGRKGLELPGFVLRTLETVEHLCGQIKAADKELEGLAKTDPVCQRLMSVPGVGPVTAVRFAAALDQAQRFGTAAQVASYLGLVPGEDSSSERRRLTRITKAGSKQTRWALVQASWNFLRWAKDNDPVLLWAREVMRRRGKKVAVVALAHKLSGILYALWRDQSEYQLRRPG

SEQ ID NO: 441776 - protein, 376 aa, unidentified
MKKNSTSNAARPTKKGPSISKTKSPKNTPKMTVGIDLGDKQSAYCILDADGDVLSEGTTRTTEGGFEQQFQNMKPCRIALETGTHSPWVSRLLQSYGHDVIVANARQVRIIYESDRKNDKVDARTLARLARVDKDLLHPIRHRSEKAQADLTMLRARDALVQVRTKLMNCVRGMVKSVGSRLPGASAECFARKVREHLPEAIRDALTPLLDQVEQISTQLREYDKRIEQMAKKDYGQTQLMRQIPGVGVMTSMAFTLTIDDPHRFSKSRDIAGYLGLLPRQSESGDSKPQLRITKAGDHMVRRLLVGCAHYILGHFGPDSDLRRWGQSLMVRGGKNAKKRAVVAVARKLAVVMHKLWVTGEVYEPLREVNQVKVAA

SEQ ID NO: 441777 - protein, 313 aa, unidentified
MEKLYAGIDVAKATLDVAINGQKEVKSFANSEEGMLILVDYLKTKAPVLTIAEATGGLEKLLAGYLTEAGLQLAIVNPKRVRDFAKAKGKLAKTDTIDARIMAEFASDIHPEVRPLADQKAEGIKSIMTRRHQVMGMITAERNRLSVCGKSVRPLINSHIEWLKNQMKEIDKNLQDQIVDSPIWKEKDNLLRSVPGVGRILSFSLMGLLPELGKLNRKEIASLAGLAPVNRDSGTMRGRRTILGGRARIRTPLYMAALVATRCNPIIKSYYLHLLQSGKVKKVALTACMRKLLTILNAMVRKNQTWQSGHFCG

SEQ ID NO: 441778 - protein, 353 aa, unidentified
MDYYGVDVHKKYSVFARMDQWGKVVAEGRISNTPEGVAAMLSPSQGTAEVVLEACGLWPYVYDLLQAHGAKVSLAHPLRVKAIAHAKVKTDKVDARILAHLLRADLVPESYAPPREIRELRELLRSRYAWTQQRTRSKNRIHGLLAKRGYQAPARDLFGQKGRQWLDTLSLDQTARTLVERELEVVDVLDQVIADASQEIRQRAGEDPMAQLLMTMPGVGYYTALLLVAELGDVTRFPSAKHIVAYAGLAPRVRASGGEAHIGRITKQGSPYLRWILTEAAHRAVRLSPRYLELFLKKRAQRGLQRAMITVVRQLLSDAYGILKHGRPYEERRGQSSTSTMADLARSTAPLSD

SEQ ID NO: 441779 - protein, 313 aa, unidentified
MKKTICGVDVSKARLDASIEPGDIFAGFDNDTAGIAKLAAFCRQHGVSLVVMEASGGYERRAFLELWQAGLACALVNPRNVRRYAEAMGRLEKTDRIDAAVIARFAIAKDLAPTPLPSPAQQRLKALDARLKQVTGDLTVQKQRRASLLDNPEMLASIDEVIALLKRQSRSLEGEIASMIDDDPLWALLAQSWRSIKGVAGRTVARLHAQLPEIGTYSNKAIAKLVGVAPLADDSGKHKGKRRIHGGRAEVRSILFIVARTAALYDKSLADFRDRLAAAGKEKMVIRIALARKLLVRLNAKARDARAEYANAT

SEQ ID NO: 441780 - protein, 336 aa, unidentified
MLLYCAIDLHSNNNVPVVIDQHDNILFQRRLPNDLDTVLLALEPYKQHLFGVAVESTFNWYWLVDGLSDAGYPTCLVNTTKVKQYSGLKHTDDKDDAFWLAHLMRLGILPTGYIYPREQRATRDLLRKRAQLVRHRTTHVLSIQNQYWRNTGVKLKADFIKRSNDYLGEVEDKDIRLAMGSNHRVIQVLDEQIKQIERRVKEQVKLLPEYELLLTVDGIGDILALTVMLETGGIGRFREVGHYASYCRCVDSQFRSNDKKKGEGNEKDGNKYLAWAFIEAANFAKRYNEKARRFHQRKKAKTNNVVATKALAHKLARACYYIIRDQVPFDENKLFA

SEQ ID NO: 441781 - protein, 397 aa, unidentified
MIAVGIDISKAKSTVAVIDSDGTVLASPFTMAHTQPEMEAFVSYLKGLGEPTTILMEYTGHYHYPVLKKLQDEGFPVCIVNPYQMKKYGDVEIHKAKTDKKDALRIAAYALEKSYKLVPYSSMEQKYEDLKFLSRQYSQRITYVAKLKVQLIALLDQTMPGITRILPLNSRNPEKCALLLFIKRFKSFDEIQRIGKARFLASYNVLAKKASERSASSKGLSIYELAVDSITTRGEDPYIWLSQNQCVDLLSATQNAADEIISQMRNIAETIPEYKVLRAMHGVGDRLGPIILAEIGDVHRFHSGKALNSYAGNDAPPYQSGQFESRNRHISKRGSSTLRKACYEVMQALKLTKPQDDPVYLFMLKKEQEGKPFNVAKMAGVNKFLRIYYARAMELYK

SEQ ID NO: 441782 - protein, 382 aa, unidentified
MKGNVCGLDVHKDNVFVCILKENGEKILFRVGILTPDLDSLRDMLVSHEVGEVCMESTSFYWMPVWRVLESDFHLWLVNPFAIKQLPGRKSDVKDGEWIATCLKKDLIRGSYVPDAVIQQLMQYNRRVFDIVREMNFLHNKLDALLQRCNIRLSNYVSNVDTKAYREVSMKLAEGVTDSDELLKSVHKRTRNKWGDDVLRAALTGVVTEVDSELIAMYMEELELLRTQKVRCLTRMREISQKHFPKQLANLQTMPGVREQSATQIIAEMGVDMSTFLTAAMLVGWAGFKPRNDESNGKMKSRKTTHGNKYLRKLMVECAWGATRTKECFYSRFSYHQTQVRKKNAMKVRVAVARKQIVAIWHILSEECEYKEYCAQQETGKD

SEQ ID NO: 441783 - protein, 347 aa, unidentified
MEKTVLVVGADISKDEFHVCAKVRTADGKVKIVGTRSFSNNTSGFVEFVLWVSKRSKENWSIRYVMEATGSYYEDFAYYLYETGSRVSVVLPNKIKHFAKSLNLKTKTDKVDAVMIAEIGIERELDAWQPMLPQYKMMRDLSRELLSIKKEKSRAMCQLHAMKHSHEKTDSVIEIKQKQIEFYEQSILLIESEIEKIVEADTDLKQRVEKIKKVKGLGLITIIIVLCETNGFLLFNNIKQVVSYAGMDIEMKESGNFKGKTKISKRGNARIRQCLFMPALAATVHNEKIKELYERINERNPKIKKKGVVAAMRKLLILIFVLWKKNEEYNPDHQWQRKDIKIVGEGC

SEQ ID NO: 441784 - protein, 343 aa, unidentified
MNHAAIDLGGKESQICIRQPDGTILEERKVPTRKLTELVATWAPSRVVMETSAEAFRIADAAIAAGHQVRVVPGTLVRLLGVGERGVKNDQRDAQQLSKASWQTDVPSVHIPSKPARELKSICGARDVLVGTRTKLINNVRGWMRTQLWKLRSGTTSTFADRVRGHAAALGETLPEHIERQLRMLSVVVEEVKAADKQLRTLAGEHEVCRRLMRIPGIGPVTALRFVATIDEPGRFATAHRVQSYLGLTPGEHSSSERERRTGITKAGPMALRCTLIQAAWATMCLVRTSHPMIDWARRLAERRGRPVAAVALARKLAGIMFAMWRDGTTYQAKRSAEAIEHS

SEQ ID NO: 441785 - protein, 358 aa, unidentified
MSAPGIAVIGGVDTHTDIHQAAVIDSVGRHLDTQSFETTSAGYGQLLAWLRAQGEVIAVGMEGTGAYGAELARFLTASGITVVEVDRPDRRARRAHGKSDPIDAYAAATAVLSGRASGTPKSRDGIVEAIRALRVVRKSALKARTQTINQIRSLMVTAPSALRDKLRGLPTSVLIDTLARTRPTADLTDPACAAKTALRRLARRYQALQQEIKEADADLAPLVTRAAPSLVALPGVGTETAGQLLITAGDNPDRLRSEASFAHLCGAAPIPASSGRTHRHRINRGGDRNANSALYTIVLVRMRHDRRTRDYVARRTAEGMSTKDIMRCLKRFVAREIYRHLRSTSILNTDPADQLDDL

SEQ ID NO: 441786 - protein, 343 aa, unidentified
MAYFAGLDVSVKETSICIVDDTGKIVREARMASEPEALLQVLTNNNYRFKRIGLEAGPLSQWLFSALAEAGLPVICVETRHMRAVLKAQINKTDRNDARGIAQMMRVGLYRAVHVKTLRSQKLRMLLTHRKLLQSKAIAIENDLRGTLRNFGLKVGMIGAVKFEERIRELVENLPDLAVLVEPLLIVRRVVREQLGILQRRVLAVVRDDEVCRRLMTIPGVGPVVALTYRATVDVPARFRNSKAVGAVFGLTPAKYKSGETDRTGAISRCGDEMMRMMLYEAAQSMLVRSTKWSWLRAWAMKIARHRGMKKAIVALARRLAVIMHRIWVDGTEFRWTREVTAA

SEQ ID NO: 441787 - protein, 386 aa, unidentified
MTQVSTAIADAGREDGTISVALELSKARWLVGIALPRSSKISRYGVTGGDTAGLLKLLQAARAKAAQLGFSEARVVSCYEAGYDGFWLDRWLKQHGVNNRVLDPASIEVDRRARRAKTDRIDLDKLMRVQCALDRGEPRACSVVRVPSVAEEDAKRPHRERQFRVRERVRHVNRIKGLLSKEGVRGLDPGRPDFVRRLSAATTPDGRGLPPHLLAELRREHQSLRLAIAQIAELEAEERARITAPRGDPNTAKIANLIGLRGIGLASAVPLVREAFYRAFNNRRQVGCYFGLTGTPYCGGAMAREQGISKAGNPRARGIAIELAWLWLRHQPDSELSRWYRVRVAGQQGGARKSAIVALARKLMIGLWRYLETGLVPTGAVLRPVR

SEQ ID NO: 441788 - protein, 415 aa, unidentified
MNHPKMRYTYVGIDSHKDTHTAVFIDCFFEKLGEITFNNLPSAFSAFLFDANKLKMDGTELLFGLEDVSSFGRTLTVFLTNNNQQARHVNALLAARERKNQNITQKTDSVDAECVARVLLSKFGELPAADPQDKYWILRTLVVRRDQVVNNNVRSRMTLHTLLTQHYPNYRKFFTYIDGKTSLAFFSKYPSPSTLKNVTFEELAGFLRAESSDYFGEKKAREILDSIEDTTVQFQEIRDDAVRSAIRQIEFNLRELERMEVLMAAYLESFNCTLTSMAGIDVVSACQIMSCIGDINRFPTPAKLARYSGIAPVTYASGQKSLQFANQRGNRELNSLFYSLAVRLSSPTGPQNKIINRFFYDYFQRKRSEGKTKGQALKCVERRLVNIVWTMLTNNEEYVNPPIFDKPDKPDETRK

SEQ ID NO: 441789 - protein, 421 aa, unidentified
MSKQNVEIAAFIGLDWADQKHVLTLQEAGSDQRHRFTLDHTPEALQSWIQLLRNRFGGKPVAIAIEQTRGGLIYALMHVEFIHIYPVNPQTAAKMRQAFYPSGAKDDPTDADLLLEILMTHRQHLRVWVPDDVLTRSIQLLTEGRRRLVEERTALTNQLTAALKEYFPQALDWFGDLNTARACAFLQRWPSLQDLKQATPSSIRKFYKTQGYRGQDKLEQLITNIKDAQPLTEDDAVLLASAMMVHALVMAIPSLTDSIERYDQQIAALFDQHDDSTLFGSFPGAGPALAPRLLAAFGSDRDRFECAADMQQLSGIAPVTEKSGKGIWIHWRLACSTFLRQTFHEFAAQSIFQSDWARAYYDQQRQRGKSHHAALRALAYKWIRIMFRCWKTRTSYDEAQYCNSLKIRRSPLAAELAAAEK

SEQ ID NO: 441790 - protein, 424 aa, unidentified
MNDTLNKKIEQVTDKTLIVGVDIGSEIHYARAILVRGYEVSKKPYRFENTDEGFSGFITWAFNLAVENNLTKIMIAVEPTGHYWFNFAEYLKKYDVQLVLVAPQHVKHSKEMDDNTQEKNDRKDPLVIAKLVPEGRYLIPYIPEGIYADLRTAFNRRCELVDAQVRNSNRMNRWFDVYFPEYKTVYDRIDAISGLAVLKRAPLPADILALKEDGIYQIWREERIRSVGINRARKIIAAAESSVGVKGGVAARWEFWQLMEEHDLIVRQLHDIMLLIEEYLRQIPGADRLLKVPGAGIVTVAGFLAEVGDIKRFTDPKQIQKLAGLAVVENSSGKRKGMPGISRRGRGRLRWILFQLARTMVKFNKEMRTYHLYYTTRKENPLKKMQSIMAIAARIARIFYGILKNGTEYDPAIVMRDLNKVVSA

SEQ ID NO: 441791 - protein, 355 aa, unidentified
MNQEKYIGMDVHAATISAAVKNAEGKLLMECVLETKAATILEFIQGLRGTLALTFEEGTSAAWLHDLLKPHVSRLVVCDPRKNALMRDGNQNDRVDARNLAELLRTNQVKPVYHGEHGIRTLKELGRSYSTLTQDSTRVMNRIKSVYRSWAIPCAGTSVYSRRHRAEWLAQLVEPGVRIRAEHLYQQLDSLEPVRQAARRELLRESRKHAAVKLLRQMPAIGPIRSALLVAILQTPHRFRTKRQLWAYSGFAVQTYDSGEYRFVRGKLQRNRERITVRGLNRNHNHDLKNLLKGAAISAIQRPGPLQDFYAALVEKGMRPSMARLTLARKIAAITLIIWKKGVSFDPKQLQRQTA

SEQ ID NO: 441792 - protein, 391 aa, unidentified
MRFVGIDIGAERHMVASIDEQSTVLQRPTAFREDAEGYQQLIGLLGPPAGTLIVMEATGHYWQNLFAMLAAEGFAIALINPLRTRRFAEEDLVRTKTDAIDALGLARFGQQKRPPATLLPNVATRDLRELVRLRARFLQDFGDRTRQLHRVVDLSFPEFTRYVVQLDSPRATALLQAFPTAAAVRTASERQIASIRGGQRPVGRELARALKSAARTSVGHHDTEVYARQVRFFCEDLDLLRRRLGNLERDIEHLLAAHQVGQLLTTIEGIGPQTAAKLVAELGDPAAFRSAGALAAYVGAIPGLRQSGNQTWDRAGLTRVGHAKLRAALWMPTLVAVRRNPWLRAYYQRLRARGKLPKVALMAAMRKLLIAIYTVAKHRRPFIPIITMTTP

SEQ ID NO: 441793 - protein, 364 aa, unidentified
MKRKVYVGMDVHKETIRIANLTSNTKEIVKEQQIKHNEVQIKKFVNKLKSEWNEIHSCYEAGVTGYPLYRYLKSLGVNCILVAPGKIPRQSSDKIKTDKRDAIKLAKLLRSGELESIHVPSEEDEAVRDYLRSRDSLRLDLGRNRQRLMKFLLRKGITYSATKYWTVSHNKWLNNLQFNNEILQETFNDYYSRVRVQEENLKAMDKRIQEIAESEPYREKVGILRCFRGVDYLTAMFLLCEVYDFKRFKTAGSFMSFLGLVPGEYSSGSKRKQTGITKTGSPRLRRILTEAAWQHRFPGTGSKIVTARRSGQPALVVALAEKASLRLHKKFRNLQQRGKTPQVIITAVSRELSGFLWAAMNLVA

SEQ ID NO: 441794 - protein, 335 aa, unidentified
MRGVDAEGNVVVARRLRRKEVLAFFANLTPCLVGIEACGSAHYWAREIAKLGHTVKLMPPRYVKPYVKRGKTDPGDAAAICEAVTRPTMSFVPVKGLEQQGLSMLHSARSQLTGQRTQLINAVRGHLSELGIVAARGMLGFAELAAIVRDESDKRLPVTARAALMILVRQIETISTEIAALDSTLRKENNASELGPRLESIPSVGPVIASALRARVTDAALFENGRHLSAWIGIVPENDSTGGKIKQKGLSKKGDRYLRSLLVNGAMAVVRQAQKRPDKHPWVAKLLGRMSAKQAAIAIANKTARIAWVLMVHGGVYEAGHRAPQYRAQACVAAG

SEQ ID NO: 441795 - protein, 346 aa, unidentified
MEHYVGIDVSLELSSVCVVDGRGKIVKEAKVASEPEALVYFFKELGFPVNRIGFEAGPLSQWLHAGLTQAGFETVLLETRHVKAALSAMTVKTDRKDACGLAHLLRMGWFQQVHAKSIGSQEIRALLVARKQLLGRLLDVELSIRGILRGFGLKVGQVTRKTFEARIRELVTGHTTLERIAEAMLLARATLKAQYEKLHKAVLAIVREDAVCRRLMTVPGVGPVVAVTFKSAVDDPSRIAKSKAVGALFGLTPKKYQSGEKDVTGGITRTGDEMVRTALYEAANVLLSRITRFSKLKRWGMDVAKRRGSKRAKVALARKIGVILHRMWRDGTTYRWAETKPIAAQG

SEQ ID NO: 441796 - protein, 354 aa, unidentified
MTGESLAQQVVIGVDTHDLVHVAVAVDHLGRRCDDISIPASPAGYERLVTWALEHGSVAAVAMEGTGSYGSALCTLLQARGVRVVEVSRPSRQHRRNRGKSDLIDAEAAARAFLGGEATAQPRGGDAAIAMIRCLRVAREALVNQRTQTINQLRALIVTAPAELRASLAPLSAPRLIKRVARFRIDGVVSPADATRFALRQLGRHVRAIDVQIDELNDRLTPLVSNRAPELLALHGVGVDVAGNLLVAWDNAERIKSEAAFAALCGVAPIPASSGKTSRHRLSRGGDRSANRALWRIVLTRLRTDDRTREYLVRRRAEGKSQREVVRCLKRYVAREVFHVLQRLTPVIPSLDTT

SEQ ID NO: 441797 - protein, 312 aa, unidentified
MTDYTIGVDISKALLDVHLLPDGETRQFTNQRCGFDELIQWIGRRKIARIVYEPTGAYHRSFEDALSKAGLPLAKVNPLQARRFAEARGTRAKTDRVDAEVLAVMGGALKLGVYIVPSRMLRNLKALQIARQALIKDRTAARNRSKNLTLAMLKRQNANRLRQIDRDLAAIEKKMLALINTDEKMARTFRILCSIPGIAQITAVTLIVEIPELGMLTSKAVASLSGLAPFARDSGKWKGKRFIGGGRKFLREALYMPALVALRFNPDMKAKYQQLKNAQKPSKVAITAIMRKLIILANTLVKKDKMWINNNA

SEQ ID NO: 441798 - protein, 464 aa, unidentified
MKVKHQGKENSKKEENVEFPRHLQHINMHAAGIDVGSRSHFVAVPEKPDEECVREFNSFTCDLNKLADWLEENGIETVVMESTGVYWIPLFELLESRGFEVKLVNARHVKNVPGRKTDVLDCQWLQQLHTYGLLEGAFRPPEQICALRSYLRQRSTMVRYAASHIQHMQKALNQMNVMLHIVVNDITGVTGMKIIRAILQGERDPHVLASFRDRRCKEKEATIAKALEGNYRAEHMFSLKQAVEMFDVYQEKIAQCDREIEDALNQFGGKIDIENKPLPPQPKKHRPSRNEPKFDLRSHLYRITGVDLTRIDGITAYGALTIISEIGVDMSPWKTEKQFASWLGLCPGNKVSGGKRISGKSKPTANRAASALRLAAQGLYNSHSALGAFLRRQKARLGAPKAITATAHKLARLVYTLLQQGTEYVDAGQDYYEEQYRQRVIYNLKRRSKQMGFFLIDKETGAIA

SEQ ID NO: 441799 - protein, 436 aa, unidentified
MTSPCLSYNYKYQEVNLLSFKIIKKNCCGLDVHKTWIYACIGIADANDRVEYKQARFSSFTKGLQELCDWLAKYHCSDICMESTGKYWIPVFNILEKNNLWVTLSHPKYTKPMKGNKTDRKDAKWICDLYMCGMVKPSFIPPADIRHLRDLVRYRFKLSCMITGEKNRAQNCLTVSNLKLDDVFSDVFGKSSRSITEHILQHPGETFDVTPFVDKRCKTPIEEIQAAVDGAVSPEQAVKLRQCLDHIDELEKHISEVAQEIYRLSEKYEAALELIRTVPGFDKNNLTAIQILSEIGGDMSVFPTAKNLVSWAGCCPRNDQSDRKIKSTRISRAGSYIKPVLVQIANALIKSKKHPEFTDRYRRIKARRGHKKAIIAICRMLLTAIWHILSDLKPYTADGFLEPRPVNESRVLTTSQALNLLKQRGYTIKDDPATAS

SEQ ID NO: 441800 - protein, 404 aa, unidentified
MTSDDRPLIFLGLDIGKSAHYAVGVDRAGQTVYSEPVANEESALRLLVLWARAHQATVIVDQPGGTAALLLKLCWDAAIDIGYVPGLAMARARDFYAGDAKTDPKDAFVLADVARAHPNRVVWLRETSAARTQLELLNSYDADLREDAHRLTNRIRALLATYWPAFERAFGDRLDTIGGTALLKLYPSAPQLRQAGAKRLVTLLRATHRVHQPEPWVEQLLVAAKSQTVVVAGADTAAGLIAELAEQLHRVLARRQRLEKEIERAFFNLPEASILRSMPGIGPRLGARILIEIGDIRQFRTSAQLAAYAGLGPTPHQSGTSIRGNRATRFGNHRLKDAFFLAAFSSLKHPPSRTYYDRKRKKGKRHSQAVLCLARRRVDVLHAMLMTNTHYQVPSHPSDLKTAA

SEQ ID NO: 441801 - protein, 388 aa, unidentified
MIYVGIDIAKTNHYASIVDYSTGEVIENPFLVTNNKQGFDLLYSKIKDFNKEKVLIGLESTAHYGNNFIFYFHDKQFKIALINPIQTSSLRKTRIRKVKNDKVDSLLICEALSLGYYNLLSNYDIELLEIKSLCRFRKELKDKTSEAKIQLNSYVDQVFPELNYFFRNNLDIKTARELLKLYQSPQDISKLNLIKLSNLLIKFSRGKYDKNRAIELKKLASNSIGINNSALCIQIKMTIELIELLESQINDVEKRVGDFIKKSDNVITSIPGIGDMTAAIIISEIGDINRFNNPGQVLAFAGLDPSVKQSGTFNASSTRMSKRGSSLLRYALILAANNVQLNTKTFNSYYNTKRLQGKLHYNALGHCAGKLIRIIFYMLKNNVKFNLD

SEQ ID NO: 441802 - protein, 347 aa, unidentified
MALASISVLGVDLGKNLCSVVGLDAFGKVVMRRKVRRETLIRLAEKLPPCVVGMEACCGAHHLARIFAAHGHEVRLMSPEYVRPYVKAQKNDDRDAEGIAEAATRPTMRFIDLKSQDQLDMQTLHRSRDRLVGERTALINQLRAVLLERGIVAPKGRRKLEEFLADFMDERGGAELSPRMILLVADARKQWAELDRRIAAFDTEFVQWAKENEEARRLTTIPGFGAIVASALIAAVGHAESFGRGRDMVAWLGLVPRQFTTGGKPKLLGISKRGNSYLRKQLIHGARAALPHVAERDTPLGRWAKALMMRAHHNVAVVAFANKLARIAWAVLRRGERFAATGVPSAA

SEQ ID NO: 441803 - protein, 347 aa, unidentified
MKILSLDLGKNKTVGCDYERESGKHRFQTVFSTRAGLAQLVKEVKPDRVVIEVCSIAGWVCDLLREMGIEVQVANTSDDAWRWRKVKRKNDRCDALKAAQLSAVNQLREVHIPTIDVRQWRALIAFRQQLVRRRTRVKNHVRDLLLREGQILPRGGKCWTQLGVAQLEAMAQPLSEVGMNELWRGELAIELRQLRAVQAEIEVAEEKLDAIGAADPRVRLLRTIPGVGPRLAEAIVALLDRPERFRKVSEVSAYIGMVPKELDSGETQRRGKITRHGSRLVRSLLVEVAWAGLRHNPWVRETYQRISGGKKSRQKIAIVAVGRRLLVRCWAMLRDGTSWRWPAAKVA

SEQ ID NO: 441804 - protein, 348 aa, unidentified
MVRFVGIDIGKAKCRAAITDPSGVILDEFTFTNNHEGIEDLASRLNMHDRVVMESTGSVWTNLYNHLDEKHIPVVLANPLKTKAIASAKIKSDKVDARILAHLLRSNLVAESYVPPKHLREIRALVRHRAGIIKIRTMVKNEIHALIDKHGFRHEFSDLFGKRGLEWLRSLELPPLDRLILNNHLIHLESLNQQTERVDEEIHSKACEDEDVRLLLSMTGIDVYSALLIRSEIGCIDRFPDYKKLVSWAGLAPSLHQSGSIEYHGSITKQGSRTLRWIIVEAARVAVNHDTRMRGFHERVKHRRGDQKAIIAVANKMLKIIWFMLTRKEPYESRNEKRYQQKLNSIAG

SEQ ID NO: 441805 - protein, 372 aa, unidentified
MKFYDQQHRFYCGIDLHARSMHVCVLDQAGAVVFDRNLACRPESLLRTLEPFRDSLIVGVECMFAWYWVADFCVAHDIAFVLGHALYMKAVHGGKAKNDRIDAGKIARLLRGGTFPLAYAYPKGMRETRDLLRRRTYLVRKRAELMTHLQILNAQYNLEPFPKKLSFAANRAEMNIAAQFSDASVQKSAAADLAVIDRLDEVINDLELHLTRTAKIDSVQTYHRLQTIPGVGKLLGLILLYEMHEAQRFDSAGQFLSYARLVRCSHESAGKKLGSGNKKIGNAHLRWAFAEATCLFLRQSERAKKFKDKLASQRGNGKAMGILAARLARAVYHMLRKGEAFDEERFWSGGVTPNTTGASSLSRTKEASHAGD

SEQ ID NO: 441806 - protein, 392 aa, unidentified
MPQPQTAPTATVAETAPLLVSFELSADRWVVTMRQPGSGKLSRFSVAARDTARLLALLTAQREQAERRSRRAVKVVSIYEAGRDGFWLHRWLLAHEVANQVVDPASILGPQRRRKAKTDRIDGEKLLRSLAAWLSGERGVCSMVRPPSVAEEDQRRLSRERDELVGERTRLSNRINGLLANQGIAGFRPLQQDAQQVLDALRTGDGRVLEVHLRTTIERILQRLALLGQQIKAVEKQRDALVKPVPADAASGAPSPAAATMRSLCRLRSIGPEFATVLSLECFYRTFDNRRQVASFVGLAPTPWSSGSVAREQGISKAGNRRLRRTMVELAWSWTWLQPGSALTQWFRRKVAGQGGRMRRIAIVALARKLLVALWRYVTDGVVPQGAALKAG

SEQ ID NO: 441807 - protein, 354 aa, unidentified
MNSVIEPIVKCAAGLDVHQGSVTCTVLEEQSTGAPRRETRQYATFPRRLKELGRWLQERGVELAVLESTGIYWKSVYAALEEAGVQTYLVNARHVKQVPGRKTDVADSEWLAELARCGLLKASFVPPRDLRELRLLTRYRRKMSGYLAGEKNRLQKVLEDAGMRLGCVVSDIDGVSAQRMIKALAAGETDPAKMAALAAGSLRRKQADLVLALEGDLSDRHRFLLQRITNHIRWLEEQLQELDVQIVAAMGPYQEEWRLMQTIPGIDHLSAAMLLAEISPDMGRFGSKERLSSWAGMCPGNHESAGKKNASAPRRATNTSGNSCVKRPTVRRRRTASSRGSSRGSSSDGGPSEP

SEQ ID NO: 441808 - protein, 337 aa, unidentified
MKRYLGVDLHRTQFVVCTRWENGEQEIRQWRIGELPRFVKQLREEDQIAVEAMGTTAHFYDAVVGRVARVVVVNPHQFKVISESVKKTDRHDAQALALYLEKDLLPEVRMKPKQNRELMHLAETRDLLVKQRSALKGKINNLLAMQGIELKREALSSKIALARVLALPVSGMVQLELRILVEQIRSLSESIAELDERLEEEGQQLPGYENLTSIKGIGSLSATVLLTVIGKISDFADENKLAAYLGLVPKIANSNESERSGRITKQGNKLARTALVQCGLVAKRYSPYLQRFYERIKQRRGGGKAKIALARKLVKIVYDTLKNQWVFEDFPSFTLAA

SEQ ID NO: 441809 - protein, 414 aa, unidentified
MEMVRTKVCGADIHKKFLVATILSIDGTKISERFGMKLDDILKFKEWVLENNCEQVAVESTGVYWVPIYTVLEDKIEVIVANAYQIKHTPGRKTDQRDSEWIAELCLKGMIEPSRIFPKEDRELRTLTRARENLVNNSTQMKNRIHQALESSCIKISSVLSDIFGKSGRYILDGLLEGKTIDEILVGIKSKKIRKKDQELREAIKNSLDLAQILVIRICLELMEEIQKKIKNLDTEIMSRIERMKEDVEIAMSIPGIAFTSASSILAEIGNYRDFENGNKLAAWCGLVPAVYESANKRIIGSITKQGSKHVRRMLVQVAHAISRTRNSRLKSFFLRLKAKKGTKVAVVALARKVLCILHHLLVNREMYEESGNLKPKPLKFDRTSSPIQITEQDMIDTLVKAGYIIKKMDIGGE

SEQ ID NO: 441810 - protein, 342 aa, unidentified
MNKVAIAAIDLGKNSFHLHAQDDRGHELYRKKFTRTALVQHLVNLEPCTVVMEACGGAHFMAQQAVKFGHTAKLIAPHLVRPYVKSNKNDFADAEAICEAATRPTMRFVPVKTQAQQALAMLNSTRDSFIKDRTATVNRIHAALLEFGISLPAGFKSINELTALLEASSLSDPIKKLLTRMHDHFDYLHEQIKSLDKELESQVAEDDLAARLMTIPCVGPITSSALAAELGDGKQFKCGRGYSASIGLVPKQHSTGGKTVLLGISKRGDRNQRRLLIQCARVYLMHLDRQKGVLAQWVRHLIATHHHSNHVVCALANKLARIAWAIAAYHTEFDAGPSAMSA

SEQ ID NO: 441811 - protein, 378 aa, unidentified
MATSRSVLRNELTAKFGDLYMSLDLGDKRWHISIGDGQCGLSHYSVGAGQTDELADCIAKAKGRLHSSRKAIVHSCYEAGRDGWWLHRWLTAVGVDSIVVDPASIEVNRRARRAKTDRLDADKLVAMLVRHHLGERVWAVLREPSPQDEDARRAHRELQRLTHERIAHTNRIGSLLVLHNLRPSVVIGGRYWSAWWEHHRPQVPPSLAAELEREVMRLQLVKQQVRAIEAARSQELVDGKQPLVAQLTRLRAIGTKGAWVLVKEVFGWRTFANRHELAGSLGLVPTPYASGDSQLEQGISKAGNRRVRGLLVELAWGWLRLQPGSALTQWFNRRFASGGKRLRRIGIVALARRLAIALWRYLKNGEIPAGAQLKPTGA

SEQ ID NO: 441812 - protein, 368 aa, unidentified
MDEIITGFVGLDAHAESTAIGIAEAGRAAARFVGTVGAKPAELIRALGKLGKPDSLLVVYEAGPCGYVLARELAAAGYRCEVIAPSKIPRKAGDRVKTDRRDALMLASLARAGELVAVTIPDERDEAIRDLSRARVDAVRARLKVRQQLKALLLRHGRRYSGKTSWSAAHERYLAEISFQHPAQGIAFAEYHQAVGEGQARVERLTQALRQQVEDWRMQPLVSGIMTLRGLDLIAASTIVAELGDLRRFAHPRELMGYVGLVPSEHSSGSQRRQGAITKTGNAHVRRVLIEAAWNYRYAARVSRRQQVRQEGQSATIREIAWRAQLRLAHRYRRLSARGVQYNKLCVAIARELVGFIWDIGHHISPSA

SEQ ID NO: 441813 - protein, 353 aa, unidentified
MFGEKPEGGATMITVTAIGLDIAKSVFQVHGVDAAGQVVLRQRLARGRVLAFFEKLAPCLVGIEACGSSHYWARELTARGHEVRLMPAQYVKPYVKRSKNDAADAEAICEAVTRPTMRFVPVKTPEQQSVMMLHRVRLMLNRQRTQLSNSIRAHLSEFGIVAPIGRRGIDQLLAVVADAADTRVPADARLCLQMLAAQLAVVKEQILENDRRVRSSARTELGRRLMQVPGVGPLLASAFIATIADPTAFKTGRDLAAWIGLVPKQNSSGGKERLGSITKAGNRYLRQMLVVGAMAVIRYAERHGTRRPWLVQLLQRRSTKVAAVALANKTARIIWALMTSGERYREPTVAMAA

SEQ ID NO: 441814 - protein, 451 aa, unidentified
MSDLPVLDARAAFVDVGSEQMHVSVAGGPPQVFGAVTAQLHALRDWLKAQGVRSVAMEATGVYWLPLYGVLEAAGFEVRMVNGRQTRNLPGRKTDMQDCQWGATLHSHGLLRAGFVPPAHIRRMQDYMRLRADHISMAAIHVQHMQQALERMNVKLHDVIAKLTGVSGLAVVRAILGGERDPQRLLARCDTQIQRAKAERVKESLRGTWTEEHLFALSQALQSWEHYQAQIAECDRRVEALLHDIDPGQPPNACALATRPSRPGVNAPNIPDLRAILAQICGGQDLTQLPAHTEYGVLQVIAEVGTDLTPWRTEKHFTSWMGLAPGSHQSGKRKRSAKRSRNRAGRLFCVIARSLARSKDIALGGFYRRMAARRGGLVANIALARKLAALFWRVMVKGMDYVELGLQQYEAKVLETKQRSLRRLARQLGQQLVPMTTPAPTKGPSANNATL

SEQ ID NO: 441815 - protein, 319 aa, unidentified
MDFLGIDVGKSELHAAILQDERASTKNVPNSETGIRQLITWLKNRKAENIHACLESTGGWSEAVALALHREGYLVSIVNPCRIKAFAQSEMLRTKTDAVDAALIARFCRLHKPEPWEPPTPEVLALQALVRRYQSLTAMCTEEQNRLGAPMLTEEVRVSVEKHIEHLRNELEEIDRKIDKLFEDHPPLRKQRDLLTSIPGIGETTAARILGEMPHIAEFRDVKAVVAYAGLSPRHYQSGSIQRSSRLAKIGNGQLRCSLYFPAIAALRYNPIVKSLGARLQERGKAKMSIIAAAMRKLLVLAYGVLKSGQPFDPAYVTP

SEQ ID NO: 441816 - protein, 410 aa, unidentified
MNPLFVGIDVGLHKNTVHILDAQGTTLARFTIPNDLSGKQTLVERILTTAAQVGADCARIGMEATNLYWWHLVQALHHDQNLASLHPEIAVLNPKVIDGFKRVYTDTAKTDLLDAQVIADCLRFGRVQYPPPPDPRVAALQRLTRFRFHQAQSLSREKNRALNLIFLRFSNYTSACPFSNIFGKASQAVLTQMTPEEIARTPIEQMAALILQHSNNHLPNAPDIAKLLQQAARNAYRLHPKMQDAVQVALTMSLDSIRFFEQHLKKLDRLIAREVRAIPNTLQSIPGIGPVYSAGIIAEIGHIQRFPNHNALAKFAGLTWRQHQSGDFAAQNIPLSRSGNFYLRYYLVEAANSVRVREPEYQAFYQRKFKEARHHNHKRALILTARKLVRLVFALLSKGQIYQYGRRSKP

SEQ ID NO: 441817 - protein, 344 aa, unidentified
MNQIIRIGMDTSKHFFQLHGVDAAERPVLRRKLRRNQVLAFFAKLAPTVIGMEACGAAHYWARELRKLGHEVKLMAPQHVKAYVKRNKNDGRDAEGLCEAMSRPTMQFVPVKTEEQQAALMLAGVRQQLIARRTQLSNTIRGYAAEFGVTAAKGLDKIEPLLARIAQDETVPAQARELLAIQGQDYAQLQIELKAIEVKLMAWHRANACSRRLTQIPGVGPIGATALVMKTPDPRAFPSGRHFAAWLGLTPKDHSTAGKTRLGKITRAGDEVLRSLLVAGATAVIQQVRNGRGRPSAWLLALLKRKPPKLAAVALANKIARIAWKLMTTGESYDGALGAQAFAA

SEQ ID NO: 441818 - protein, 454 aa, unidentified
MQKQDSYDYYVGIDCAQNKHDFAMKNNQDKFLIKKGHFSNTLQGYEKFLNTVLSKCPNKDKILFGMEVTGIYGTNLYERLKSDGYHVVMIFPDSVKNYRDYKRLNKTDKIDSACIAELLLNGDAQIVHVEKNGYTDLKAYIRRRNALKVTCTQETNRFLAKVCLYFPDLLKVFPSGRATLKAIFSIYPTPYSIIEADFDELVSVLQKASKNKFGVDKANELIHAARNSIVVRKSISDGELYNIHSLIDSIDFLESEIRNLEKIIDSKAEEFPTYHVLLTLTGCGKITAATIVAEIGDISRFHKASQIVSLAGLYGDNSKSGSSVNKRGKISKKGSRYLRHAIYMVAEFARRNNPIFKAYFTKKKNGDRTKHILAVNAVANKLCKVIYSLMKNQSTYIIQYRDLAKLSESTQNEFFQNAETDFSAKTRRKKYLYEDEYGELHEFVFKSIKKALIE

SEQ ID NO: 441819 - protein, 375 aa, unidentified
MSNHSEAFVAFDTSKLRNAVAIADSGRTGEIRFLGEIENSATGTAKLARKLAGKYERLTFCYEAGPTGYELYRQIKSLGQECIVVAPSLIPRKPGDRVKTNRRDAVSLARLLRAGELTAVWVPDRHHEAMRDLTRARDTAVDDLRSKRQQISAFLLRKGLHYCAGKKTWSQAHLNWLMSQKFEYPEHRLVFEEMMMAMRQAQERLERLEQAIRAAVADWSLADLVTALMAMRGIDLISAATFLAEIGDLSRFQSPCELMAYLGLVPSEDSTGDCVKRGPITKAGNRRARRMLVECAWSYQHPPRVGKDKQEKIAAAPRAVREIAWKAQSRLNRRYRALIRRGKLKTVAITAVAREFAGFIWAVAREATAARATAK

SEQ ID NO: 441820 - protein, 354 aa, unidentified
MANSTRIELQAFSSIGIDIGKDVFHLVGFDSSGKVVLRRKIKRLALVSTFENLSPCIVGMEACLSAHFVSRTLRKLGFEPRIIPAKYSKPFVKGQKNDYNDAEAIAEAALRPNLNLVAEKTQAQLDLQALHRVRSRLVSRRTATINQIRAFLIEQGITVRSGAHALRNSLFAILKNREDEISPRMGDIIIGLYQDWLWLDERIESTTNDIEAISQCEGNCQRLMSVPGIGPVISTAVVAAIGAGEAFERGRDFGAWLGLVPRQYSTGGRPILGRISKRGSKYLRTLFVQAAQIILMRPHNWEKFSFGPWLKEASKRMHKNKLAAALANKLARIAWSILRHGKDFDTHRIEVTAI

SEQ ID NO: 441821 - protein, 324 aa, unidentified
MMSAVKTPKIFVGVDVSKFTLDVFHPDTGELSKLDNTEIAVEDFCRSLKKKKRSVMVVMEATGGYETLLLNQLAKHKIEAAVLNPKRVRDFARGIGADAKTDPIDAQVISKYALVVNPQPIAMKSDYDQKHTALVARRNQLLELINQENNRLKQSWDDDAKKSIREVLEMLKKQLKSLDSQLASMLEKDTKNQRKIEILRSAKGIGSVTISTVIVGLPEIGLLNRGEIAKLVGIAPQNRDSGKKSGKRFISGGRGHVRRVLYMATIVAIRHNPTIKAFYLHLKSKGKESKVAIVACMRKFLTILNLLIKKNELWRNEESVSASN

SEQ ID NO: 441822 - protein, 416 aa, unidentified
MDMDVLHERCAALDIGKKELKACVRSPNPQRKNSRSQQIRTFATTTNALLELRDWLVAEQVTLVVLEATGDYWRGVFYLLEDVVNVILVNAAHAKGLPGRKTDVSDSAWLCQMGECGLLKASFVPPEPIRHLRDLTRYRATLATERTREAQRLEKELEDAGIKISSVATDILGRSGRAMLTALIDGERDVHTIAEMARGRMRPKIPALVEALTGNFGEHHAFLCRMHLERIDQISATILELSTRIEEEMRPFSSQLQHLSTIPGVGRATAEVIIAETGGDMTRFLTPEHLASWAGVCPGHHESAGKRKSGKTRHGNKWLGGALGTAALAAARTKDTTYLGARYARLVRRMGGKKAIVAVEHSILTAVWHILTDNVDYHDLGGDYFARRDPETAMRRIIRQANALGYTVRFDPIQAA

SEQ ID NO: 441823 - protein, 443 aa, unidentified
MNDPRSASDPRPVNDPGPGGASDAEARFDHFTHFGGFDWAQGEHQLVVVDRGGKIVLSLEFANDAKGWAEFGKRIAPLAPLAVAIETSCGPAVERLLDAGLSVYPINPKAAERYRDRKAPSGVKDDELDAWSMADALRTDGHGWRRLLNQDPLTAELRLLCRDEIKLIGQRTALVNQLRAALGEYYPVALDAFDDWTAEGAWQFVIAFPTPEQLLKAGKRKWEKFLHTRKLYRPETAQRRLELFAGAMNFANPNPAVTRAKSLLAVTTAKQLSLLQSQLNEYRQRIAKLFADHPDHDCFGSLPGAGEKIAPRLLSELGSNRLVFQDAGALANYAGVSPVTRKSGKSCIISLRRACNKTLRATIHLWADLSRRSSVWAEVYYQKKRAEGSSHAAALRCLGNRWIKILWKMWQTGKPYDEALHLKNQTKHGSWVVTLLPSPASNN

SEQ ID NO: 441824 - protein, 391 aa, unidentified
MIYVGIDVAKDKHDCFITNSDGEVLFKAFTITNNLDGFNDLYQKIETVMKDITKVKVGLEATGHYSYNLLGYLIDKGLPTYVINPLHTNLYRKSLSLRQTKTDKIDARTIASILMSDVNLKSYSDISYHNEELKSLTRYRFDKVKERAKLKSSVSRLICILFPELEKLVPTLHMASVYALLYEFPGSKQVANAHLTRLTNLLSEASKGRYSKDTAITFRDAARTSIGSNMPAKSLELKHTIKLIKELDSEIDEIENEIKIIMDEINSPILSIPGINYRMGAMIIAEIGDFSRFDSPDKILAYAGFSPSTYQSGHLYGAYAHMEKRGSRYLRYALYNAAKYVCHWDPTFTAYLAKKRAEGKHYNVAISHAVKKLIRVIYHLEKTNQQYIKAS

SEQ ID NO: 441825 - protein, 370 aa, unidentified
MKKNSTRPQSPKRAAARSKGPITIGLDLGDKTSRYCVVGDNGEVMSEGSVATTRKAVAQKFSGMGRCRIAMEVGTHSPWLSRLLSKLGFEVIVANARQVQLISASSRKNDRMDAHMLARLARVDPQLLRPIRHRSEQAQADLMTIRIRAALVEARTSLVNAARGFTKAMGERLPACDTDSLGVEQLEALPAALQPRLQPLLEQIEALTAQIQKLEGHIEQIARIEYPETRLLTQVSGVGTLIALTFVLTVEDRERFQKSRDVGCYVGLRPKQCQSGQSQPQLRITKEGDRYLRTLLVQGAHLILNRRGPDTDLKRWGLKLAGRGGKNAKKRAIVAVARKLAVLLHRLWVCGEVYEPLRNSRPTPASKQAA

SEQ ID NO: 441826 - protein, 335 aa, unidentified
MNFVGIDLHKKTITLEALNQDRHVVKRPTLACSDPQSIRRCFEQFRPFQAVVEATASYEWLWELLEPLAQRLVLAHPGKLRLIAESKNKSDRVDAHVLAELLVLDLIPPACRPGPRQREHRRLVRQREYLTHRTTAVRNKIRRLLSDYNADRPNLFTRDGLAYVATVAVAEADRFILQQLLAEWRHHEEQLQAMDKRLRQFAQAGPAREQEAQDVLASIPGVGPVTIDVVLSEVGDVGRFRSAKEVVAYAGLAPGQRESAGKRKELGITKQGSRSLRWVLVEAAWRLVRCSRRWQTVFERLQRRGRKKAIVAVARRLLTVMVALLRTGQRYRRAA

SEQ ID NO: 441827 - protein, 401 aa, unidentified
MARTTHDDSTTPAHPRLHVALELSLNTWKLALTTSRAGKARIRDVKARDFPGFLTEIQDAKKRLGLAEDIRVVTCYEAGRDGFWIHRFLEAHGIENVVIDPASIEVNRRSRRPKTDRLDAQKLVQLLARHHDGEDVLRVVRVPSVEAEDERRLPRRLRTLKRRRVQATNRIQAALFQHGVDVSPRKLCFNKRRILQEVRKARQWDGTPLPPDLLDDVRMFVDQCDLITRQIKKLEKRQREVLREARREAPEATPAQRKAATLSRLRGVGDVGAYVLATEFFGWRTFNNRKEVGALAGLTGTPHQSGGPGREQGISKAGNPRVRTLMVELSWLWLRFQPESKTTRWFHEHVGKAGSRGKRKAIVAVARKLLVELWHFVEHGVVPEGAVLMDQGEGDHAQAAA

SEQ ID NO: 441828 - protein, 402 aa, unidentified
MNCVGIDVSKGKSMIAVMRPFGEVVVSPFEVRHTASELSELARLLKNLDGETRVVMESTGNYHAPVAWLLHDAGLYVSVVNAMLVHDYGNNSLRRGKTDKKDAVKLANYGLDHWLTLPRYVPEEDTRLMLKTCYRQYQQYSKVQTMLKNNLISLLDTAFPDANRLFTSPPRADGSEKWVDFVATFWHCECVCGRSEKAFTTQYQKWCRKHGYNFSQDKALDIYASACGRFGVMPKTNTAKLLVEQAISQLQTTSAALAALKQEMQSLAASLPEYPVVMEMFGVGPALGPQLMAEIGDVRRFHSKKALVAFAGIDAPPYQSGQIDVRSRSISKRGSASLRRTLFLVMSVILQRAPMDEPVYQFMNKKRSEGKPYRVYMMASANKFLRIYYASVKAYLDSLEHD

SEQ ID NO: 441829 - protein, 345 aa, unidentified
MQITTVGLDIAKRVFQLHGVDAAGKAVLRRKLQRSEVLAFFKALPPCLVGMEACGTAHYWAREIRELGHEVRLMPPSYVAPYVKRGKTDAADAAAICEAVTRPTMRFVPIKTAEQQAVLMLHRTRDLLVRQRTTLVNALRGHMAELGVIAPQGIARVADLMAVLLGEDTTNVPALARQALRGLAAELEALDRRVKEIEVAIVTWHKDNEASRRLATIPGVGSITASAIVATITDPFQFHSARHLAAWIGLVPRQHSSGGKQRQGGISKQGDRYLRRLLVLGATAVIRHSRSKSTAEAGWLKSLLERRTARLVSVAQANKTARIVWALLVRGEAYRMPAAVPGGGV

SEQ ID NO: 441830 - protein, 500 aa, unidentified
MKSRRSKAKIRVGQKRLSVICSEPEQKPEILRPDAGGIDCGAQEHYIAVPPDRVRAGEPIVRRFSAFTEGLDAAVDWLKECRVTTVAMESTGVYWIPLYQKLEAAGIEVYLVNARHVRHVPGRKTDVQDSQWLRQLHRFGLLNASFRPQDIICRLRSLHRHRDNLVSSSASEIQHMQKALQQMNLHLHHVVSDITGLTGLRIIDAILSGQHDPEQLVKLRDKRVYKSTPQQMQAALVGDYRPEHLFVLGQSLQAYRFYQAQIEECDREIEPLLEKLAQQVEAASAKLNLDVLKPSSAKHGATTPEPLAESKPACRLKAKRKRKPRANEPKTDLAGLLERICGIDLTKVVGLHVLNVLLIVSEIGVDMSKWRSAKAFCSWLGLCPGNKISGGKVLDSRTRQVVNRVADALRLAAQSAGRTETCLGIFYRRKQAHLGAPKATTATARKLACLIYHLLKYKQPYQDPAPATYQLRLKKSALTKLQRQAIALGYTLLPTTPPPA

SEQ ID NO: 441831 - protein, 347 aa, unidentified
MIIIGCDLHTRSEQIAMLDTETGEFEERRLEHEEGEARRFYAGLKEPALVGIESTGYTRWFADMLAELGHELVVGEAGKIRAKETRKQKHDRRDAEHILNLLLRGDFPKIWLPSAEERDVRVLLEHRHQLVELRTRAQNGLQAIALSYGLRRRRRLWSERGQEELKKLPLREGMERRRADLLRLVRQLDTWIQELDRRIEQEVAQREEAQRLMTHPGVGPQTALATVLVLGPVERFPDDRHLTSYLGLIPQEDSSAGRQRFGHLTKQGNRLLRWLLVEAAQTASRYDPRLRRAYRRLAFRKGRPVAKVAIARKLAIRLYIMLRDKIDYSEFCRRGSHAGMLEDVALV

SEQ ID NO: 441832 - protein, 319 aa, unidentified
MERIHVYGIDVSSKFLDISEGGGKPRRIANDEAKIAEWTKSLPNSARVYLEASGGYERLACRVLGAAGIRVLVINPLQARRMMQAKGIRAKTDGLDAKALAEFGPDLPAHEPPTPTRQELQDLVRARQSLHRMAADLTKQAQKPELTDCVRETLLNLAKTTRREAASLQKQIRKVLSRLARDAELIRSVPGAGEGLAATLLAELPADFRQARPEQLASYCGLAPHERQSGLSRRHAFTGPGNIHLKTALYMPALACLRTKTWAQDFYQRLRNNGKSHRLALVALMRKLLLQILAVLKRNSPWTPDFCEQHLTRKLTISP

SEQ ID NO: 441833 - protein, 381 aa, unidentified
MLLNNNTVALKSQLENHISIGIDQGDSLWMMTAMDRSTGKYSRHCFRGAGKEYDCYEKVTEFVNSGRPVSVCYEAGRSGFTPARFFNNAGCNTRVLPVNKIKIISSGKQVKTDKIDSQFLAEINPLDESVPSVWVPTVHQECLRELPREEQRIKCDISRNNNRMISILQRWPIPTISTHNQSESWRRIIKKWRDAKAIPKLLPLSELRRIEMMVDELEVLEKHLKKWQELMQETEDAERKKSEENNEKYLVDVLRKYRGIGEVISRSFAWEVCDFHRFKNAKKFSSYLGLTPTPFSSGKIFREQGISKQGNPELRRLAIQLAWLWHHWQPDSEITKKWSNQLKKKGRQRKTAIVAMARQLMVALYRDIVKGEEIKGAKKNR

SEQ ID NO: 441834 - protein, 323 aa, unidentified
MAKRITICAGIDTGKRKLDVALDGSSEQLQVENTPEGYQILVERLQRRKVKRVGIEASGGYEQAVVAELRRKRYVVVVFQPAQVRAYAMFHLQRAKNDKIDAALIAACTAAVKKIHTAPDPRLQSFAEHLTMIEQIGEDIATLKNRIESCRNERIQKLWKEDIACLAKRRRAEFKALLAAIRKHRDLAARIDLIHSVGGSGLPTAVSILVRMPEIGQITREQAAALAGLAPYDDDSGDHLGNRHIDGGRERLRRALYTAALPASFRWNPQLIALYKRLIAAGKGHKRALIACARKLLVFINTVVARGTPWQVEPPKTASAPAT

SEQ ID NO: 441835 - protein, 338 aa, unidentified
MSKITTIGLDLAKNVFHVVCCDEHGKVVKKKMLKRSQVLNYFANLPTCLVGMEACASAHHWARELGALGHQVKLIPPQYVKPYVRGNKNDYNDALAIAEAVIRPEMRFVSVKTPEQQDVQALHRLRERRLQERTALCNQLRGLLAEYGLILPQGVNILRRRLPELLEDGENGLSDLFRRLLAQSYQQLQELDGYIDFYTQEMKRQSQQDEACRRLQTIPGYGPIVASVFHSVMGNGEAYRRGRDVSASLGLVPRQHSSGGKEVLLGISKRGDRYLRSLLVHGARSVVIQATKKDDRLSRWINKVKAERGFNKAVVALANKMARIGWAVLVNKTVYQSA

SEQ ID NO: 441836 - protein, 398 aa, unidentified
MTESSDYESVQVFIGVDVGKDIHHAVAVNRSGKRLFDKALPNDETKLRSLISDLKQHGQILLVVDQPATIGALPVAVARSEGVLVGYLPGLAMRRIADLHAGEAKTDARDAAIIAEAARTLPHALRTLKLADEQIAELSMLCGFDDDLAAQTTQASNRIRGLLTQIHPALERVLGPRLDHPAVLDLLQRYPSPEKLASLGEKKLATQLCKLAPRLGKRLAADITRALTQQTVVVPGTNAAVVVLPRLAHQLITLRKQRDEVALEVEQRVLAHPLYPVLTSMPGVGVRTAARLLTEVACRAFASAAHLAAYAGLAPVTRRSGSSIRGEHPSRRGNKTLKRALFLSAFAALRDPISRAYYTRKMSQGKRHNQALIALARRRCDVLFAMMRDGTFYTPAAS

SEQ ID NO: 441837 - protein, 349 aa, unidentified
METAYDGRQVVGMDLHRRRSVLVRMTEDGRRLGTARITNSPAELRKAIARAGKSPKVVLEATYGWYWAADTLAAAGAEVHLAHPLGVKAFTYRRVKNDERDAADLADLLRMGRLAEAWIAPAEIRELRELTRYRHKLVHLRTSCKDQVHALLAKLGVPVTCSDIFGKAGSAWLDSLALPQPYAGKAASLRQIIAVLDAEITLLTQVIADLLAGHHGYQVIQQLPGVGPVLAAVIVAEIGEVTRFKTADRLCSWAGLTPRHRESDTKVTRGRVTKQGSRMLRWALIEAVQRAGGDTVTGATRDAIIARRGKQTRNIAKVAAARKLLTLVCYGLRDGQIRCLSSTPAGQAA

SEQ ID NO: 441838 - protein, 372 aa, unidentified
MIVIGADTHKRSHTVASVSEATGRALADITVSAKRRAFDDLLRWARGQDAARVWAIEDCRHVSGALERFLLVRGERVVRVSPKLMAGARRASRERGKSDVIDAVQIARAALREGLDTLPIAQLAGAELDVRLLVDHRERLVGQRTRLINDLRWGLHDLWPEFEIPARALIGVGWQDRIGGRLARAEQTVRVQIARDELRRIRELTRSIDALEHELAALVAELAPRLLAEPGCGVLTAAKLIGEVAGVARFSSDAKLARLAGSAPIPASSGRTDRHRLDRGGNRQLNCALHRLAVNKGRLDPETAGYLARKQAEGKSRREALRCLKRHLARRVWHLLQPPTAPAVPSASTSPATPTPSITIHCNTPSARFSLT

SEQ ID NO: 441839 - protein, 416 aa, unidentified
MDEEVYYERCAGIDVHKKLLVVCLRIGRKSQVREFGTLTHEIREIVAWLKDNGYQMAAMESTGSYWKPLYNIFEQEGLPAMVCNAYHIKNVPGRKTDVGDAQWIARCLSQGLLNPSFVPDREQRELRDMTRFRKSQIEERSRNINRLQKFLEGANVKLGSWLSDIEGKSATALLELVIGKPDFTVDDVAARMHKNMKSSAEELFLSLEGSITPTQREFFAHVMAVIREQTTQIEKTDAMIQRSLSANSRAAVQALDAIPGIGRVSAEQIIAETSTDMTRFRNQHSLSKWAGVCPGNNESAGKRKSGKTPPGNKTPKSTLTQCAKSAKKNKNSFFHAQYNRLVSHRGKNRATMAVAHSMLIAIYFVLFGVPFKDLGADYYTQFNREKKINSHVKQLSKLGVVIPEEVLRAAFERPPD

SEQ ID NO: 441840 - protein, 391 aa, unidentified
MVEAFTKPPGKEDQHMKPNVKYVGLDVHKDTTVVAVAEGGREGEVRQYGTLSSDLHALERLLTKLRADGSTLVVAYEAGPTGFGIYRHLQTMGIECLVVAPSKMPVPGGKRQKTDRRDAELLARLLRAGELTCIAVPEPIDESIRDLCRTRSDAVDDLRRAKMRLKSFLLRQGYHYKGTADWSDRHLRYLRTLTLPLPAHKAVLEEYLLAFDHCVQRVARLDDLLAAQVPQWRMYPAVKALMNLRGFQLVAATVMVAEIGDIRRFTHPRHLMAYLGLVPHERTTGDNRRLGAITKAGNVHARWMLIETVQCALNRPKVSPELTTRQEGQPADRRELAWKAQCRLHKRGWHLLNRGLLKPKITVALAREMAAFVWAMLHLVPAAGGAGLRRT

SEQ ID NO: 441841 - protein, 339 aa, unidentified
MQVTTIGIDLAKHVFQVHGVDAAGVAIIRRKLRRSEVIGFFAKLAPTVIGLEACATSHHWARALLALGHQVRLIPPAYVKPFVKRQKNDAADAEAICEAVSRPSMRFVPVKSAEQQGVLVLHRTRDLLIRQRTMLANAFRAHLAEFGIVEKLGAAGLESLIAQVEADASNEAPKVAREALRLVAGQIHDTQSRIAEIDKRIVAWHRSNEVSRRLETIPGIGPIIASAIASTTTDPGLFTSGRQFSAWLGLVPRQHSSGGKERLRGITKQGDPYIRRLLIIGATAVLRFARRRAPTAAWTSRLLARRPPLVVAVALANKMARIAWAIMKRGTSYRAPMAA

SEQ ID NO: 441842 - protein, 430 aa, unidentified
MKSNTQNAKIEAITEKTLVLGIDVGSETHYARAFDYRGIEYSKKPFKFSNTEAGFATFKEWILDLKERHEKDKVVPGMEPTGHYWFNLGKFLQDNEMKPVLVNPHHVKKSKELDDNNPTKNDRKDPKVIAGLVREGRYMIPYLPDGVYADLRTASNIRFQLQAELTRIQNRISRWFNIYFPEYKTVYGKPDAKSGMLILKAAPFPEDILTLGINGVNQIWRDAKLRAVGKARAKTLIEAAEHSVGSKEGAVSARMEIRMLLEDYESRNIRLQEVMTLIEGLVKQIPMAEKLLEIKGVGIRTVSGFLAEVGDISRFNNPKELQKLAGLALVENSSGKHKGETTISRRGRKRLRYLLFEVAMSLVAKNPEFRELHNYYTTRRLNPLKKMQSLMAIAAKLIRVFYVMLTKGVNYDPKKMVSDIKRPAVYLQAA

SEQ ID NO: 441843 - protein, 459 aa, unidentified
MARHQRKGNGLPAQLAAVNLHAAGIDIGAQEHWVAVSPDSDSQPVRRFGACTADLEALASWLQQCGVQTVAMESTGVYWIPLFELLEAQGFAVVLADAREVQRAPGRPKTDVQDCQWLQRLHTYGLLAAAFRPPEQICVLRSYLRQRAMLVTYASQHIQHMQKALTQMNLKLQHVVSDVTSVTGMAIIKAILSGAHNPTTLAQLRARNCHHSEAEIARALQGNWRAEHLFALQQAVELYEFYHHQIAECDRQIEAQLQTLADHSAGRTLPPAPRPPKRRRNEHHFDARLPLFRATGVDLTAIEGINEHTALVLLSEIGTDMTRWPTEKHFAAWLGLSPLHKISGGKVLSRKVRPSANRAAVALRLAASCLHHSHSALGAFFRRLKARLGTPKAVVATAHKLARLVYRLLKHGEAYVVQGMAEYEHAYRERVVKNLIRKAKELGYQLLPTSEQTAQEAPA

SEQ ID NO: 441844 - protein, 312 aa, unidentified
MFVGIDVSKATLDIAIRPSGERESVSNNESGIKALITRLAEVHPALIVLEATGGVEHQLTRALVSAELPVVVVNPRQIRDFAKATGQLAKTDAIDAMVLARFAEAVRPAVRPLPDETLLELRALIVRRRQLTEMIVAEKNRLGTVSKTVTKRIAAHIRWLQAELGRADKDLDQSIRRSPIWQENQDLLRSVPAIGPVVSRTLLAELPELGQLNRKQIAALAGVAPLNRDSGTLRGRRVIWGGRATVRATLYMAALVASRRNPVIAAFYKRLRAAGKTPKLALVACMRKLLTILNSMIKHRTRWSENTPLQTT

SEQ ID NO: 441845 - protein, 446 aa, unidentified
MDVILTHCAGLDGHKKSMTACRIMPDPTGQEVEGLAAVQPFGTFTLELLALADWLAAAGVTHVAMASTGEYWKPVYNLREGTYTVLWVKAAHGKNVPGRKTDKADARWLAKLLRYGLLPARFMPPAGQRDLRALTRYRTKLLQERSREVNRVQGVLERANIKLAAVASDVMGVSGRAMLAALLAGRADPATMAEVARGRMRSKIPALEQALTGVVRDHHRLLLATQLAHIDFVDEHIEALSRAIIERMQVLDPPAPPMAPTGLAGDASPPRAAAPPAPLTFARAIGLWDTIPGVDQRGAALLVAELGIDMARLGTAARLAAWSGGAPGNDESAGKQRAGKTRQGHGPLRAGLTQLAHAAARTKGTYLAALYYRLAARRGKKRAIMAVAHAIVVSVFHMLSRNQPYRELGANYFDAPQRQHGVDRRTRRMERLGYHVHLAVLPSPAA

SEQ ID NO: 441846 - protein, 350 aa, unidentified
MTIVETRAEIRAITGGVDTHAGVHVAAALDPIGGLLGVREFAATTAGYARLLDWLAGFGTVALVGIEGTGSYGAGLARHMAGAGVRVVEVDRSDRQDRRRQGKSDPLDAVSAARAAQSGRARGAPKGRDGAVEAIRALMVAKRSAMRERTRAINQARALILTGPDDLRARFAKHTPAALVAGIASLRPRPGDVPGYAVRVALRELGRRAVFLDGQLERLDELIVPLVTARAPGLLALYGIGPNTAALLLIAAGDHPGRLRSEAAWAHLCAAAPIPASSGKVTRHRLNPSGDRQANHALWRIAFTRMGSDPATRAYVERRTKEGKSKAEIIRCLKRYVAREVYPHLRPAAG

SEQ ID NO: 441847 - protein, 307 aa, unidentified
MKFYGVDVSKDTLDIACDGKVVQIGNDKRAIRSFLKSMPAGSVVAMESTNSYHLLMADSCYAAGMVAYVVNPRVTRHYREALNLRGHTDRLDATTICSYIRHHHVNLRAYVPKSADQRRLQGLIRRRAKLIGIRVQLLQSMREIKELKSDLDAVVKRMDRMVAQIDVMIDRQLEGNADRGRICTITSVGPVVSAVLVADLQAGNFKSADAFVAFYGLDPVPNDSGKTRGNRRISKKGHRLGRTMLYVAAISAASSKAWKPIYERILAKGLSKVQALVCLARKIARAAWSIYTHKTEFQPERLLAGLT

SEQ ID NO: 441848 - protein, 336 aa, unidentified
MNKSMEFNYFIGIDVSKKTLDISVFKQKEFDFHIQIENSIKSFKTFLSTLKRKKINTLNCLFCAENTGVYNEHIKTICEKDDLFLWIEKPLQIIKSQGITRGKTDKIDSKRIAYYAYKNHEDAKKWVAPRPVVVRIKRLITLRKNLLNNFKQLKLVINEKKFLNTDLEILSNACKNSLLAIKQDIKNLEKQILDLIKEDSDLNHKYNLVTSIDGIGMFTAIEVIIATNEFKNFTNAKQFACYCGVVPFDFSSGTSIHKRPRVSSMANVNLKTLLHMSALSAVAMKGEMREYFIRKVTQGKNKMSVINAIRNKLILRIFAVIKKDQPYQKDFSFSFG

SEQ ID NO: 441849 - protein, 350 aa, unidentified
MKIYVGIDIAKLNHFAAAISSDGEIIIEPFKFTNDADGFQLLVSKLESFDKNSLIIGLESTAHYGDNLVRYLVTELYQVCVLNPIKTCQMRKNNIRKTKTDKVDTYVIAKTLMMQDNLRFVSFFDLDMMDLKALGRFRQKTIKQRTRLKIQLTTYVDQVFPEIQYFFKSGLHQHAVYALLKEAPSPKEIASMHMTHLANLLKVNSHGHFTKEQAKELRVLAQKSVGANDSAISIQITQTIQQIELLDSQLEKIEAEMTDIMKFNDSVIMTIPGIGYINGGMILGEIGDIHRFSNPNKLLAFAGLDPSVYQSGNFQAKTTRMSKRALVFYDMPCKCSLERCQKQRNLQGLL

SEQ ID NO: 441850 - protein, 311 aa, unidentified
MQESCKVAICATVGIDVSKDQLDVVLRREEREQPRVYANSAAGFRDLHRWLQGQDVQPQQIQVALEATGSYSDAVALFLYEHDYLVSVLNPAVLVDYRNSVNVRSKTDALDARLLARYAQERRPRLWKPLPPEMQTLRFLLARREDVQHMLQQERNRLHAGRMDDWIRTRVQQHVTQLDKEMGAIWKRIMGHLKAHPSLKSQWRRLQTIRGIGPIGAAALLAEVGEIERFDDPRALVSLAGLAVKRHDSGRSVHGTPTIDRHGRTGLRRILYLCAVSALRWDAHMQRFAAQSRASGGDAQTLAYRLWGVET

SEQ ID NO: 441851 - protein, 457 aa, unidentified
MSKRSKKAKSRSFKASSLPKHLQHINLNAAGIDIGSERHMVAVPEGRDTVSVREFGTFTADLEALAAWLKQCGVTTVAMESTGVYWIPLFELLERRGFEVKLVDARHVKNVSGRKSDVLDCQWLQQLHTYGLLAGAFRPPDEVCVLRSYLRQREMLIQASSMHIQHMQKALQQMNLLLHNVVSDITGVTGMKIIKAILAGERDPRVLARNRDERCKNTTTTIAKSLVGNYREEHLFALRQAVDLYEIYQTKIADCNQAIIKQVKKQPDISDDDPPTPEQQVPARDRIRDGVDVRDLLFKKSGVDLFAIPGLAADTLLTLASEVGFDMTPWKTEKHFASWLGLCPGTKISGGKVLAKKTKRNPNRATQAFRMAAASLYRSQTALGAFYRRIKSRAGGKQAVTATAHKIARIYYAMLTQGATYVELGQQAYEQRYKERRIDHLKVQAKSLGFQLVPCAT

SEQ ID NO: 441852 - protein, 317 aa, unidentified
MMSIQNYGGIDIAKKNFVIGITGMAKTKTETNNPKGFQHTVEYLQKHHVSLVVLESTGGLEIPLAKALHHAGLRVVIVNPRQTHSYAQSFSLGKTDIKDAKMLADYAQAIELKGLTADMLYQPPSLAEEELEALVKRRSQLVEMRTAEKNRLTQIHPSQQQSVEDLIQHFSTLIADLDKQIAKHNDSNFDGKNKIIGDIKGVGDTTCATLMSMLPELGRLPHKRIALLVGVVPPANQSGESVGKTGCIGGRMEVRNALYMATLTASRFEPKIKAFYERLIGKGKPFKVAINACMHKLLRILNARVRDYLQSDELQSA

SEQ ID NO: 441853 - protein, 424 aa, unidentified
MKFKMQDKQNQLIERISDKHLVVGVDIAQQLHVARAVNFRGIVVGDPLAFENNEDGFASLLKWMDKLQRLNKLDAAIVGMEPTGHYWINLSKWLFKQGIEVVKVNPHLVKRNKENRDNTQSKSDKKDALVIADMVKNGYYAFVRNTSESFEILRVLMSNRDVVVKRLVSTINQLNRWVDIVFPELRQVFKDITGKGAIATLRLFPSPMELRSLKPHDVVSGWKSIMKRQPGLKKAQLLLQLARKSVGTRQALEAYKFHLEQLLEEYDLAVLQLERVEQEVKDVLKQIPFAKKLLAIKGISEISLAGILGEAGDLSGFSHGNSLLRHAGLHLAEASSGKWKGQIVISKRGRSRLRRFLYLATMSLVMNNTEFRAIHTHNVKVKKMKKMKSIMKLVGKLARIFVGIARRNESYCADKVQPITELVA

SEQ ID NO: 441854 - protein, 410 aa, unidentified
MAVIWIGCDGATPDVTGGVSLAAEAAALRPRPTDTVRYSTLLAIGTLARRVAYRNQSLQPTNDRSNIMGWVVGLDVHKDTIAAAALNPTGETVAEASFINTCAGHAELHEWISANSAGARCGLEASGGVGHGAAAFLQRSGLEVVLVPSRLSAREANRNRQRGKSDPGDALAIARVVQREPRLPGFNHGGPHEDLRLLGDYREQLHSERTRTTNRLHADLAIAYPGYQRGIGKALTSRRSLNKATALIADDHSVRADLCRQRLGRLHDIDLELKQIETQLETLVEASGSTLTTIVGISTIVAARLIGETGDPRRFPTSSAFAAGNGTAPIDASSGRNERHRLNRGGNRRVNRALYTVAITQTRHEPRAADYLARQRAAGKTRREALRCLKRRLSDVIYRTMLEDAARLDT

SEQ ID NO: 441855 - protein, 354 aa, unidentified
MDNSIRYVGLDVHRDSISVAVLDSQGKVVKETVIETKAERVLGLIEELRGTLHVVLEEGTWSAWLYELLQGRVARVVVCDARKITRQGNKSDRLDARELADLLRCNRISAVFHRDTGLRTLRELARTYGVLTQEQTRTMNRIKALYRSWAIPCAGQSCYGPKQRKAWLDKLPYAAVRERAKIYYQQLKSVQELRHKVRLQLLAQVRKHPAYRNLVGIPQIGPVRAALLIAFMQVPERFRSKRQLWAYCGFALQTQSSADHCWVEGKRQRSKKAPLVRGLNNNHHPGLKWIFKSAATRLCTGKGPFAPFVLGLLEQGIRPEMVRLTVARKLAAIVLAVWKKGERFDAQRLTLQAA

SEQ ID NO: 441856 - protein, 340 aa, unidentified
MNALYAGCDLHGNNNLIGIIDEEGKRVFKKRLSNDLELVRDTLKPFQEKLVGIAVESTYNWYWIVDGLVEKGYEVHLANPSAIQQYSGLKHSDDKHDAFWLAEMLRLGILPEGYIYPKEERPVRDLLRKRGHLVRLRTSLIISLQNILSRNLGRRVNVNDVKALKEDRISPLLEMNEDLALAGRVSKEAIDHLTGQIRKIEGVVEKKVKLREEYRYLLTLHGVGKILSLTIMLETGPISRFETVGDYVSYCRKVPSQWTSNGKRKGSGNSKNGNKYLAWAYSEASEYARQLYPEPRAYYNRKMQKTNAAVAHSALANKLSRAGYYVMRDQVPFQPEKLFG

SEQ ID NO: 441857 - protein, 416 aa, unidentified
MPEEGEPVHYYLGVDWADQTHAVWVVDERGTKITARTVPHTAEGLSEWGRELDEWRAQGIELWAAIERPEGRVVDFLLDHGVVVYPVNPKALDRARDRFRQSGAKSDPFDARVLADFLRTDHASFRALQPSSEAAQELKLLTEDCQRQIRQQTRLVNQLTATLKAYYPRGLEVAELTTALAREFLQAYPTPAAVAGLTERQWQRWARAHRLSEARTQELWAVLQRPQLPVPAHVVRAKARLLQTLLTELEPVVAAVGAYRQAVEDFFAALPAAQWIRTLPIGEHGITAPTLWARLGDAPGRWESFQHLQAHAGAVPVTVKSGKQHVVHFRFACDKMLRHVVDQVAFLSLRSSEWARAYYDQQRARGHSHRETLRALGAKWLKIIFVLWDRQVPYDEQYHLATMARQQLRQRSKKIA

SEQ ID NO: 441858 - protein, 339 aa, unidentified
MAILFVGIDLAKNVFAVHGVDERGKAVLVRPTVQRAKLHELVASLPECTIGMEACSGAHHWARLFKQHGHAVRLMAPKFVSPYRISGMRGKNDAADAAAICEAVQRPNMHFVPVKSEDEQARLCVHRVRQGFVEQRTATINRLRGLLSEFGIVLPQKAATVRREATAHLEDLPGWANTAVGDSLSEVHRLDERLAEYDRHVSQMAADDERSRRLMQLQGVGCTTASALVSTIGDAHDFKNGRQLAAWLGLVPGQYSSGGKARLGSITKAGDRYLRTLLVLGAKSVLAAAKNKDDRLSRWAMALQARRGYWRAVVAIAAKNARTAWAVLAKGESFRPIQT

SEQ ID NO: 441859 - protein, 341 aa, unidentified
MQNTIDENLEPAAQLWVGLDVSKDTLDACLLRPNGKSTHKQFPNDAGGFAKLLRWVQHSACEQIVHFCLEATGAYSQALVLFLAQAGQRVSVVNPARIRFFGLAQAQGNKTDKADAALIARFCRQEAPELWRVAAPEMQLLMALMRRLHAVQELAVQEKNRLSVPSQPAVVIESIENAIAYLEAEIKRLQQQIRDHINGSPDLKRDSKLLQSIPGIGELTSWDLLAELPEVSQFNSAQSVAAYAGLAPREHRSGSSVRKHTRLSKQGNTRLRKAMYFPAVTGITWNPLVKAHYERLVKAGKPRMVALAACMRKMLMIVYGVLKHQKPFDPSWQSQPLHNPS

SEQ ID NO: 441860 - protein, 348 aa, unidentified
MNATRKTVVGVDTAKNVFQVYAVDQETGEVINQQIKRAQFLQWFANRAPCLVGMEACGGSRHWARKLQELGHEVKLMSGKMVKAFVCGNKNDTADARAIYMATQQPEVKAVAVKSEAQQAVLAMHRIRQQLVKMRTAQINALRGLLAEYGEVFGQGRKAFDVGIKEALERLAERLPAPLIDTLRDQWNELGRLDERIARIEASLLAWLRQDRAAKAISAIPGVGLLTATAAVAAMGNPKVFRSGREFAAWIGLIPGQTGSGGKVRLLGMSKRGDTYLRTLLIHGARAVLHHAKKPSPWLQQLSQRRPPNVVIVALANKIARTIWAVLAHERAYDRGHVSSRPLAAAST

SEQ ID NO: 441861 - protein, 355 aa, unidentified
MSQEKYIGMDVHQASISVAVMDARGKLIMECLLETKAATILEFIQGLRGTLALTFEEGTSAAWLHDLLKPHVSRLVVCDPRKNALLKDGNKSDRVDARKLAELLRTNQVKPVYHGKHGTRALKELGRSYLTITKDVTRVMNRIKAVYRSWAIPCAGTSVYTPRHRAEWLAKLVEPGVRIRAEHLYQQLDSLEPVRLAARRELLLESRKHAAVKLLRQIPSIGPIRAALLVALLQTPHRFCTKRQLWAYSGFAVEIHDSGEYRSVRGKLQRNRERITVRGLNDNHNKDVKSLFKSAAISASTRPGPLQDFYVARVESGMRPTMARLTLARKIAAITLTMWKKGVSFDPKQLQRQAA

SEQ ID NO: 441862 - protein, 343 aa, unidentified
MDYFAGLDVSLKETSICIVDDAGKIVREVRVASEPEALLQVLTNTIYRFKRVGLEAGPLSQWLYSVLAEAGLPVICVETRHMRAVLKAQINKTDRNDARGIAQMMRVGLYRAVHVKTLRSQKLRMLLTHRKLLQSKAIAIENDLRATLRNFGLKVGMIGTVKFETRIRELVEKLPDLAMLAEPLLIVRRVIREQLDILHRRLLAVVRDDDVCRRLMTIPGVGPVVALTFRVTVDVPARFRNSRAVGAVFGLTPAKYQSGENDRTGAISRCGDEMMRMMLYEAAQSMLMRSTKWSWLKAWAMKIARHRGMKKAIVALARRLAVIMHRMWVDGTQFRWTREAAAA

SEQ ID NO: 441863 - protein, 375 aa, unidentified
MKEKVRFLGLDVHAETITVAVAEPDGEVRSLGTIANREESIRKLIRKLGSAEQLRACYEAGPTGYVLYWQLTQLGVECAVVAPTLVPTKAGDRVKTDRRDALKLARSHRSGDLTAVWVPDPDSEALRDVVRAREAAKRDQLRARHRLSKFLLRMGRRPAAGMKAWTEPYMAWVRQVRFERPAQQATLLDYLHEVDHMAARVKRLEQAITEVVKLASHEVQEVVKGLQALRGIAEISAVTIVAELGQIARFDTPRQLMGYSGAVPSEDSSGKRRRQGSITKTGNAHLRRIVVEAAWSYRHRPAIGPRLRKRHEGVPEPIKEIAWKAQHRLHKRYMRLAAAGKDQRKIITAVGRELLGFIWAIGVKAETASKQPMAA

SEQ ID NO: 441864 - protein, 410 aa, unidentified
MSLVGAEYFVGIDWAATNHAVCVHDSSGRRVTGFGVEHTAAGFTGLIRRLAKLGEPGGVPVAIERPDGRLVDALLAAGYPVVAVKPNAIKTWREGEVISGAKSDPGDAHVIAEYLRLRAHRLRAATPLSEDTRALRLVSRTRSDLVAARVAAGNQLAALLDTAWPGAKEIFAEVTSAISLAFLHRYPTPDHAAHLGEKRMAAFCIKHGYSGRRSPAELLTRLRAAPAGVSGAVVSDALRDAVLALIAVLTALNTAIKDLDRSNAAHLHAHPDGKVFTSFPRAGLVNAAQIRAELAEPDAYSGPDAIAALAGLVPVTRASGKHHAVSFRWACNKRLRVALTTFADNSRHSSPWAAGIYRRAIAGGKDHPHAIRILARAWVRVIWRCWNNGQPYDPARHGGAARQLNPPTAA

SEQ ID NO: 441865 - protein, 419 aa, unidentified
MTNEASLHWAGVDWGDQSHALVVVNAEGKPVASLVIPHSAEGLELLVATLREHGPIAGVAVECTRHLLIDKLLEAAFPVYPINPKIAKTWREHLKVDPAKDDTGDGLSLGYHLRLYHAELTPLRPDDPLTRQLRLLCQDEQSFIAERTAAANRLKDGLKQYYPQALEWFPQFTTPTAVAFLLAFPTPAELDAASDNELWAFLHGRHIGRTPAWRRRVAQRGQGPAWPSDEATRAAKSLYAASLARHIQGLNATLDVYRLRIEALFAQHPDAPLFASLPGAGPKLAPRLLTHFGTDRRRFPDASGLQALSGTVPVTKRSGKAHHVSFRWACQKDFRNTLFFFAFQTLKRSPWARALYDRCRQRGQTHSGALRNLGAKWLKILLRMWHEHTLYDERTYLHSLAEHGSPLVAHMQNSEKWRL

SEQ ID NO: 441866 - protein, 324 aa, unidentified
MIDGVLGIDVSKNALDVSMSGCNKIRARSFVNSAHGWRHLLDWLVTQKIQRVHACLESTGRFGLGIACALHEAGHVVSIVNPAQIRDFARTKLGRNKTDGVDASHIREYCELFKPQPWAPPSNAHRTLGELQTIRAGIIASLTQWKNRRNSGMVDAVAQSLADVTISHFASQLEAVDEAIAQTIDDDSDLRRQRDLLLSISGVGETLAGVVLAELPGPNVLRSSSEVVAYAGLNPRLYQSGTSINRITSISKIGNAVLRTALYMPAMSAMRYNPAIVALVTRLKAQGRLKPKQIVVAAMRKLLVLCFGVLKTGKPFDPAIAMGC

SEQ ID NO: 441867 - protein, 348 aa, unidentified
MAMTIVEATRTVVGGIDTHSRVHVAAALDDVGGLLGSESFAANPAGYAALVSWLEGFGQVTKVGVEGTGSYGAGICRFLMRSGIEVVEVDRQNRQARRNAGKSDPLDAVEAARAALSGKASGRAKSRDGWVEALRVLLVAKRSARTARVKALTQMRAVTYSAPDELRGRLEGLSISAFVSSAQLLRPSRARDQVMAATKATLSSLAHLVNELEAEITGLDAMITPLVRSNAPELLAIRGVGIDTAASLLVAAGDNPERLRSEAAWAHLCGVSPLEASSGKVTRHRLNRGGDRQANSALWHIVITRLAIDPDTQVYMERRVKEGRSKREVVRVLKRYVAREVYRAMPRG

SEQ ID NO: 441868 - protein, 365 aa, unidentified
MPSVSHLGPTYLGLDVHKDTISVAILAPDRDGSEVERIPHDEPSVRRLVGRLGDPRWLRACYEAGPTGYELARLLAGMGVGCQVIAPSLIPKAPGDKVKTDRRDCRRLARLYRAGELVAIRIPSVQEEAVRDLCRARADLVQDRTRARHRLGKFLLRHGRPWRGGNAWTLTHERWLLSQRFDEAALRATYGHYRAVLDARDAQLAAIEADLAIWQDIPPFADAVHHLAAYRGITRLGALTLASEVCDWRRFPRAAAFAGFCGLVPSEYSSGTSTRRGHITKTGNAHLRAQLVESAWSYQYRPAVGIELRSRQQGLDPAVVARAWAAQLRLCGRFRRLAARKDSKNLVVTAIARELTGFLWAEMAA

SEQ ID NO: 441869 - protein, 491 aa, unidentified
MKKRSIYGQQSQALMRIYEEAGRPSKVLVGAIDYAKRDHVAMFCNGNGDILKKPFPVKNTPEGVDFLLAELAATSRYHKIDTRHAYFGGEDCGAYTENFAECLREHGFLVANVNAEDAKRQRENMQASTDRLDLLGIARMLINRRGNCAPSQSGPYRNMRTMVRHRRRLVSLTTEQRNRMHCLVDRLFPGYLDEKKSGLTPFHPPSLRLMEEHFSAQQIARRKRDTLAGLISRAGGQRPDEVATKLQAYAATVLHATPEYVPTLQMSLAQHVALYRCLSDSIDTIEHEIAVWLAQTQGAFLMSVRGIGMVLAAGVAAEIGDPNTQKPVNNLCSYAGIIPRVAQTGGPDAQAYTGSVAHRCNRILKDYLVQSGSHLGLHGVADLMADHHRRDAAGQHANYGIARRYLRMGIHLMRNSTVYLPPELRSPTTPAAARAEYYQILWPYLVEKWKKYDAHRVAFAPDNPLGQWRNMVQELYEIKLKIPGADAPGGN

SEQ ID NO: 441870 - protein, 421 aa, unidentified
MEETGELAELVERVAALDIGKAALTACIRVPHEDKPGRRCQEVREYATTTRALLALADRLRCQGVTLVVMEATSDYWKPPYYLLEAEGFECWLLNARHVKNAPGRPKTDKLDAVWLAKVAERGMCAPSLVHPKPVRQLRALTRYRRTLIRERAREKQRLEKILEDAQIKLSAVVSDLFGVSGRAMIEALVAGERSPWALARLARGTLRNKTKILEDALTGHFDDHHGFLCQMMLDRIDGLSAQIGQLDARVEEAIAPFARQVTQLDEIAGVGTTSAQELIAEIGADMSRFPTAGHLVSWAKFAPIENSSAGKKKGGSTGKGNPWIGGTLGEIVLGASHTHTFLAERYRRIARRRGKKRAIVATGNTVLTIAYHLLSDPDARYTDLGPGFYDSKAGRDRQARNLIRQLEHLTGKKVALNEAA

SEQ ID NO: 441871 - protein, 390 aa, unidentified
MFAGIDVASERHVLARLDGTGQPLGRPIGIDEDAGGYRMMLEALGPPPALVVMEATGHYWKNLYATLVAAGHDVVLLNPIVARRFQQAQLERTKTDAIDAAALARFAFEKRPAPSYIHDAAAEALRELVRHRDRLQQDFEDRVLQLHRLVDLGFPELTRYVKGMHTMLATALLSECPTAAAFARTPPRRLAKLRYDGRHRVGEDLAGRLVEAAKRSVGQHHGPVYDLQVRHICQDLDLWRRRLKELETDIGGLLDAHEVGRLLTSIDGIGPNSAARIIAIVGDPARFRSAGAFAAYVGVVPSLRQSGKRTGTRAATGFGNARLRSALWMTTLAAVRLNDWLRQFYERLRAAGKPPKLALIAAMRKLLHAVYSVAKNRKPFVPITEQARAA

SEQ ID NO: 441872 - protein, 415 aa, unidentified
MDVLYPRCAGLDVHKDTVVACLRVVSAGAAKTEVRTFDTTTPGLLALSAWLAEAGCTHVAMEATGVYWKPVWHILADGDVMLILANAAHVKNVPGRKTDVTDAVWLADLLAHGLIRASFVPEAPVQEMRALLRTRKQLVREQASHVQRIQKTLEDANLKLGSVLSQIMGVSGRAILQALIEGESDPDTLLGLVQRGVKAPPEKLRAAFQGRITERHRFLLRLHLRQVDALDAAIAEIDAEVDRDLDPFRQAVRQLRTIPGVSDLSGQVIVSEIGTDMSRFPTAGHLISWAGLCPRNDESAGKRRSTRLRKGAPWLKTTLVQCAWAASRKKASYFQAQYQRLRHRRGPKKAICAVAASILTAVYHMLRDGTFYHDLGADHLNRASPQDQANRLARKIEKLGFACILTPSIAEAVSV

SEQ ID NO: 441873 - protein, 335 aa, unidentified
MTKVMDAVSVGIDVSACTLVVALERDHQPGRQRREFPNTAAGHQVLVQWLSKSATAVQVCLEATGLYSLDLALALDRAEGIEVMVANPRAIADFAKALLQRSKTDQLDAEVMLEFVRRMPFVPWQPPKPHRLDLRALLRRITGLKLASQQEKNRLHSVSQAAEITPLVRKDIQSHLVQLERHIEKLEQQAEAIVQADPELAQQFRHLVSVRGIARVSALHILAELVVLAPDMTARQWVAHAGLDPRHHDSGPSIHKPARISRAGNRYLTAALFMPALVATQHDPNIRAFYQKLVDRGKTKMQAIVAVMRKLLHALHGMLRTDSDFVGEKFYVIPS

SEQ ID NO: 441874 - protein, 364 aa, unidentified
MARATHAKKPTRRRIVGGVDTHAETHHAAVLLMNGGRVADAEFPTTEVGYAQLIEWLRGFGRVHAVGVEGTGSYGAGLTRALHAAGLAVVEVNRPDRRQRRLVGKSDPLDAYAAAEAVLAGRATAAPKLGTGIAEALRALHRTRAGAVKARTATINELRALLITAPAGLRDPLRELPTAALIDTCGRLRPTSATLSDPTQAVKHALRSLARRYRTLTEEITDLDTRLRPLVEQACPQLLAHHGVGVETAAQLLITLGDNPDRLGSEAAFAALCGVAPIPASSGKTSNKHRLSRGGDRQANRALYIIALARLATCPRTRTYLARRTTQGLSKRDIIRCLKRYIAREIYKTLTSTNTTTQEPQPAA

SEQ ID NO: 441875 - protein, 337 aa, unidentified
MNPQQTISSRFWVGIDLAKTTFQAALWGHEELRHMRVRAFSRTADGAKDLLAWLGEQGGPDARLGLVMEATATFGDELATWLLERDPGLHIAIVNPTQTSAFLRSMGLRNKTDDLDAKALARYGFDRKPASWEKPTPEMAALKDLVRIRMDLVNVRTAMTLRLKDHGRTSKLAAQAMVQVIQSLNTQIKALEMGIREHLRVHAPLEKKVTRLESIRGVGLITAVTVLAELGDPSRFARSRQLTAFAGVSPRRKESGTSIRGKTRMCKQGSARVRGVLYLAASAAVRFNPDLKALYERLLAQGKPRRVALGAAMRKLLVLMRAVLKADHDWVPERHAA

SEQ ID NO: 441876 - protein, 359 aa, unidentified
MSLQVDNSSTVVGGVETHKELHVAAIVDHHDRLLGSASFPTTRHGYKTMLAWMRSYGTLSRVGVECTGTYGAGLLRYLQQAGITVLEVTAPDKSVRRKRGKDDTIDAENAAHAAYAGRRTVTPKTRDGMIESLRVLKVCRKTAIAARRIALQMIQMQIISTPDELREPLRKMTRMQLIRTLAAWRPDLSGYRDVTTAYRIAFKSLARRYLELHDEIADLDVMIKAIVDDLAPELVARQGVGYESASQLLITAGDNPARLRSEASFAALCGVSPIPASSGMTQRHRLNRGGDRAANSALHIIAIGRLRLDPRTQEYVVKRTGQGLSKLEALRCLKRYIAREVFYILRSRNQAINQVQIAA

SEQ ID NO: 441877 - protein, 379 aa, unidentified
MEAQVNKIDFTGQNIYVGFDSHLKSWKVTIMAEDIVYKTFTQPPQPEVLNNYLKKHFPGGTYHTAYEAGFCGYWIHDKLLSFGIKSIVVNPADIPTTDKERVQKEDKRDSRKIARSLSSGTLMPIHVPSLQTQRDRSLLRTRSMLVKDLARYKNRIKSFLYFYGISIAPSFSNPQSHWSNRFMAWLENLEIDNGSGKEALMILINECKNLRISILSINKQIRQLSNTDRYRDKVKLLKSVPGIGLLTAMIILTELEEVERFSNIDKLCGYIGLVPSTKSSGDKERTGDITPRGHNVLRTAIIESSWTAIRNDPSLMHSYLTFTKRMESNKAIIKIAKKLLSRIRYVLLNQKPYVCLVESENYKNKKLSETVTKSLQSLN

SEQ ID NO: 441878 - protein, 351 aa, unidentified
MIIIGVDYHPSDQYIAFVDTETGEYGERRLNHSDGEAEKFYRELAARGISVRVGLEATGYSRWFERLLAELGIEVWIGNAAEIKTKRVRKQKTDREDARLLLRLLRENNFPRIWVPSRENRDLRQLLWHRHRLVQMRTRIMNQLQALAMNEGLRRKKKLWSDQGRAQLEKLSLGTWASRRRKDLLELLDRMNPSIEELTAVVEQEAKKWPEVLRLMTHPGVGPLTALAFVLIIGTPERFQCGKQIGSYVGLIPEEDSSANHQRLGHITKQGSSLLRFLLGEAAQAAARCDADWRRRYMHLAVRRQRNIAKVAMARRLAVRLYWMWRNGWEYAQWVAFGSHAGQLGTGHGVQ

SEQ ID NO: 441879 - protein, 397 aa, unidentified
MYIVGIDIAKRKHEAAVIDGEGTVIIKPFSFTNNCSGYNRLLAMLAKAKLPLDEVSFAMEATGHYWLALFTRLQKEGFRVQVINPVQTNSIRSFYIRQVKTDPRDALLIAEVIRFGHFSESTLHPENIYELRELCRGRHAIVSMQADVKRKVVALLDQVFPEYETAFTNMFSDTSMAILQTCPTPKELSEMPLEELCHLIEVSSRKRFRMVKAQELQELARNSFGFAMAGDVFSTMIRLYAKHLVFLKQQVQEMDRKIAEIMDTLDTPITTITGIGPTLGAYILSEIGDISRFSSAAKLAAYAGIDPTMRQSGEYNGVRNRMSKRGSPYLRHAIWLAASSAVLHDPALKLYFQKKRDEGKPYMASVGHACRKMVSIIYAVMRDNKAYTPYIPNEISA

SEQ ID NO: 441880 - protein, 423 aa, unidentified
MRLTYPICCGVDVHKTFLVATIITSEAIVPHYHQKRFSTFFSGLVAFKGWLLEHNCKDVCMESTGKYWVPVWNVLEDSFHVVITNPKWVSAVKGNKDDKKDSRWIGDLFRMGLVPGSYVPDKDIRILREFTRYRSKLVSMRTSEKNRFQNAFTVCNLTLDAVVSDMFGKSATNIENYLLETDAVDPDYCVSLLQRSLKKKASDVVEAVSGFNMTPEQKERVRIVQGHFADIDHRIAQLDDIIGSLVSEHEGHISLLCTIPGIDRRTAITILSEIGTDMTQFGSSKRLCNWAGLAPASNQSAGKKKSVSISRAGVYLKPALVEAAHAAVKSTEKQPYYRIKYERLMRRRGKKRAVIAIARMILTAIYAMLSTGEVFNPSDLEKYDMPEGLKKKHTFSSAKEAVKLLVSLGLIPEGSISLDALAS

SEQ ID NO: 441881 - protein, 384 aa, unidentified
MTPDFEVGKANKWFRQCVGIDIAKDKFNACLFMYDIASDMGCGTRSMEFRNDRQGFNQLLKWARKECVRGYPLTFLMEPTGVYYEKLAYHLCKVRQVVYIVMPNKAREFCRYEGIKTKTDEMDARCLALLGCVNRRLTPWQPPKTIYRELRQMTRFVEEIQKVRTMLTNHLEALTHTAAPVESVVKHYGRLIADIDRQLEDNLKNIRAKIAADKELEEKVDRICTIKGIGYLTVVTIIAETNGFNLITSRKQLASFAGLDVIASQSGNEDPRHVISKKGNTHIRRTLYWPAISSSRFNPQIRDMYGRICKRNPKVKMIGITAAMRKMLLLTFTLWKNGEVYDPDRSGKPIQDKRTVDEEGRQPGQRMTKPKMAAVINLQPCEIV

SEQ ID NO: 441882 - protein, 389 aa, unidentified
MQLIANRPEAPSAIRSDLGAIFVSMELSRSSWLITSLSPGAGEKMSKHGVPAGDICTLLRRFSVLKQKAFSRTGKLLPIIVIQEAGLDGFWIHRVLQNEGIESHVVDPASIATSRRRRRAKTDRIDGEALLRTLLAYKRGEPRVCAMVKAPTPEEEDRRRLCRERKVLIAERVKHVNRIKGLLFCQGVSAYQPLRRDRRQQLDELRTGDGRPLPKHLKVQISRELDRLELLLEQIKAVEAERDALLAAHQAAGRAPAVMLLDIKGVGPEFAAILWSEGLFRHFDNRRQIAAYAGLAPTPWQSGSIDREQGVSKAGNARLRTTLVQLAWLWLRNQPQSALALWFEERVKRNGGRLKKTTIVALARKLLVALWKYVTAGVVIEGAVMKTVR

SEQ ID NO: 441883 - protein, 409 aa, unidentified
MERQLERCGGLDVHKETVAACVRVGGRTGQAEQHVQTFGTTVGELLVLRDWLAAHGVTHVAMESTGVYWKPVFYALESDFTCLLVNAAHIKQVPGRKTDVKDCVWIAQLLEHGLLRGSFVPPAPMRDLRDLTRYRKALIHDRTRVANRLHKALEEAGMKLASVASDILGVSGRAMLAALVQGTTDPAVLADLARGRLRGKLPALRQALASRFRPHHAFVIGQLLAHLDYLEEAITTLSAEIERVMAPLAEPLRRLDTIPGINQRTAEVILAEVGADMSVFPSARHLASWAALCPGHHESGGKHKSGKTRKGNRWLRTALIEAAAGASRAKNSALQARFRRVLRQRGPKKAVVAVAHALLRVVYHVLADGTVYREAGANSYDRHHSQRVTRRALQTLERQGYRVTLEPAA

SEQ ID NO: 441884 - protein, 359 aa, unidentified
MIYIGMDVHQKSTTFCLFDPSAEKDRQYRTVTQPTTEEAIRRTLAPLGGQCQVAYEVGTQAQWIAAIVRPLAADVQVANPSRIPWLFRDGRKNDRLDARKLVTLLYLKQLPTVHLPQAEVSAWRALINHRRKLVTQRTQIKNQIRAILRAFGHRCPFKNLWTFRGQVWLESLVFDEARTLMITTLLDELTFFDQKIGVIEGKLDGIARAQANVALLRTIPGIGPRTAEAIAAFTDGVERFKDRRTFASYFGMTPTEDSSGGVQRFGHISKRGPSVVRWVLVEAAYVAVRKNAELRKFYERIHRGNLVLSGEGKDRKKLVLERSEGKAIVAVGRKLLTIAYAMMRDQKPFEAGKVLRSAA

SEQ ID NO: 441885 - protein, 414 aa, unidentified
MKVVYPICCGVDVHKSFLVGTIVSTTSGVEPHYQKKRFSTYNNDLHRFCDWLLSNGCKNVCMESTGKYWVPVFNILEERGITTTIANPKWVKAVKGNKDDTKDSKWIGDLFRLGLVPGSFIPTKDIRILREFTRYSYKLTSMKSSEKNRFQNAFTVCNVALDSVVSDMFGKSATAITDYLISEDTFNPEYCVSLLKHSLKKKSESVLESIEGYSITQEQKLRIRIVRSHLNYIESLISQIDSAIDVMVAKHESLISLLCTIPGVDRNSAITIISEIGNDMSQFGSSKRLCCWAGLTPGNNESAGKKKSVRITRAGVYLKPALVQVAHAAVKAKDNSYYRLKYEQISKRRGKKRAIIAIARMILTAIYQMMSTGEVWNHTDLFKVDMPETLKEKQLSKAVKQATKFLEKQGLTVA

SEQ ID NO: 441886 - protein, 313 aa, unidentified
MKEEKTFIGIDVSKEKLDVGVRPQVDFMTFANTEDGISLMTDFVKSKQPELIVLEATGGLEMAALRSLVVAGLPAVCVNPRQVRDFAKAMGVLAKTDKIDAHVIARFADSVRPEIRPLKTEETEMLDALNTRRNQLIIMLTAEKNRLTTASKWTKKDIEKSIKGLEKALAKLNREVENLIKKSPHWRHMDKILQSVPSVGPVMSLTILADLPEIGTMNRRQIAALVGVAPLNRDSGKYKGRRAIWGGRARIRSVLYMCVISGICHNPKIKAFYNRLISSGKKHKVAITACMRKLMIILNTMIKDDTCWNESGC

SEQ ID NO: 441887 - protein, 332 aa, unidentified
MSAVFCGLDVHKESTYATVLDSTGQVVTQRRMKNEDVSEFLEPLQVNRIAMEASTYIIPMYRRLVEEGYDVTVSHPKKTRYIAEARIKSDRVDSKALAELLRLDSLPESYIPPEELADLRERIRRRAFLVRQRTKLKVKIRDVLAYEGVKPPTGHGLFTRKGVEWLRGLGLEPVDCYLRLMAPLSREVLLLSKELRGMARDDPDVQLLMTIPGVGYYIALLIKAEVGDVGRFSSFDHLASYAGLVPSTRSSGGVERHGRITREGSRWLRWAMVEAAMVHVRQDSPVSRFYHRVAERRGRKPSLVAAARKLVTVCYSVLVNRRPYYNPLHAQA

SEQ ID NO: 441888 - protein, 343 aa, unidentified
MQTITTIGLDIAKSIFQVHCVDASGQVVIRRQLKRRQVLAFFQKLPPCLVGIEACASSHHWSRELQAVGHTVRLMPPAYVKPYVKRQKNDMADAEAICEAVTRANMRFVPTKTPEQQSGLVLHRTRHLFIRQQTSVINAIRAHLAEFGVTAAVGRKGIEELLRVIADPSDKRVPDAVRACLAALGNQLLSLKKQILAFDRMILAWHRSNQTSKRLNCIPGVGPLLATALVANVADPKAFQSGRNFSAWIGLVPKQHSSGGRPRLGSISKQGDRYLRGLFVAGALAVIRYAKLHGTKYRPWVAALLERRPTKVAAIALANKLARMAWAMMAKGERYNYPASLRV

SEQ ID NO: 441889 - protein, 423 aa, unidentified
MEVLHECVAGLDVHKDNVVACVRTVSGDKTTREHRTFDATTDGLLALLEWLTSCRCELVAMEATGVYWMPVWRILSDGAFKLIVVNAAHIKAVPGRKTDMKDSTWLADLAAFGLLKASFVPDEEQHELRALMRTRKQLVREQTRHVQRIQKTLTEANIKLDSVISDIMGRNGRRMIEAMITGVRDPRKLAALADQRLKATPKQLYDALHGRLTEHHRFLLQLHLGQWDTLDATIKGVEREVATRVFRMDTEGMAAKANFSDLIDQLVTIPGVSRLSALTILSEIGTDMSRFATAGHLVAWAGMCPGQNESAGKRKRTRLRKGAPWLKTMLVQCAWAAKRKKDSYYKAQFFRLQSRRGPQKAICAVAASLLTAIYHMLKDGTIHQDLGSGYFDQRPPEIKVKRLVNQIAKLGFEVTLQPIAKAA

SEQ ID NO: 441890 - protein, 355 aa, unidentified
MVTLGASHSNPDHKGGPNVERQYVGIDLHRRRSVIVRMTPEGEKLEMVRIENDPVAFSLELAKAGPNPEVILEATYGWYWAADHLAECGGRVHLAHPLGNNWGHRRVKNDERDAADLADLLRLGRLAESWIPPTEVRELRELVRYRAKLVALRSGLKAQVHAVLAKEGVRVPMSDLFGAKGQTLLDECRLGDAYALRVESLRDLIEVYDGEVEMLERHIGKRLDGHGGYQAIQAIPGVGPVLGAVFTAEIGDVTRFPAADKLCCWAGLTPRHRESDTTVKRGSITKQGSKLVRWAAIEAISRNRGGTFLQAASHRIAERRNNRNIGRVAAARKLLTLVYYGLRDGEIRCLARDAG

SEQ ID NO: 441891 - protein, 420 aa, unidentified
MIPAVIERGAGIDVGRKFVDVCLMVGAAQAEPKQETRRFSTLNEDLERMHQWLKENHVTHAAMESTGSYWRPIYNILDDGEMEIVLANSQHVRNLRGHKTDRNDARWIAHLLRHAMIRPSFIPNRETRDLRDLTRRRKQMVGCAAEERNRVQRVLQEANVQLGTVLSDVFGDSGLNMLDALMNPDATPEQIAELAVRQARKKIPLLKKALEGHRMTDHHRKLIRHSMEHLAFLEEEIAELDKEISEHVNAHAALRKATELAQSVNGIKEIAAAAIIAETGADIKQFPDGGKLSSWVGTCPGNNITGGKRKSAPARKGNPWACRVLVECAWSATRKKGSEAQRHYEHLKHGHKHKPALVATAHLLTLQLYEALATGKPYVDKAQAELPASKVQRLVRHHSRRLKKLKHWLSDHRQRCGQTT

SEQ ID NO: 441892 - protein, 451 aa, unidentified
MSRTPAPAKETESLLIVNPDAAGLDIGQDEIWVCVPADRDAPAVRPFGTYTPDLNALADWLEACHIRTVALESTGVYWIPIYEILDARGLKVYVVNARHLKHVPGRKSDIQDCQWIQRLHTYGLLTASFRPVADICAIRSYVRQRAMLIEYRAAHIQHMQKALQQMNVQLMQVLSDITGKTGLAIIRAILAGEHDPRQLATLRDERCAKTEAEIVKALTGNYRTEHLFALKQAVALYDMYTTQIQECDTELERLWQAQRPARDQDLPSLDTRDKRNTHSKNAPAYDARTLLYQVVGVDLVAISGLNVSTVQDILSDTGLDLSAFPSEKHFCSWLNVAPRNDISGGKVLRSRTLKSGNRAGQAFRMAAQAVSRKQDEFGAYYRRQRARLGPEQAIVATAHKIARAYYHVLKHRTPFRSLSADEYEQQVRQREVAHLKKKAAKLGFTIVETPA

SEQ ID NO: 441893 - protein, 462 aa, unidentified
MTVPTTKGSRTKATPLPTSLPAIRPLVAGLDVGSSEHWICGPARAYGQPNVRGFGTTTDQLQALADWLAEQGVESVAMESTSVYWIPIYELLESRGIEALLVNARQLHNVPGRKTDVTDCQWLQLLHSCGLLRGSFRPSEAITRLRALQRQLANLVAERTRCVQWMQKALDQMNVQVHRAVTDLTGTTGLAIVRAIVGGERDPARLALHRDYRCRKSAAEIARYLTGTWRDEHLFNLTSALRLFDALEAEIAAYDAQLLTAVESLQPPDRQADPVPPHPNPAKEKAIKARGEQQARTTLWRFAGVDLTRIDGISAGAAQVVLTEVGPDLAAFPSEDQFVSWLRLCPRTPISGGKPLKKRRNGLGANRIAGVLRMAATSLQRSKTALGAAFRRIARHKGGAVAVFATARQLAQLIYRMLRYGHDYVDIGEQAYDQRFLVRRFAALTESARSLGYTLVPTAATE

SEQ ID NO: 441894 - protein, 369 aa, unidentified
MAVAKRIKKERSSKTMAEGVAAAGLDLSDRRARFHAIDDEGETVETGTVAMEAPHLQRWASNIAPTVIAIEAGTHSPWVSRLLTACGHEVIVANPVKVALITRNIRKSDAVDAEYLARLARFDRKLLHPIQHRGEQAQLDLQVIRTREIMVQSRTKLIGHVRGAVKSFGARLPKCATEAFVNKTRKVIPEQLRSALDPVYVQIEHLSTTIAGYDRQIETTARERYPEVERVAQIKGVGTLTGLTFVLVLEDASRFRRSRSVGAFLGLTSKREQSGEEDPQRRITKAGDRLMRRLLLQSAHYILGAFGEDCDLRRHGMRIAERGGKRAKKRAAVAVARKLSVLMHRLWISGETYDPLRNGGKRAELPSAA

SEQ ID NO: 441895 - protein, 414 aa, unidentified
MFAVGVDVSNGRSTVAVLQTKTSTLMKPFEIPHTAEGFASLAGKLAGLDGEVRIVMEHTGRYYESFARAMHSAGFFVSAINPLAIKNYQDGINIRKVKTDKADAMKIARFALDKWEILPQYTPMDTIRYDLKTMHRQFQLSSKTKTALSNNLVALLEQSYPGANRYFDSPARPDGSQKWVDYVDTFWHVDCVARVSQNAFVERYRKWCKRHGYNFSQQTAIDLHTDARQKFALVPKSDTCKLLVREAVSQLNAVSRTVETYRTEMDRLASQLPEYETVMAMTGVGKSMGPQLMAEIGDIRRFPHQKSIVGFAGTDPIKDDSGDKVSDSKPSSKRGSPYLRKTLFVIMSILLQLHPQDDPVYQFLDKKRSEGKPYYVYMTAGMTKFLRIYYGKVRDCLKEQGLWEQTPDATGKAD

SEQ ID NO: 441896 - protein, 346 aa, unidentified
MNAVGIDVSKGKSMVAIMRPFGEIVSAPFEIKHTASGINSLVELINSVEGESRIVMEHTGRYYEVLAHQLSEANLFVSAINPKLIKDFDNDSLRKVKSDKADAVKIARYALDKWQNLKQYNVMNELRNQLKTMNRQFGFYMKHKTAMKNNLIGILDQTYPGVNTYFDSPARSDGSQKWVDFASTYWHVDCVRKMSLNAFIDHYQNWCKRKKYNFSQSKAEEIYGKAKELVPVLSKDAITKLIIKQAVDQLNSASTTVESLRTLMNETASKLPEYPVVMAMKGVGTSLGPQLIAEIGDVSRFTHKSAITAFAGVDPGVNESGSYEQKSVPTSKRGSSDLRKTLFHLE

SEQ ID NO: 441897 - protein, 342 aa, unidentified
MEHYAGIDVSLECSSVCVVDANGKIVREAKVASEPQALIAWFGSLGFGLERIGLEAGPLSQWLFAAMREAGLAVELLETRHVRKAFEAMPVKSDRNDARGIAQLMRLGWFRPVHCKSMSAQETRSLLTARKLVQSKLHDVENSLRGILRGFGLKVGKTTGQKFAGRIEELVTGHPHLQMIAKALLAVRAVLRTEFAAFEKQTRRMVRSDMQARLLTSIPAVGPIVALTYASAIDDPARFKSSKQAGAHFGLTPKKHQSGETDYTGRISKIGDASVRTALYEAANVMLTKPVKGCSQLKSWAMRIKRRAGMSKAKVALARRLAVIMHRMLADGTSFNAAAAAA

SEQ ID NO: 441898 - protein, 434 aa, unidentified
MLRSKDKACGADIHKKTVVATILSADGTKVEGEFGTTVPELIRFKEWLKENDCNSVAVESTGTFWQPIYSILEGSVEVIVANPYMIKHIPGRKTDKVDSNWIAQLCLKGMIEPSRIFPKVDRELRRLTRARESLGKIRTQLKNSIHKDLDSSHIKLSSVISDIFGRSGMHILRGLLDGQSIDAIIEGIPSGRVKKKADQIKEALHNNLELTQVILIESSLSLIRSVKQQIDMIEAEIASRIVSRKEDLEIVRSVPGVDFISGATLLAEIGDYQDFSSPEKMAAYFGIVPSVSQSAGRLHTGSITKHGSKHMRWILVQIANAASKKIGSKLRRFYLRIKARSGHNLAIIALARKILCILHHLLMNREKYVEDDGGKKPKSKKNYRTSSPRVMDIQEMIDIIRQSGYEVQKGDTSRGDSLKLSQSCGRNIKRGACG

SEQ ID NO: 441899 - protein, 412 aa, unidentified
MNAVGIDVSKGKSTVTIRRPGDVVLMPPRDIPHTQSAINGLIGQIKELDGETKVCMEHTGRYYEPVAMWLSDAGIFVSAVNPILIRNFGDDSLRTPKTDKADSKKIARYTLDRWAKLKQYGSMDKTRNQLKTMNRQFGFYMDQKTAMKNNLIALLDQTYPGANDFFDSPARSDGSQKWVDFVHTYWHVDCVRSRSPEAFKKHYQNWCKRKGYNFSAQKAENIYHASSDLIAVFPKDDNTKMLIWQAVAMLNTASRTVESLRLEMDKAASALPEYPVVLAMDGVGPTLGPQLMSEIGDVTRFTHRGALTAFAGVDPGKDDSGQRIRKSVPTTKKGSPYLRKTLFQIMDGLIKRSPADDPVYAFMDKKRAQGKPYYVYMTAGANKFLRIYYGRVKEYLASLPQTSDTEAEKDGI

SEQ ID NO: 441900 - protein, 346 aa, unidentified
MEHYAGIDVSLERSSVCVVDAQGKIVKEAKVASEPEAVVAFFETFGIAMKRIGLEAGPLSQWLHAGLKRAGFETVLLETRHVKAALSAMTVKTDRKDARGLAQLIRMGWFRPVHAKSMASQEVRALLVARKQLLGRLIDVELSIRGILRGFGLKVGPVTRKGFEARIRELVMGQATLERIAAAMLSARATLKTEYDKLHKTVLAIVREDAVCRRLMTVPSVGPLVAITYKSAMDDPNRIVKSKAAGALFGLTPKKYQSGEKDVTGGITRAGDEMVRTALYEAANVLLARITRFSKLKRWGMDVAKRRGSKRAKVALARKIAVILHRVWVDGTTYRWAAAEPIAAQA

SEQ ID NO: 441901 - protein, 345 aa, unidentified
MEHYVGLDVSLKLTAICIVDRTGKIEREGVVSSDPEAIAIFIKSHAPHVARVGLETGATATWLWTELNKLGLPVICIDARHAKAALKMQINKSDRNDAVGIARIMQCGWYKEVHVKDLDSHAVKALLASRALLVKIKRDLENQIRGLLKNLGLVIGRAKMNVFAVRAAEMTEDRPELAAAVVPLLSARAAIEQQIADLDRKVMRLARNNAQARRFMTAPGVGPITALCFLATIDDPTRFKRSRSVGAYLGLTTRRYASGEIDWTGRISKWGDKMLRSYLYEAANVMLTRVARWSALKAWGIRVAKRTGLRKAKVAVARKLAVVLHRMWIDGTEFKWSKEAANQPA

SEQ ID NO: 441902 - protein, 514 aa, unidentified
MSEGTAVPPFSRLSPRLLRKHSAWHIRHIPLTQNFHPQPLAPARKADWVHAHCARFRSPYAAQDKPFASGFTNPDPNGGDIMLKINYMSTLFVGIDVSSKTNAVYAMDFEENKYISSSFGNNQPGADKLVNMIAECMQKHQNLDTVLIVLESTSVYSVHISNFLSTSEVLMPYKPYVFCVNPKATSNYRKSYIGMEKTDPTDAYLIADFGRVGRTKKLEPWRGGQFIALKRLTRHRMHLSECITREKTYMVSNLYLKFSELQLLEGDDKPFGSLYGATSSAVLTEFLSPQEIIDMPEENLLAFLAEKSRNRISDISKTSELLRKAARDSYRLDKCMYEPLNISLASSFNCIHAYQKEIRLIEQAIGKCINGMNPNALTILRSIPGIGPVWASGILSEIGDIAAFHSSDALAKYAGLYWPKGDSGDFTSEDNQMSKAGNPYLRYYLGEAANSVRKHIPEYADFYARKYAEVTRHQHKRALALTSRKFVRLVFGLLVKNQLYTGEKLDTEYNIETN

SEQ ID NO: 441903 - protein, 355 aa, unidentified
MSQEKYIGMDVHQATISVAVTDSRGKLIMESILETKAATILEFLQGLHGSLSVTFEEGTSAAWLHDLLKPHVTHLVVCDPRKNALLKDGSKSDRIDARKLAELLRGNQLTSVYHGEHGMRTLKELGRSYVTITQDLVRVMSRIKALYRSWAIPCSGTSVYAPRHRAEWLDKIPEPGVRLRAERFYQQLDLLQPVRQQARRDLLTESRKHHAVKLLRQIPSIGPIRAALLVAQLQTPHRFRTKRQLWAYSGFALKTHDSGEYRYVRGKLQRNRERMTVRGLNNNHNPDVKNLFKGAAISASTHPGPLYDFYIALLEKGMRPTMARLTLARKIASITLTIWKKGADFDATQLHRQEA

SEQ ID NO: 441904 - protein, 326 aa, unidentified
MHPPTTYVGIDISKAKLDVALYHDDALKAETITVACDRRGLLALRRWLHQATTDRPLLIGMEATGAYWQPVAASLHASGARVYVLNPRCVKDSARAENQRQKTDRVDAGVIARHLRAHCAKLHPWTPPTPAVATLRALLTRWDQLGQELQREYNRRADVHEPLVHASFRRMIRFLLHERRTIRTALDQHCTAAAELHNAVDAVAAEPGIGLLSAMRLVALMRTHTFTTARQAAAFLGITPRHCESGTSLKRPPRISRVGDAALRHALFFPAVVARHHHPVLKPWADGLVARGKTPKQAACAVMRRIVHIAFGIVKRIDREQPLLAA

SEQ ID NO: 441905 - protein, 435 aa, unidentified
MADKLIVGIDVSKDWLDLCASNAAGVERIANTREAVAAWLERVAPGLIACEPTGGYERTLIAAARERGIAYLRVHPNDVIAFRKSRGIKAKTDAIDARLILAFVCDKAARAELRTSLIGDDRLQALAARRRQLVDALQAERCRLDAAALPAVRASLEAVIAVLRQSLETLEAELAEAIAAHPPTAELAKLLQTIFGIGPVAAITLIADLPELGLLSAKQIAALVGLAPHTKRSGKTRYRETTGHGRPGVRRVLFNAARAAVRHPSLFKDFYDRLVTDNRRPGKVALTAVMRKILITANAVARDRQPWRGRPAAGTPCRPHAEQTARRAGRVKTAAAPRAVARSASLEAAYRWATPTFRLDGVHGRWPAQGRPRTKKWLPGVKRCCSAEQVRREEERFPREGDGTNVRQAGTMPNLIETREALRCPALHCYYWDRR

SEQ ID NO: 441906 - protein, 348 aa, unidentified
MNSLHYIGFDVHKKTISFCVKTAAGEIVEEGSTPAQREALRKWAAARPQPWRGAMEATLFSGWIYDTLKPYGEQLEMAHPAKMKAISAGKKKSDTIDARTIADLVRCNLLPACYVAPPRIRELRRLLRYRSLVVSEAVRMKNKMAGLLMETGTLYVKEKLHRKKYFANLLEELEEVPESVIDLLRLSRGALEMFESTQKRLVRELLADPELAQRVERLMTIPAVGEITALTWALEVGDPQRFPSGSDAMSYCGLTAALKSSAGKQQRGPISKQRNHWLQTTLIEAAKLAPRWNPQLAALHARELERGHRNRATLAVARKLVTYLLAVDKSCQPFQVRAPSELPTQKAA

SEQ ID NO: 441907 - protein, 326 aa, unidentified
MRKVFFVGADVSRDKIDFCFLTPVENTRPKFVSLPNDTDTIKAYFQSFIKDDIFIVFEHTNNYHLPLQSALTDLNIKHSVLNPAKISHFLKHLTFQKSDVTDAYGLALYCRIFKSDLNPSAYNHEYNLIKSYNSTILLLSKIQTQLKNFKKSQDFVADTELSELIKSLTVQVQETKEKIKLIAFEILKSFVPNCEQIIKDNKGFGIDLALNLFPQLHFNRAKSEKQFISFLGLSPRIYESGSSVHKSPKINKRGSPAIRRILFLNAISCARFNDKFKQRYENLVSKGKKKKVALVAVMCAIVRYLKSLFPLNESYINESLYHARTS

SEQ ID NO: 441908 - protein, 379 aa, unidentified
MTNAMLQQDDIKPGRLLVAMEMSLSKWGLAAAVAGQPRKRVKTVAGGDYAALLEAVADFKARFKLPPDAPVVFCYEAGRDGFYPYRRLTELGHEVWVIDSASIEVSRHRRNAKSDGIDADKLVELMQRKAGGEQRALRVVRVPAEGAEDQRQLPRERASLLTDRRRVLNQIESLLFIQGYREVPQSSRALKVWLEQSRALGPQLRARVQRDVERLALLESQLTAVERRLKEQAHHAHAGHIGRVACALMQLCGIGLIGAWVLASEIYGWRVFRNRKEVGSVLGLTPTPYSSGTAQREQGISKAGNKRARSLLVELSWLWLRYQPDSALSQWFKARFSGGGKRLRRIGIVALARRLAVALWRYTAQGVIPEGARLKAAGA

SEQ ID NO: 441909 - protein, 351 aa, unidentified
MIESIKVEGQGIVGVDLGDRASQICRMDRESGKILEETRLSMTTVSVQRYFAALEPQLVVLESGTHTPWMVRLLRQLGHGVLVANPSKVRAISASRRKTDERDARCLAQLARVDPELLAPIQPRSEEFLQALAVVRAREGLVKARTMLINQMRGMVKSSGYRLPSGSSASFARKVQETLPEPLKAALEPLLRVIAELSEEIHGFDHAVEAWAKRWPVTERLRQIKGVGPLTALVYVLTLGDPDRFARSRAVGAYLGLVPATRNSGNSAPQLPISKQGDRLLRRLLVQASHYILGPFGQDSDLRRFGQRLAQRGGKNGKKRAVVAVARKLAVLLHRLWVSGTDYEPLRATAS

SEQ ID NO: 441910 - protein, 349 aa, unidentified
MIMLGIDAHKRSHTVVAVDHLGRQLGIKTTKATTTAEHLELVRWADQFGVDRTWAVEDCRHLSRRLERDMLAAGESLVRVPPKMMAHARDAARTYGKSDPIDAMAVARAALREPNLPTAHLDPASRELRLLVDHREDLVAERTRHINRLRWHMHEIDPGWDPSPRCLTTFKHLRAVAARLAGHNTVIARIAADLVARIHQLTVDVNSLEAELDTRTSRLAPKLREVHGVAGLSAAKLVGEVAAVGRFHSRHAFARHNGTAPTPVWSGNSDRHRLSRAGNRQLNAAIHRIALTQARSHPDARAYLERRTEKNATRKEAMRSLKRRLSDVIYRAMLADAERVADRHDRRAA

SEQ ID NO: 441911 - protein, 407 aa, unidentified
MDVVHPKCAGLDVHQQTVVACARVGSGKTVTHAVRTFGSTTPELLALSDWLATHGCTHVAMESTGVYWKPVWHVLDGHFELVLANAMHIRNIPGRKSDVNDATWIADLLAHGLIRSSFVPPEPIQELRDLTRTRKQLVREIAQHTLRIQKTLETANIKLTAVLADITGVSGRAILQALVAGERDPERLATLANERVKASRADLVAALHGRVTGHHRFMLHLHLTQIAALEAAVREVEARLGDALAPFRAALDRLITMPGVSETVARVIVAEIGFNMTRFPTAGHLVSWAGLCPRLHESAGKRLSNRTRSSNPWLKTTLVQAAWAATRKKDGYFRAQFLRLKSRRGPKKAIIAVAASMLTAAYHMLKHGVDYRDLGADHFDRRDKAKLAKRLIARLQDLGITVEVRAA

SEQ ID NO: 441912 - protein, 346 aa, unidentified
MLYAGLDLSRRRVDVCLLDARGARVEVTAAPPDGDGLRGLADRLASHGEPISAAVESMNGARYVHDMLEAAGWDVALADAAKVKGLAPLTAKTDRIDAFVLAELCRRDLVPAVWLPTPGVRAERERARFRLHLVRHRAALKNRVHATLIAHGHNLPVSDLFGVRGQELLARLALPEPWAQTTAASLRLIADLDREIGACESELRRLGADHRYVPLLMSAPGIAWVLAYTIAAEIGEIERFSSPKKLCGYTGLCPRVIQSGSSDRRGPLTRNGPEHLRWALIEAAVHAARHPVYAAHYEHTKRRLGRQRGAKVARVEVARKLAEAIWYMLTREQPFAPAGPALPLVA

SEQ ID NO: 441913 - protein, 411 aa, unidentified
MDVMVERCCGLDVHKDTVVACVRTPGRGGARDQETRTFGTMTSDLLALRDWLVATGVTLVGMESTGIYWRPVFYLLEDAVPCWLLNARHLRNVPGKKTDVLDAEWICRLVEHGLVRPSFVPPRPIRELRDLTRYRKAQIEERGREAQRLDKVLQDAGVKLSSVATDILGRSGRDMLEALAHGTRDPEVLAELARGRLRSKLPVLREALNGRFSGHHALLVGEILAKLDYLDEAIERLSMEVDRLIAPFGAEVALLDTIPGVDRRTAEALVAEIGVDMGRFGSSARLASWAGLCPGLDESAGKRRSGRTRKGPKWLGAHLAEAAEAAGRTKRTYLGAQFGRLRGRLGHAKARKAVAHSMLVAAFHILARHVPYEDLGADWFAKRRPEAHARRLARQIEALGYRVTFEPLAAA

SEQ ID NO: 441914 - protein, 404 aa, unidentified
MLILFYLGIDIGKRHHEIGLINDKGNPIGKTLRFSNSKAGSEKLLNFINQHHLTPHNVLIGLEATGHYWLSVFSYLHKLGFKSTVFNPLQSDALRHFYIRKTKTDVSDAYLIAQVIRIDSPQETPFIEEDLLRLRNLERLRYSFIDQSSDLKRKIISLLDQVFPEYEQIFSDIFGKSSTELLLHSPLPEDLLNIETNKLAVLLNKMSQGRLGEFRSLDKAMKVKESAENTFGISIGTDVFKLQIQLLLEQISLIEKHLKKIEKAMIEISERQEHFLTTITGIGDITACVILGEIGSVERFERPEQLVAFAGLDASVYQSGDFNSNKTRISKRGSPYLRRAIWQAAFVASYHDPALSIHYQKLRKRGKAHGTAIGAVARKLTHIIFAILRDNKPYEPRPEVNNNN

SEQ ID NO: 441915 - protein, 430 aa, unidentified
MRRPVPTGKLLRSPVERTQGAEEEPAVKKNSRKTQTIDGKGASPRSTSQEAKKGKRKVVVPVKGGQPAITIGIDVGDKHSHYCWLDADGEIVKQGRVASTRAAVEKEFSGITGARIALETGTHCRWMSEVLKDLGHEVIVADARELKSITGSRRKSDPKDAEQLARLARVDVRLLHPVSLRGRKTQQDRSVLQARNALVEVRTKLICTIRGMVKSDGARLESSSAEAFPEQVKEAIPEGLRRAVAPLLEMLDELNEKIRYYDQLVAHMAEKEYPESRLLTQVAGVGALTALYFVLTIEDAGRFERSRDVGSYFGLVPKQKDSGESTPQLRISKAGDEGARRLLVNCAHYILGVFGPDSDLKRWGVDLAARGGKNAKKRAIVAVARKLAVLLHRLWVTGESYEPLRNSDKKATAKKAAAAAIAAASKTAAA

SEQ ID NO: 441916 - protein, 355 aa, unidentified
MSSEKYIGMDVHQATISVAVLDSQGKTLMECILETKASTLLEFVGGLRGTLYVTFEEGTWAAWLYDLLKPHVAKVVVCNPRKNALLKHGSKSDKIDAHKLADRLRLNDLKPVYHEESGVRMLRELARSYLTIVKDLTRVMSRVKAVYRSWGIPCGGREVYYTRHRQQWLNKIQEPGVRRRAERLYQQLDMLQLLRQQARRELLAESRKHTITAKLRTIPSIGPIRSALAVALIQTPNRFRTKRQLWTYSGLGLETRDSGEYHYVKGQVRRRKKQKFIRGLNRDYNHDLKALFKGAALRATILPGPFQDFYQRSLAKGIKPTMVRLTLARKIAAITLTVWKKGANFDLDKVKPQAA

SEQ ID NO: 441917 - protein, 411 aa, unidentified
MQVIYERCCGLDVHKRTITACVLKWLGGDWKKEIRQFGTMTHDLLALSDWLVREGCTHVAMESTGVYWKPVYNILEGQFELLVVNAQHLKAVPGRKTDVRDAEWIAELLAHGLLRGSFVPPVRVRELRELTRYRTSLVCDCARTINRLQKVLEGANLKLASVVSDIRGVSARLMLEALVAGERDTSQLANLAKGRLKEKHAQLVEALSCRLQPHQSFLIAEHLAQIDYLEGAIERLSRQIEEKLRPFEQEMAWLDTIPGVNRRTAEVLWAETGGDMARFASARHLASWAGMCPGNNESAAKRRTGRTRKGSPWLRHCLIEAAHGAAHTKNRYLSSQYHRLAARRGKKKAQVAVGHSILVIAYHLLTRKQPYSDLGANYFDERDRQAVTKRCLNRLQKLGFKVTLENVQMAA

SEQ ID NO: 441918 - protein, 333 aa, unidentified
MKRTTIGIDIAKNVFEIYVEDGATQGVERKRLSRKKMLPWLANRPPALVGMEACGGAHYWARELTKLGHEVRLMAPQYVKPWVQTNKSDAADARAICRAVQEPGMRFVRIATEAQQDVQAMHRVRSRLRGNRTALMNQIRGILLEYGVASLRNALPSLLAEERWSPLMRQFLTEQQAELTACEAQMAAVTVAITRASATQPVCQRLEQVRGIGPLGASALWLKLAGGAYQNGRHVAAALGLVPKHTGTGGKVRLGGISKRGDRYLRQLLIHGARAVVAQVGEKPDALSGWLRRLVARRGMNKAVVALANKNARVAFALLHGEQPYEVTKMCQA

SEQ ID NO: 441919 - protein, 417 aa, unidentified
MQPHFSYYLGVDAGYAHHVAVLCDATGTPVSEWTVDATVEGVMTLVDHVAAQVDGAVHTVAVGIEQPHDPVVELFQCRDAVVYTANPKALERFRASFQAAPCKDDRRDAWQLAEAVRLGLPALREVTQPRALVQEIRWVNRQVLADQQECQRLGNRLRTAVHTVAPGLLSLCPAADEPWFWALLAQGATPEAAQAVSQATIAQLLQTFRIRRHSVETVWTTYHTAWVPVAGGVYAGIRYQIAALIEQLQACDRVLQAGRRQLTTLLDQWHTELRQETPEHPTVVEILWSSPGTGERTLPTLIGEGWALLEAAQLPLLRTYSGQAPVTIASGNSKRVEMRRACNPWLRQALHHISSVFWQHDPRARALYQAHRAQGQRHSRALRTVGDRWLAMICAMIRTKTVYDPAKRQGLGIAKAA

SEQ ID NO: 441920 - protein, 312 aa, unidentified
MVVIAGIDVSKDKLDIHVLPSNQTFVVGRDRRGLASLVRRLRKAGVEQVALEASGDYERIVIEALEADGFVVQLLNPARVRAFAEAIGMLAKTDPIDARLIALYCQHFPDTGLTRRPEQARKLGEFLNMRAMLLKLAGEIRNSLEHVREPGLKALADTLSADIAAKLKDVDDRIAKVIAGHDATMRKARIIRSFTGAGPVLTSGLLARVPELGGVTRHAAARLCRAAPTDRQSGRTRHRSSIEGGRDQVRPVLHMAALAAIRSNPIIKAFAHRLSAAGKPKPLVIAACARKMVVILNAMLRDNTEWKYAKAA

SEQ ID NO: 441921 - protein, 369 aa, unidentified
MSETNVAFQSFVGVDLHKCTVTLVAVDPDGNQIAKLTAPTKCIGKIAAWLRSLPDPVSMAVEACPFVEWFIDRFRWCVHRMDIADATELASRRGKRRKNDPNDALDIALRLARGECPLGFIADEELMQLRKLGRHWRQRSRLLSRTKHSMKSMLNAANIRGPKFDAAGAHRWFLAHGHLLKPAQQDAFADFIDILILVERQRERLRRKIILANRSEEFVKITELLKTVPGIDEIWACIIAAEIGPFDRFPNADALQFWAGMTADMKESAGRTQSGNITKAGSCTLRWALCKAAVTLCRSDAKQEATRQRLIRQVGGIKAKANVAMGRRLLGILYAMVRDGKPYEIGEPTNHNRAANRARAARKQRKEAA

SEQ ID NO: 441922 - protein, 343 aa, unidentified
MQTVSTIGLDIAKSVFQVHGVDTNGVMVVRRQLKRRYVLVFFEKLPPCLVGIEACASSHHWSRELQALGHTVRLMPPAYVKPYVKRQKNDAADAEAICEAVTRANMRFVPTKTPEQQSGLVLHRTRHLFIRQQTSVINAIRAHLAEFGVTAPVGRKGIEELLRVIADPSDKRVSDVVRACLAALGSQLLSLKRQILDFDRMIMAWHRSDQTSKRLNCIPGVGPLLATALVASVADPKAFRSGRNFSAWIGLVPKQHSSGGRAKLGSISKKGDRYLRGLFVAGALAVLRYAKIHGTKYRPWVAALLARRPTKVAAIALANKLARMAWAMMATGERYNYPAALRV

SEQ ID NO: 441923 - protein, 357 aa, unidentified
MKQDTQLNFTGQSIYVGIDVHKLSWDITIIVNGIKVKKFSMNPQPKELYNYLKKHYPQGEYYSVYEAGFSGFWADRELRVLGINNIVVSPADVPTKSKERRRKTDRVDSGKLARELSVGHLDGVYIPEEKAEALRVLVRLRRQLVTDQTRAKNRIKSLLLFLGQRVPEDVEEKHWSKRYIIALRNLPINQEESKIALVELLDNLESTRNQIASVVNQLRNYVAQDNEISKTINLLTTIPGIGFVLAIILYSEIIDIKRFGRLDELAAYVGFSPAVYFSGEKEITLGLSKQKNKYIRNYLIEASWIAIRRDLALQMAYGKLCKRMPGNKAIIRISKKLLNRIRYVWSKQQPYIFSVVK

SEQ ID NO: 441924 - protein, 327 aa, unidentified
MQIPLQVVGLDVSKATLAVCYQVQSQLVQLDVSNTPAGFRQLVRRCGTQCLYLLEATGPYHLAAATYLVAAGAEVAVVNPLVVRRFIQMHLGKGKSDRKDAQWLLRFGQQQPVARWQPPHAVLVECRQLEQALELLIRQQTMSSNALDALQLQPVVSAVARRELQQTVRHLEQQVDQLEAALLTRVEAHYARELPLLCSIPGIGRKTAAQLLLFADGFAQVQNYRQLIAKAGLCPREYQSGTSVRGQTRITKMGGARIRSKLYLCSWSACRANAACQALYDRLLAKGKPKKVALIAVCNKLLKQACAIVNSGVPYQPDFCKKTAVPT

SEQ ID NO: 441925 - protein, 411 aa, unidentified
MVLDPKGIPIGRSFSFQSSYNGFHFKLWQKLKLLPFEVNPENTAFAVEISINYWQKICHYLSDKGYTVLMVRPITTKHERPRLNNFSKTDPKDALCIASSARQGYFNFYQQYPDEIQGIHRLGITYDKLKKQIVIAKQRLRSEVEMLFPEFPSVLKIDTDTARYLLSKYLTAKDFSEINVFYESIELVAISRNHHGTETLKALKEAAAKSIGLPLDKITYLAHRMAVNMWIEQIRMLKIQQYNILREMSALAQKTAFFKLLTSIKGVSEITAVRFIAEIPQLGNDLHFKQVEAFAGLNLRLSDSGNTSGYRRISHWGNNRLRAVLYKMTEETKNHIPEVRIRFIKRQMKRSNYTKNITACTSNLLKIIIAMIRDNRCYEYDPEKVREMETLDKQYHEYKLKRKRKSFIKIA

SEQ ID NO: 441926 - protein, 318 aa, unidentified
MNLPSPLPVTTHLGLDIAKRTLELGAHPALAQRAFANDPAGHRALIAAVQQIAAPIQIICEATGGYEHDLLAALHAARVPVTLVNPRQVRDFARAKGLLAKTDVLDAAVLAEYGRIFQPAPAAALTPAQQRLTCLVRRRQELLELITQEQHRGEHHHDPFVVKKARSLMTTLRRQLEQLEEEISALEKADRTLARSVERLTAIQGVGRRTAWLLLAAMPELGTLARGQAAALAGLAPYNHDSGPQRGQRHIAHGRPLARGALYMAALVAARFNPVLKPFYQRLRAAGKPGKVALVALMRKLAELANLLLKSSSFQLVQ

SEQ ID NO: 441927 - protein, 319 aa, unidentified
MNRIIIGIDISKHKFDAAYMTTARKWQRETFENTSEGFKIFVKWLAEKNIEKCHMVMEATGRYGEDLANFLYVSGYEVSIVNPAQIKYYGRSLLKRTKTDKIDSQLIAEFAQRHELPFWQPLSPGLQALKDQVRCLEAFKKDATQTRNRLGHAKDLMVRKMLEERLAHIQKQVDQLTVSLKQLAKEDPLISHQIELLISIPGIGETTALYLLGELPDLSTFKCAKQLAAFAGLNPSIKTSGISVKGKEKISKTGRKELRKILFFPAMTVMRGSSHLKLFIERLRGKGKKGKVVVTAVMRKMMHIVFGVLKTQIPFQEVI

SEQ ID NO: 441928 - protein, 352 aa, unidentified
MTRITTIGLDIAKSIFQVHAIDAGDRVVVVKAIRRAQMLAFFGRLEPCLVGIEACGSAHFWAREIGELGHTVKLMPPKYVKAYVKRGKTDAGDAEAICEAVTRQTMTFVAVKSAGQQALAMLHSVRETLIGQRTQAINALRGHLSELGVIAPQGLLGQAELARIVRDDDDARLPLIARVALKLLVAQIEAVSGRIAETDAALRAEHKSSAQSRALETVPSIGPVIASALRARVGDAHGFENGRHMAAWIGLVPEQDSSGGKVKQRGISKKGDRYLRRLLVSGAMAMVQHAQRKPDKYPWIAKLLGSKPPKLVAVAVANKTARIAWAIMARGGTYDPGFHAKRTAAAVLAAPV

SEQ ID NO: 441929 - protein, 343 aa, unidentified
MTISMLGIDIAKNTFQLHGADISGKAVHKKRLARRELVAHVANLPACTVVMEACGGANYWARVFQSYGHTVKLISPQFVKPFVKTNKNDANDAQAIVEAASRPSMHFVPFKQVEQQDIQTIHRIRTRVVKNRTALINEIRGLCLEYGVVLTPGAARVKSSLCAAIADGGNELTPSSRESMQDLYEELVDIEARVKKLDARVRQLCRQHESCQRILKIPGVGELTATAIVAAVPDPGEFRNGRHMSAWLGLVPRQSSSGDKTTLLGISKRGDRYLRTLLIHGARAVLSHYRERDNDYNRWVGRKKATLRHNKAAVALANKNARIIWSMLNTGEEFNYGAPATAD

SEQ ID NO: 441930 - protein, 386 aa, unidentified
MTQHSHVTTSNGLDYDRTLILAVEVSGRSWIVAAQVPGLRQKGVKQQLAPRADALMAAVEGYKRRAAAAGMAVERVIVAYESGGSGFWLARWLQQRGVEVYVMQPSSVPVDRRMRRAKSDRIDADMLLRTLLAWLRGEPRVCSMVPVPDEATEDARRPIREREELIRARVALVNRIEAVLTVLGAGDYNPLRRDCRERLGQLRTALDQPLPPHARAQIERLLDRLDLIRQQVADLEAQRDRAVEGETVGQAERMIQHLARVRGIGVQTATVLVHEAFVRRFRNARALGSYAGLTGTPYSSGGTHREQGISKDGNRRLRATLVELAWMWLRYQPGCALSRWFHDRLGGSRGRLRKVMIVALARKLLIALWRYLQDGAVPQGMELKPA

SEQ ID NO: 441931 - protein, 317 aa, unidentified
MNTQNNQNEINVGVDTGKTQLDIYIRPLDIYFTVTNDEKGINKAVKEIKKHNPTRIVIEATGRLEQAFIIACAKETLPFVVANPVRIKKFAGSAGQLAKTDKLDAKLIAHYSEALKPELSTLKPETLREMSDLLSRRCQLMEMRTIEKNRLQILPKSLASTINPMLTAINNQLTKIDKKMAKLIEQCDEYKIKNDIIQSVPGVGNVVAFSLLSNMPELGYINNKEAAALVGVAPINRESGAFKGKRMIRGGRHQIRTAMFMSMMSAMQCNPVFKATYQRLVAAGKPKKIAIIACVRKMIVILNSMVRDGVYWDPKMN

SEQ ID NO: 441932 - protein, 356 aa, unidentified
MSYDVKYIGMDVHKEAIVIAVLNEGGKLVMESVIETRASSILQFLHGLRGELHVTWEEGTWAAWLYDLLQPQVQHIVVCNPRRNALLKEGSKSDKVDAHKLADLLRTGMLRPVYHGENGLRTLRELGRSYQTISKDLTRVMNRLKALYRGWGIPCAGTQVYAARCREEWLSKIPQAGVRRRAELLYQQLDGLQILRRDVRSEFLAESRKHKAAKLLRQIPCIGPIRAARLIGLMQTPHRFRSKRQLWTYSGLGVETHDSAQYRFVSGHVQRSKKPQQVRGLNQNHNHEMKEIFKSAATRASCGRGPFYDFYAGLLAKGMKPEMARLTLARKIAAIALTLWKKEERFDAEQLKTQAA

SEQ ID NO: 441933 - protein, 328 aa, unidentified
MVAKVSDAIVGIDVSKETLDAYCTKGQRKQGRTFANSPDGWKLVRTWLKAMGSKQARVCMEATGRHSLGVALALHDAGHVVSVVNPAQIRDFARTKLGRNKTDKIDAALIREYGELFKPEPWTPPSPAMRRLCELQTMRAGIIRSRAEWKNRMGSGLGDSVAIELAAATIDHFTTQLEAIDTAISETIDQDAELHHRRDLLISVIGVGDTLAALLMAKMPEPGVLRRSGEIVAYAGLNPSHHRSGTSIDRPTRISKIGNAELRSALYMPALSAMRFNPAVAALVARLKIAGRLKPKQIVVAAMRKLLVLCFGVLKTGKRFDPAIAMPA

SEQ ID NO: 441934 - protein, 354 aa, unidentified
MSSEKYIGLDVHQATISVAVMDSQGKLIMESILETKASTILEFLAGLRGALSVTFEEGTWAAWLYDLLKPHVAKLVVCNPRKMAVLKQGNKSDKIDARKLADRLRLNDLKPVYHGETGVRMLRELARSYLTVVKDLSRVMNRLKALYRSWAIPCAGRDVYYTRHRSQWLGKIPEAGTRRRAEQLYQQLDMLQHLRQQARRELLAESRKHTITAKLKQIPSLGPIRSALAVALIQTPHRFRSKRQLWTYSGLGLETRDSGEYHFVKGQVRRKKQVWIRGLNKDYNHDLKGLFKAAAIRASVLPGPFQDFYQRSLAKGIQPTMVRLTLARKIAAITLTLWKKGENFDIEKLKSQAA

SEQ ID NO: 441935 - protein, 409 aa, unidentified
MDQLIERCCGLDVHRDTVVACVRGPGPNGRRQHEVRTFGTTAVELLALRDWLEAHAVTDVAMESTGVYWKPVFYVLEEAFTCLLVNAAHIKQVPGRKTDVKDCMWIAQCLEHGLLRGSFVPPAPIRELRDLTRHRKVLIQERTRAANRLHKLLEDAGIKLASVATNILGVSGRAMLEALVHGTTDPAVLADLARGKLRKKLPALRQALAGRFRPHHAFLVSQLLAHVDYLDEAITTMSEEVEGRLAPFAAQLTQLDTIPGINTRTAEVIIAELGVDMSCFPSDRHLASWAGICPGNNESAGKHQSGTTRKGNRWLRMTLIEAAGAAIRTKDSALGARYRRVMRHRGHKKAVVAVAHAMLRAVYHLLAEGTTYREPGADYYDRHHTHRVTRRAIQFLERQGYRVVLEPAA

SEQ ID NO: 441936 - protein, 416 aa, unidentified
MEQESILVKTKQYTYFCGIDIAKRKHVACVINRDDEFVVRSQSFNNDAQGYQALLNRLKDTGQRRQILIGMEATGHYWYALRDFLAGKGYEVVVLNPIQTAQQAKKGIRKSKTDKIDAHHIAQLLKNGEHKAALVPGDFAMTCRQLTRLRYKLIGQGAGVKRLLWSRLHPVWPEYETLLANPFCKTGRTLLMTAPTPADVLAFGREALAELIRKTSRGKYGAMQAEKIWLAAQQTVGTRRGLDGARVSIRSLLTQIEALAAIRKQLEAEIVALAERLPGHLFTLPGIDRISAVSLFGETDPIEAFDTGAQLVAFAGLDTTVFQTGQYEAPHRRITKRGSPFLRHTLWGMAHRACYQEGDLRDYWLRRRGDGLHYLAAVTASAIKLSHVAWRILTDRRDYLPKAPTARKIRRSRPTS

SEQ ID NO: 441937 - protein, 332 aa, unidentified
MQFKHFVGIDISKLTLDVYIHHKSLHHKFTNDQQGFDALLKWIYLRTAESTPLEIVFCFEHSGFYSLLLAIYMQKHDCNFSMISPLQIKRSLGIVRGKNDKIDSRRIAEYAYEKRDKYYPTKIPSEAILKLHPIMTLRDRLARDRGAFVGTMKEQSKFLPIDQIPVLMESYTHIIKSLDAEIKALEKAIKAIVNDDPELKRTFELITGIKGIGLLVGVYLIIYTHNFSRFETWRKCACFAGIVPFQNSSGTSVRSRSQVHPIANKQIKKMLHIAALSAAHTDKEINIFYNRKIQDGKSKMCVLNIIRNKLLARAFAVARRGTEYVDIMKHVA

SEQ ID NO: 441938 - protein, 356 aa, unidentified
MLKYCLGLDVSSKELYACLSVIDHLQKVIVKSSSKFLNNPSGFDSLVAWLIKHYKQKDIPLIVIMEATGVYYENVALFLHLKGYKVSVVLPNKAKKYFQATGLKSKNDRIDAQGLARMGAEQSLDQWLPKDEYFYQLRSLTRQQQSLQELKTNVNNQLHAEEHGMYQNQVVISQLTFLIVTINNQIKDVEAAIAAHLNKDKEVAKLVEGITLIKGVGALTVAIILAETNGFALFKNIPQLISFAGYDVVENQSGSHTGKTRISKKGNAHIRRCLHMPSLAVIRYQQSPFIQLFNRTLQRHGIKMKSYVAVQKKLLVLIYVLWKKKEAYQPTRNINHSGEQEQMSSSLLSFEEAGVH

SEQ ID NO: 441939 - protein, 378 aa, unidentified
MDRAINSTAPADRLFCAVELSKNSWLLGIQFPDRQKASVYPLKGGDSEGLMAKLVAACDRWTKVSGKKPSIILCYEAGYDAFWLARFLKARGIDCLVVDSASMQVNRRSRRAKTDRIDLGKLLRALIAWCGGERHVWSVVRTPSVDEEDLRRSHRERGRLITERTAHVNRIKGLLFAQGIRGINVKARYKTLQIDELVTGEGRPLPPRLAQEIKREIERLGLVQQQIAAIEEERDESPTTCKETEKKRTQLLLLKGIGPTFSAVMAREVYYRQFCNRRQVAGFLGLATSPYDSGQMERSQGISRAGSGPVRATMIQMAWLWIKHQPKSAIAQWFVQRTEGQNGRIKRIMIVAVARRLAIALWRYLEQGLVPQGATLTR

SEQ ID NO: 441940 - protein, 424 aa, unidentified
MKVTYQTCCGVDVHKSFLVATIVKTTGGIEPSYQKKRFSTFNNSILEFKQWLINNNCHDVCMESTGKYWIPVFNLLEDQINVTIANPKWVKAVKGNKDDTKDSKWIGDLFRLGLVKGSYIPCKAIRILREYTRYRYKLVSCRSSEKNRYQNALTVCNVALDSVVSDIFGKSSTSIIDYLLEQSGTSINHEEIASKLLRSLKSKEDAVIESVEGYQMTDAQKYRMRLVRAHMDYITAEINDVDKMIENMISSNPDFENAIQFLCTIPGVKRDSAITIISEIGTDMSQFSSSKRLCCWAGLTPGSNESAGKKKSVRITRAGVYLKPALVQCAHAAVKSDKSPYYKKKYESLVKRRGKKRAIIAIARMILTAIYQMLSTGEQWNPSDLYKIDMPVALVEKQKAKAIKQAKKLLQREGLLPPDEPLAS

SEQ ID NO: 441941 - protein, 454 aa, unidentified
MSKSRTRPTGLPIINEFAAGIDIGSRFHVVAVSPDLCDEPVQTFQAFTSDLLRMADWLIEVGIQTVAMESTGVYWVAAYEVLESRGINVILANAREARAVPGRKSDVNDAQWLQRLHACGLLRASFRPGREIAALRAYLRSRERHLDYAASHIQHMQKALTFMNLQLQHVISDITGVTGMQIIRSIVAGERNPDVLAAMRDVRCKAKIETVRAALVGNYQPEHVFALKQALALYDFYQQCVAECDVQIEQVVAALNAKRPVPEAALPKARHRTKQPNDVNFDVRFAMYQLAGTDLTQIHGIGPFLALRLVAECGTDLSRWKTAKHFTSWLTLSPGCKISGGKVLSAHTRKTSNRVTVALRLAAVTVGRTNTALGAFYRRLAARIGNAKAVTATARKIAILFYNAMRFGSNYSDPGADYYEQQYRDRVIKQLHRRAAQFGLSLQPLDSVVDECVS

SEQ ID NO: 441942 - protein, 404 aa, unidentified
MKGPIVSIDVSKGKSDYQAFKEMNVKYTGSRSIKHTKEGFDEIVSLVREMEKKLETEVCVVYEATGVYHRVLKKVLEDNNIKQFIINPLLSAKTRKNDSLRSPKTDKLDPKSIAKTYYSHSLHNSHKPETIYHELRELSRYYEDILVHLRKDKVAFRAQLDVVFPGYDTLYDDLYGPVALAVIEKYPHPEMLQKKKINTVSKVIHSKTCHRQAMSDTMADKAIEYSKTIYSGCDKDDIEVLILQRFIKKLKEDMAEAERTIGEMIKLVQELPDFSIIKSIPGIGDNLAARIIAELGDMTRFKKKNELVAFAGLDPRISESGQNDGDHMHITKKGNKRLRCLLYLAVTCSIRLKRDDNSTKDFYIKKKQQSNPMCSKAAKTACASKLVRIIYSMCKTGELYQYNK

SEQ ID NO: 441943 - protein, 376 aa, unidentified
MTTIGAKRLETKVEVILGVDTHLDFHVAVAIDHLGRRLGEASVPTTAKGYEKLLCWAEGFGPLRCAGVEGASSYGAGLARHLRARGIEVLEVERPKRQRRSSRRNLQKSDPSDAESAARVVLAGEASGAPKSADGTVEMIRALRAARRSAMKARTQAANQLQGLRVTAPEQLRQRLRGLSTMELVSVAARFRLGDDLRDVPSATKFALRSVARRYEALSAEIAELEAHLDRLVAQVAPELVSLAGIGTDNAATLLIVAGDNPQRLRSEASFASLCGVSPVEASSGKVVRHRLNRGGNREANRALYMICLARMRRDLRTQEYLSRRTAEGKSKREIIRCLKRYIAREVYRVLISRGARSSPTVPMDEAHIVTGSSAA

SEQ ID NO: 441944 - protein, 373 aa, unidentified
MVVVGVDTHKATHTLVGVDVAGRKLAELTVKATAVGNLKALGWARSVFGADVVWGIEDCRNLSSQLERALLDAGQRVVRVSPHLMARTRASARTRGKSDPIDALAVARAVLREPDLPVASHDEISRELKLLVDRRDDLVAQRGGTVNRLLWRVHELDPSHAPKPASLDRRKTWRWLGAWLATQPGLVASLARDELADIASVTEEINALERRIAARVRAEAPSLLNLVGCAELTAAKVVGETAGVGRFRSEAAFACYAGVAPLPRWSGRTRVRVRVVRSGNRQLNVALYRIALTQSRHSGPGQEYYRKRRAAGDSHAEALRRLQRRVARSVFGCLRADFANRRATCEPLRSFPELEQINAEWSRALARLWSSGT

SEQ ID NO: 441945 - protein, 362 aa, unidentified
MRIIGCDLHTRQQTLAMLDTETGEVVKMTLTHEGNNVQEFYSTLSRPACVGIEATGSMQWFVNLMEELGIECRVGNPAKIRAAEPRKQKHDRRDADLILTLLVENRFPAIWLPSKELQDLRALLRHRHQWVRMRTRIQNALQSIALANGLRRGPSLWSRDGQSTIASLPLAPHTAHRRSELQAMYVKFESDIEKLNQRVEEQAGQRPGARLLMTHPGVGPVTALATDVFLGDPKRFADGKTLASYVGIIPREYSSGGRQKFGGLSKQGNPLLRFLWGEAAAHAVRRDPDLQRFYRRKMVQKGLGKARMAVARKLGIRLWIMLRNEIDYNEFCRRGQKQQNSGAACAGMPETRYGATSHRPID

SEQ ID NO: 441946 - protein, 351 aa, unidentified
MESQQTAHPKLFIGIDIHKRNWKVHCSTDLFMGKSFSMSADPEKLLAYVSKHFHGYQVTTAYEAGCCGYYAHRCFQSYGWQSLVVNPADIHRKGKEQHTKTDKIDAQLIARELKDGRLESIIIPDKEREELRSLFRRRNDLVKDFRRVKSYIKMQLLYFGIKEPEEFDNDHWSHKYRNWLDNMVFEYPTAKATLDSRLRFFRFVDQELRDISTELRRYCKKHYKKDYMLLRSIPGIGGIVACGILCELGDLRRFNNIKHLAGYVGLAPSIYQSGKNQRTMGMTPRANRLLRSYFVEASWQAIRSDPVMQAYYRKHQGKNVKSVIVKVARKLLSRTLAVIKTEVPYTIGIIE

SEQ ID NO: 441947 - protein, 348 aa, unidentified
MLIIGCDFHAGFEVLAIFDNRNGVQTEKRLEHPQEAIAFYRELQRKGEMVRVGMEAGAPCQWFRRLLSECGHELWVGDAARIRAAAVGKKKTDREDAKLMLQMMREERFPQIWVPTEEERDARQLLLDRHHRVRARTQAKNQLQSLAMNQGVQKGRRLWTEAGRELLAGLTMSQHTARRRDYLLRRVAELEQEIAHMDVLVWKEAQRRPAAVRLQTHPGVGPQTALATVLTLGEVSRFHSARAVSAYLGLVPTESSSGGRQRLGHISKQGSRLMRFLLVEAGQTAVKKDPELKRAYKRMWVRKGNKAVAKVMVARRLAVRLYWMLREQWTYTELVEHVGKPESFCGKR

SEQ ID NO: 441948 - protein, 357 aa, unidentified
MTQVKKLDFTGTTIFCGVDVHKKNWRVNIHDSEFELEDFSQDADPVLLHKHLTRKYPGASYKVCYESGFSGFSTQRLLSSLGIDCQLVNPADVATTDKEKRQKTDKIDARKLCEHLQSKKMKGIYVPSLQWEHGRSLIRARAKIVSNQTRCKNRIWQLLHFSGLSLPKNYEAGQYWSRNFIKDLQATSCDSKELKITLDLYIKDFLQTRSLLLEATRAIRKLCTQSEYEKEIALLRSIPAIGEINAAVILFELQDINRFKYFDNLSSYVGFVPNTSDSGDTKKTKGITNRHNHYLRTALVESSWSVIRKDPALLMKYKMYCRRMDKNKAIIRIAKHLLSRISYVLKNKKEYVSGVVG

SEQ ID NO: 441949 - protein, 353 aa, unidentified
MQRFIGIDVHGQSCTLVVMGPSGRRLGEYVVETNAKVLIERMRGIAGDKYVCMEEGTQSEWLCEILNAHAKEVVVTQPLRRAGSKNDAIDAWALADLLRRDAVERSVFKSPRTLTQLRQAARGYVAMRQDMIRAKCRLNALYRSRGIQPTAEIYDPDARETWLSKLPPSHRPLGELLSEQVDRLSQSHQTAETWLLEQAKLTPVTHRLATAPGIGPIRAALLAAIVVTPDRFRTTRQFWSYSGLGIVSHSSSDWMRDKTTNTWARKPTVQTRGLNRNRQPELKAIFKGAATTIIQQMPNHPLHQDFQRMTDAGIKPNLAKLTLARRIAAATLAMWKHQEDYDPSKTRRIPQSQ

SEQ ID NO: 441950 - protein, 357 aa, unidentified
MKKRLNADTINVNGKTVTVGIDVHKVSWHVTALVEGVIVESATIKPCYRVLKKLLARFAGGTIRIAYEAGPTGFSLYDALTADGMDCIVVPPSLIPVESGNRVKTDKRDSKKLAQYLENNRLKKVYVLSKQARAHRQFVRTRRQLSDHLTDVMRQIKSLLLFHGIPSPSGAKRFWTRPVLRALRSITPDEYVSRSLNTLIDLYEYLTQQVKHLTREVRRLARTETYARRVELLTSIPGVGVLSAMEVLSELQDVTRFATADQIAAFLGLTPSQYSSGQHVRMGKITHAGNHRLRTRMVECSWIAIKKDPFLHKTYEEIKKRRGAKRAIVAVSRKLIIRIRRILLDGDTYRLAYATAA

SEQ ID NO: 441951 - protein, 394 aa, unidentified
MKLIGIDIGKNKHFFCIMDQQTGEIISQPVSFSNDKEGFDFLVQKIKSYPKDSILIGMEDTGHYHFALLKYLLDLQYTVALINPKTTDFNRKMQGGITKNDKLDTINICDVLDTPERKKQYRITKVNSFDLYEQKQLTRHHHNLKEEENVYKNRLQKCIDIVFPEFNKLFNSKYGIVYMNILKMFGSAENIANTDIRTIRKCFEIEGRGNRISLTPERLKECARSSIGISSSAEVIQIKHLTAQIELIEEQLTEIDKKIEEFSIQNNSPILSIPGISHFSGTSILAELGDISNYSKPSQIIKFAGVAPLHYESSQFNAQHTSITKKGSKYLRKTLYQIILPVIRHNPVFTKYYQLKISQGKGHRCAQGHCVRKLLRIIYHLLKTNQQFDPQLLR

SEQ ID NO: 441952 - protein, 322 aa, unidentified
MQGKMTSVRAETAVYAGIDVCKAWLDVYLHPTGQSFRVPNSKDGCKRLALELTSAQAGLVVMEATGKLHRLCHRELSASGFAVAIVNPYRSRKFADALGLLAKTDKIDARVLALYGAAMSPEVTPVPAKSLAELQELVLARQAAKAGETALKNQTAAAASPVLKRLLKAQLRAQARLIAGLEAAIATLLARDAGLGRRCELLASINGIGPIVAATLVACLPELGRLAGGQIAALAGVAPMNCDSGEMRGQRCIKGGRAQVRSALYMAAVTATRCNPDLKAFYGRLRNAGKAAKLALTAVMRKLVLLANTLIREDRHWMPKHA

SEQ ID NO: 441953 - protein, 353 aa, unidentified
MNETVMCRFEKKGTEMNLYCGVDLHGDNGYYAIVDQNNKRIFNKRLPNELDKVISALEPYRKQLKGIAVESTYNWYWLVDGLMKKKHKVGLANPAAMIQYSGLKNCNDQTDAFFIADQMRLGLLKYGYIYPEEERAVRDILRRRMLFVQQKTAQVLSFESLYSRQTGGQINGNEVRKLKNADIEKLFPDEHVRLMGQSSIETIRFLTERIDMFERTALKQCRLKKEFQKLYSVPGIGDVLALTIMLETGDINRFARVGNYTSYCRGVSADKYSNEKKKGKNNRKNGNKYLAWAYVEAAHYMIRYCPEAKQWHQRKQTRSGKVVAVKALASKICKACYFIIKDQEDFDVKKIFG

SEQ ID NO: 441954 - protein, 473 aa, unidentified
MARAARRPGARQYPKRRSSRGRSAPFEQMHLNAAGIDVGATEHWVAVPEDRDEEPVRRFGAFTADLYVLAEWLRQCQIETVVMESTGVYWITLFEVLEERGFDVKLVDAHDARQVPGRKTDVKDCQWLQELHTYGLLRGAFRPEDQICVLRSYLRQRSMLVAMASRAVQHMQKALEQMNLKLTEVVSDINGKTGMEIIHAILAGERDPQRLASHRDRRCKHDQATIAKALEGHWRAEHLFALQQALEQYEFLQQQLQACEQQIEACLQTFVTHVEVEPPQPTPACKRRARQRQAPSFDVHQYLDAMTGVDLTQIDGIDALTALKVISEIGLDMTRWPTGKHFASWLGLCPGNKLSGGKRYRMRSKPTANRAASALRLAAQGLVNSHSALGAYYRRMRARLGAPKAITATAHKLARLVYSLLRYGTAYVDAGQQAYEQKYRDRVLTNLQRKARVLGYQLVHVEDTGRVQAAATL

SEQ ID NO: 441955 - protein, 416 aa, unidentified
MNAVGIDVSSRKSTVAVLRPLGEVVCLPFDVTHDIAGLASLVEKLKAIDGETRVVMEHTGRYYEAVAKALHEAGFFVCAVNPLLIKEYGANSLRRVKTDKADAIKIARYALDNWADLRDFTPMDAIRYDLKTLNRQFQLASKQRTASANNLIALLEQSFPGIRKCFDSPVRSDGTQKWVDFAHSFWHVDCVRKQPFAAFCERYRKWCKRHAYLFKLSNAEEVYALAKRAVVLTPKSKVVKVLVQEAANQLISISRSVEVYRAEMDRLAAMLPEYPVVMAMYGVGKSYGPQLMAEIGDVRRFERKQALVAFAGIDPMPNQSGDKNVRSNKSSKRGSPYLRKTLFNVIRTYLQGAPQDEPVFQFLNRKRAEGKPFYVYMLAAANKFLRRYYAKLRDYFASLDTLQPVAPIPTILKAAL

SEQ ID NO: 441956 - protein, 322 aa, unidentified
MTSSKEDKYVGIDVAKRQLDLAVWGMDEFKQYGNSESGILEVVKHLQAMGPTLIVVEASGGWEMLLVAELAFAGLPVAVVNPTRVRNFARAAGQWAKTDKLDAGMLARFAEAIRPEVRPLRNEQEVYLAGLVSRRRQVIEIMTAEKNRRSTTHGPILERLDEHIAWLLEEFRYLDAELSRFIQASPVWKEKEILLRSVPGVGPVTSFTLLAELPELGTLNRQKIAALVGVAPFNKDSGPRRRKRRIFGGRAGVRSALYMAALVGSRSNPVIRDFYERLLERGKEKKVALTACMRKLLVILNAIIRDRKPWNPRIPRKEIIPV

SEQ ID NO: 441957 - protein, 405 aa, unidentified
MAIVFVGHDWAEAHHDVFVEDEQGRRLAGGRLPEGIEGVARFHAMVGEHVDDPTEVIVATETDRGLLVGSLVAAGYKVLAVNPLSVSRYRERHSTSGAKSDPGDARVLAELARTDHHNHRPIAGDSEHVESIKVLARAHQNLIWTRQRQLNQLRSTLREFYPGALETFTELGSSDALAVLAAAPTPTLGRQLSISKIASALRRGGRQRRIDERAKEIQTALRTEQLTAPELVSESMGAVVKALVAIITELSTQTASLEVELTDRFDAHPAAKVIRSLPGLGMILGARVLAEFGDDPNRYADAKSRKNYAGTSPITRASGKSHVVLARYARNKRLADACYLWAFAALSTSPGARAFYDARRASGDTHNRALRALANRLVGILHGCLRHDTPYDEHTAWAHRTQLAA

SEQ ID NO: 441958 - protein, 339 aa, unidentified
MQVTTIGLDLAKNVFQVHGVTEVGEIVFNRSLRRAQMHRFFEGLPPCLVGIEACGTSHYWAREIATLGHEVRLIPPAYVKPYVKRGKSDAIDAAAICEAVTRPSMRFVAIKTPDQQAVLALHRVRDLIVRQRTQIVNMLRGVLAEFGIVVRQGAGHAIAFAKHCFEGVEQDLPDPARDIVTNLSHQLVALHRRVLWYGRQLNRAAPLDARVARLRTIPGVGPITASAIVASIGDGRQFSNGRSLAAWLGLTPLNRSSGGKERLGRISKMGDRYIRRLLVLGMTSRIKQIRHRPDQFDPWFSEILERKPAKLAAVAMANKTARIIRAVLTREQDYKVRTA

SEQ ID NO: 441959 - protein, 386 aa, unidentified
MQVIEQSKIQLADLLINNLNNALFIGIDPHKFKHHVMVTNRNQDVLKELEIANNHSDINLLIQEILKIKVRYSFNNIIIGIEGYHGNGEFITNKLQEHFSLIYEVPVSRTSSYRKTNVYREKTDRIDSLGVINSLTQHLTELSVITKNSNTSLPLILNDLVMTRQRFVRQRISVKNSIHHLMQHIDPEYVLKIKTFNTKKSWKLTNTLCKQILKSNLPLEINNRAKLTIRNIKYLIQVEENISDLEKEIKDILESSKYMYLIDSYKGIGYVTLAEILSLIYDIDRFANPEKFCKYCGIAPISFSSGNSKKFHSNKFGVRELRTIFHTIAVVRVRRCPEDKEYYERHIARGKTKKQALILLMRKNALTVYALLRKKQAYVTPVLGSN

SEQ ID NO: 441960 - protein, 393 aa, unidentified
MRRAGLQRDALSSQVIDVLEGTRRRPTVKKLTTKGVFRTGKLQDQQLTIGLDLGDRSSFYCVLNGAGEVVVEQKVLTKPDAMKTTFGKMPRSRIALETGTHSPWVSRLLADLGHEVIVAHARNVRLIGESRRKDDRLDAQTLARLARIDPQLLSPIQHRSAQAQADLSVIRARHALVRARTALVCAARGLTKSFGERISGYSAKGFKLATGEALSPQLQVALAPLLSALETINERIREYNVQIEKLAEESYPEVALLKQVKGVGTLIALTYILTLEDPKRFRKSRDAGCYVGLQPGRRNSGQSEPQLHITKEGDSYLRMVLVQGAQHVLGPFGEDSDLRRWGLKLAERGGKNAKKRAIIAVARKLAVLLHHLWISGEEYEPLHNTQKPTLAAA

SEQ ID NO: 441961 - protein, 412 aa, unidentified
MKDLLEISCGLDVHKEKIVACILTGPLGKPTRSEIREFTTLIPDMIALRDWIVSQNCHHVAMESTGIYWMPIYEILEDAFSGDITLLVVNARHMKNVPGKKTDMRDSEWISTLLRAGLLNGSFIPEKRIREFRDLNRYRKSVIRDITSQKNRIEKFLQSSGFRLSSFISDIFGASGRNIILHLMEHGQIDKTALDSCLKTKTRNRIDEILMSVNGTLSEHQKTFLKILMTHYDSLKEHLTEVETSLEEDMAPFTLQVEQLNSIYGISTTASCAIIAEIGIDMKPFKTAEHICSWAGLCPGNNESAGKRKSASVTKGNPYIKSMLCEIAWVIAGKRNTYLSAWYWRIKQKKGAKKAIVALARKLLVIIYTMLKQGTLFDESCFETRRKHCEQKQLSRYIRELEKHGYHVEAQS

SEQ ID NO: 441962 - protein, 341 aa, unidentified
MEYCGIDLHAEYSQICVLDEDGEVMETSRVRTSRKALERFFRREPMRVVLEAGGSSPWVSRLLESVGHEVVVCSPRRVRLIAESKLKNDRVDAEVLARLVRLDPEFLKPIQHRSEEAQLLRGNLKVRSAMVEARTKWINTVRGLLRSFGYKVSGKAPKTFVDRVDKLDLPSELRTVIEPLLEQLDLLSGEIARRNEHLEEMVKELPEVEHLRQIPGVGPVVATYFVLTIDDPNRFRHSRDVASFFGLRPSMRESASVSHFGRITKEGDPEMRRLLVQAAHACLLTKADSELKTWALALAERKGKSKAVVALARKLAVLMHHLWVTGEVYQATPNKEADQAA

SEQ ID NO: 441963 - protein, 484 aa, unidentified
MIKRNQSSLGIDLSDKTANYCAMNADDGVVAEGKVGLRVARLAEMWRRYGPVDVVVMEAGTPSTWVQELFEGLGARVIVADPRKLQAVTASVRKSDERDARMLARLGLADEELLSPTYVRAPEHRRTMALLKVRDQQVRFRTATVLEVRSQVKLAGGRMPPCDAVDLHEHEDAVPDEIQDVLAPLFGTLRGLAESIGKLDALLEEEAARFPVVSQLTQIDGVGTITALAFVAVVGEPTRFANTRDIGAYLGLVPRRDQSGLSDPSRRISKAGCGFLRRLLTQCAQTVCRARGKDTAQRRWAHRQIALRGKPGKRKVVVAIARKLAVLMLAIWKSGESWNPLHRVPAASPADAPHPVVHDECGSESCASERDTKRAPSSTTRTQPCTEGQPLTKSADGSTGRSGAPRTPAARTTKPSQDGMPGASAPARSATPSAPATPACAGGPADLASASRAGPGLDPRFGHPAETTVDALCWRGEDASPRMR

SEQ ID NO: 441964 - protein, 340 aa, unidentified
MTKISMIGLDLAKSIFQVHAVDASGRPVLRKQLRRAQVLKFFGGLEPCIVGMEACGSAHYWARELAKLGHEVRLMPPAYVKPYIKRNKTDGRDAEGCCEAMQRPTMRFVAVKNEPQQAVQVLHRTRALLVRQRTMAANALRAAFGEFGVVAAQGFKGLRTLIEHLSATDCPLPALAREALLVLSRQWQRLDDDVRILEKRIVDAARADAAARRLMQVPCIGPIIASALTSAVPDARVFRSGRGFAAWLGLTPRQCGTGGKQRSGSISKQGDRHLRSLLITGASARLRYARARGSDPWLTELLARRPYKVVAVALAAKTARIAWALLAKGETYRAPAPAAV

SEQ ID NO: 441965 - protein, 352 aa, unidentified
MMIIGCDFHPSFQQISFLDEETGECGDRRLVHREEAMGFYRSLHVKAQVGIEATGNDRWFRRLLIEAGHELMVGDASAIHASAPREQRTDKRDARHILRLLLEKRFPAVWQPSAGNEQQRQLLLHRCQLVRMRTRINNQLDSIAKSEGLTRSRSWSAHRRQQIEGLALTGCYAERRADLLGLLDALELRIKRLDKAVQAAAEQHDEARLLMTHPGVGPVTSLAYVLVVGDWRRFPRGKQVGSYLGLIRSEASSGKHQQRMGHISKQGNRLLRWLLVEAATTAQRHDPRWHRQYLRLSAQKHHGVAKVAIAHKLAVRLYWMLRSGQDYGRIMERGSHARQSECPVGRSQGPIE

SEQ ID NO: 441966 - protein, 428 aa, unidentified
MLKINPLSTLYVGIDVSSKSNYICALDFYKNKYINSSFANNQPGAEELAEKILECLKQHPELNTIVAVLESTSVYSIHIANFLSSCEELMHFKPYVFVLNPKCIANYKKSYIGLGKSDPIDAFVIADYARAGNIETEPWRGSQFLALKRLTRHRLHLVECMTREKTYLVSNLYLKFSELQMLEGDDQPFCDIYGATSSSVLTEYLSPEEIIDSSEEDLISFLARKSRNRIKDISKTAELLRKAARDSYRLDKALYEPLNVSIASSFNCIETFKKEIRLIDTAIEREIRGLNPNAFIILQSIDGIGPVFAGGIVAEIGDISAFHSSDALAKYAGLMWKSNQSGDFDGEDTPMSKAGNRYLRYYLGEAANSMRKHNVEYGAYYRKKYNEVPKHQHKRALALTSRKFVRLVYGLLARNQLYSGVSLDTSNE

SEQ ID NO: 441967 - protein, 394 aa, unidentified
MKLIGIDIGKNKHFFCIMDQQTGEIIFQPVSFSNDKEGFDFLIQKINSYPKDSVLIGMEDTGHYHFALLKYLLNLQYTVALINPKTTDFNRKMQGGITKNDKLDTINICDVLDTPERKKQYRITKVNSFDLYEQKQLTRHHHNLKEEENVYKNRLQKCIDIVFPEFNKLFNSKYSTVYMNILKTFGSAENIANTDIRTIRKCFEIEGRGNRISLTPERLKECARSSIGISSSAEVIQIKHLTAQIELIEEQLTEIDKKIEEFSIQNNSPILSIPGISHFSGTSILAELGDISNYSKPSQIIKFAGVAPLHYESSQFNAQHTSITKKGSKYLRKTLYQIILPVIKHNPVFNKYYQLKISQGKGHRCAQGHCVRKLLRIIYHLLKTNQQFDHQLLR

SEQ ID NO: 441968 - protein, 309 aa, unidentified
MGIDVATATLDIAVRPTAETWRAPNDAPGIDALVMRLGAWAPTLIVLEATGGSQGPLVAALVAAALPVVVVHPRHIRACAQAVGILATTDRSAARVMAHCAEAVTPAPRPLPDAETQELRALRGRRRQRVAMVSAERARLDTAPPSIQDAIQAHIAWLTTPITGLDDPLTHARQTHPAWQAKDDVWQRIPGVGPVLARTRLGQGPAWGPLGAQPLAALSGVAPCNRDSGTRRGRRPGYGGRAEVRAVLSMGALVATRHHPVIKAFYERLLAAGKAKKVALTACLHTLLTIMNAMVRDLKRWQPREVPIA

SEQ ID NO: 441969 - protein, 412 aa, unidentified
MEALYRCCCGLDVHAQTVVACLIRDGKKQTRTFSTMTDDLLMLLDWLSGEGCTHVAIESTGVYWKPVFNLLEGVLEVVLVNARHVKTVPGRKTDVRDCEWLADLLRHGLLKASFIPPLEIRELRELTRYRQTLVHEQASVANRVQRLIESGNIKLGQVASNALGVSGRLMLRALANGETDGTKLAALARGQLKKKEAELQRALTGRLSPAQRFVLRELLDRYDELEVALARASEQIKQEVAKCDDPFVREAVELLQTIPGVGLRVAEVIVSEIGVDMQRFATDGHLASWAGMCPGNNESAGRRKSGTTTKGSIYLRNALVQAAWAATHTKETYLAAQYKRLVKRKGKNRALVAVGHSILVIIYHVLLRKESYSELGGDYFDKRNIEVQRNRLVRQLESLGMKVTVEALPVAA

SEQ ID NO: 441970 - protein, 393 aa, unidentified
MYLVGIDIGKLKHSFCLLEKETGEILVEPVFFENNRDGFNVLLSSFKHLPQKDILIGMEDTGHYNLALLKFLLDRNYQVALINPVATDLTRKMQGGISKNDKLDTLTICDVLASNQRVKSYRVSKYNSFDLYEQKLLTREHHNLKEEENQLTNRLQKCIDVVFPEFNSLFKSKYGIVYMNILKEFGSADAIAHADIRTIRKCFDTGRGKHISLTAEELKEAARNSIGFPSSSEATQIKHLVARIELIKEQIAEIDKKIEEFSIQNNSPILSIPGISHFSGTSILAELGDIHNYSKPSQIIKFAGVAPLTYESSQFTAQHTAITKKGCKYLRKTLYQIITPVIQYNPVFRKFYLLKIAQGKGHRCAQGHCVRKLMRVIYHLLSTGTQFDPALLR

SEQ ID NO: 441971 - protein, 343 aa, unidentified
MQIRSVGIDLGKTTFHLVALGDNGKVLLKKKFTQKQLITFTANMQTSLIGMEACGGAHFLGRALREQGHDVKLIPAQFVKPFVKSNKNDFIDAEAIAEAVDRQNMRFVPIKTDDQLDLQALHRVRDRLITRRTSVINQLRAFLLERGLVFAKSPAKLRERMPEILENADEDLTPRMRNLLALLWNEWKDLELQIVQMNDEVEQIASSDAACMRLRQIPGIGPLVATAIVAAIGNGAAFRKGREFAAWMGLVPKQYSTGGKAKLAGISKRGNLYLRKILIHGARAVVLRSKRERIAMGSWLTALEARAPRNVLIVAAANKLARIAWAVLSSGQDYRAVQEAVAA

SEQ ID NO: 441972 - protein, 323 aa, unidentified
MGRVVRESGESGASIGIDVAKATLEVWSEPDGAGWTAANDPVGIGELVGRLRGRAVARIVVEATGGYEYAVVAALSLAGHAVAVVNPRQVRDFAKAIGRLAKTDRLDAQVLAHFGAAIRPEPRALPSAAVRELDAVVTRRRQVLEMLQAERDRHPLARGKVARQIQQHIAWLERQLTGLDDELRRLIEASPVWRAKEDLLRSVPGIGPVTTATLLAALPELGTLSRHQIAALVGVAPFARDSGTLRGTRAIWGGRTSVRCVLYMATLSAVRWNRAISATYHRLLDAGKLPKVALIACERKLLVILNAIVAHGTPWQPDFAQNP

SEQ ID NO: 441973 - protein, 399 aa, unidentified
MGEGMVAGIDWASEVHVACVMDGDGAVASRFSFTHDGAAIGAMAGRLRAAGVAGVAIERGDGPVVEELLSAGLAVFVVPSRQIKGLRTRYGSAGNKDDRFDAYVLADTLRTDGHRWKPLRPDTGPTRALRAACRSRKDLVETRVQVLGQLRANLELAFPGTIGLFTKLYSTISLAFLQRFPTAAKAAWLSPKRLASWLASVGYTGGVSAGILYDRLATAAPGLTGAEGEARGQITLALVSVIGALNTQIAALDAEIGRLFAAHPDRHIFASLPRSGTIRAATLLAEIGDCRQRFPTDDALAALAGACPSTRQSGKRTQAVFRWSCSKKLRAAVMDFANGSRMADPWAAAIYAAAIARGCRHPHAIRILARAWLRIIWRCWQDGAAFDPALHRSRQTATA

SEQ ID NO: 441974 - protein, 418 aa, unidentified
MEDSHSKKVKHINKKTLMVTLDIGKAVHYGYMRTPTGEDVKPFPFDNKRKGFNELWDKVCQFKQAQGLDNIVIGFESTGPYAEPLFHFLRTKPVRLVQVNPLHSKRLKELTGNSPCKTDQKDPRVIADIISLGHALTLVVPQGAAAHLRRLTQARERATQRRTALLNQLQHVIFIVFPEFLHEFKRVHSKSALYLLQHHPSPQDILALGYESLAGLLKRVSRGKIPAQRARQLFEAAQGSVGIREGRASIVVELQHLIKAIGHEDQLIDDLEQQMKDYVQQIPYSQSMLSIKGLGTVTVAGLIGEVGDFDAFATVAEVMKLAGLDLYEVSSGKHRGRHHISKRGRALMRKLLYFAALTMVRKQGIMHEQYHQMLDRGMPKVKALVAISRKLLRLICALVHNRTVYVAHYHQRTIGIAA

SEQ ID NO: 441975 - protein, 355 aa, unidentified
MPSKADTAVARTIGIDTGKNTLHMIGLDERGAIVLREKISRARIAARFVNLPPCLVGIEAGMASHYVARELVALGHEVKQVPPAYSKPFRHGHKNDFRDAHAVAEAVERPSTRCVPIKTDGQLDLQALHRVRSRLIGNRTAVINQIRGFLLEHGIPVRQGHHFLRKQLPLILATRTDVLSPRMIRIIGDLMADWKYLDERIERVTDEIEALAHADEGCQQLITVPGIGPIISSAMVAAIGNGAAFCKGRDFAAWLGLVPKQMSTGDRTILGRITKLGNRYLRMLFIQGARAVLLRPASWVKHSFGSWLTAATRRLHRNVLAVALANKLARIAWTVLAQGRRYEARVEPRVEPAAA

SEQ ID NO: 441976 - protein, 340 aa, unidentified
MFTNFVGIDVSKSKFDLALIKGQDKDHVIQGVFDNTQKGIKTMSKFLEKEHHVQLPETIFCMEFTGVYCRPLTSFFVEQDCHVWIEMPVNIIRSLGLQRGKNDRVDAHRIALYAYKNRDDIKLWKPQRDVILQLRDLLALRERLITSQKALTNPIEELLAMGAKSAATSVRKNCQKTLSAIENEIAQIEKNLDDIIKDDTQLKELFQLATSVPGVGKLTALFMICFTNEFSMYTNPKQLACYCGVAPFEHSSGSSVRGRTRVSHMANKVLKRMLHMGAMSVISRDPELRNYYQRKVAQGKNKMLVINAVRNKIIHRLCAVIKRGYAYQSEIIFKERLVLS

SEQ ID NO: 441977 - protein, 367 aa, unidentified
MKKVSIAAPKQGRNISQQKLTIGLDLGDRNSWYCVVEEAGQIQLEQRVGTNAKALREVFGAMPRSRIALETGTHSPWISRLLSELGHEVIVAHARKVRLIGESRKKDDRMDAQTLARLARIDPQLLSPVKHRSAKAQADLTLIRARAGLVRARTALVNTARGLAKSYGERLRGCNVRNMNPEKAEGLSPELQSALEPLLACIESVSEQIREYNERIEKLAQESYPQVALLKQIKGVGTLIALTFMLTLEDPHRFGKSRDVGCYVGLQPGRRNSGKSEPQMHISKEGDPYLRTLLVQGAQHILGPFGIDCDLRRWGLKLAERGGKSGKKRAIVATARKLAVLLHHLWVSGEVYQPLHNNQSASMPAAA

SEQ ID NO: 441978 - protein, 432 aa, unidentified
MVAVMIGVDPHKGSHTAVAISPAEESLGEIRVGASAAQAQKLAAWAAAWPERTWAVEGAAGLGHLLAQQLVAAGEVVVDVQPKLASRVRLLQAGDTNKNDPNDALSVAVAALRSRACRPVSADDYAAVLKVWSKRHRDLARARNQVACRLHSVLCDLVPGGHPKEISAAQAARILEQTAPSSAVALARTELAAEFLADLRHLDAQLRGIRKKLASAVRASRTTLTQVFGVGPVIAGTVIGDVGDVARFPSRDHFAACNGTAPVEVSSGNRKIYRLSLRGNRRINHAVHMAAITQLRHKHSQGRAYYDKKVAEGKTHKEALRSLKRRISDAIFARLQADARQTAARAKGPGGQQGNDSVASAAGSHPQAPALRPGHSRTCSHTTTPASTPPRQDPPLSPAAANPARRRAAGQGGAPRAKRGRTTLTGGERRPR

SEQ ID NO: 441979 - protein, 318 aa, unidentified
MNETTTIGLDIAKQVFQVHGIAMDGTVTVKRQLRRSEVIRFFDRLPRCRVGLEACGGAHFWARELTVLGHDVRLIPASYVKPYVKRGKTDAIDAVAICEALSRPTMRFVPIKTVDCQAGVMLLKTRYLLVKQRTQSINSLRGHLSELGIIAARGTGKVETLIAIIRDKTDERIPAVARRALEMLADQVEALVRRIATLENEIVSEVRRDDTMRRLATIPGVGPITAATIVALVPDPMAFNSGRHFAAWIGLTPKMHSTGGKERLGRISKMGNPVLRSLLVVGATAVSRHARRGATVSPLADRPAGASTRQSGRHCAGQ

SEQ ID NO: 441980 - protein, 401 aa, unidentified
MTKLLYIGLDVHKESIVAATAVSGDRAAELYGKIGGTLEALDKLIKKLSKPGLELRFVYEAGPCGYVIYRHLAKREYHCQVIAPSLIPTKASDRVKTDRRDAQQLARLFRAGELTAIYVPDEEDEAVRDLVRARDRAMTDQCRGRLRLKAFLLRLGHRYIGKGNWSDAHLRYLSSLRFAHAGQQIAFQEYLEAITVASERLERLSKAMEAALPSWKREAVVRALMSMRGVALLSAMTLVAEAGDMTRFDSPTQLMSYFGLTPSEYSSGEKRHQGGITKAGNGACRRALVEAAHHYRVAPRVTPAIQKRQEGQSHEVRAIALKAQQRLNGRFRLLTGRRKKSVVIIAALARELCGFVWAIACQVNAPERLKAQAAAHNAAASKTSPTKRRVYVLDSRKNYKN

SEQ ID NO: 441981 - protein, 330 aa, unidentified
MTNADVRESTMPPLEFVGVDMAQQGFEWAVHGVRGTHRAGNDETGFEALLEALKDRRIGLIVIEATGGLERALAGFLLRHGLPVAVVNPRAAREFARSMGHLAKTDAIDAVALAHLAQTLAAKADQAGVRLTPPSAEVELLQAMVARRVQLLSMRTAEKNRLGGVVRVLHQSIEAVIKTLDKQIAKLDRDIDAHLEQHFSEQAQRFDAIKGLGLTTCAAVLAFMPELGTISGARAAKLAGLAPLNNDSGKERGKRHIWGGRSIVRSALHMATLSAVRFNPVIKVFYDRLLAAGKPKKVALTACSHKLLRILNAMARTGQPWNESFHAITP

SEQ ID NO: 441982 - protein, 407 aa, unidentified
MEKNEKRYIGLDVHKHYLIALGVNEKLEVVLPARRVELSNLVSWMRKALTKQDEVVLEMTTNTWQLYDELSAYAGSVTVVHPPHVALITRAQVMTDKIAASILARLLAKGLLVGVWVPPQEVRELRGLVAQRQKMTRLATQAKNRLHAVIQRHHLKPPDGNPFAKTNNGWWESLSLGRLEKMNLQSDLETLQFSEKQESRLQEEMTGVAAEDEEIGRLLHISGFGVVTAVTVYAAIGDIGRFAEAKKLVGYAGLGARVHDSGMTTRTGKITKAGRRDLRVALVEAAHVAANSHPYWKAELARLQPRLGYNKAIVVIARKLLVTVWHVLARKVADRFAEPEAVSKKMLHIAYEVGKANRAGKSAAQFVRERMDTLGLGSDLTSIPWGSKKPIPLPPSTLKERSDVPNK

SEQ ID NO: 441983 - protein, 432 aa, unidentified
MIILGESFASFQTIKVIAMKEPTVTFEQIIERACGIDVHKSLVVCTINGTGIKEETRSFNGFTESLVELRDWLKENGVTHVAMESTGVYWKPVFNIFEEDFEIILVNARHIKNVPGHKTDKKDSKWIAKLLLCGLLKGSFIPPKPIRELRDLTRYKRKIIGHITSEKNRIQKILEDANIKLSSVVSDMSGAVATRIIDALIGGEENVSELVKFRHGKMHCTEDELAASLRGKLTNHHRFMLQTIKESIGEKERLLEKLDAQIEKMLKESELELDAKLLQTIPGVGKEGAAYILAEIGNDMSQFPNEQHLTSWAGMSPGCNESGGKKKSSRTTHGNIHLKTLLTQFAWAATRTKNTYLRSKYDSLVGRRGKKRALVAIGRKILIAAYFILRDQTPYKELGGGFLDNRKKDKQVQRYLIKLRELGINVHIEKAA

SEQ ID NO: 441984 - protein, 322 aa, unidentified
MSGSSVMVGIDVASTHVEVAAIGAELPAALSRVGNDAEGHGTLANGLARLKPALVLMEATGGYEAALACALQAVGLRVAVVNPRMARDFARAMQRLAKTDRIDAVTLAEFAGVLARRADFDRFIRPLSGPEQQDLAALVTRRRQLVTMHLSERQRLRLARPVTRPSIEALLEAIARQLDEVEAEMVHHVEQHHAQMAKLLQSVAGIGRVAAATLIAELPELGRLNRRQICALVGVAPYAKDSGASRGRRRIAGGRFELRRALYMATLAATRYNTPIRASYERLVAAGKLKKVALIACMRKLITHLNAIARDYLNGRSRLAHA

SEQ ID NO: 441985 - protein, 430 aa, unidentified
MKVVNYSAVSIDSVDRKKIEPQLHGDTLIMGLDVAKKKEYAALADETGNIVGVIRWEHPRESRKFADFIDRLEPSRVQLVMEPTGSYGDPLRHLAYERGWQVWKMAPKRVGDAKEIADGVPSIHDSKAAHILVWLHKQGLTESWEPKGVSRRRVRTLIRRLSRLQENWQRHMGYLEAQMARYWPEIIQAWELKRATLLGMLINFGGPKRIVEHEEEVRTYMRKKGGYMLSQERIDEVIEAARDSLGVTMLKSERISLKNLAEYADRLRRDRLKFKRRLDRMIRQEEVRRIGEEVGLPTAAVFWDKLGSFKDYPNVDQLIKAFGLNLKEKSSGTYDSPLRITKRGPAEARSALYLATWRKINTDPLFQAWHRNKLKRDGGPGTASKNVSVVALMRKYVKGLWHLARGKEFDSTLLFDVDKLKAKRSMAGMN

SEQ ID NO: 441986 - protein, 453 aa, unidentified
MTKPKTGGHPDLKMVNPQAAAIDIGSTMHMAAVNPDADIMPVRAFGSFTQDLHDLADWFQSCGVTSVAMESTGVYWIPAFEILEAHGLEVILVNARYAKNVPGRKTDVSDAGWLRQLHSYGLLHGSFRPEAEIATLRAYMRQRERLTEYAAAHIQHMQKALMEMTLQLHHVVSDITGATGMRIIRAIVAGERDPEVLAAFRDVRCKSSMDTIKAALVGNDREEHVFALTQSLELYDFYTAQIETCDRKLEAAVTALTVRADDELPPLPKARIKGKQHNAPSFDVRAALYGVLGTDLTQIHGLGPSLALKLVAECGTDLRAWKSAKHFTSWLCLAPGNKISGGKLLSSRTRRSSSRAAARLRLAAVTIGRSDTALGAFYRRLSSRTGKQKAVTATARKIAVLFYNAIRHGMTCQDQGAAAYDERHRQRVLSILQRRAKTMGFALAPIPETAAVS

SEQ ID NO: 441987 - protein, 356 aa, unidentified
MNYSGVDLHRRSVVICTVDDHGSVVGRTKMKTDPGLITQYFQQLPGDHTAVVECTTGWYWFCDLLQSNGITVVLAHAKYLKAISYAKVKTDAVDALTLAQLLRMGYIPEAHQLPPEYRAMRDLLRQRMVLEHRRTTIHQRVASILAQFNITDLPLSPSQSGFADFLNECPLPEQYRMTLMMHHQQCLQVTEHRKELERYFKAHLRPTATLQRLLSIPGVGDITGSIIAMETGPIHRFADAKHYCSYCRLAPGARDSGGKHKHRSGSKDGNPYLKYAYTEAAIKAMMFYPVIKAFATRLEKRSGKAIARTVVAKELAKIVYYILARQQEFRTFKGVKIDKRRDWPRARKPVHITGEK

SEQ ID NO: 441988 - protein, 417 aa, unidentified
MELEPIYRRVIGLDIHQAKISACAVSEQSDGSVVVEMREFGGFKRDRRALAQWAKAFDPEIVVMESTGIYWKSPYAALESVGIAAWVVNARHVKTVPGRKTDVADAQWLATLARAGLLRGSFIPPAHIRYLRLIARQRQKLGGMLASEKNRLHKILSDAGIRLGVLVSDIHGQAARAMVKAIIAGKPMASVLDLAGRLRASRSELFEALQPEELSAAHLFVLGEIMTHIEDLEARMGRFEQMLLQGLSAWQPQLTLLQTIPGIDQMGAAMLLVEISTDMDSFGSAEKLASWVGICPGNNESAGKRKSGKTRKGNAWVRRLLCEFAQAASRSRCALKDKFAALSIRKGHKKSIVALAHKMLRIIFAMLKNNKPYHDHAVDYEALNVQRNAPRWLKMLKKHGFLPINETPMTTSTAFAA

SEQ ID NO: 441989 - protein, 386 aa, unidentified
MRPTLLCYGESVACASSFNPRMAFGQSVAQPEPRTPCAPNSNRCQSVGYHRQLVYVRMSPNTITTMQTIPVTVYAGVDVAKATLQLHLQGRQAEFTNQAAGLLQLCQQLKTIPHVHVVCEATGGYERLLVQAMHQAQIPVSVTNPAQVRAAAQAQGQRAKTDRIDAALLTDYGQRYQPKPTPATTASQDQLVALTQWLTQLVQAQALAKTQAEHHQAAFVCGRHTKLMAHYQSQIVAVEKQIRALLAHDAQLQQRVDCLDDIKGVGPRTAWLVLAHMPELGQINRQEVAALAGLAPWTRESGTMKGMRCIGGGRPEVRLALYMAALSAARCNPVLKPFYQRLRAKEKPAKVALTAVMRRLLVYMNHQLKALQATQTDTKLQNAKIP

SEQ ID NO: 441990 - protein, 391 aa, unidentified
MFLLGIDIAKLNHVASCIDSSTNEVIFSNFKFKNDFKGFSALLDKIKSLDVKNLIIGLESTSHYGENLINFLFKQHFKVALINPLQTSHLRKANIRDAKNDRLDSLNIARSLIFSKLNFVSEKNIDCFSLKKLTRFRSNLIKQRSKAKIQLTSLLDLLFPELQYLFKSKIHSKTIYTLLKKYPSADEIAALKDDEISNLLYASSKGHFKREKSIELKSLAKTTVGIKDTSVSLHVIQLIELIELFDRQIKDIVTKITDTVNKLDTKLLSVPGINIIACAIILGETNNFDNFSNATKLLAFAGLDPKIRQSGNFSATSCRMSKKGSPYLRYALIFTAWNAVRYSEKFNKYYCLKRSQSKSHYNALGHVAHKLVRVIFTLIKKDISYQEEKLE

SEQ ID NO: 441991 - protein, 443 aa, unidentified
MSELIVLHRSERHYLGVDIGRRHHVVSAIARTTFDLGDARWQSAPTMKVEVNRAGFERIAGLVTRLQVDGAEVVAGLEPTGGYYARTVHAFLRSLGIEVLWVKNHAVHDARDAVYGKRTKTDPVDARLIARLLYLREAVGQEYAFATSYDQIGAYATLRLLVGNRWKLRQAQARAGNQLTQILDVVFPEIAEIFAKPTASDAALLLLERYPTPAAITAAGHDEIYRIVVFEARAPRKAPMVPKLLERAHTSVGLKDGITDILAAQSYLIGQLRRLDAEVATIEQRLVDTLAGLPEADILLSFPACKHARTATVLGAMGAPVEAFHSDKALRRHLGWSVEEERSGTSVARERLAVNGNRHSRRELRLWTLALVSPNMPWTPFRAYYERLVAPPITKRPNVALGHLASKLITVMYFCMLRGQRYDQARLANDMGLTVPDRAAMAN

SEQ ID NO: 441992 - protein, 286 aa, unidentified
MTEQRRSYAGECVYVGVDVHKETYTVPCVCHKQLVKTATVQAEPASLAASVRRWFPGATLASAYEAGFSAFVLHRALTQAGISNIVVNPASLAVAANAKVKTDRRDSKRLAVDLADGRLRGISVPTEEEERARLLPRTRAQLVEHRATLARQSKATLHQFGLIAPSRPGIGEVVARPVATALGDMTRFANERALCSDTGLTPSAYASGAAGRRGPLSRQGSSRGRHLLIETAWRAFPYDAVLQTMFERIAATRGKKRAIVAIARRLIGRIRACFRQGTMYAVGTLT

SEQ ID NO: 441993 - protein, 351 aa, unidentified
MRYIGVDVGKNRCQACIMDEEGVILDEFPFTNNGEGIQRLLGQVGDVDCKAVLESTGNLWLRIYETMEDHGVEVKLANPYKTKAIASARIKTDKLSARVLAHLLRADLVAECYVSSREVRRVNALLRQRASLVRMRTMVKNRVHSLLDRYGYSSPWSDAFGVAGMRWLKGLEVDPVDRCILDSHLRHLECLDGEMGVLDSWIASRAMVSEDALLLMTLTGIDFHSALLLACEIGVIGRFPSPRHLVSWMGLCPSLYQSGNSLVMGRMKKDSNGRVRWVLVQAARTASRTDPRMRELYLRVAARKGDKKAVVRVANKMAVIVWHMLTERRPYGQVKEGLYRSKLKKMRRVAS

SEQ ID NO: 441994 - protein, 332 aa, unidentified
MYLGIDVHKRYAQVAVMDEAGAIVEEVRVENANLDDLAQRYAGAQAAIEATSNYYHIHDTLSEHLDVTVAHPKKLGQIADTDKKTDRVDAKELARMVRLNSVPESYVPTDEIRKARALVRGRQTLVENRTKYANKIHSLLSDHGVTEDLKPLTVEGREFLRELSLSTPWDSLLESYLEMVETLTEEIQTLEETIEERAGSLNETQLLMTIPGVSYYTALTIYAELGEIERFDGDKEVVSYVGLNPVIRESGDSRIEGSISKRGSGRVRWLLVQAAHTAVHTCNDEYLSRFYERLANRKNSQKAIVATARKMLVSIYHMLDRGEVYDPPGVSA

SEQ ID NO: 441995 - protein, 419 aa, unidentified
MTVNSLMQKRSAIKPDTLIVGVDVAKFNHVARTMVPGGEIGRPFGFPNSREGFLALSAEIEARKPTPASAVIVGLESTGVYWINLARWLAEHGWQVVQVSGLYVHRTKELADNSRGTSDGKDALLIADLVSQGKYLGFVRPAGILADLRQLVGLRQRLVHERAARYNLLHQSIDLLFPEFVTVFRDVTGPGARLVLRRFPTPSAALAQPPDEMRRLLSEDGRVRVSVAKLVRLQAAAQQSIGAREGTAGLEYALNDTLQQLDSFDVRVRQVEAEIGRLLPQVDETPILTSVLGIGPMTAAIILGETGGLRQYTCAAAVLKLAGLNLYQISSGQYRGERHISQMGRSLLRQTLYFAVLQHTHPGTPLYPHYAELLRRGKPKPVALVALCCRLVRLLYALVRDGRCYSAQPPERNQQNSAA

SEQ ID NO: 441996 - protein, 275 aa, unidentified
MKDTKYFIGLDVHKEKTSYCVRDKLGNILTESEVATLYSELESRLKPYLATSMIGLESCTSYYTLYQNFLKNGYHIKVANTIQLRQLIAKNDKLDARRLSEMLRLGTFPCSYIPEEKIQHLRSLLQVRHSLMEEKTRCNNRIQAFLDRNGIVMPDQEAFGKKWRQQLLQYIGSGEVSLELRYEYDHFVYLEEKAEHLGQEISGYTMKHWAKEYRLIQSITGFGPVLSCYVIAQIIPISRFASNRKLRRYAGVVPAFHESGGCLTIRKISPKMSYR

SEQ ID NO: 441997 - protein, 321 aa, unidentified
MQPHAVFVGVDVAKATLSWAVCGSPGQHDLDNDEASIEAWLETIPEDAAIAVESTGKFHLRVVRLAHASGRRAYVLNARDVFFFAKALGVRAKTDRKDARLIANYLAQHHAQLKPWVPATELEDRVQSLLRCRASIAAKRSSLRQSLKEVDGLDAEVEQLEEKFDALLDEVDRQVSKQIECDKELTRKRELLKTITGVGPQASALLTGLLSRVRFANINALIAYTGLDPRPNDSGSKIGRRRLTKRGNPELRRQLYLCAFAASHSRALGPLYRSIKAKGFKPTEALVILGRKILRIVWSIWKSGTPFDPGRFACAEPCAKT

SEQ ID NO: 441998 - protein, 387 aa, unidentified
MSQTAAVLTPAAVDYERTLVLSIEVSNKSWVLAAQVPGLPHTKAKRTINPEAEALSAAIAGYRARAAAVGRSIERVIAVYEAGWSGFWLARWLMSYGVEVYVIQPSSVPVDRRMRRAKSDGIDAELLLRTLLAWLRGEPRVCSMVPIPDEADEDARRGVRERAELISERVGLVNRITAVLATLGVSDYNPLLRNRHHRLAELRTGLGKPLPLNAHAKIVRLLARLELVLAQLAVLERERDAVMEADASDQASKMIQQLASLRGIGVQSATVLVREAFVRRFANGKALGSYAGLASSPYSSGGIDREQGIGKGGNRRVRTVMVELAWLWTRYQPAAAQVCWFRERVGSTGRRVRKVMVVALARKLLIALWRFVTDGVVPGGAVLKPAT

SEQ ID NO: 441999 - protein, 353 aa, unidentified
MQKEEKVVKQVLGIDVAQDELVVCLGKMHDDWTPVLVAHKTFVNKPKGFKELIDWVKKLTDPVVPVRYVMEATGVYHESFAYFLHEQSLLVSIVLPNKISNYARTLNIKTVTDKTASEAIAMFGLEKKLDCWEPPKGIYKKLQQLTRERGQLIDERTVIKNQLHAEKAEAKPYQESIDRANERVVLLDKQVAQILQEVKELINTEVEVKKIVLLICTIPGIGLLTAAIILGETNGFELIRNKSQLTSYAGLDVKEKQSGTSVKGKPRISKKGNRHLRKAMHLPALAAIRHNERYKAIFVRLVSKHGIKLKAVVAVQRKLLEMTFTIFKTKTKFDKEFFTEKVESEELAELAAQ

SEQ ID NO: 442000 - protein, 452 aa, unidentified
MQERMGKTKGLSLECIELNAAGIDVGATEIFVAVPPDRDPRPVRSFPTFTADLRQMAAWLLRCRITTVAMESTGVYWIPPHEILEEAGIRVCLVNSKHVKHVPGRKTDVQDCQWLQYLHSVGLLKASFRPDSQICAIRSLSRHRSSLIESAAVHVQHMHKALTQMNLQIHHVLSDITGQSGMAIVEAIVAGQRDPAQLAALCHQKVRSSPETVIKSLVGNYRSEHLFTLKQSLISYKHYQAMMADCDREIEQLMRSLKGRINPTRNGPMPPPGPRTQKRRKNQFHFQMSPELTRIFGVDLTAIPGISALTAHTLLAEIGPDLSRFPNVAAFASWLALCPANKKSGGKVLSSRTRQTNSRANCALRIAAQTLARSRSRLGNFYRSIRARLGGPQAITATAHKLARIVYHLLTTGQPYDETVFLQEDRKQAQRYEKRLRKQAETLGFQLVPIAA

SEQ ID NO: 442001 - protein, 429 aa, unidentified
MKNSAARKLKQVPKGYLVMGVDPHKKRHAAVAVTQDFTTHSKFKFNNSREGFEMALERARAEMVRTGSRGVIFAIETGGHYWRNLAYFLDERGIPFHFINQFTLKRRREGKDLNRRKNDYRDSEVAAQLLCTGEFTDTKLQHGVYAELRAAHNAYRRLVKERTRITNLVKGLLDGIFPEFTQVFKDPCGLTALSVLSICSVPSIIAQMTEEEFVGAIGAKHQGRLMRRKLRALHYAARTSIGIEAGARSVSSEISFLVEKLCLIRRQIRSIDETLAKLVDKTEEGKYLLSIIGLNYISVAGLLAELGSFRSYRSAKQLIKMAGSNPTESESGGKRSAHTPMSKKGRPVLRYCAWTAVIPMLRFNADFRAWAKKLRERPVYANPLNGREIVGAGLNKLLRLAFALVKNQTFYQVPELELISELELLPVGS

SEQ ID NO: 442002 - protein, 348 aa, unidentified
MTVYIGVDFHARKQMLSYLTTEDGEIQQIELQHEQDDVRGFYAQLRSQGQVIVGFESSGYAAWFEEMLEELGCEIWVGHAAQIRKCARRRQKNDRRDADLILELMLRGDFPRIYRYSRANREVLQQLRYRQRLVKMRTMTINSLRFMAASRGITLRGKLQSQRGQDRVLALVLPTPLDQQRNELCRLLMELQQKIETVEELLTQTAAADVKVKRLRTHPGIGLLTGLGLVHTLASIERFANGRKVTAYAGFDPVEDSTGERRRMGSISKQGSRLLRSLLVEAGQVAARHDDELGQVYRRLLVRRGHATAKVAVARRLLVRAFIMLRDEIDFAEFQRRGVAARSSRRSA

SEQ ID NO: 442003 - protein, 350 aa, unidentified
MLIIGCDYHPGFQQIAWVDTETGESGERRLTHPGEAEQFYRELKQQNMAVQVGMEASGQSRWFERLLRDLQFELWIGDAAEIRTKRVRKQKTDRQDAQLLLRLMIEERFPRIWVPDAENRDLRQLLWHRHRLVQMRTRVMNQLHVVALNEGLRRKKALWRAVGRQELESIALARWASRRRQDLLDLLDQLTPKIQELTRALEEEVEKRPVTRRLMTHPGVGPLTALAYELVIGTPERFHCGKQIASYVGLVPTEESSGDRRRLGHISKQGNVLLRFLLVEAAQVTVRSQPEWRSTFFHLAMRRGRKIAKVAMARKLAVHLYWMWRQGRDYGQLRKLGSHAGEPGHRHGAQ

SEQ ID NO: 442004 - protein, 318 aa, unidentified
MSKRSTAYAGIDTGKDYLDAALHKRGDELRVKNTPDGHRALSAWLRKHRVKRAGIEASGGYEMDVVAHLRRDGFTVVVFQPAQVRHYAKFHLQLAKNDKIDARLIAACSAAREAEDIHDPPDERLAPLAAHLTWIDQIGEDVARHKTRLETCRDARGRAHGKQEIARYKKLQKAQTTLLEKEIRRHEDLARRLDLIESVNGIGMKTALLILVRIPEIGRLSREQVAALVGFAPYDDDSGSRHGERHISGGRKRVRAGLFAAALPASLRHNPLLKALYQRLRAAGKAHKVALVACARKLIIFVNTVVARGTPWQLQGAF

SEQ ID NO: 442005 - protein, 357 aa, unidentified
MPSSDVKYIGLDVHTEATAVAVRNGAGKLIMESIVETKARTLIDLLDGLRGELHVTLEEGTWAAWLYQVLKPHVKELVVCNTRRNALLKEGSKDDRVDARKLSELLHGGLLRAVYHGENGLRMLRELARTYEVTNKDVRRVMNRVKALYRGWGIPCKGMQVYSRRYREQWLQKIKEPGVRRRAELSYQQLDALQDLRHTVRGELLIESRKHAGTKILRQIPFIGPLRAAQLVALMQTPYRFRSKRQLWTYTGLAVVTRDSAQYRYVNGQLERSKKPQQIRGLNRNHNHAMKEIFKSAALCASRRAGPFQEFYEGLLAKGMEPELARLTLARKIAAIALTLWKKGERFDAGYVKPQAA

SEQ ID NO: 442006 - protein, 401 aa, unidentified
MQRISVGIDIAKEIHWVTAIDADGVVQINRKLLNTPTDIASLADQLGALAGPGDGPEGSTIRIGLDVIGGIAGLAEAMLAAAGFTLLHVPGLAVNRARQGTVGGENKSDPRDARTIADQVRSRADLRRIEPATEIDLEIRLLVGRRRDLVHAQTQRVARMHDMLVSIFPGLEACLDLTTKGPLHLLTKFVTPAELRTAGKKRLVRHLQAAGGLPNVEALADRALAVAAEQNIAVPAERMTARLIRELAAEALASRARLIELDRELEALLQRHPDAALIRSLPGMGVVLSAELIAEAGNLSRFRSADALASAAGMAPVLRQSGRTRFLRRPTGGNKGLKRVFYQSAFCSLAHSDSRAFYDRKRREGKRHHQAVIALARRRVNVLWAVVQNRTPFQTGFKMAA

SEQ ID NO: 442007 - protein, 342 aa, unidentified
MGSILRKRRSRHVMSAFVCGLDVHKDSTYATILNHEGKIVNQTRMENERVLPYLSHFKVSRVGMESSNQIAPLFRQLTSKGYDVVVSHPKKTRYIAEAKIKSDRVDSKAIAELVRLDALPLAYFPTGEIAQLREKVRRRAFLVRTRVKLRVKIKSVLTYEGLKWPSDHGLFTKKGVVWLHGLNIDSIECYLRILKPLDEEIKLLSGELKGIAEGDEDVKLLMTIPGIGYYSAVLMKSEIGDVSRFPFGERLCSYAGLVPSTHASGRTVRHGNITKEGSRWLRWVMVEAAQTHVYKYDTSITRAYNRIAERKGKKIAVVAAARKLLLCSFSVLKNKRPYYDQA

SEQ ID NO: 442008 - protein, 331 aa, unidentified
MNYSHFIGIDVSKLTFDASILDPEENELAHRKFKNNPSGIQEMIDWAKAFQADISSTLFCAENMGCYVHQLSMASLEMKFNLALACPLSIKKSLGIQRGKNDRIDARRIAEYAYIHQRQLKTFELPEDALVKVRDMLNLRAVFVKYKVSVTKLIETAEYHYTKEGESPYLSTLKAELEDTTAKIKHIEKEIYEIMSANVSVSANYSLIQSIVGIGQINAATIIVMTENFTKFDSPRKFACYCGVAPFEHTSGTSIRGKTRTSKLAAKDLKVLLTRAAITAMVHDPQIKAYYARKVAEGKHKASVINAIRAKIIYRCFAVVKRQTPFVKLMA

SEQ ID NO: 442009 - protein, 422 aa, unidentified
MCVLPPDGQEGEVVVKVYRTFTENLRQLRFWLQALKVTEVAMESTGVFWRPVWNVLEGHFRLLLVNPAQVKALLGRKSDRRDARRIAEFLRDQRLDASFVPPPEIRYLRELLRDRVSLVEERTRVGNQIRALLETANIKLGSVASDVLGQTGRRILTALAEGQWDAERLSWKAVGKLRKKERELKKALTGYFTKEHEFRLGQLLKRLRFLEKHLEELDTEIRRCMGPYEKQVELLMTIPGVDQLVAWTLVAELGVDMAVFPDAAHCASWAGMCPGEKESAGKKQSVRLKKGNRYLRRVLVQAGWAASRKKGSYLQGQFRRWMARRGPQKAVVGVGHQILTVAYAMLRDGVAYRELGANYYDRRHGEKTKLRLMQRLMELGYRVEVTPLAEGGEASEGALPVVDGAVVVQAARKRGRPRKEIS

SEQ ID NO: 442010 - protein, 337 aa, unidentified
MKFSGIDLHSNNSVVVVSDEEDRIVYQKRLPNNLEQIRAALAPYRDELAGVVVESTYNWYFLVDGLMDAGYRVHLANTAAIKKYEGLKYSGDFADAAYLAQLLRLGLLPEGYIYPREQRAGRDLGRKRMQLVRCQTMQILAIENILARQTGGRMSSERVKRLTAEQIEDLGLVPDVALAMEANRAVSASLQQQIAVLEKRLKERVKLRSEYRLLKTVPGIGETLATTIMLEMGTITRFASVGNFSSYCRCVDSRRESNGKKKGEGNAKNGNKYLAWAFVEAANFALRNCPDAKRFYERKKRKTNSIVAIKAIAHKLARACYHMLREQKPFDVQRCFV

SEQ ID NO: 442011 - protein, 294 aa, unidentified
MEHSFIGIDVAKDHLDVHVRPTGEVFRVPSDDAGLGTLLTRLRVLSPTVIALEATGGYEVPVAAALASAALPVAVVNPRQIRDFARATGQLAKTDTVDARVIALFAEAVRPTPRPVPDAQAQALGELMARRRQLVDMLGAEQNRRRLLRDRRLQRQLDAHIAWLEEALRRLDHDLTTLVRSTPIWREADDLLRSVPGIGPVTACTLIADLPELGRLDRRRIAALAGLAPFARDSGTFRGRRMIAGGRAPCAVHGHARRHQTQSRDSSVPPAAANRRTTRQGRHHRGDAQAAHYP

SEQ ID NO: 442012 - protein, 415 aa, unidentified
MGILLADKRKEVSMTAAQFWAGVDVGKEVHWVCVVDDTGAVVLSRKLDNDEQCIRALIGEIDALGEQVAWTVDLTTVYATLLLTVLADAGKSVRYLAGRAVWQASVTYRGGEAKTDAKDARVIADQSRMRGTDLPVLHPDDDLITELRMLTAHRADLVADRTRTINRLRQQLVAVCPALERVAQLTQDRGWVVLLSRYQRPKAIRQSGITRLTKILTDAGVRNAHTIAEAAVVAAKTQTMRLPGEEVAAGLVAELAQGVIALDDRIKTTDADIEGRFRNHPLAEVITSMPGIGFRLGAEFLAVVGDPALIGSADQLAAWAGLAPVARDSGKRTGRLHTPKRYSRRLRRVMYMSALTAIRCDSASRAYYQRKRDQGKRPIPATICLARRRTNVLYALIRDNRTWQPSSPPIARTAA

SEQ ID NO: 442013 - protein, 418 aa, unidentified
MEGLLPLYRRVAGIDVHRMLHVVTVLIEQPDGSIGKHSRDFGGFKRDCRALAQWLAELQVQLVVMESTGIYWKSVFAHLENAGITAWVVNAHFIKHVPGRKTDMLDSEWLAVLARFGLVRASFIPPKDLRELRLVARYRRKLNAMCSSQINRLHKLLDDAGIKLGAVVSDIHGVSARAMVRGLIAGQCEAALLAHARGALKRKTEDLAASLEGDLSARHLFVLRHLSDSIETLQRQLADIDAYLMAAMQPYAWAHGLLQTIPGIDAVAAALILIEIGDDMGRFGSPERLACWAALSPGNHESAGKRKSGRTRHGNNVIRYILCECANAARMTKSTLAAKYKSLTVRKSHKKAIVAVAHKMIRLIYILLTRKQPYLDPCIDYAAMSAKKNAPRWIKQLKAIAKWPAARTTAGTAATAAA

SEQ ID NO: 442014 - protein, 410 aa, unidentified
MRYYLGVDWADKTHAVWVVDEQGAKVASRAVPHTAAGLSEWGRELDEWRAQGIELWAAIERPEGRVVDFLLDHGVVVYPVNPKALDRARDRFRPSAAKSDPFDARVLAEFLRTDHRHLQALQPSSEAAQELKYLTEDYRRHVRQQTRLVNQLTATLKAYYPRALEVSELTTALARQFLQAYPTPVAVTALTAKRWQRWASAHRLSDVRTHELWGILQRPQLPVPDHVVRAKARLMLTLVEELTAVVAAVGQYREAIDAFFAGLPEAQWIRTLPIGNHGVTAPTLWALLGDAPRRWESWQHLQGHAGTVPVTIRSGQQRVVRFRFACDKALRYVVDQVAFLSLGKSEWARAYYDQQRARGHDHHPALRALGAKWLKIIFVMWDRQIPYDEEHHLATMTRQQLRQRGQKKVA

SEQ ID NO: 442015 - protein, 412 aa, unidentified
MQVLYDKCAGMDVHKKSVTVCLSTPGPRRQHHKEVRSYGTTTHSLVEMLDWLMGMGCSHVAIESTGVYWKPVYHILEGVCQVLLVNPQHVKAVPGRKTDVSDAEWLADLLQHGLLKGSFIPPQPIRELRELTRYRKALIRERSAEVNRVQKLLEDANIKLASVVADVLGVSARAMLEAIMVGEKDTRLMAEMARGQLRKKIPELEQALEGKVKAIHQFLLAQQLAHIDYMDEAIRECSTEIEKRLEPFAEAVERLDTIPGVNRGVAQVIVAEIGTDMGRFPSPRHLASWAGMCPGSNESAGKRKSGKTRKGSKWLSEALVEAAWGAARSRGTYLSATYHRLAARRGKKRALIAVGHAILVIAYYMLSSSQNYFDLGGNYFDERDRHATENRLVRRLQSLGYQVNLEPVAATM

SEQ ID NO: 442016 - protein, 322 aa, unidentified
MSVKVLGVDIAKQKFDVALLTDEKTKHKTCKNSVEGFESLMIWLEKQGVQKVHACLEATGNYGEDLAIYLHEAGHKVSIVNPARIKGFAQSELIRTKTDKIDAGVIARFCLAMKPEAWVPPTPEIRSLRALVRRVDSLIDMRSQEKNRIGTAHESVIPLIKEHIVYLDQEIERIRKQIDDLIKQNPQLKQRKDLLDSIPGIGKATIPHLLAELDNLDKFTHVREMVAFIGLAPKETISGSSIKGKPRLCKIGHARLRKALYMPALISIQCNPVMIAFYNRLKERGKNGKVIVCAIMRKLVHVIFGVLKSGKKYDPNYKPVLA

SEQ ID NO: 442017 - protein, 445 aa, unidentified
MKGKVVSAFRKRGLHLAVRDAEPQVSESINSMERKTDTMKTYILRELKAVQPQTSARASGSQPTGRPATMANSKPALFIGLDVHNDSIAVSLAASGSTEVRRYGVIGGQHEDVLRLLKKLSAAHPEAELRCCYEAGPRGYPLCRFIRSQGAHCSIVAPSKVPRQPGDRVKTDRRDADQLARLLRAGELTGIYVPDPQDEAVRDLIRARYQVKKQQHRARQQLKMFLLRHNLRYAGTKAWTAQHLRFLATVKLPFGEQQFVFQEMVNVISEAGQRLERYEKQIVSVVESWRWEPVVRALMSLRGVALLSAATLVAELGDLERFATAPQLMSYLGLCPSEHSTGKDRQQGGITKLGNSIARKATIEAAWNNRSPVRISRTILERRQGLPKAVTQAAWNAQIRLHQRYKHLTAVGRKKSQVAAAALGRELAGFIWAIGRMVKPRPVKN

SEQ ID NO: 442018 - protein, 369 aa, unidentified
MGNRSMFVGLDVHKETIDVSIAEGHRGGEVRHYGVIASDLEPLDKVVRALRAPDRQLHFVYEAGPCGFGIYRHLTKRGERCVVVSPSMVPKRSGDRVKTDRRDSLALARLHRAGELRPIYVPDDADEAMRDLVRAREDAVVGGTQAKYRLKAFLLRQGRRYPGREGWTLPYRRWLTDLSFPTAPQHITLQEYRDTIDETERRIERVTEQLRQLAPTWRWAPVVAALQALRGVSFITAVALVAELGDLTRFAHPRELMAYLGLVPSEYSSGPSVRRGGITKAGNPHVRRLLAEAAWAYQGIPRIGRQHAYRQEALPKVVCDIAWKAQLRLTARFRRLVARGKAKPKVATAIARELTGFIWAIAQKVSPTL

SEQ ID NO: 442019 - protein, 432 aa, unidentified
MEDVREEPLFVRRVAGLDIAKAGVEVTIRVPSGTIAGRRQQETRTFGTTRRQLLDLADWLASWGVTKVGMEATSDYWKPVFFLLESRGFDCDLYNAAQVRALPGRPKTDRADSIWLAKITERGMIASSFVPPEPIRRLRTHTRYRRHLTQARTAEKQRVEKLPGDGHLKLSSVISDIHGVSGRDMLDALAAGQRDPHALAAMARGKMRGKIRRLEEALECSFFSAEHAAVLAMMLQVIDHYTAQISQLTATIEELAEPYLPQIGQPGAVPGIGMICAQDIIAEIGTDMAVFPTASHLVSWAKWSPQVRQSAGKRKGSNATGRGNPYLGAALGEAGISAGNTQSFLGARYRKLTRRMPRKKALVATGNSMLTIIHALLSDPAAVYTDLGADYYEQRMHARRQARNHVKSLERLGYKVTIEAVDPATGELTAAS

SEQ ID NO: 442020 - protein, 400 aa, unidentified
MISVGIDISKDKSTVCMLRPYGEVVEAPHSIDHTEQALNALIERIQSFDEDVKVVLEATGGYHQVVVTKLLSAGIFTVVVNPYIMKKYCAAALRKAKTDKIDSIRIASYGIDHWFSMTAYCPPDEIYAELKLLGRQYDRYVRLKVNCKIQLANLLDGVMPGIKTILQGTVPAYSTKDKLCDFVEKYWHYDNIKKMSEKRFIEDYGKWAKKKGYRCSESQAIAIYQLSKNNIPTLKSGTPSTKMLVLQAVKAVKDAAITLSIIISQMQEIASTLPEYSVVRNMKGVGDVLSVRLIAEIGDVRRFHNGSALVAFAGIDAPPYESGKFIGTKRNISKRGSSTLRKIGYEIMHSLKVVKPTEDSAVYDFIIKKETEGKPKRVAKIAGLNKFLRIYYARVMETYC

SEQ ID NO: 442021 - protein, 301 aa, unidentified
MKNKSFIGIDISKNVIDVSIFCEGTPIKDFPHDVFNNSHKGFGEMCTWLKKNHVVLSNSLFGMEFTGSYSMELEKFLNARKYQFCMLSTHVVKHHPMGPKDKSDKIDSAKIADFLYRYDGTECVKPYKMPDKTMQRLKALMNERKFLVEQRTCFMNRRQLCTTKEDAQLYDGYIKQLNHDIENIELKVQKLLETDDSLSTTYKNLLTIPGIGFVNAMNVIVITRNFTAFETARQYASYIGVAPHFHTSGTSVKWRPRPSARCDGQAKADLSMAASVAVQCDAELQSFYTSVRDNKLCLKAL

SEQ ID NO: 442022 - protein, 355 aa, unidentified
MSSEKYIGLDVHQATICVAVMDAKGKVVMESILETKAATILEFLSGLRGTLSVTFEEGTWAAWLYDLLKPHVANLVVCNPRKNALLKHGNKSDKIDARKLANLLRLNDLEPVYHGETGVRMLRELARSYLTMVKDVSRVMSRLKAIYRSWAIPCAGRDVYYTRHRGEWLGKIPEAGCRRRAEQLYQQLDMLQPLRQQARRELLAESRKHTITAKLRQIPSLGPIRSALAVALIQTPHRFRTKRQLWTYSGLGLETRDSGEYYYVDGQVRRRKKQGFIRGLNKDHNHDLKGLFKAAATRASVQPGPFQDFYQRSLAKGIQPTMARLTLARKIAAITLTLWKKGESFDVEKLKAQAA

SEQ ID NO: 442023 - protein, 356 aa, unidentified
MKNSKLDFTGQTISVGIDTHKKNMVITPRCQGMQLKTISMDPEPEQLVRYLHKNYPNARYESVYEAGFSGYWMDRKLREAGIKNIIVNPADVPTKQKEKRKKTDKIDSRKLARELSAGNLEGIYIPSEEHEAIRALSRLRKQITKDQTRLKCRIKSLLNFVGITLPENSELKHWSGRFIKYLSEMEFKHKAMKITLERLLESLINGRQILLGIVKNLREIVKENAEMKKITGYLQSVPGIGFITAITLYTEIMEIKRFGKFDELSSYVGFSPSTDSSGEKDKVIGLSKQQNRYLRNMLIESSWLAIRKDPALLQAYGNLVRRMSKQKAILRIAKKLLSRITYVWRNEKHYVCAVVS

SEQ ID NO: 442024 - protein, 341 aa, unidentified
MVTTIGIDPHKATHTAVAINKTETVLGELTVAADRDQTRRLIDWAQNLDGGGRVWAVEAAGGLGYLLSQQLIADGEDVVDVPPVLASRVRVLGSGRSDKNDPNDALSVAIAALRQPGLAVVRREDDTQVLRMLAKRHLELTALRTQAVSRLHAVLMLLRPGGMGQRLSADKAARMLGGIRNLDVIGEQRRIMAKAHLADIRRLDREIKANKTLIRSAVAASGTTVTDVYGVGPVVAAFLIGYTGDIGRFASAGHYAAYNGTAPIEVSSGGKKRHRLSMRGNRVLNHAIHMAAVTQIRHDTPGRVYYDRKIAEGKNKKEALRALKRRISNTVYRQLITDHQG

SEQ ID NO: 442025 - protein, 449 aa, unidentified
MSKIKQKKTKVRRISSLPVINPTAAGIDVSDTEMMVAYPVNSKELEIRLFGCFTRDLHMIVKCLKEKGVTTIAMESTGVYWVPLFLLLQDNGFEVYLVNAKHVKNVTGRKDDEEDAEWIQKLHSCGLLSASFQPDNMTRTLRSMVRHRKNLVRTSSTYINRMQKALELMNIKLHTIISDIDGKTGLLIIEAILAGERDPEVLADLRDRRIRASREDIIKSLEGHWTSEHLFELKQCYQLYCTHWHMIDDCDKEIEKQLIEKIAAKNEGLIPDIPKVKRKVSGKKHKVSFNLTGYLKEILNVDVTEIFGISEISALTILSEVGTDMSKWKTEHHFTSWLGLAPNTKISGGKVISSRIMKKKHHAGQAFRIAANSLSNSKSPLGDHYRRIRVKAGAAKAVVATARKLAIIYYMMVANEEAFNPKALQDFQKKYKEKKINQLKRKIALLEAA

SEQ ID NO: 442026 - protein, 406 aa, unidentified
MVFVGIDWSEQQHEVELQAGSGKVLKRLRVSADIAGLSRLQEAITDAAEEPSQVVIGIESNHGLLVNALVASGYRVYPINPLTSARAREGEAPSRSKSDPGDAHVLANLVRTKRQDLRPLAGDSEQAQALQVRARSHLRAIRVQQRLRSQLRSTLAKFFVGALPLLGDESEDLRDALAVLSLAVSPEQGRGLSQNKIRSSLARHGRQRNLEVKASEIQAQLRAPQLELNAPKVVSAYADEVSHLVRSLLLARSEVAQLEAQLAADFREHPDAEILLSQPGLGLVLSARVLGESGDDPTRYVNAKARKNYAGNAPVTKRSGKWKMVSRRLARNRLLADAGFLWANSALSASPGARRYYDQLRARGKTHNQASRALANRLVGILHGCLRRRCLYDEAVAWLQPLKEAA

SEQ ID NO: 442027 - protein, 399 aa, unidentified
MSSTKKVVIIGVDPHKMSVTIEVVDTREQLLGTGRFDTTNTGYAEMQRYVKQWPDRLWAVEGANGVGRPLTQRLVAAGEQVVDVPAKLAARVRLFDTGHNRKTDALDAHSIAAVAVRTEGLRVVADDGELEALRMLTDRRDELAHQRVQTVNRLQRLLSELVPGQRKRDLSATQAKAMLATVRPRDIAGKTRRRMAAEEIADLVALDAKLKKIKAELKAAVVYRGSTLMDIYGVGPAGAARTLADVGDVARFADRNRFASWTGTAPLDASSGEQNRHRLSRAGNRRMNHVLHVAAVVQIRHDTEGRAYYRRKLDAGKTPMEALRCLKRRLSDVVYRQLVADARQKDGAGPGGHCGATLQSSAADSHPLVDTSDQPLPGPAKPTLRRPPARRKTLTPTAP

SEQ ID NO: 442028 - protein, 309 aa, unidentified
MIADQNVAGIDVAKARLDIHVLPSGQVLSVANTAQGLAELCRQFRQLGVTRVGLEASGGYEREAVRQLDAAGFVVQVLPPSRVRALAQAVGRHAKTDPIDAAMIARYLLLAPDRPAHRSDPARERLDELASLRRQLVAERNKLVSRLDIASDRMVRRMLARMHAVIGANITRLDAEIAAHIRSTHLKARYDILIAVPGVGPVLAATLLCDLPELGQANSKPLASLVGVAPHARQSGKTNKPGRCTGGRASVRNVLYMATLSALKARSPSLRTFYDRLRENGKPFKLAINATMRKFITILNAIVKQATVA

SEQ ID NO: 442029 - protein, 423 aa, unidentified
MTKLTSTPAGAVLVAIDMSKKRQEVLIERPEGGRRRRMTVMATKEDYDGFAEQLAAIGRPIVVGFEATGNYHRTLAHRLLTAGFELRLISSVALARTREALHNGWDKNDPKDAQVILHMLRIGATQRYVDPLAAGINDLQELSKTHETISRMKTQTWHRILTHYLPLYFPEIARFAGNSRSDWFLALIERFPTPASITALDREAFSAAAWPLIGRKVSKARLINDIYETASASTALPVPEDSAAITMFRMVIAQGRSLIQQRDEIERLAHSRLADDVDYQLLRNIPGIGPINALTILAEAGDLRRFNHHRQFLKFCGLDLATCQSGTFRGRTKLSKYGNARLRRTFWMAAQVAARQRDNSFRDKLGRYTAGHADDADRRRKAMTALTAKMARVAHAVIKTGTEYRPFLERSDARWKDPSLQVP

SEQ ID NO: 442030 - protein, 344 aa, unidentified
MDHFAGLDVSVKDTSICIVDDTGGIVREVKVASEPDALLAVLKSQSYHFKRIGLEAGPLSQWLFSALAEAGLPAICVETRHMRAVLQAQINKTDRNDARGIARMMRAGLYRSVHVKTLRSQKLRMLLTHRKLLQSKAIAIENDLRGTLRNFGLKVGMVGKLKFEARIKELVENLPDLTVLVEPLLIVRRVLREQTAVLHRRLLAIVRDDEVCRRLMTVPGVGPVVALTYRATVDVPARFKNSKAVGAVFGLTPSRYQSGEIDRTGGISKCGDEMMRVMLYEAAQILLVRSAKWSWLKAWAMQIAKRRGMKKAIVALARRLAAIMHRIWVDGTEFRWSRQEAAAA

SEQ ID NO: 442031 - protein, 418 aa, unidentified
MEEIHPRCAGIDIGKKFAKVCVRTPGVNPHSRRAKERISEVVTTWGSMTNTILALREHLIEQQVTLVLMEATSDYWKPYYYLLEDLPGCEVMLVNARHVKNVPGRKTDVNDATWLAQLGAHGLVRPSFVPPPAIRELRDLTRTRSAVTRERSREVLRMEKLLEGAGIKLSSVASDLTGVSARAMLNALCAGERNPEVLADLAHWSMRGKSGELIEALTGRFSDHHSFLVRAHFDLIDKHDQVISEITERIEAMIEPFRDARTLISSIPGISNRVAEVIIAETGADMSRFPSPAHLASWAGVCPGNNESAGVVKSSKTTHGNAHLKGALGIAAFAASQTKNTYLAAKYRRIAARRGKKRAGVALQHDMLNAIWHMLQTGELYNDPGADFFTTLRPERTKGRALHQLEQLGYTVTLEKAS

SEQ ID NO: 442032 - protein, 443 aa, unidentified
MSRAKALTRGDRRRNERLVRLRSIVRRDYAIVAVDLASAKQAAVVADHDSIVLGRRMFSGDAWVIDDILDWAEPIAAAAGFAGVVLGCEPTGHRWKPVLDRARARERELVCVNPMLVHRGREEEDFTRDRSDFKDATIIAKRVAELRCYVPYALEGHWCRLRHLGARRNDVLVAVGSARLRLRDLLECAWPAVLSAASEPLDALTWRAAMAVATDPEQIAAMSLDAFAAAVREQLPRWGGARRNLRILRAIHAAAQAPGGVATERAAACERAAYALDDWHRALDQLADVEARMTAVLDTLGLTELVTTIDGLSVVGAAAILAETGDPARYDCARTWAKHAGLCPRANESGNFHGATTVSRRGRPALRTAAWRAIWGALRHNKIYADRYTHLTTRPGNPLRDGQARAAIAAALLRQLFVVVTRRVAWDPALAAAPAEGVAPQAA

SEQ ID NO: 442033 - protein, 371 aa, unidentified
MKRRAYRATEVKNVLLEEVLRSAPAGAATAGLDIGKYEVRAVVRWKEGSFERPWKARNPSEIEAVVGLLRKVADHRALIVAMESTGTYGDALRAKLDQAGLEVHRVGGKAAHDYAEVFDGVPSQHDGKDAAVIAELAAFGKSSLWPYRPKSESDGEMAYWADWLDAQQDIQRLWTGRLESLLARHWPEATRLLALSSVTLLRALAAYRETQKARLKLERLAQGNEVIGRQAKVVGAATACVLWVALGDPKDYPCGEAYRKAMGLNLQERSSGKYQGQLKITKRGPSIVRRWLYFAAMRTAQSVFVKPWFEAKKAKDKDRGNGALIAVARKLALALPAVGAQGKPFEPWRLFSQKDLVRKAQQAKRRAARSR

SEQ ID NO: 442034 - protein, 398 aa, unidentified
MISVGIDVSKEKSTVCILKPYGEIVRSPYEITHTESQMSELVSMIKCLDDEVRVVMEATGSYHLPVLSFLEEYGIFVAVINPLVMKKYASIILRKGKTDKLDSIKIANYGLDNWFHLINYKSSDEVYVQLRLLGRQYAHYIKLRIESKLSLTTMLDYTMPGIKTMLKNRSDKPEKDKLNDFVEEYWHYDNITKKTEKQFINCYKNWAKKKGYQQSEAKAIKIYDLAQQGIPTLSSDTPSIKMLVLEAVRVLREIDKTLALILSQIQELAKSLKEYIVVREMGGVGDIIAPRLIAEIGDIRRFHSGKALIAYAGIDAPPYQSGQFTGTRRRISKRGSSTLRKTGFEIMKCLKSIKPENNAVYLFMLKKEAEGKASKVAKIAGLNKFLRIYYARVSEVYK

SEQ ID NO: 442035 - protein, 361 aa, unidentified
MRYVGIDYHKHYSVLCATDERGQELKQRRIKGNTAAGFAQFFSELGEQNKVVMEACWNWGWLYDLLGQIDQVGEVVLAHPYKTRLIAEAQIKTDRIDAQTLAKLLRGDLIAQSHAPSAATRARKHLLRQRLFWVRLRTMLRNRMHAILDRQHGLERPQLKNFFSRRGQTWLEGVELPCAEDQPLLKQDLEVAALLDQKIKELDRAIGQSQSVEEKLLESIPGIGPLFSSVIATEIDGIERFHSAAKLAAYAGVVPTTHASGGRVFHGRLLWQCNKWLRWALIEASWTAIQFSGYFGAIYRNARARGKNKHVAITMVAHRMAKIIWLLLKEKRPYTETLPDRSEDQVTVAPRRKALSLASSC

SEQ ID NO: 442036 - protein, 322 aa, unidentified
MQGKDLPEQATPPVYVGIDVCKERLDIHIHPSGQRFAVINDAGGWRRLKHVLAAQPVARIVMEATSRYHRAAHRSLHAAGLAVAIVNPLRARLFAEAMGTLAKTDAVDARMLALMAERLDPAVTPPARAAVEAVQELDRARSAAIAERVALGNRHAVAANAFLRAELARRLRSLDTHIARLDAALAKTIAADPVLAARHAILCSIPGIGTVTATALIANLDEIGTLSSRQVAALAGLAPVARDSGATHGHRHIRGGRAPLRQALYMAALSAARYNPALKDLGLRLRDKGKPAKLALIAVARKLLVLANTLVAQNRLWSPLPA

SEQ ID NO: 442037 - protein, 407 aa, unidentified
MRAIRAKRYASRTVDCTGDRAEPHAEAPRGALSAKRRQTMHEGITAYIGLDVHKDSIAIAAAGNDREVPHFVGTVRPDFKRVRKALSHYGSASSLQVVYEAGPCGYTLARQLLADGFRCQVIAASRITRSPTERIKTDRRDAITLARLARSGDLIAVRIPDERDEAIRDLSRARQDAVTACLKTRQQLKAFLLRHGRPLRGSKPWSPTGELYLSKISFAHPAQNIAFADYRQAVLDTRARVERLTEALRAQCAHWRMQPLVSALACLRGVDFLTAVILVAEIGDFSRFAHPKELMGYLGLVPSEYSTGERHHRGDITKTGNAHARRVLVEAAWNYRFPARLSHTITRRQEGQSKPVRDIAWKAQLRLGHRYRRLQSRKLHQNKIIVAIARELTGFLWDIARHVPLVA

SEQ ID NO: 442038 - protein, 336 aa, unidentified
MYRDVSGVGLDLAKRVFQVHAVGRDGQITIRRKLRRGEVLAFFSSLPSCLVGMEACASAHHWGRELMALGHDVRLMPPAYVKPYVKRGKTDAADAEAICQAVTRPTMRFVAVKTREQQGVLMTHKIRDLLVRQRTALINALRAHLAEYGIVTATGPGGVSTLTKLLREEQDALPSHARAALSSLVEQLGALAEQIDRLEGQILEWHRSDETSRRLATIPGIGPITASAIAAAVPDPGQFRSGRQFAAWLGLTPRPNSSGGKDRLGGISKQGDGYLRRLLVVGATAVMRMVRKDPKRQPWLAELLERKTVRVATVGLANKTARIAWAVMTRKEVYAT

SEQ ID NO: 442039 - protein, 355 aa, unidentified
MTNGTRWVGIDLHRRRSHIAVIDEHGELAASRRIVNDRETFLELLGGSEDSGRGETHVALEATYGWEWLAELLEEAGYDLHLAHPLRTRAIAAARVKTDAIDAKTLAHLLRAGLLPEAYVAPRELRELRELLRHRATLTRMRSAVKNRVHAILAKHGIAREHSDLFGKGGREFLAALELREAPRRRLDSLLALIEDFDREINQTTREIEERAAADDRVDVLTQIRGVGRYTAMLIIAEVGDITRFPTARHLCSWAGLTPTVRSSDAKARLGHISRQGSPALRWALVEAAQKITTGSGPLRDQFERIAKRRGRKITKVAVARQILTLSYYGLRDGEIRCLARRSRASAKVKLAAPA

SEQ ID NO: 442040 - protein, 373 aa, unidentified
MEHVGQIGASACFILKVRTVSCAIAAVRKPEYEEGQKMDTVCAVVGIDVSKKKLDIALLVDGKIKTKVLDNSSEGHQSLLEWLSKTKLPLAALHVCLEATGVYSEPVALALHQAGAVVSLVNPACIKGFGQSENIRNKNDVIDASLIARYCAAMKPQPWTPPPLEQRQLRAWTQRIQTLKDIRQQEENRLEALSVSGMEGVAQHVKQLIAWLSAEIEKLEDDINDHIDRHPGLKHDAELLASIPGVGMTTVARILGQLGDIRRFESAKAFAAFLGVTPRQRRSGSSVRGRTVICRTGNVALRAALYMPSLVARRHNPILRQFAERLAMNGMAKKAVIGAVMHKLAHLIYGVIHNDKPFDPNFLTKGLAIQDGI

SEQ ID NO: 442041 - protein, 343 aa, unidentified
MYFIGLDVHKKTISYCVKDAAGRVYQEGKIGSTRRELDEWIRTMPQPRSIAMEATIFTGWIYDHLLPHAAKVKVAHPVMLRAIAAAKKKNDKIDAGKIADCLRCDFLPECHMASTEIRDRRRTLRYRSLVIRQMVQMKNRVSGLLMETGVSYNKQRLHKVGYFAELMTANEDVHESIRPLLKLSREMIRRSQKLDYALVSSLERDPLLKERLRRLRTVPGVGPITALTWALEIGDFTRFSSVKQAISYCGLCGDEKSSADKVMRMPISKQRNKHIQRVLIEAAKLAPRQSPELALVRARELERGNPNRATLAVARKMVSYMLAVERRNQDFVPAEEFSRIAAA

SEQ ID NO: 442042 - protein, 351 aa, unidentified
MSHNLNSTITVIGIDIGKNSFHVVGLDVRGGIVLRQKWSRSQVEVRLANMPACLIGMEACVGAHHLSRKLKALGHDARLMPARYVRPYSKGQKNDFRDAEAIAEAVQRPTMKFVATKTVDQLDLQALHRVRERLVSQRTGIMNQIRAFLLERGIAVRQGQWFLRAELPRILATPPDVLSPRMVRIISGLAADWRLLDERIEELSGEITAFAKQDSGCERLMSIPGIGPLISSAMVAAIGTGDVFSKGRDFAAWLGLVPKQISTGDRTILGKISKRGNRYLRTLFVQAAWVVLVKIKPSRWEGHGLKHWIEAAKKRLHRNVLAIALANKLARIAWSVLARGRAFEASKLQAA

SEQ ID NO: 442043 - protein, 318 aa, unidentified
MNVVGLDISKDTIDVTLITAKGEMDYIKIGNSHEGFEKLIDWIKTKRVRKIAISMEATGVYYEQAAEYLSAVYTVYVINPLKIKDYAKSQFSHTKTDKADSKLIADYAKRHLDKLTPFRPSENPTLYKLINLLQQLKQQKHESQNRLHTAKDPFIRSTHETIILLLSKKIDETSKRIESTIKQQKSLNAEYQNLQTIPAIGKDTAAILLRHLTDKTFRTANQFVSFAGLSPKIEQSGSSVNKKGRLSRYGHRQLKRALFMPALVAYRINAFPQLVKNLQAAKKPKMVVIVAIMRKLAKIAYYIHKTQKPFDKARHQTV

SEQ ID NO: 442044 - protein, 320 aa, unidentified
MNIISFDISKNELVGVRTNRSARVLEKFILPNEVSVIESFVTDAKSKYTHLTISSEATADYHRALAERCLQNNIPFKLINPILTKQFTRSTIRKRKTDLTDALIIAKLTLQGEGSLLDAKSLDPLKSIARTAYKIGKLQRILEAVNDRFNRVFPDNSEIIAELEKPLLPLKEAAKNIRNYVEKNVDAETKNLLTSIVGIGPAIASGLIVEIGDIHRFPSGKKLVAFVGLDPKVKQSGLRLNRNTKITKRGSSQLRRSLFIAAYIAKRHDPELKEYYAKKRNEGKRYKEAVVAVSRKLVYRIYAVWKRGTPYEKRYPQMIF

SEQ ID NO: 442045 - protein, 345 aa, unidentified
MEPMYYIGLDVHKRKISYCVKDSGGKVYAEGSLPATRMDLDLWMKTLPQPWSAAMEATMFTGWIYDHLKPHAAALKVAHPLMLRAIAAAKKKNDRIDASKICDCLRCDFLPECYMAPTAIRERRRTLRYRNLLVRQMVQMKIKISALLMEAGVSYNKQRLHKAGYFRELLATNPDIDEGLRSLLGQCRQSVERLQKTESALVRSLERDSLLMDRVERLMTIPAVGPITALTWALEVGDVQRLSSIKKAISYCGLCGAEKSSGNTVQRTPLSKQRNKHLQTTLIEAAKMAPRNSPELAMLYDKEKQKGNANRATLAVARKLVAYLMAVDRGQRKFQLAEVSSDIAA

SEQ ID NO: 442046 - protein, 366 aa, unidentified
MEKSSTAFVGMDVHKESIDIAIADAKEARHFGRVGGDAASVDRVVRKLRSVHKRALFVYEAGPCGFWIYRRLKAQGLPCMVVSPSMTPRNAADRIKTDRRDAMKLARLARAGELEPIYVPDALDEAIRDLVRAREDAVCMQRQARQRLQALLLRNEIRYVGRSSWTRAHRRWISKVKLPNPAQQIAFEEYVQACEECERRLERFEQAIGAQLQQWRWRSVVQELQALRGISALHAVRIVAELGDFQRFDTPRKLMGYLGVIPSEDSSGARRRQGAITKAGNSSARRALIEAAQAYSHPARVSWVIARRQVNASKRACDIAWKAQLRLCARFGRLAARRLPRNKVIVAVARELAGFVWAIAREVKPL

SEQ ID NO: 442047 - protein, 457 aa, unidentified
MSQRKRKARKSKINVNNLPPHLRHINLNATGIDIGSDRHLVAVPEGSDDVSVREFDAFTSDLHEIADWLEKCGVTTVAMESTGVYWIPLFEVLEQRGFEVKLVDARHVKNVSGRKSDVLDCQWLQQLHTYGLLQGAFRPPDEVCVLRSYVRQKEMLTQASSMHIQHMQKALQQMNLLLHNVLSDITGVTGMKIIKAILAGERDPNVLALNRDQGCRNSKETIAKSLVGNFRDDHMFALKQAVELYETYQSKIAECEQVLIKHLGTQPDVTDDQPPDSGKHVRARERMRAGVDVREKLFKMTGVDLFATPGLAADTLLTLASEVGFDMTPWKSVKHFTSWLGLCPGTKTSGGKKLNRKTKRNANRAAQAFRMAAASLSKSQTALGAFLRRIRSRTDGRRAITATAHKIARIYYLMLTKGTAYVEAGQQAYEQMYKERRINALKKQAQSLGFQLLPCVS

SEQ ID NO: 442048 - protein, 346 aa, unidentified
MRIIGCDYHPSWQQICWVDTETGEAEERKLEHASGEAEKFYRQLGEPALIGMESTGNCQWFVEMATAAGHEVWIGDAARIRASEVRHQKNDRRDAALILKLLLEKRFPRIWTPSGEEKDLRQLLIHRYKLVRIRAQVKNELQHLAMNRGITRSRKLWSKAGEQVLRELPLAPWASRRREDLCKVSEMLNGQIALLDQAVLEEAEKNEKARLLMTQPGVGPITSMAFVVTMGDVSRFQGGKQVASYLGLIPREYSSGGKQRLGSISKQGNRFLRMLLVEAAQVAVRYDPGLRSEYLHRCHSKAKGVAKVAAARKLAIRLYWMLRTNRGYPEVVRVESSSRMPLVSAS

SEQ ID NO: 442049 - protein, 395 aa, unidentified
MKNIYIGIDVSKEQSSAQGIDEKGGKVFYIEFSMNARGFAELQKVIDKNCKKQTKLMAAMESTACYHITLFSYLTSKGITSFIITPLLISNFVKLSLRKTKTDKKDALAIARFLLLHKDSLEQQRLTSDMLNMRDLARQRESLVDQTRAVKMDMKRLLNITFPELEKVCGLYTKSMLRFLTHYPSAHAVKNAESSAIADVLIPGSWGHNTLEDVKRIKDTSETSIGINSFTKEIIIKQKASLLIQLNEHLDEITSVLIDHCQSLMQEDMEILNSIKGMGDKITTNFLVEIGGDISNYANHKKLIAMAGIDPAVYQSGMHEGRGKISKRGNKHLRRVIWLMASSVIQCNEFFKTYYLKRREDGLPYKKAVMATAHKLIRIIFAMLTNRTLFNVKAN

SEQ ID NO: 442050 - protein, 409 aa, unidentified
MNASTPIPPRRPTAGIDWASDDHAVAVVDPAGVAVKRSTFEHTGAGLRALVKTLQFADVDAVGIERPDRPVVDALLAAGFTVFVIAPNQLKNLRSRCGSAGNKDDRFDAYVLADTVRTDRQRLTALTQDSPQTITLRMTVRARKDLIAARVAMANQLRAHLQSTLPGAIGLFRDIDSPITLAFLTRFPSQTKADWLSPARLQNWLRSARYNNPTNAAALHAHLTAAPRGTTGPEATARAAVTLALVAALSAIRAQIKALEDQITTQLAGHPDGHIFTSLPRAGTVRAARLLAEIGDARGRYPTPESLVCLAGAAPSTRQSGKTKVVSFRWAVDKQLRGAVTDFAGDSHAANAWAADLYRRARDRGHDHPHAVRILARAWLHVIWRCWQDRVPYNPANHRAPQRILAAAA

SEQ ID NO: 442051 - protein, 488 aa, unidentified
MRGYSHLSDDEREQIGLLKVLGHSIGAIARAIRRPKSTISRELSRNRLPSGRYSPLHAAGAYQLRRRRDALIEKDAMGRQRGDVSIAALTTSRWSPAVTKRKTETVNDLSRCLDPLDMDATLIAVIEMSQSSWLVAGIVPGVERQPLKKLAIDEHALLKLLSRWRAEAEKKGHKITRVTVAFEAGHDGFWLARWLAALGVEAHVIHASSVAVTREHRRAKTDRLDTELLKRGFLGWLRGERGHCKMVAVPTLAEEDAKRPSRERETLVGEASRIITRLKAAFVRLGIRSFNPKLKAAAERLGTLRTPEGEPIPPNTLAALKRDLERHQIVKRQIREIEQTRLEHLAQAPAKGPNAMVLLLARVVGIGVETADMLVQEVLSRNMRDRRAVARYAGLTGSPDESGAKRREKGLARSGNARVRRGMIQLAWRFLLFQKDSALAEWYRQRTANAPSTRKTFVVALARKLLIALWHLARDGVVPEGVRLRPAA

SEQ ID NO: 442052 - protein, 348 aa, unidentified
MSLVLRSFLPHPNSCLGTSPYQQGRDTKMAQRSFCGIDVAKDRLDVMVLPEELCWSVANDAAGWAELVAKLRGLRIAASGIEASGGYERGVVRALLAAGMSVRQINPFKLRQFAKACGVLAKNDRLDARMIALFVATLPTRSAQRYAPVERLAELVTARRQLSDDKVAAENASRLFEDAALRRLYGGRIARLAADIALLDKRLAEILAGDAMLARRYALLVSMPGVGPVLAVTLLALLPELGQMNRKQVAALVGVAPYDFDSGRLRGMRCIWGGRAPVRRVLYMAALIGCRCNPQLRAFHDRLAAAGKKVKVVLVAVMRKIITILNAMLRDNVPWVDHSIGRHILPAA

SEQ ID NO: 442053 - protein, 343 aa, unidentified
MLYIGLDVHKEFCQACVMNKSGKVISNERFLSNQDALDKFLDRFDKAKFVLESTGIWEFIYEGVEKRGFEVVLAHPLKVRAIAEAKVKTDKVDAQTLAHLLRADLVPRSWVPSKDVRDLRQLVRQRSYLVRQSTSLKNRIHAELLRRGVRRPEESGGAFTKKSIAWMRSLRIPTVDSCLACLENVQEQIEAINVKLLEEFGRRPEARLIATIPGIGFYGALLIHAEIDDIHRFAHPEKLCSYAGLAPTVSQSASSVKYGSISKEGSAYLRWILTEAVHVHIRHNPTSRLSKFYSRIERRRGKHKATIATARKLLHIIYWMLLNKERYHGHGFNPGSQTCMRNA

SEQ ID NO: 442054 - protein, 428 aa, unidentified
MAEQDNVIAGRNLVAIDVARYWNAVLIETAAGKRLRFRMANTAADFDRLINLLDSLPGECRVGLEPTGDYHRPIAHRLWASGHEVVSINSVALARYRDAMFNSWDKNDPKDAAVILEMLRRGTVQRYIDPMVVGTHDLQELAKTYYQVSRARTKVQHSLINHGLPLYFPEMHRYWATTRNEWFVRFLLQFPTPGHVRSLSCAEFVDAAWAVVGRKVNKRAKLEEIWEMAGKTAALPHALDSLAVETFRITLRRYQELNALRTELELRAEQALKTNADFAHLKTLPGIGSVIAMTILAEGGDLRRFSHHRQFLKYCGFDLAKNQSGTQRGKEQLSKRGNARLRLAFWLAGVAAVHMKENSFRAKYERYIRSSPDDPDLRRKALTAVAAKMARVTYGVIKKNQPYRQFFEQSLPSGSIPLSAAVGALATP

SEQ ID NO: 442055 - protein, 503 aa, unidentified
MVSSYWENPFRSLVPNDVNQALAKLLLSRLKEYPFIITIRPPSIIAKGKMMARKIRKLKMKKVQPLHTLQPNAAGIDVGATEIFVSVPQDRDVEHVRCFTTFTDDLHKAARWLKKCEIKSVAMESTGVYWIPVFQILDAHGFDVMLVNAHHVKNVPGRKTDVEDCQWIQYLHSVGLLRGSFRPGQDICSVRSLLRHRGNLIKIASTHVQHMQKSLTQMNVQIHNVISDITGVTGLTIMDAIVDGQRNLNKLANLKDPRIKASKDTIKKSLKGDYRPEHIFTLKQALQSYRHYRQMIYECDIEIEKHLKDRESRIEPDQPARPPGDIKPRGNAPNFDLKHHMHRLLGTDLTLVDGIDVGTAHTIFTEVGPDLSCFPTPAHFCSWLGLCPNNKISGGKILSSKTKPGSNRVAQVLRMASISLLRSRSYLGEFYRRMRAKSGAPKAITATAHKLARIVYHLIKYQKAFDQSVFNKEQEMHKIRMEKNLRKQAKYLGYQIVPAVTMS

SEQ ID NO: 442056 - protein, 338 aa, unidentified
MIVIGVDVHKQSVTAVAVDEAGRMLDERTVAVGSNELIGWASALGTERLWALEDCRQLTRWLERQLLSRGEDLVRVPPKLMAPERRAGRTRGKSDPIDALAVARAALREPDLSRPRPGEQLFRDLKLLVDHRDDLVDERRRTQQRLRWHLHQLDPTFAVPLRMLGRPSHLERVSRWLARQEQELQVRLARELVSRCRALTRTIAELDRELEQRTGETAPTLLKLPGCAALTAAKLLAEIGPIDRFKTDAQLARHGGVAPLEASSGRVQRHRLDRGGNRQIHAALYRVAITQARYHPAARAYLERKQAEGKSRREAIRCLKRQRVRVVFNTLKASPALT

SEQ ID NO: 442057 - protein, 347 aa, unidentified
MNGDYAGRQVVGMDLHRRRSVLVRMSEDGRKLGTARISNSPAALRAELARAGKNPRVVLEATYGWYWAADTLAAAGAEVHLAHPLGVKAYGYQRVKTDARDAANLADLLRMGRLPEAWITPREIRDLRELTRYRQKLVGLRSSCKDQVHAVLAKLGLQVTCSDLFGAWGRSWMDGLALPQPYAGKVTSLRQLIGELNTEITMLSEVIADLLAGHAGYQVIQRLPGIGPVLAAVIIAEIGDVTRFRTAAQLASWAGLTPKHRESDTSVTRGHVTKQGSRLLRWALIEAIQRARAGSWPGDARDAIIARRGRQARNIAKVAAARRLLTLVYYGLRDGQIRCLPEPAVAA

SEQ ID NO: 442058 - protein, 429 aa, unidentified
MQNESTPDARGPVFCGVDTHADSHWLCVLDWRGRKVLSRQFPADAAGYEALAGAIAAAGEPACIAMEGTSSYGAGLTRHLASLGMPVREALSPAGTQRRRPGQGKCDEADAERAARAAMSGSRLGTPKSQDGWVDGVRCMLAARSGAVKARTSAINTARSLLTTAPEGLRSRFRGMGGPRLMEELPSVRAEGALGAALGALADLWAAARDAALDMERAIEASLEENCPALLAMYGCGPVSAAKLAVAAGDNPGRLRSEASFAAICGACPVPASSGKTVRHRLNRGGDRQANSALHEIARQRVMRDPETAEYAERARARGKSDREVMRCLKRYVAREAYRALMRPHEIRRPEDASELVAARRAAKVSQVRAASILGTSEKYISMLERGQRELKPIRRAYEAWVEAGLPLDWDRQAFEAERKMDSKRHLAK

SEQ ID NO: 442059 - protein, 428 aa, unidentified
MNGEDLSRLEEFRQFRREVRGSDEYLLVGVDIAKDKHYAFFGTAQGKALFRRLVFENNLEGFQKFLVQARAMRDQNGLKRMVFGMEPTGNYHKPLGEHLIRCGHLVVLVSGVAASENRKTLDGCWDTSDPRDAANVADLMSQGKCLFYEFPVGSLQDLRNLLSLKRRFKRVEHGYRVRIRNHLVAKYFPELDRYYEQSPVTSLAIVRWCLDPSVIAGLEYPEFSQRVGTGRRRVAQEKRLQAIWKLAVDSVGCEAGPVVEFEAQVMVEGLKQIQKALEEIEEKIQEVCSSFPEYECLLSIPGFGPDVASKVLGAIGDPLRFENGRQVLKLAGLDLSAKRSGKKSESVIPVISRKGKTDLRYALYQAAFIASIRNQDFMVYYTHKLRGREREPGIKIKMRVKLAAKFLLIAWTLMKKKESFNPDYLANQ

SEQ ID NO: 442060 - protein, 360 aa, unidentified
MNSLPATVGDFYRYVVGVDTHAATHSYAIIEAPNGGLIDQNVFPTSPAGLRRAREWIARRTEGDLDGVLIAVEGTGSYGAVLSDVLQQVGYRVVEAPTPRRARARSKTDALDALLAARSSLVMPLTTLRDRRTGDLQSALQVLTGARDQQNADRLRCINALTALVRTHDLGIDARRALTGMQIATIASWRRREETLGTATARAEATRLAKQITTLERDLAENRERITHLVETTAPELLDLPGVGAVTAAVILTVWSHPGRIRNEAAFAMIAGVCPIPASSGNTTRHRLNRGGDRRLNRALNTIVLTRMRTDPATRTYIERRQSEGKTSREIRRCLKRYISRQIFRSLKVAHPVPDAAAAA

SEQ ID NO: 442061 - protein, 405 aa, unidentified
MEIIYPRCCGLDIHKKTVVACVITPEEKEIRTFSTMTEDILAMVDWIKSKGCTHVAMESTGSYWKPIYNILEIEGLNPMVVNANHIKNVPGRKTDVKDAEWIAGLLQHGLLQGSYIPSREQRELRELIRYRRSLIEERAREINRIQKVLEGANIKLSSVVTDIMGKSSRAIIEAIINGEEDTVVLSELAQKRLKNKKEELKKALKGLIGPHQRLMLKTQLAHIDFLDEQIGLLDEEIKRRMLPFEEDLERLDTIPGVGRRTAEHIIAEIGTNMDQFPSAAQLCSWAGVAPGNNESAGKRKSGRTRKGNEKLRSVLVEAARAAFHTKDTYLSAQYHRIAARRGANRAAVAVAHSILTIVYYLLKRKERYNELGVNYYKERKKEAIVKQSIKKLESLGLKVIVENAV

SEQ ID NO: 442062 - protein, 407 aa, unidentified
MRPIYGRCCGLDVHKKTVVACRLTPEGSQTRAFGTMTTDLIQLREWLLAGGVTHVAMESTGVYWKPVFNLLENHGMELLVVNARHVKAVPGRKTDVKDAEWLAELLQHGLLKASFIPDRESRERRELVRYRRSLVEQRAHLVQRIQKLLEGANIKLGDVASDVMGVSGRAMLQALAQGVDDPAAIAGMAKTGLRNKIPELERALTGSVGHHQRFLLRSQFRLLESIEAEIARLDEEVAERMRPFQVALERLDEIPGIGRRAAEQILVETGTDMRRFPTSAHFASWARVCPGNNESAGKRQYASIGGGNRWLRNALLEAAWTVSHSRKQTFFTARYRRIASRRGKKRAAIATAHSLLIAVYHVLRDGVVFQDLGPAHFERRNVDAIVRRSLHRLEVLGYKVTLEAMPA

SEQ ID NO: 442063 - protein, 351 aa, unidentified
MPHKSTVHAVTAIGIDMGKNTLHMVGLDLRGAIVLRERVSRGRVASRLANLQPCLIGIEAGMATHYVARELAALGHDVKQVPPTYAKPFRQGHKNDFRDAHAVAEAVQRPTTRFVPAKTNEQLDLQALHRVRSRLVSERTAVINQIRGFLLERGIIVRQGLRFLRQQLPDILAKRTDVLSPRMVRIVADLAGDWRQLDERIETVTNEIETLAKSDDNCRRVMTVPGIGPIISSAMVAAIGSGAAFARGRDYSAWLGLVPKQMSTGDRTILGRISKRGNGYLRTLFMQAARVILLRPANWPKHGFGAWLIRAAQRLHPNVLAAALANKLARIAWTVLAQERSYEARVTKAAA

SEQ ID NO: 442064 - protein, 343 aa, unidentified
MKLTRVGVDLAKQVFQVHGVDRAERPVWCQRLKRSRWIAELEHHVEPGCEIGMEACGGAHHWARLLQSKGYVVKLMAPQFVKPYVKSNKNDANDAQAICEAMSRRSMRYVAVKTVEQQDIQAVHRVRAGLISERTAKANQLRGLVYEYGLAAPRQITALRCAVPAWLEDASNGLTVRFRTLLSGLYADLQALDERVRELDKEVRAIGRENEAVGRVEQLRGIGPLIASALVAMIGDARQFKNGRQVAVALGLTPRQHSSGSKERLLGISKRGDSYVRTLLIHGARSALRTAPGKNDRLSRWALELAQRSHPNVAATALANKMARVAWAMLRHGTIYEPNHLVA

SEQ ID NO: 442065 - protein, 429 aa, unidentified
MKNSAANKLKQVPVGYLVIGIDPHKKGHAAVIMTQDFTTHSKFKFNNSKEGFETALERIRMEMVRTGSRGAIFAIETGGHYWRNLAYFLDERGIPFHFINQFTLKRRREGKDLNRRKNDYRDGEVAAQLLCTGEFTDTKLQHGVYAELRAAHNAYRRLVKERTRVTNLVKGLLDGLFPEFTQVFKNPCGLTALSVLSICPIPEGIAAMTEEEFVNTIRTGHPGFLMRKKLRALHYAAQTSIGVKADAQSVSYELSFLVEKLQLIRRQICSIDETLVRLVDETEEGKYLLSIIGLNYISVAGILAELGSFRSYKSAKQLIKMAGSNPTESESGGKRSAHTPMSKKGRPVLRYCAWTAVIPMLRFNPDFRAWAKKLRERPVHANPLSGREIVGAALNRLLRLAFVLVKNQTFHQVPEIESMPEPELLPVAS

SEQ ID NO: 442066 - protein, 406 aa, unidentified
MNEIGKRYIGLDVHKHYLIALGVDENLEVVMPARRVELMNLESWMKKNLTKQDEIVLEMTTNTWQLYDELVEYAGSVMVVHPPHVALITRSQVMNDKIAASILARLLAKGLLVGIWVPPQEVRELRGLVAQRQKMTRLATQAKNRLHAVIQRHHLKPPAGNPFAKTNNNWWQVLTLGKLEKMNMQSDLETLQFAQQQEVRIQKEMAGIAAENEEIGRLLHIAGFGVITAVTVYAAIGDIQRFEDAKHLVGYAGMGTRVHDSGMTTRTGKITKAGRRDLRVALVEAAHVVANSHPHWKAELARLQPRIGYNRAIVAIARKLLVTVWYVLAHKVADRFAEEEKVSKKMLHIAYEVGKENRAGKSAAQFVRERMDTLGLGSELTSIPWGSKKPIPLPPSRLKEKERRPK

SEQ ID NO: 442067 - protein, 406 aa, unidentified
MRSIALDIHRDFCEVAIKEDGEVRSRGRIKTDPEELELFARSLAGDDQVALEATGGAERIAAILEPHVARVAIANTRKVRAIAEAKVKTDRVDARTLCELLDAGYLPDVWRPDEHTRSLRALLGRRERMVRSRTRAKNAVHAALGRNLKRRPPMSDLFGVAGRRWLAGLELPAHERRIVESCLREVDFLSGEIEALERELARLALPSAEIKRLMSVPGVSLVSAATFVATVGDVRRFPTPRKLVSYVGLDPKVRQSGEAPARHGHISKQGSAAARHVLCEAAWITVRTPGPLRAFHERLRARRGAQIALVATARKLCVLCWHLLTREQDYAFGRPSLHRHKLRRLELAAGDPSRRGRRSGSAASKREQRHERELSERFEAAYRRLVEDWQPKPKREGAGATRGRAS

SEQ ID NO: 442068 - protein, 360 aa, unidentified
MTTVAEKPRGIEQVPPLWDAFVGGDTHRDTHQLEMLSAIGAVISTITIENDADGYEQAIAWITERAPGPRVLIGLEGTRSYGVGLSRALQVAGLTVVEVEQPSKTDRRARGKSDPIDAHHAATQVLRLPLERKALPRSDGDREAMRILLIARGEISTTRTGQINRLRALLLLGDDQDRQWCRCTMSKANLETISRRRGRQHETTEQAVRRAEARRLALAIRAADIELAENLKQLGQLVTAFAPGLLDRKGVGPFSAAQAIVSFSHAGRCRSDAAFASLAGVSPLEASSGQIKRHRLNRGGDRQLNRAIHTIMLTRWRDCPRTREYIERRRKQNKTDREIRRCLKRYIARELFRELTAAGS

SEQ ID NO: 442069 - protein, 360 aa, unidentified
MTGTMTWAAMDVHARSTYAASMDVLTGELTRRRFDTAAVEPVVCWLAGLPGPVRACYEAGPTGFGLYRAAGRAGIDCQVIAPSKTPRPAGDRNKSDRRDTDLLLRQLMAGALTPIAVPSVTFEAARDLARAREQVRLDLMRCRHRLSKLLLRHGRVWDRTAWTKAHRGWLAAQTFEQVNTELAFVDNLAACDGLTARKDALDERLSHVATDPEFSPIVRRLRAFRGIDTLSALIIVLEVAGFDRFPRAVQLGSWLGLVPSRQQSGESDVHGSITKTGSKYARRILVEAAWQYARPPALGRALYERQEGLPDHILQIASRAQRRLYRVHKRMRERKKPGNVIVVACARELACFLWAAATAP

SEQ ID NO: 442070 - protein, 331 aa, unidentified
MSEAIIIGLDIAKYVFHAHGVDGRGRAIFSKRITRRKLLDFFVAQPSCTVALEACGGGHHWARLLTQLGHEVRLIPPAYVKPFVKRQKNDAIDAEAICEAVQRPSMRFVAVKSEQQQAAGLVFRTRDLLVRQRTQLINAIRGHLTEYGWIAPKGPSHVAMLAELLEEEEMASSLPEAARAMFRLMLDTLAGLGSKIADLDKEIARRAREDEVSRRLMTVPGIGPISATAIAALAPPAETFAKGRDFAAWLGLTPLQRSTGGKQKLGATSKNGRTYAQAPTHHRQQCHRASGEQTRRPKRLVARTDAGSQTAHAGDRRARQQDGTDHLGTTC

SEQ ID NO: 442071 - protein, 354 aa, unidentified
MPRQSTDTVAVLGIDIGKNTFHLVGLTERGAIILRRKLSRGQLEAKLANLPPCLVGMEACVGAHHLSRRLKALGHDARLMPARYVRAYLKGNKNDFRDAEAIAEAVQRPTMRFVATKTAEQLDLQALHRVRSRLVGERTAIANEIRAFLLDRGIAVAKGLNRLRAALPGILGTRTEVLSPRLLHIIEDLVADWRHLDQRIDNVSLQIEALAKQDAGCERLMTVPGVGPIISSATVAAIGSGDVFAKGRDFSAWLGLVPKQISTGDRTILGKISKRGNKYLRTLFVQAARVVLLWPRSWERYGLKPWIEAAARRLHHNVLAIALANKLARIAWSVLHHGRNFEVRKMSEPVSRSA

SEQ ID NO: 442072 - protein, 349 aa, unidentified
MLYVGLDLSRKRLDWQALAADGERVGEGACPPDRDGLLHLVLAVQRDYGERPVLAAIESMTGARFVHDQLELAGWDVRIADAQRAKGIAPLACKTDRIDAWVLAELARRDLVPEIWLPGPEVRCERERARFRLHLVHKRTSLKNRVHAILFQHGLRAPVEDLFGAGGRRFLERCELPEPWRSNVAASLYLIDVLEEQIDGIERELRRLSVEHRYLPLLMSAPGIGSVLGYTIAAEIGDVERFPTPAKLVSYTGLCPRVHQSGEVDRRGALSKHGPPYLRWALIEAAHNAIRCYPPYRELADRQRARLGKQRGGSVAAITIARKLAEASWWMLTRNRPFAPAGARIPLTA

SEQ ID NO: 442073 - protein, 356 aa, unidentified
MRYYIGLDVSMKRTFICVLDQDGKIIYEGSEVTDPHTIFDHLFLNNRLPKINLKDALIGFESGSLSHFLMKGFLERDIPTVCMDARKLSPILSIKVNKTDKNDARGIAEALRSNMYTKVHCKPQESIDKSILLGARRVLVNQQTQLKNTVRGLLKSFGIRLNAIGAKSFPTTVKSCLEGKNDLVILSITALLNVFEKQLEEIEKIDKKMNRTMSKDAEVVRLLTIPGIGPVTAITYKTEIFDPTRFKNSRSVGAYLGMTPTQYASGDTQRQGKVSKCGSSELRFLLMEAGIVILTRSKKWSKLKAWGLKILRKKGLKKAAMAVGRKLAIIMHRMMLEKTNFIYGDEKKEEMLVKAI

SEQ ID NO: 442074 - protein, 362 aa, unidentified
MNQEETSRRLYTTQHPFYCGIDLHARMMSVCILDQSGEILVHRTMKTDPETFLKAIAPYRQGMVVAVECLCTWDWLADLCADAGIPFVLGHALSMQAIHGGKAKHDQIDSHQIAALRRGGMLPQASVSPATMRATRDVLRRRRPLAHKRAALLAHVQNTHSPYHLPAMGTKIASKANREGVAERCADAAVQKSIAVDLALITSDDALRRDGELPIVTTAKHHDAHTLSLLHTVPGIGTMLRLVLLDAIHDVHRVPRVQDVVSSCRLVQCARASAGTRYGTSGATLGKAHLTWAFAAAAVLFLRDHPAAQKYLARVEKKHDTGHALTSLAQTLARAVSDLLKRPGACETETFFQRYTIREGSG

SEQ ID NO: 442075 - protein, 374 aa, unidentified
MTATIRPTFSVNEPTLYVAFELSLKEWKLALTTGFGIAPWVRTVSAGDLSGVQQVIEQARPRLGLGSTAPVVSCYEAGRDGFWIHRALTQLGLENRVVDSASIEVSRRAKRAKTDRLDALKLVLLLVRVCAGDHRAWREVRVPSLADEAARHVSRERTDLVQAQTCLINQMRSWLALHGTRLPAARRGEWWTTVRDWAGAALPAPVQARLARAHARWQVLETHVAELDTQQQMAAKAAPAGALGRLVQLKGIAATSASVLLQEGLVWRDFQNRRQIGGLLGLNPIPHASGEMARDQGISRAGNPRLQSISIQLAWSWVHWQPSSALSQWFRLRFGHGKRSRRIGIVAVARRLVIALWRYVTAGVMPTGAIVKVA

SEQ ID NO: 442076 - protein, 327 aa, unidentified
MIQYILGIDVSKDTLDVVLWDGDRGDHQVFPNSRVGYARLSRWLISRRTGLVHACLEATGQYGEGVAEHLYASGHAVSVVNPLRIKRYGDSKLHRNKTDKADAALIAEFCFKENPPLWKPLAAHYKQLRQMVRRLEDLQCNYHQEYNRLKSGLDNEWVIEDLQDHLQQLHQRIQALKATIQQFIVETPELKHQADLLISIPGIGKLTAARLLAEIGDITSFEDAPQLAAYAGLNPKGTRSGSSVRKKARISKEGRSFLRYILYMPAIVARKHNPIIQAFCARLAQRKLPQMAIVAAAMRKLLHLVFGVLKNQQVFDPNYLNQPVFTS

SEQ ID NO: 442077 - protein, 329 aa, unidentified
MSFPNTVLMNKDKEIYGIDISKKVFDVYSQSLGYLQFANDEKGFRSLSNKLSLKSLVVMEATGYYHYRLAQYLYKKGIAVSVVNPLSVKRFIQMKLTKVKTDKSDAKAICEYGQMNQVPLYNALTDLQAECLQLFRLLDVYLKQRTATKNKLKGEESLNKPSKVVYSSLKRNEKHLNKEIDLIEARLLDLVKQEQQGQLTLLKSIPGMGVKTALFLIVLTDGFNKFDNASQLCSYVGITPTIRQSGSSIRGRSRISKVGNKKLRNLLFLCAFSACKHNKACRELYQRIVAKGKSKKLALIAVANKLLKQAFAIAKSELPYDENFVSKLA

SEQ ID NO: 442078 - protein, 319 aa, unidentified
MFAGIDVAKAELVVSVIPGEERFSVGNDERGVRTLVERLRSLALELIVLEATGGYELVCVAGLAAAGLPVVVVNPRQVRDFARATGELAKTDRIDADILARFADRVRPAVRPLADADAQELDALLSRRRQLLEMLQAERNRLGQVFGRGKPQVKKSLKAHIAYLERELRITDTDLGEMVRKSPAWRERDELLRSVPGVGPVLSRTLLADLPELGRLSRREIAKLVGVAPLSRDSGTVRGRRFVQGGRAVVRAVLYMGALVATRRNALIRAFYARLLAAGKPKKLALVACMRKLITILNAMVRHGKPWSIENSNALLLHA

SEQ ID NO: 442079 - protein, 333 aa, unidentified
MYAAIDIHKHAFQAAVLDPESGQLVEERFAADRESLARWAEQWRGRVQAVAIEATTGWRWVWRELVAHGFEVRLAEPLQARALLGRRRSAKTDRLDARWLARLLAKEMLPQSWIPPEQIQQLRDRTRLRKALAEDRRRWGQRLHAYLLHEGWPCSRSNLLRPPGLRWAAALRLSADARLQVDSLLAVIAALEAQLDTLDAELRRFARADERCQALQSIYGIGPILACHLLAEIGEARRFRRAEQITRLAGLDPVVDESGESRRRGHLAKAGSPHLRWALVEAAVHAHRAGAPDLGLYRATRARRDTSVARLTVARKIGKRAFHVLRELELASA

SEQ ID NO: 442080 - protein, 342 aa, unidentified
MAVQSLHSPRYYYGGGFVVKVVFPTCCGVDVHKSFVVATIITTPTDSLQPHYQEKRFSTFNSDLNRFATWLLEHNCLDVCMESTGKYWVPVFNILEKRGIRVVIANPKWVKAVKGNKDDTKDSKWIGDLFRIGLVKSSFIPELKIRILHEFLRYRYKLVSMKNSEKNRFQNAFTVCNVALDSVVSDMFGKSATAITDHLTSDESFDPEHCVSLLQRSLKKKAEKVLESIEGYSISDEQKARIKIIREHYDFIEKLIAKVDTCVNEMVEKYEGEINLLCTIPGIDRNSAITIISEIGTDMSQFGSSKRLCCWAGLTPGNNESAGKKKSVRISRAGVYLKPALV

SEQ ID NO: 442081 - protein, 349 aa, unidentified
MDQQTPVTTYVGLDISLAETHVCVLDQDGKRLFQGAVASDPDALTRIIQEKAPNCQRVGMETGATTPWLWRALRARGLPVICMDARHANRALSMRRNKTDKNDAQGLAELMRIGWFKEANVRSPQTQYVRSLLSASYQLRLSRKDVLNQMRGVVKSFGLFTGSTATRTFPAIVREIIQENPQFGPLLTPLLAVHDALVAQITAYEDALKNIAASDPDARRIMTVPGIGYLVALTFMTAVDDPTRFSSSNKLGPYLGLSPRVRQSGEASWSAGIGHAPDRMMRSYLYQAATVVLTKTASWSALKAWGLRLYKRSGFKRAAVAVARKLAIIMHAIWVGGTEFKYGQKERTA

SEQ ID NO: 442082 - protein, 408 aa, unidentified
MSQVIIGMDPHKRSATIEVMTSDETVVGGGRYGTDVAGYRAMLAGAKQWPERTWAIEGCQGIGRHVASRLLADGEDVVDVPPKLSARTRVFATGQGRKTDATDAHSVALAATRMTGLRPVVDDQQLAVLRILADRRRSLGEDHTRMVSQLHQLLPGLIPGGAKKDMSAAQAKAMLARVRPRNAAGKARRRVAAELISDLERIYQRKKDADKELSALLAVTGTTLTDLHGIGPSGAARLLAEVGEVTRFPDKAHFASWDGTAPIDASSGDQVRHRLSRGGNRQINRVLHIMAVVQLRNPTEGRAYYDRKVAAGKTPREAMRALKRRLSDIVYHQMITDARAKATGPGGHLGAATGSSAAGLHPSAGTSEKSLPGPATDDLTPGKPAHSPGRSRHSPSAPDRRRRQAQSA

SEQ ID NO: 442083 - protein, 475 aa, unidentified
MYEIRQIHSSCHCFFYEQEVIIVKTQKQRKQNRISRHLERVNLYAAGIDIGSSSHYVAVPEELDDEPVREFLAFTGDLHRLADWLVNIGIQTVAMESTGVYWIPAYEILEERGLEVLLVNAQHVKNVPGRKTDVQDCQWLQELHTFGLLRGCFRPAEEGIALRAYMRQRQSLVERNADHIRHMQKALRQMNLLLDNVVSDITGKTGMEIIRAILSGERNPQILAGMRDKRCKQDEKMIAASLEGHYREEHLLSLKQAVQLYDFHQQLIYDCEQSIEQQLQSLDGKIESHEVNPVTSKKRKTKSSLHFDVRHEICRLTGVDLTRIDGMDENSVLKVLSETGTSMQAWPSEKHFASWMGLSPGNKITGGKIINSKTKPSASRAAAAFRICAYGLFNSKSSLGSYFRRQRARLGAPKAITATAHKLARIFYSMIKNQSEYVDLGGDYYEKLYHERTLKQLKHKAKTLGFHLIPLTSEV

SEQ ID NO: 442084 - protein, 364 aa, unidentified
MASAANGRALRHTVEVIFCQERNPTMEVTTVGLDLGKDVFQAHGITSDGTVVFNRTIRRKQLLKFFEKLPSCLVGIEACGSAHHWARELTAIGHDVRLMPAAYVKPYVKRGKTDAVDAEAICEAVTRPTMRFVAVKSKEQQALLSIHRVRQLVVRQKTQMLNVIRGLLREFGHVIGNGPVAAMRFIKAFETEDCLDIPDVAKSMLKTLCDQVVALDDRVTFYDKLIEYHAQIDERAKRIRTVPGVGPITASAIVATIGDGKQFKNGREFAAWLGLTPLNRSSGGKERLGRISKKGDRYLRRLLVIGMTSQVQRARGYPERVHPWIMQLLERKPVRLATIAMANKAARIIWAILTKETYYRQAAA

SEQ ID NO: 442085 - protein, 412 aa, unidentified
MTNPYNLFVGIDLGSQSHHVSVVDRDGTLLGERKFEHDGQGIQQLLTWLAELAGGASPETVAVALEAPRGAIVDALLERGYCLFSINPKQLDRFRDRYSVAGAKDDSRDGYVLGNSLRTDLSHFRRLRPDHVQIVRLRELSRASDALQEDWRRNANQLWSYLQRYFPAILKFSSAADDVWVFDLLEQTQAQSKLAAALPIEELAKLLRRRRIRRFSAEKLYRALQDRLPLAAGVEEALAEQVLLLLPRLRLLHQQRSEVDHRTDRLLVEMAQENFPEHRSVEILRSIPGVGRVFIATVFSEAGRPLLDRDYHDLRLLAGAALVTWRSGKTEIVSMRRACNDRLRHAVQNSANTHMQKDPRAKQIYARLRRKGNTHARGLRGVGDRLLELICVLLRSDQLYQLDRRQPKQDAA

SEQ ID NO: 442086 - protein, 387 aa, unidentified
MQKPHDNSKASPAAFMQDNTLIAVIELSLSNWLVAGLIPGVSREPLKKLEPNPEDLLKLLHGWRDEAIKAGRPITRIAVAYETGRDCFWLARWLRERGIDAHVIHATSVAVSREHRRAKTDRLDTAMLKRGFLGWLRGERGHCTVAIVPTMEEEDAKRPHREREGLVHEQTRVVNRMKSALIQFGVRNFNPKLRKASVKLETVRTPEGKSLPPNTIAALRRDMERLRIIKEQIKAIEQARLQQLEQKPEALANRMVYLLVRIYGLGLETAGLLVHELLSRTLRDRKAVARYAGLTGSPDESGSKRREKGLSRSGNARVRKIMIQLAWRMVKFQPDSALVQWFKQRTENAKGSRKPLIVALARKLIIALWRYANDGVIPEGFRLHSAA

SEQ ID NO: 442087 - protein, 341 aa, unidentified
MQHVAIDLGGRESQVCVRAEDGQILDERKIVTRGIEAYLKGQPPSRVVVETCAEAFCIADQALRSNHEVRVVPATLAPTLGVGARGIKTDRRDAQMLSEVSCRIDLPSVHLPTQLARERRNRCGVREELIAVRTALINCVRGWTRSLLLKFPSGVTATLTKRIRDAATKHPQGLPEYIERVLASIEAIQEQILKADKELEQLAAEDPVCQRLMSVPGVGIVTSMRFVAAIDDVARFPSAHAVQSYLGLTPGEHSSSDRRQRTGITKAGPAAVRRTLTQAAWSLRRSHPKDPISLWATDIELRRGKFIATIAVARKLAGVLYALWRDNSRYTPNYVARNNQA

SEQ ID NO: 442088 - protein, 400 aa, unidentified
MVIYINRADDRRNNSPAERSDNREDEMTYIGVDLHKANMAVVCCDAKGEFVCKERIPCKCIGKIEEFFAQPHLHPCNVVIESVGFYHWLFDLLEDKVENLILANPVETKKYSWNEPKTDFRDARKLALLLAGGEFERNRSLSCFVPDKTLRTFRELTRYRHNLVCRHTSLVNSAHRILLKNNLAGPKILNGQSLELFLSRFGDKFSLYHKDFLMQISENLFYNERQLKEAEEKIQPFLHMDRFKQLYEILTSIPGIGDIVCATLISEVGDFSRFDHPDKLASYAGLCPRVFASDATVRYGRITKKGSGFLRRALINAAWVSIREDMKPRRIFNRVCKRAGRKKAVVAIARKLLVWIWYLVAEGEKWEAVSTRPDSLTNNKSGVTLMRLLKRTLYRVNSVA

SEQ ID NO: 442089 - protein, 426 aa, unidentified
MNRQEAIVAWVGIDWADESHQVCEYEVGTGNKQIYAVEQNAESLQEWINQLRIRHGGGKRIAVVLEQARGGLIYALMSTDFIEIYPVNPQSLAKFRKALYPSGAKSDPVDAELLEEMVRQNPGRFRAWVPGDAQTRSLQLLTEGRRKFVDDMTALTNQLTSALKTYYPQALDWAGELSREQACAFLEKWPTLSDLQKTRAFRIREFYQKYSRPEREALDQRVRQIEKAQPLTQDPAVVMAGVMMVRTLVGQIEPLRAAVEKYDVEIARIFQQHPDRAVFESFPGAGKVLAPRLTAAFGADRDRFEAALEIQEFSGIAPVTERSGKTIWVHRRWACPKFVLQTFHEFADQARKFCAWSKLYYQQQRAHGKEHHAAVRALAYKWIRIMFRCWKDHKPYDDSRYMKSLVQRGSPLAAGWSQQPVRSVKI

SEQ ID NO: 442090 - protein, 408 aa, unidentified
MHEKQTYAYIGIDIHKDTHTAVILNCWEEVLGTMTFLNQPSSYASLCQYVNDVSGDFIPLYGLEDVTHYGRHLTAYLNEQGHEVREVNAALSYMERMSYPSTHKSDEWDAQCIASVLIRRLKHLKPVRSQELYWTAQVLVQRREALKKAHMRLTAQFHNQIKDAYPSYKSFFHDVTIVTALAFFERFPSPIHLGKVTVEELASFLRKASRNACSTKKAETIYTLAMKEKSFFLVHQPIRDSVIQSLVRDLFFKKEELDRIEQEMARFLPLFGQQLQTFPGIHTVTAMGLLAHIGDIKRFKNADKLAKYAGIAPINHSSAGKGKDRQSKQGNRDLYHLFYFLAIQQIQVSRTGEARNALFFAYFKKKIAEGKTKVQALICVMRRLVTILYQMMKHQQAYNPPPLPETSS

SEQ ID NO: 442091 - protein, 394 aa, unidentified
MPELFVGIDVAKDTSSAQGIDSNGKGLFSLTFAMDSEGFIQLWNAINENSRDLSGVLTAVESTACYHINLYSFLTAKAVSTVVINPLLIANFAKLSLRKTKTDKKDAMTIAQFLLMNRERISQLSLSQDLQDFRDIARERESVCNMLSSHKVEIKRLLQSTFPELERIADLSTRVMQEFVATFPSARLVKIAKPKAIQKILQRKGVGSRLTYTAVDLIQAAKQSIATISPAKELILQGKVRTLQHLQERYEELTKIMTEYCKASMLEDFEIITSINGISKRTATTFLAEIGCIGNYASHKKLIAFAGIDPTVYQSGKFEGSSRISKRGNRHLRRVIWMMTTCVIQHNATFRAYFMQKRSEGQPFNKAVFATAHKLVRVLFAMLTQRTMFKEICG

SEQ ID NO: 442092 - protein, 387 aa, unidentified
MPQVNDLSRSLAAFDPISTLVVVVEMSKTSWLVSGVVPGVERQPLKKLEPDATALLRLIERWRIEAVRAGRPIRRIALAYEAGRDGFWLARWLIARGIEAHVIHSASVAVSRERKRAKTDRLDAAILMRVFLGWLRGERGHCGMVAIPTMEEEDARRPSRERESLVNERSRIVNRMKSALARFGIRGFKPHLRRAPERLACLRTAEGTGLPANIIEELRRDMARLALVREQISSIEKTRAERLERAPDTGPHAMVRLLSRVIGIGIETADMLVREILSRKLRDRRAVARYAGLTGSPDESGLKSREKGLAKAGNARVRRGLIQLAWRFLMFQKDSALARWYRTRTEGPSGARKTTMIVALARKLLIALWRLATTGEIPDGVELRPAA

SEQ ID NO: 442093 - protein, 355 aa, unidentified
MNPEKYIGMDVHDATISVAVKNAEGKLLMESVLETKARTILEFIQGLRGTLALTFEEGTSASWLHDLLKPHVSRLVVCDPRKNALLKEGNKNDRIDARKLAELLRTNQVHAVYHKKHGTRALKELGRSYMTLTKDMTRVMNRIKSVYRSWAIPRAGTSVYSRRHRAEWLAKLVEPGVRIRAEHLYQQLDSLEPVRQAARRQLLRESRKHAAVKLLGQIPSIGPIRAALLVALLQTPHRFRTKRQLWAYSGFAVEVHDSGEYRWVRGKRQRNRERITVRGLNDNHNQDVKNLFKAAAISATTRPGPLHDFYLARVASGMRPTMARLTLARKIAAITLTMWKKGVSFDPKQLQRQAA

SEQ ID NO: 442094 - protein, 329 aa, unidentified
MEKLYIGIDLHSASFQACAVAEDGTRRWEARFERDAAGIAAFCARCPSSSAVAVETTTPTWHFVDAVAPAVGSVCVVDPFRTRLKAGYAAKTDRLDARRLADALRRESVVSIYCPPLAIRELRELCRSRHVLVQTRTALIQRLRAVLLRHGIRETRQRLTRASGLGWLSSVTLAPQGQAAVQRLRRVLELVLAETRLADAAVAQAAATDPIVRALTTIPGIGPVIGLTVRAEIADIARFPTAPRLASYAGLVPRVERSASHAWTGPITKRGSPWLRWALIEAALHGPRRHDAEGRWARRLALRKGALKARVAIARTLCEEIWRVWPRVG

SEQ ID NO: 442095 - protein, 405 aa, unidentified
MNAIGIDVSKGKSTVAVLRPYGEVVVSLFDVAHTGSDLRALADLIKKLPGETKVVMEATGNYFESIARYLHEQNIFVSVVNPVLISDFGGNTLRKPKTDKKDSVKIASYALNYWLDLREYTPQEDLRKSLKLLNRQYQQSIKLKTMMNNNLISLLDLTFPGINKLFTSPSRESDGHEKWVDFVLEFPHCDMISKLTIKAFAKKYKKWSDQNSYHFTESSCEKIYAFAKDCVSSVSSDKAIVFSVVQAAKMLISATENCHAIQSEMNRVASKLPEYDTVMNMYGVGKAVGPQLMAEIGDPRRFHSRKAITAYFGYDSENNDSGQKTTRSNPMTKKGSGVLRRTLFIIMQVLLKTKPQDNPVYDFLIKKQSEGKHYYSYMNAAANKFLRIYYAKVKEVLHTTETPLT

SEQ ID NO: 442096 - protein, 326 aa, unidentified
MEHELHYIGIDTAKEKLNVDVLRPDGRHRTKKFANTTKGHDELVSWLKGHKIDHAHICIEATGTYMEPVAECLYDAGYIVSVINPALGKAFAQSEGLRNKTDTVDARMLAEFCRQKRPAAWEAPHPLERALRALVVRHQALTDMHTQELNRTETAREVQRPSIDAHLLWLEAELKRLEKQIKDLTDDDPDMKHRRKLLESIPGIGEKTSAVLLAYIGLKDRFAHARQFAAFAGLTPRRYESGSSVRGASRMSKAGHVSLRSALYMPAMVATSKTEWGRAFRDRLAANGKKGKVILGAMMRKLAQVAYGVLKSGVPFDASRHNPVAA

SEQ ID NO: 442097 - protein, 363 aa, unidentified
MKAEKKTATRHVGIDLGKRTYELAIAEKGGAKMSNGKTCAAGRQALYKKLRRSDKVALEAGNLAFIIAKELEASVGCRVYVLNPSHLPLIYGSMKKTDKEDSLKLAHIVKDFPEERLPIVPVPSDKEMNRRKLLASYRRAQQSRIREINRLHGLFLAQGITTMTKEDLSASDSRREAVRALAGIELEEAKYLAECLQLHEGRIAALNRKIKEESAGDEAIERLQSVPGVGPMVAFAFASHVAAERFENASQVSNYLGLVPRVYMSGDTVRYGRITKRGNGYLRALLVQGAWALTRAKQGGKLKERFEYMTVEKSISKKKAIVAVARRMAELLYTLMRDGTRYEHRPFIREKKAEELARLAMSA

SEQ ID NO: 442098 - protein, 389 aa, unidentified
MLLDHASHGLTAIHTHIGAIFVSLELSRSTWLVTSLSPGKGEKMSKHSVPAGDIASLMKLFAELKRKAEARTGESYPVITIQEAGLDGFWLHRVLQQEGIESHVVDPASIATPRRRRRAKTDRLDGETLLRALLAYKRGEPRVCAMVVAPSPEEEDRRRLCRERQTLIAERITHVNRIKGLLFAQGISDYAPLRRDRRTRLEALRTGDGRVLPSHVKAQISRELDRLELLLDQIKAVKAEQDALLTAASRPAGKNAPPNPVTMLLALKGMGANFVAVLWSEAFYRSFSNRRQVAAYAGLAATPWQSGGIRHEQGVSKAGNPRLRTTMIQIAWLWIRHQPKSALTRWFKERSQQGRKRAIVALARKLLVALWKYVTQGVVIEGAAMKPAA

SEQ ID NO: 442099 - protein, 347 aa, unidentified
MKKLVKQVAGIDVAQKELVVCLGRMYDDLSPQLYSHKIFPNTKKGFMALVLWVKNQAAEDVSICFVMEATGVYHESLAYFLEERGYEVSIVLPNKISNYFRTLEVKTITDKTSSQAIARFGLERRLQNWKRPKPIFKGLRQLSREREQLVQERTLVKNQLHAERSEAEPSEASILRMKKRIVMLNKQEQEIKEEIQEAIKKDEQVKNDIKLICTICGIGLLTAVSVLSETNGFELIRNKRQLTSYAGLDVKEKQSGTSVKGKASISKRGNKYLRKAMHLPALAAIRHDDRFKAVFVRLVSKHGIKMKAAVAVQRKLLEMIYTIYKTNKPYDKNYLKRNEVEAQIGQD

SEQ ID NO: 442100 - protein, 412 aa, unidentified
MRRVIGIDIHRSFGEVVIWEDGKLRPAGRVDMTRTALEGFGKGLQATDEVVIEATGNCMAVSRVLSPFVAKVVIANPLQVKAIAHAHVKTDKIDAGTLASLQAAGYLPEIWTPDPATERLRRLVARRNQVVRHRTRIKNEVHAILHAHLIPRCPHADLFSRIGRAWLERQPLPEDEMLAVARHLWELDRLGEDLLLLDREVAKDALVHPAIKRLITITGVNVTVAAGLVAAIGDIRRFAAPQKLVSYVGLNPRVRQSGLGLAQHGRISKAGRSHARAMLVEAAWAAAKAPGPLHAFFVRIRAKRGHQVAAVAVARKLAVLCWHLLSKEVDYLWVRPALVANKIRGMELQAGQPAKKGSTRGAAYAYNVKVLRDQEMVAAAHAERAYEQFVARWQPKRPKKAVRERLNPARHE

SEQ ID NO: 442101 - protein, 461 aa, unidentified
MKKTKLTGPQKGSARAKVDWKALDVVHPEAAGIDVGGSEHWVAISPDRDPEPVRCFGCFTVDLREMAKWLIDKGVRSVAMQSTGVYWMPVFEVLEQNGLEVYLVNARHTKNLPGRKSDVQECQWLLKLHAFGLLNNSFQPTHEIRIARTLWRHRGNLVAEAGSAIQRMQKALTEMNIQLGNVLTDLSGVSGLKIIGAILEGERDPQALAALARPEVKATPEDIAKSLEGNWREELLFVLKQEVELYRFYQQKIIDCDRQLRQHLESLKSTVDLQAQPLGPKPKGKTRSRNAPQFDLRTELYRITGIDWTQINGMDVLTAQTVIAETGADLSAFPSEKQFASWLGLCPTNEQSGGKILNRRTRKVVNRATGAFRNAAVTLIRSQSYLGAQYRRLRTRLGAPKAITAMARKLACLFYRLIKRGQQYVDKGTEYYEAKYREQQIRSLAKRAQKLGLQLVIPVTA

SEQ ID NO: 442102 - protein, 312 aa, unidentified
MTSSKYIGMDVHKESISIAVRNSAGKVVMECVTETKASMILQFIEGLRGDLHVTFEEGTSAAWLYDLLKPHVTKLVVCDPRKNKSMREGNQSDKIDARRLAELLRLDHLTPVYHGEHGLRTLKELVRSYLTVTKDLARVMTRVKAIYRSWAIPCTGKQVYAQCHRAEWLGKISEPGVHRRAEFYYQQLDALRVLRQEVRRDLLTESKKQKAWKRLCQIPAIGPIRAAVLLGILQTPHRFRTKRPLWNYGGLAIEMHSSADHRSVDGELQRSRKNVLVRGLNRNCNHDLKNLFKGRPWWISANRAPFRSSTRL

SEQ ID NO: 442103 - protein, 385 aa, unidentified
MTSTNTRFRIIPAQFDIFAGLDVDKKSMATTFSDHATFFKSLRLPHNATHLLNYVDKHFAGKRIAFVYEAGPTGFGLHDELVARHHTCLVVAPSMVPTAPGKRVKTNRLDSRNLSLRLRGGELNGIHVPGRCYRELRHLVQLRDTQMRQLIATKCRIKALLLYEGIEFPDSNGRWNARAIDGLYRLSCSSEVRFKLDHLIGTLYFHFNSAATVQKRIRQFCKNDPELHQSITLLTSLPGVGWITAAHAVARLGDWRELKNVRQIAGFLGLVSSEHSTGEKENRGPITRSGDSRLRNKLIQCAWVAIHKDPELRAFYRSVYQRQPKKVAARKAIVAVARKLTTRMAVVLKEQRPYIIRPEISVAPLTAEETVGPRERLDAAQNEQL

SEQ ID NO: 442104 - protein, 371 aa, unidentified
MPSIVYVGMDVHKESFTLCCYRFEDDALKYKQSVKPDYKNIFKYLNQVRRLYKEDVEFICGYEAGCLGYTLYHQLTKLGVECIILAPTTMGITNTNHIKTDKRDAGNIARCLAFHTYSKVNIPTPEDEAVKEYIRMRDDHKKALKSTKQQILAMVLRQGYQFNEGSNYWTIKHVAWLHSLDMGGLLQESLDEYLITYDYLVDKIERLDKRIEEMAKEERYEDNVKKLICLIGVKTLTALTVIVETGDFNRFATAPQFAAYLGLVPGENSSGDKIKHLGITKAGNSHMRQLLVESAQGYTRGSVGNKSKALKSRQSGNAPEVIAYADKANERLRRKFYRMTLKNGSKHNVAVTAIARELACFIWGLMTNRIA

SEQ ID NO: 442105 - protein, 408 aa, unidentified
MEPIYTSCCGLDVHKRSVSACVRRLGTNGRVHQETRTFGTMTRDILELADWLTAEGVTHVAMESTGVFWKPIYNLLEGCFTLLLVNARHVKHVPGRKTDVQDCQWLAQLLQCGLLKGSFIPPRPQRELRELTRHRSQLVGERARMANRIHKLLEDANIKLGSVATDILGVSGRDMLRAMVAGEDDPGKLADLARRQLRSKLPELTLALEGRLTKHHRFVLGELLDHLEYLERQIERFSGRIQALSGPFAPVREAVASLPGFDQRSAENVLAEIGTDMAPFPSEHHLSSWAGVCPGNHESAGKRQRGTTTQGNKWLRTALVQSAWAATRKKDSYFQAQYRRLAARRGKKRAIVAVAHSLLVVIYHMLKTGSTYQDLGGDYFDKLNKNRLVPYLLKRFKDLGFQVTLEAA

SEQ ID NO: 442106 - protein, 338 aa, unidentified
MQLYAGIDLHSSNNYLGIIDTDDKRVFGKRLPNCIKTISMALKPFCKKISGIAVESTYNWYWLVDGLQDKGYKMHLANPSAIQQYEGLKHTDDKWDSFWLAHMLKLGILPQGYIYPKKLRPMRDLMRRRLRYVNQRTSHVLSLQSMLNRHLAMQLNSNEIKKLKLTDADKLFKDPFSISAAKHGISAISFLNATAKHIEKQIMASVKLKKSFQVITSMPGVGHILGLTVMLEADDFSRFESPGNYASYCRCVKSERTSNKKKKGEGNRKNGNKYLAWAYVEAAHLIIRFCPEANAFYQQKKAKTNGAIATKALANKLARATYCMIKDQTMFDVKRIFR

SEQ ID NO: 442107 - protein, 453 aa, unidentified
MAARNARVSRKPGKSRAALTITHPNAAGIDIGSASHFVAVPPDRDDEPVREFPSFTVDLNAIADWLEACAVDTVAMESTGVYWIPLFELLESRGFTVLLVNARHVKNVSGRKSDVLDCQWLQQLMTYGLLSGAFRPAEQVCVLRALWRQRGMLLKSQARHVQHMQKALTQMNVQLANVLSDVVGETGQKILRAIVAGERDGQVLGAMKNARIHASVEEIAKSLQGNWRAEHLFALKQALDAFDFVGRQLTECDGQIEQQLTVLQVHEGKPAKGKQRGRARNAPKFDLRTQLFKMCGVDLTRIDGIDVTTALAVISETGVDMSRFKTVGHFTSWLGLCPGTKITGGKVMSGKTKRCANHAAQALRLAAAALRSSQSALGAYFRRMCARMDKPKAITAAAHKLARLIYTMLTRGEEYTDQGQDYYEERYRERVLRQLSQRAQKMGMKLVVAEQAV

SEQ ID NO: 442108 - protein, 463 aa, unidentified
MAARKQKRMTAQVAEDEDYQLRHERVAGIDVAKASGMVCLRLPPAEGKSRRTSRTWEVAATVPAVEALAGELKAAGAELVSMESTSDYWRIWFVVLEAAGLRVQLVNSSQARNLPGRPKTDREDAQWIARLTEMGLLRPSFVPPPEIRALRQCTRQLTHLTQDRTRYWQRLEKLLESALCKLSSVVSKMAGSASVLAMIEAMINGERDPRVLADLARTRMRGKLGELEEAFTGMQFGEEHAFAAASHLRMIKMLDDEIRALEDRVRERIAAIPAAWGVDADGATGPEAGRGPDAAVLPAVARLAEVPGLTENSAAALIAEIGLDMSAFATPGALVSWTGLAPVPHQSGPRKGRGKKGQGDNYAKRIAGGAGNGAARTATFLGERHRRIRSRPGSGWNKASCAVGRSILVIVWHLLKDPSARYRDLGPDHYAKHTDRNRKARGHIRQLQALGLDVVVTPREEAA

SEQ ID NO: 442109 - protein, 313 aa, unidentified
MILHQNILGVDVAKDWIDICDLASGQIRRIDTRPRTLLAFATGLPQTTLVVFEASGGYERPLMAALEAKGVPYARVNPRQAREFARATGCLAKTDKVDARILAKMGRALELAPTPPVDPARRRLAELVARRADLVAAISAETNRLGQAADRFVRADIKACIAMLKRRKLALEKEIAAHTRSHEDLQHLDRRLQTAPGVGPAIASVLIACMPELGHTDRRGAASLGGLAPQVCDSGLSKGKRRVWGGRGDVRRALYLAAFIASRCDPELKAFRKRLEAAGKPFKVAIIAVARKLLTILNAMLRDGHDYQSKTTA

SEQ ID NO: 442110 - protein, 420 aa, unidentified
MKDINTKKLKRVNEKTLLAAVDIGKVKHTGYWRYPDGTDIKPFEFFNNGRGFQKFWDCICEAKRVYLVEEVVVGFESTGSYAEPLLHFLRKRGVRLVQVNPFHTKRLKELQGNSPNKTDHKDPKVIADIMELGHSLTVVIPEGVAAELRRLTHARERAIECRSALFNKLQDLVFIIFPEFLEVMKDVKGKTSQYLLKNCPTPENVIERGMERLGWELKKVSRGKLGRDRAEALFRAAWESVGIKEGQKSIVLEMTEFLLLIEASDRFIGRLEEEMAKCLREIPYSRCILSIKGIGKVTVAGLIGEVGDFGQFRTISEIIKYGGLDLFEISSGKRRGKRRISKRGRPLLRKLLFFASINTVKKGGVMYGVYQRYLQRGMPRNKALIAVARKLLRVIFALVRDHSIFVRDYSETPYQYQEAA

SEQ ID NO: 442111 - protein, 344 aa, unidentified
MATYYIGADVHSNNTELAIENRRKIMARYSVPTTIPAISTVLDSLQGKKYFAMEEGPMAGWLYRNLNKKVDEFIVSDPRRNKLITSDGDKDDKIDAAKLAVLLRGEFLKPVHHTDDSDRAHLKHWVNLYHDRVRDAVRHINKIRACCRMHGAAIPRKVVRIKKHRHEWLSGFSNTVLKDQLHMLWIGYDATKEQVKIAEKQLSSQGSKYQIINHWRNLAGVGLIRSVTIFAYLDTPWRFKKRSKLHKYCGVGLERSTSGRDKKGKLKPTRLKLPWAVNRRLKNAVLGAATTAIYQKDNIFKDYYERMLSNGINPVNARHSVARKMVSVMSAMWRTGSLFDEQLF

SEQ ID NO: 442112 - protein, 340 aa, unidentified
MFVNYKVMQNFYFIGIDVSKKKLDICVMSNSKVLKEEQVSNHPQAIATVIAGIKEELSMSNDSLIICAEHTGQYTYPLICACKSVGSKLWLENASQIKYCSGVTRGKNDKVDARRIAVYAMRFFDKAKTYQRPTEELMRLKQLEAERSLYLTDLAKYKAQLSDQEGFMEDKIFKRKAKRLKEMIKSLEKTLKEIAQEMADVIYSSEELSRQMRLLKSVEGVGPVVAMNMIIATEAFTRFDNPRQFNCYVGVAPFAYTSGSSQHSRNRVSQRAVKYIKCLLHMAAVAIAHKKTGDLKTYFERKVAEGKNKMTVLNAVRAKLVARMFAVIRNNRVYQPILSV

SEQ ID NO: 442113 - protein, 339 aa, unidentified
MKRQYVGIDLHRRSSTIYRMSEDGDVLGCQRILSQPFELAEAMAEAGDAPEVVLESTYGWYWAADLLKELGCNVHLAHALGNNWGNRRVKNDERDAKDLAAMLRLGRLAEGWIAPPETRELRELVRYRFSLVAHRTSAKAQIHGVMAKNGVLPVVAEMWGPAGTAQLDSLELPFAYSLRIESLRDLLELYDREITMLDRHIHRLLKDDPSYRAITKLPGVGRVIAAIFIAEIGDITRFDCAKKLCSWAGLTPKHRESDEVVRRGAITKQGSPLVRWAAIEAVGNYRQRGDEKLRADYRRIAERRGKYKARAAVARKLLTLVYYGLRDGEVRCLEAPEAA

SEQ ID NO: 442114 - protein, 465 aa, unidentified
MSKLSRRNRTRSSHGETRPFEGMRTVNPHAAGVDIGAHEIMACVPDGDDQQIVRAFGTYTADLEALADWFIDRGIQTVAMESTGVYWIPLFETLEARGIQGCLISAQSLKHVPGRKSDVLDCQWIQTLHSYGLLSASFRPEADFVALRTLLRHRAQLLEHRAPHILHMHKALLQMNIQLSQALSDVTGVTGQCIIRAIVAGERDPRRLAALRNYRCKKDADEIALALTGTWRAEHLFILTQALALFDFYTAQISACDAQIEHTFAVIKPRFEPAPPVPAPTEATTSPRRKPHSHSKNAPEVNTRAHILRITGVDLVAVHGISDSLAQTILAEIGTNMDKWPDDKHFCSWLGLAPKNDISGGKVLKSRTMKNRNRAAQAFRMAAHSVIRADCAFGAFYRRLKGRLGPTQALVATAHKIARTVYHMLKDQVSYHDIGAAEYNKRFRERELKYLQKKATKLGYTLSPV

SEQ ID NO: 442115 - protein, 363 aa, unidentified
MFTERTSVGLDVHARSVAAAAIDSVTGRVFQTKLTPSYEHIRSWLTDLPGPAAVVYEAGPTGFGLYRDLSAAGIRCEVAAPSKLQKPAGDRVKTDARDALHLARLLRLDEVTSVAIPTVDQEAARDLVRAREDCRGDLMRARHRLSKLLLRHGLVYDGGAAWTGAHDRWLRTEAAPQLTWPATRMAFEADYEHVLTMRARRRRLDTAIEEMAAASEFTPVVHRMCCLRGVSTLTGFALAVEIGDWTRFTGNTIGSFVGLVPSEQSSGASRVQGSITKTGNTHARRLLVEAAWHHRPRYRVGSVLRSRWEQAPAAARVRGDEGNRRLHGRWVGFLERRKRPVTANVAIARELEGWCWSLAVMDC

SEQ ID NO: 442116 - protein, 391 aa, unidentified
MYVIGIDVSKYKHDCIIMHEDTGEIVRDVFSFDNSRAGFVQFISVLKTLNPTLKKKIGFETTGHYQDNLKMFLADNGLDFMELNALLVHKFKSSLTLRGVKTDKTDARLIANYLCKVEFKPYPKIVYNILSLRSLCKRHFTLIKDRTKYLISITNFLDRTFPELKPFLNDNIKSKTAMFLLRKYGIPSKIANMNIQSYELLRKLSRGKFSVAKFYKLKDLAKHTIGFTYPTDTFEIKSLLNVYDSINEEILKVETKISTLMSKINSKIPTIKGIGLVSAATIIAEIEDINRFVSPDRLLAYAGLDPRIYESGTMSSKGKMNKKGSVNLRRVLMNCAESVIMFNPAFYAYYRKKRDEGKAHRVAISHLARKLVRIIFKLETTQVDFDPSLVK

SEQ ID NO: 442117 - protein, 372 aa, unidentified
MNNTITYVAMDTHKKDHKIALHYPGHEEVVRFVVKNNVRNIKRMVNKIKKQASADVKFCYESGVCGFTLKRRIEALGCKCEVIAPSLTPIKPGDHIKTDRRDALKLLMMFKAGLLTEVHAPNAEQEAARELTRCRQTAQENLKRIRHQLLKFLTRHGYVYTDGTHWTQKHLTWLRSLEFDQPLLMDVFDNYFTQMNHCLQRLESLDKQVKTLAESTAYKETVGLLRCFHGIDTLTAITIITEIFDFARFSSPGQLMSYLGLTCSEDSSGQSQRKGSITKAGNKRVRRLLVETSWHYRHPCKLSKTLRMRRKDQPQWVIDIADKAGQRLRGRYRHLINNGKIPCKATVAIARELAGFIWSVFKEYEARNTKAA

SEQ ID NO: 442118 - protein, 396 aa, unidentified
MDAAVYLGVDIGKSGHYAVAVDDTGKPIYQTGVSNDEPALRKLVDWAKQRGAVVVVDQSTGAAALLLKLCWAGDVRIGYLHGLAMARARDFYAGASKTDPKDAFVLADVARAHPQRVVWLEPNSEALAQLELLCGYDVDLRADANRITNRLRALLVTHWPALERAFGDRLDSRGVLAVVEQYPSGPAIKEASVEQLTAAFKVQRVRRAQAFAEQLHQAALTQTVTISGSATATRLIRELAVQLGAVLQRRDELDQEIAVSFFDLPEAAILRSLPGIGPRLGARIAVEIGSISRFRTPGHLAAFAGLGPTVWKSGTSINASRPSRFGNHRLKNALFLAAFASLRHPPSRTYYDRKRAEGKRHNQALLCLARRRVDVLHAMLTQHALYRTPAPLPTAA

SEQ ID NO: 442119 - protein, 348 aa, unidentified
MLADQLDYIVGVDPHRDSHALAVVHVVTGAVVFESTVIADSDGYGQALRLVDQHAPGRRAFAVEGTGSFGAGLTRFLTVRGERVLEVGRLRRERRPGGKTDALDAVRAARSVLIQQRPATPRAGGERQALQALVAAREGAVNAKRAGLCQLRDLLITTPEPLRSELRPLTRARLLQRLAATRPHSRHDAELRGSMLALRSIARRVLQLTAEERELAAEIETITRKLAPQLLEQPGVGPHAAAQLVLSWSHQGRISSEAAFARLAGAAPIPASSGQTIRYRLDRSGDRKLNRALHMILLTRKRSHPATITYIERRLQEGKTRREANRCLKRYLARNLYRLLEHGPPKPT

SEQ ID NO: 442120 - protein, 393 aa, unidentified
MICVGIDVAKDKHDCVILNSEGKVLAGVFTIPNNADGFDTLLQKIHGCTSPDDKIKVGLEATGHYSYNILGFLLNQGLPTYVINPLHTNLFRKSMSLRKTKTDRVDAKTIAAMLMSNVDLKSYTDAAYHNEELKSLTRYRFDKVRERAQLKQSVSRLVTILFPELEKLVPTLHMSSVYALLIEFPGAKQIAEAHLTHLKSLLKDASKGRYGRDMATEIRDAAKRSIGSVMPAKSLELRHTIRLIRELDSEIKDIEAAIEAIMEELQSPITTIPGMGFRMAAMILAEIGDFSFFDSPDKILAYAGMSPSTYQSGHLSLAGTYSHMEKRGSRYLRYALYNATKYVCHWDPGFAAYLAKKRAEGKHYNVALSHAAKKLVRLIYALEKSRQPYRRAA

SEQ ID NO: 442121 - protein, 345 aa, unidentified
MPIVGGLDIHRKQITFDYLDTVTGEVKRGQIAPADRAHVRAWLARFAGCEDAAFAVEGCAGWRYVSEELAAAGIAAHLGEPADTAALRGRKRHAKTDKTDARHLRTLLAEGRLPECWIPPGHILEYRALLETYHDLRRAHTAWVQRIHAVFFHQGGPPLGEGALRTEPGLAGLRAAAAAHLSPAGQQQVATAVDMLAATEAQLGPLRHQLRDAAAHLVGARVLAARLYGVGPVTGLALTCWLGGKGRFSSSAKAVRFTGLDITVHSSDRKGPPGRLSRQGPPVLRWAVYEAGKTHARASAPDHAYYAAVADRKNTKRAALSEARKIVRQACHILTELGDDALTTA

SEQ ID NO: 442122 - protein, 392 aa, unidentified
MEAMVVRSQQTGGEQVAVGVDPSRNALQLAILAPHGTVSKRFPLVPASLHSIDALFGQGQAVQIGVENASCCGAVVLLHWLRQGYDVREVNPQVSRRLRECFTEAHADAHDAHGLALSVMFHPNLPKVRLTVATASWKRLSRLRARLVKAQTGLYNRLHSLLAESYGAVYKELFPKLKSGRALEFFQAFPTLDDALDDLAQVRMLVGEDKAALLEQAGRWGEDLCLETLRLEIRLAIQLLLSHRAAIKALEEKMAELARADPEVERLKAVAGMGTILALTILGHSGHFSRFRNEDAYAAYCGLAPTIWQSGQSRVYAKRRRRYNRPLKQAFLQLALTQLRKNPDSRAYYQRKRREGKPHWIAITALARQLCKRVYKIMAEGAPARACSRSLT

SEQ ID NO: 442123 - protein, 493 aa, unidentified
MGACGLESGDVVLAAIPIRKMTIGIAQTLLLVIEWRIAMPKRTTGDRPELKTVSVGAAAIDIGSKMHMAAVNPACTDVPVRSFGTFTQHLHDLADWFKACGVTSIAMESTGIYWIPVYEILEQRGFDVILVNARYAKNVPGRKTDVSDAAWLRQLHSYGLLRGSFRPDAEIATLRAYLRQRERLVEYAAAHIQHMQKALMEMNLQLHHVVSDITGATGMRIIRAVVAGERNPDVLATYRDVRCHSSPETIRAALVGNDRDEHIFALTQSLELYDIYQAKMLDCDRKLEVLIAALSNKGGKPVGKLSKPRIKTKQVNTPTFDVRTALYGVLGVDLTEIHGLGPSLALKLVGECGTDLRAWPSAKHFTSWLCLAPGNKISGGKVLSSRTRRSSSRAAALLRLAATTVGRSDTALGAFYRRLSSRAGKSKAVTATARKIAVLFYNTLRHGMSYRDPGADHYEQQYRNRVLANLQRRAKSLGFLLQAIPGDADPAVS

SEQ ID NO: 442124 - protein, 407 aa, unidentified
MEALYERCAGLDVHKESIFACVLIGSGRTAEKIKQKFGTFPDDLWRLRQWLVQQGVTHVMMESTGVYWMPIYDVLEAAVEIVVANAQHIMNVPGRKTDENDAEWLAKLLRFGLVNPSFVPPRAFRQLRQLTRYRRAVVQARASEKNRIEKHLQIAGIKLSSVASKVFTVSGASMMRQIARGNTDGQELAKLARSHLRKKMPQLARAFPSSIPEHTQQLLGMQLRQMDRLDAAVAETELRIEQTTHEYADVIARLDQVPGVDVLTAIDILAEVGTDMTPWKTHRQIAAMAGVCPGNYISAGKQLKNRSRRGNPYLKTILVQAACSAIHVRGSYYQAKYARLKQRRGHKRAIVAIAHSLLVAIYYMLKRNEPYAERGAHSVTEQEAARKKGSLVRQLETLGYAVQLTER

SEQ ID NO: 442125 - protein, 332 aa, unidentified
MKITTIGIDLAKVVFQIHGVDERGKVAVRKQLKRAEMSGYFANLEPCLIGMEACGSAHHWARKLEGYGHTVKLMAPQFVKPYVKTNKNDMADAEAICEAVSRPNMRFVALKNVEQQAILSVHRARQGFVKARTAQGNQIRGLLSEFGIIIAQGIGAIAKRVPEILEDGENGLPGTMRNLIERLTENLKEMDRQAKELEAQIQLWHRDNAASRKLAEIPGLGPITASAIVATVGDAREFKNGRQLSAWMGLVPKQNSSGGKQNLLGISKRGDTYLRTLMIHGARSVVRVAEKKAEPGSWMRKLMDRRNKNVAAVALANKNARIVWALLAHDRM

SEQ ID NO: 442126 - protein, 310 aa, unidentified
MEQIFIGIDVAKDRLDVHVRPSDEAFAVTRDDAGLAALLEKLAPLEPYLVVVEATGGFEQTVAAALVSAGMPLAVVNPRQIRDFARATGQLAKTDALDAKAIARFAEAVRPEPRPVPDAQARALGELVARRRQIIAMMTAERNRRRQLSSQRLIKSVDRLLAVLQKELGDLEQEVGEGIRGTPAWRERDELLRSVPGIGDAVARTLIADLPELGHLDRKQIAALVGLAPLNRDSGKWRGKRTTWGGRAKVRSALYMAALVASRHNPVLKAFYQRLLSFGKPKKLALTAVMRKLLTILNAMVRDNKRWQNA

SEQ ID NO: 442127 - protein, 348 aa, unidentified
MAHFVGLDVSVKETSVCVVDDAGKVVLEQKVRTEPEDIIALLTSLGATFGRIGIEAGPLSQWLVNALTAAELPVICVETRHMKALLTAQQINKTDRNDARGIAQMMRVGLFKPVHVKTLVAQEQRMLLTSRKLLQRKLLDVESDLRGTLRNFGLRVGVVSGSRYEARVRELVEGFPGLAAIAEPLLNVRRVMRQQFAVLHKMLLDTVRGDPVCRRLMTAPGVGAVVALTYRATVDQPQRFVHSRAVGAHVGLTPKRYQSGEIDYDGGVSKCGDALLRTMLYEAAHSLLTRSRKWSWLKAWGMRVAQRRGIRRAIVAVARRLAVVLHRMWVDGSEFRWSKDSAAVPMVA

SEQ ID NO: 442128 - protein, 394 aa, unidentified
MYKFFVGLDVAKDSSVGHGIGSSGETSFSFAFSMDSEGFSKLFDAIVGTCEDISEVLVAMESTACYHINLFSFLTSKGINAVILNPLLVSNFARLSLRKTKTDKKDAETIAHFVMLHQDSISQLSVNQDLQDLRDLARESESLCKLISISKTEIKRLLQTIFPELENICDPLTKVALELLEEFPSARMLRTADPKAITKMFKRRGIATRLTYTATDLIQAAQNSVATVSPAKELILKGKVTLLKRLYEHRQELTKALTEYCKASMIEDLEIITSIRGISDKTATAFLAEIGDVHNYPTDKNLIAFAGLDPAVYQSGKYEAGGHISKRGNRHLRRAIWLMTTCVIHHNQSFHSHFARKRREGQPYKKAVLSTAHKLVRVIYAMLSQRTYFREDCL

SEQ ID NO: 442129 - protein, 427 aa, unidentified
MNENERNRVDAFRQFKKCIRGSTEDLVVGLDISKRKHHAFFGNANGQTVLKGLIVENSAEGFRHLLSQVGFYMQRDGFQRVVFGLEPTSVYHKPLAEHLIEQGYLVVYATNEAIKKNRSLLDGRWDKNDTKDSANVADLVSQGKCQYYDWPEPRLRDLRGLLLFRKRLKKQVHSWRVRIGNNLVAQYFPEFDRFWKKAASENLAIVRGFLDPGRIRQLSCEQFMAKLATPRGSLRQQRRLRQIWEAAGHSIGCRPAAGMQLEAALIVETLNSLQVQLTRVERAIHQLAKGFEEYRYLKSIPGFGPYVSAVNLAAIGNPHRFENRSQLLRLGGFDLSANRSGQKSKTAVPVISKKGKADLRYALYQAALVASSSTIHFRDYFSRLLDGRQREKGIRTKMRVKIAAKMLVIAWTLMKRKEFFNPAFIQA

SEQ ID NO: 442130 - protein, 344 aa, unidentified
MSEAFIIGLDIAKYVFHVHGVDERGRAIFSKRISRKKLLDFFAAQPSCTVALEACGGAHHWARQLSQLGHEVRLIPPAYVKPFVKRQKNDAIDAEAICEAAQRPNMRFVAVKSEQQQAAGLVFRTRDLLVRQRTQLINAIRGHLTEFGWIAPKGPSHVAMLAGLIEEEEMASSLPEAARAMLRLMLDLLADLDGKIADLDKEIARRAREDEVSRRLMTVPGIGPISATAIAALAPPAETFAKGRDFAAWLGLTPLQRSTGGKHKLGSTSKMGERTLRRLLIIGSSAVVLQASKRGAPKGSWLEQMLARKPRMLVTVALANKTARIIWALLVKKENYRAPVVAKA

SEQ ID NO: 442131 - protein, 362 aa, unidentified
MEFFCGLDVSIEETAVCVVDDKGEVHLRTAVMTEPEAILGALKPFLGRLRRVGHEAGSLSPWLHPELLRVGLPAICLETQHVRAALKAQRNKTDAADALGIAHIMRTGWFRQAHIKTEACYRMKLLLTHRRNLKRKFLDLENAIRHSLKAFGIKLGGTSRGAFEKAVREAVADDPLTSELMDAMLTARTALWTQYCRLHDMVVRIVAGSELARRFMAIPGVGPVTALSFIAAIDDPSRFRHSRDVAAYFGLTSRRWQSGTSIDVKGHISKTGDPDVRRALYEAASGLMTRFKGKDQVKTWGQKLAKRGCHKKAVVAVARKLAVIMHAMWSDGTDYVGDAQASDADIKAQAASKARKLLGASA

SEQ ID NO: 442132 - protein, 310 aa, unidentified
MDVATAKRRAKSVTNSKAGVDDLLAWCVKQQATPDTLHAILEGTGVYHEQATLALSDAGVTVSIVNPAQVKDFGRSLGVRTKTDGVDSLVLARYGALLNPRPWTPPTPEARTLQALLSRREAIAQDLQRERNRLEKAQATDTPALIHQSLLDSITFLETQLAKLQIDIDDHIDQHPELKADRTLLISIPGVGPQVSNHLLAVMHNHHFQSAEQLAAYLGLVPVERQSGSSIQGRPRLSKAGPARMRAILYMAAVVGVQYNPHLKALYLRLQARGKTKMSALGGAMRKLVHLCFGVLKTREPYRGDYAFQS

SEQ ID NO: 442133 - protein, 375 aa, unidentified
MKEKLRFLGLDVHAETIALAVAEPEGEVRSLGTIPNRAESIRKMIKKLGPAEKLRACYEAGPTGYVVYWQLAELGVECEVVAPTLVPVKAGDRVKTDRRDAEKLARCYRSGDLTAVWVPDEGSEALRDLVRAREAAKQDQTRARHRLSKFLLRSGQRPPSGVRPWTRPYLIWVAQLRFTQIAQESTRQDYLHEVEHMRGRVARLEQAIMEAVKLASPALQQVINDLQALRGIADISAVTIAAELGQVSRFGSARQLMGYCGAVPSEDSSGKRIRRGGITKTGNAHLRRIVGEAAWSYRRPPGIWYGLRRRQESISEEVKEIAWKAQHRLHKRYMKLGAAGKPQGKIITAVARELLGFIWAIGTRAETTVSQRAAA

SEQ ID NO: 442134 - protein, 412 aa, unidentified
METIVERPAALDVHKAQVTACARVPDQRGRREQHVAEFAATVRGLLELRDWLAGYGVTQVVMEATGVYWKAPWAILEDEFDCMLVNARHVKQVPGRKTDVSDAAWLCQLAEAGLLKANFVPPKPIRQLRNLTRYRKTQIQERAREVNRLHKALEDAGIKLDTVAADIMGKSGRDMLNALVAGETNPEVLADLARRQMRKKIPALREALEGHFDAHHRMWIGAILRHIDFLDEQIEQLNGMIEEQIRPFGPAVELLCTVVGIQRRGSECIIAEIGADMSCFATSRHLASWAGQCPGNDKSAGKRRSGKTRDGSKWLDFALEEAAMAAIRVKGHYFEAQYRRLKPRRGHKKALGAIKHSMITAIWHMLSTGETYHDLGGDYFTNRDPERQTRRLVAQLERLRHTVTLAEGAAAA

SEQ ID NO: 442135 - protein, 340 aa, unidentified
MMLIGIDPHKGSHTAVVVDGDEVVVDEIRVRASTDQIRELREWALAYDERCWAVESARGMGYLVAQQLVAAGERVIDVPAMMASRVRLLGSGKSQKTDPNDARSVAIAALRHSGLTLVGRDDHARVLSLLAKRHRDVARLKNKVACRLHAMLMELSPGGLASEMTVTKISLLEQVDVTDQVTRQRVVIAKELIDDMDRLEAQVKASKKRIRIAVAASDTTLCDIRGIGPIGAAIILGSVGDITRFPTAGHFASYNATAPIEASSDDKRRHRLNPRGNRKLNHVLHIAAVSQLRYPSEGRDYYQKKLAEGKTTKEAIRALKRRISDVVYRRLLADARRSIN

SEQ ID NO: 442136 - protein, 341 aa, unidentified
MDTVSLIGVDLGKHCFHLHGQDASGRMVFRKKLTRSQMFTLLGNFPSCTVVMEACAGAHWIARRLQTLGHEAKLISPQFVKPFRQGNKNDFADAQAICEAASRPSMRFASPHNEAQQIVSALHRVREGLVRERTCTINQIHAFLLEFGISLPRGMAVIRRLPAVLEAESLPPRLVSVLERLHAHFKYLDEQIHQLEHELLSQLHEDERSERLLEIPGIGPMTASVLMSELGDARQYGSARQFAASVGLVPRQYSTGGKPTLLGISKRGDKELRRLLVQCARTIMQRIEHRTDALGVWIRSLLARRHSNVVACALANKLARIAWAILAKGTHYRSIEAVPAI

SEQ ID NO: 442137 - protein, 363 aa, unidentified
MNATSLRSVVGVDLSKNVFELAVADEGWRLIERARLTRSQFERWFTNRDVGLVVMEACGSAHHWGRWLTTLGIEVRLLPARYVRAYVKRNKTDAADAAALLEAARACDIVPVRIKSVEQQGLQSLHRTRSLWMATRTSRINALRGFCREFGIAIATGSRIGLEQIGRVLADPSSALPALLRPTMKLLVEEIRLLEARIGQLERELTELARQSPACKTLLSVPGIGLLTATAMVAATSGQVNHFHDARHFASWLGLTPKESSSGMTRRLGRISKRGDRYLRMLLTHGARSVLRAATVAQQRGRPLDALRVWALNVQARTHHNRAACALANKMARICYAVLRDGEDYGAARVHRKLQRETYAMPA

SEQ ID NO: 442138 - protein, 345 aa, unidentified
MNNTIVGVDLAKNVIQVCLVKHNEVISNKEITPEQFMLWLINTKPVTIIFEACGMSNYWKQSALKHGHDAKLVSARLVAMIRQNQKTDKNDALAIAQASQLTDVNFINGKNVKQQEMQSILRMRELAVKQKGAIRQQIIALLLEFNIRVSAKRGGLSGVVQAVLEDADNGFAFPFRQSLEATWQSYLSLVSGIKSYETALESILKEHPDCQKLLALEGVGVINAVNLYITIGCSDTGVFKSGKEVAACIGLTPVQHSSGGNVKIGAISKRSRSPLLRSCLISGAMSMVNQVGKREPKTEKERWLKQLIERRGKLCAAVALANKTVRTAFALLTQGTEYKAQPLMA

SEQ ID NO: 442139 - protein, 328 aa, unidentified
MSKQIGYVGIDVGAEELWVSVAGVRPKRFAHTEAGIRGLYQWVVKQAGGTRVHVCLEATGVYGMHVAFQLVTRPDLTVSVVNPACIAAFAKAQLRRTKTDQVDAEVIRCYAQSQQPRPWQPASKNSRQLYELVAQADILRESIRQWRNRFHAYRYIPGLPDTVVKTARSTERSLQRQLKKVEAAIDQLCAGDADLAQKILLLETIPGIARLSAVKLLAYGQQWLTERSGKALVAHAGLAPHHLQSGTSVRGKSRIDKRGNDRLRKTLYMPALVGIVHNPALQLFYQRLCANGKPKKLALVAAMKKLLLIVRAMLINKQPFNPVYQLLT

SEQ ID NO: 442140 - protein, 462 aa, unidentified
MPERNDRETGESNRRQLQGLPVIRRNVAGVDLGSERHWVCGPTQDGNGREIASFGATTPELLRLAEWLKARQVESVAMESTGVYWIAPHEMLEGQGLQVFLVDTRQLARVPGRDKKTDPSDCEWIQRLHSCGLLRGSFRPEEAVCMLRTLVRDKANLVAESGDWLRRMQKSLDQMNVRVHRAVSDIDGVTGMAILRAIAAGERDAQKLAQLRDRRCNKTQQEIAEQLTGHWREDHLFSLQQALKMYDAVQERIAAYEQEILRQLEEMEEPGQRGQSAPPLNNANKAKAIKRRGQEAKRQGLYRMSGVDITQIDAIGVETVEVVLSEYGPDLSRFPTEKEFVAHVTLAPRVPSSGGKPLKKKKRNSASTRVAAALRMAALSLRHSQTALGAYYRKLAQRLGGDVAVFATARKLATLIYRLLRWGQPYMDEGIEAYEKRYRQQRVKSLTAKAKDLGYELTAVNA

SEQ ID NO: 442141 - protein, 412 aa, unidentified
MQDILTCAMGLDVHRDIIVACLVKGAVDAEPEAETRTFSTLIPEMQKLRDWVIESECRNIAMESTGIYWQPIYEMLESCFDGEISILVVNARHMKNVPGRKTDMKDAQWIATLLRAGLLKGSFIPDKAFRELRHLTRYRKSVVHDITAQKNRIDKFLQSSGFRFTAFLSDTFGASGRNIIRHLIEHGSIDREALDKCLKTKTRNRIDEILVALNGSLSEHQRRFLNMVFRHLEDLEAHKHTVEDEITEEVLKHTDTLNLLCSIPGIDVTAAATIIAEIGTDMSSFPDSQHICSWAGLSPGNNESAGKRKSVHINKGNPYLKSMLCEVAWIMASHRKLYLSGWYWKVKQRKGAKRATIALARKILSIIYTMLKTGTPYNEECFEQRRLRCERKRANRLVNELQKLGYVVVAPD

SEQ ID NO: 442142 - protein, 342 aa, unidentified
MFYAALDVSLRSVAVCIIDEEGKVRLERSVPSDVPDLVRCLNEFGEPIHQVGLEAGTLTQHLTYGLREAGFDVVCMEARQVNAALSAMRNKTDKHDARGIAQILRSGWYSRVHVKSVESHHLRALLTSRKVMQRKCIDLENEIRGLLKVFGVKLPMRLSRGAFDVAVRDTIESDPALSRALLPMLHARQMLFETFMELDRRVRKAAHEDEVCTRFMGIPGVGEITALSFKAAVDDPARFKSSRTVGAHFGLTPRRFQSGEKDNPGRISHAGDSDVRATLYASANAMLMRSIAWSSLKAWGMRLMKTKGRRRAIVAVARKLAVVLHRMWADGTEFRHGSEAAA

SEQ ID NO: 442143 - protein, 359 aa, unidentified
MIKQKLNEKSNKGNVTIAKQKVLQSYDHYIALDWSIINMAIARLTPKTNEPKIIDVPSDIKELKLYLKNLQGTKIMTIEETTTSHWLYVELYDYADKIIICDPYRNRLLSDGPKNDKIDAGKLCLLLKNGMLKEVFHSNDKLYDLRKLVSYYDDEVKAGVRLMNQKSALFRAENKSYKNKETIEATGINKFIVSQLDEKINLYIDKKQNYEDEFYKITKGNKTIKSLMSIPGIGIISSVTILSTVVDARRFKSSNHYLSYCGLANHKKMSGGRNYGKRLPRYSRKLKSVYKSAAVRVISTNNPIKEYYAYLIKEKSVTEQNANNAVARYIARVSLGIIKSGKKFKPYSWRKNKKEKDVA

SEQ ID NO: 442144 - protein, 343 aa, unidentified
MITIGIDPHKRTLTAAALDPHSRLLSQLRLPASSMAATQLLAWAAAWPERRWAVEGASGLGRPIAQLLVAAGEQVLDVPAKLAARARLLGTSNARKTDLADAASVASAAIHHRRLRSVALEDQTVIFRLLSDRRDDLVAERTRILSRLHVLLANLQPGGAARELSATRAATLLRQAHPITAVDAERKRIAHQLLAEVRRLDRQVKTASQRIRTAVGEHGTTLTQVFGVGPVLAAKLLGHAGEVTRFPTRDHFASYTGTAPVEASSGDVRRHRLNRGGNRQLNTALHIIAVCQIRDPSPGQVYYRRKLAEAKTPEEARRSLKRHLANVVYSHLVTDHRRRTRAC

SEQ ID NO: 442145 - protein, 348 aa, unidentified
MKYYVGLDVSQEETHICVINEDDRTIWQGKCLSVPASIGKLIKQHAPDAAKIGLETGNLSTYLWHGLNDMGLPVICIDAYHAHGVLKLRMNKTDKNDAHGLAQIMRSGWFKAVKVKSFASHEIRALYRARTSLVSMRSDVVNQIRGCLRIFGIFIKGIAGVGFEKRVQEIIDEGGTLAAPLRAQLTVLQTIKKEIAELDELVLDHAWACPSCRVLMTIPGVGPMTAAHYVLAVDDVKRFKKSKSVAAYFGLTPKRHQSGDMDYNGRISKRGNKIVRHHLYEAANILMTRVKKPSSLQEWGLRIAKRSGMKKARIAVARKLSVIMHQMLLTGECFDPYPATNQGATAHA

SEQ ID NO: 442146 - protein, 409 aa, unidentified
MEVTHRRCAGLDVHKDTVVACARLVGDDGQVVLELGEFGTTTTELFRLGEWLAEHGCTHAAMEATGVYWKPVWHVLEGSVELMLVNARHFRNVPGRKTDVNDATWLAELLAHGLLRASFVPPAPQQEIRDLTRTRKTLVREQSRHIQRIQKTLEDANIKLASVVSNIVGKTGRAMLEAIAAGHDEPEALLRLKQRGIKASDSELLEALRGHVTDQHRFDLRLHLDLIDALDRALAAVDARLEASLGPFREATELLESIPGVGRTVAESLVGEIGTDMTRFPTAAHLRSWVRVCPRADVSAGKHRSTRVQKGGLWLKPLLVGAAWSAVRMKDGYFRSLFHRIKSRRGAKKAIVAVAAAILTTAYNLLRTGATYADLGGDHFDRIEKHRAVQRHVRRLNQLGYSVDLAPAV

SEQ ID NO: 442147 - protein, 347 aa, unidentified
MRFYTKQHKFYCGIDLHARTMYLCILNQDGEILMHRNMPAGPDAFLKAIAPYREDLVVCVECIFTWYWLADLCAREGLPFVLGHALSMKAIHGGKAKNDKIDAQKIAVLLRGGMLPQAYVYPAEMRATRDLLRRRMHLVRKRAELLTHVQQTNWQYNLPDIGKKIAYKANRGGVAERFPDPAVQKSIEVDLALIDSYDQLLRDLALAIVTTAKKHDANTLYLLQTVPGIGKILSLVLLYEMHDIARFPRVQDFVSYCRLVKCAKESAGKRYGTSGTKIGKAYLKWAFSEAAVLFLRNTPAGQKYLARLEKKHGKGKALTILAHKLARAVYYMLKRGVVFDHNTLLQS

SEQ ID NO: 442148 - protein, 405 aa, unidentified
MLFVGDDWAEDHHDIEVQDEAGRRLAKARLPEGLAGVARLHELIAQHLDDGESDQVALAIETDRGPWVIALIAAGYRVFAINPLQVARYRERHSVSGAKSDAADAHTLADMVRTDSHQLRQVAGDSDQAEAVKVVARAHKTLIWERTRHAQRLRNALREFFPAALLAFDDLTGADTLELLAKAPDPDTAARLTSTQINAALKRARRHGAGEKAQGIQAALRSEQLRQPAAVTAAYAASVRAQAALIATLNAQIKTMGAQVEAHFGQHPDVEIYLSQPGMGSIVGARVLAEFGDDERRYDDASARKNYAGTSPITRASGKKKTILARYVHNNRLIDALGQQAFSALSASPGARAYYDDLRRRGIGHRAALRQLANRLVGILHGCLKTNTTYDEQTAWAHHTPAAAA

SEQ ID NO: 442149 - protein, 308 aa, unidentified
MQKINTMQTSRKNLFQGQLTIGVDLGDRSSAYCVLNEAGEIVLEHKLATTPEAMKQVFGSMPRCRMAMETGTHSPWVSRLLTALGHEVIVAHAQKVRLITKSRRKDDRLDARTLARLVRIDPELLTPVKHRSAQAQLHLTEIRARAVLVSARTALVNAARGLVKSYGERLRKCGTEQFRRETASGLSAGLREALEPLLREVESLNERIQEYGRRIEKMANQTYPETALLKQVKGVGDLIATAYVLTIEDAHRFRKSRDAGCFVGLQPGRRNSGESEPQMRISKEGDEYLRTLLVQGAHYILGTFWGRP

SEQ ID NO: 442150 - protein, 346 aa, unidentified
MRIIGCDLHARQQTISMLDVETGEVIEKTLVHEGEAVREFYAGLPKPVLVGLEATGSMFWFLRLLEELGIEYRVGHPAAIRKAETRKQKHDRRDAELIRRLLVEKRFPQIWLPTAEQRDLRTLLQHRHQLVRMRVMTQNGLQGLALSQGLRRGAQLWSQAGQQALDSLPLADYSRRRRQQLQELRQELDQRLQQLDQAVRQQAEQRAGARLLLSHPGVGPITALATEVFLGDARRFTDAKAVASYVGMIPSEHSSGGQQRNGRLSKQGNPLLRLLWVEAARAAARKDARLKQFYRRKLVQKGLGKAVVATARKLGIRLWIMLRDQIDYTEFCRRAEQRCPHAGMPE

SEQ ID NO: 442151 - protein, 427 aa, unidentified
MAAREKVGDSEFVAFVGIDWADQKHVWCLQAANSAKREGGELEHKPEVVEAWVSELCRRFGQGPIAVAVEQVKGALVYMLGKYECLHLYPVPSTMSASMRQALYPSGAKDDPRDADLLLELLLQNRDKLRRLTPDNEATRRVQNLVEERRKLVEEKTAQLNRLIGYLKVYFPQMLEWFAKLDTKLACEFLERWPSLEELQAAAPAEVRKFFRQHRGRHPELTEWRLQGIGQAMSAIRDRAVIEAKRMVVQVIARLLRTLLEGIAALDDKITEAAEAHPDFFIFQSLPGAGAALAPRLLAALGSQRDRYASAEEVQKYSGIAPVTERSGKKKWVHFRWACPKFLRQSFHEWAGHSIVQSVWARAYYQQQRQRGKDHHAAVRALAFKWIRIVFRCWQDGAAYDENRYLATLAKRGSLLIPVPAAAATSL

SEQ ID NO: 442152 - protein, 436 aa, unidentified
MYNPLSQKLAMITPETLIVGVDVAKHTHYAQMINFRGEGLHKPFPFQNTISGIGDLVQQIRTIQFKHGLSKVLVAMEPTGHYWLPLACVLKTQGITVVLVNPHHVKKAKELDDNSPTKRDDKDAGVIARLAKDGRFYIPHIPAGVIADIRNLVNFRERLNKDLQQSKARINTLLDLYFPEFQDVFKSVEGKAAMAALDNFPFPADLIEKPVDEVAAVLSQATHNRVGLKHAELLKDKARTSVGVRDGLEGARMELRYQLRRVKEILKECELVEARLAELLREIPYAGYLLTIPGMSILQVATIVSEVGDLNNYRNARQLIKLAGLNLVENSSGTHKGRTRISKRGRAKLRCALFRVALVLVARTQEFSILHHYYTTRPNNPLKGKQSLVAICCRLLRIIFALARKGMAYNRDLVLPESHPALVHAEPVRPVAKVAA

SEQ ID NO: 442153 - protein, 340 aa, unidentified
MEQVIGIDLAKRVFQLHIASPLGKMMKNTVVSRDKLTAFLAQQPPSKIVMEACGSANYWSRQFKRFGHEVKQISPQYVAPFRMGSKNDKNDAVAIVEADRRPGMRYVPEKTQEQPDIQCLHRVRQRLMKNRTALINQIRGLGLEYGIAIPESAHKVEQCLPDYLENAENDLTPLSRELFQELLRELKEQQQRLKALDKRFNHLNVQQEDIGRLLTLPGIGPLGASALMVALGDSKDFKNGRHFASYLGRVPREHSSGGKVRLLGITKRGDSYLRGILIHGARSVVYRVQKLPDEQCNGLQRWLKGVIARSGSNKAAVALANKNARIAWALVNQQSVYEAR

SEQ ID NO: 442154 - protein, 344 aa, unidentified
MKHYAGLDVSVKETSICIVDETGKICRELKVTSHPEDLLRVLQGPAWNLVRVGLEAGPLSQWLFNGLAEAGIPALCIETRHAKAYLKAQINKTDRNDARGIAQMMRVNLFRPVHVKTLASQKRRALLTARKLLQEKAIAIENDIRGLLRNFGLKVGVASAVMFEQRIRELVEGVPELGELMEVLLDARRKLREQFSKLHRKLLSIVREDEVCRRLMSVPGVGAVSALAFRATIDVPSRFRNSKAVGAVLGLTPAQHQSGESSRAGRVSLCGDGMMRTLLYEGAQSILTRSVKWSWLKAWAMKIAKNRGLKRAIVALARRLAVIMHRIWVDGTEFRWTKEEAASA

SEQ ID NO: 442155 - protein, 342 aa, unidentified
MGEVVTIGLDIAKSVFQVHGIDAAGEVIVRRLIRRAQLLPFFARQPACVVGIEACASSHHWARELRALGHQVRLMPASYVKPYVKRQKNDAADAEAICEAVTRPTMRFVEVKSPEQQSVMVLHRVRLMLMRQRIQLANAIRGHMAEFGLVAPIGREGLQTLIIMIVETGDERVPEEARTCLELLASQLRLVNEQILETDRRIRTSARSTDVGRRLMEIPGVGPLLASALVASVADPTAFKTGRNLAAWVGLVPKQNSSGGKERLGGITKQGDRYLRQLLVVGALAVVRYAERNGTRRPWLVQLLARRTTKVATVALANKTARMAWKIMTSGERYREPAALAA

SEQ ID NO: 442156 - protein, 396 aa, unidentified
MSNPNSPQFPNGDKHSNFELKNSHDGSSQLVKRILSAITSHSLDTVLIGLEATSVYGDNLVYFLREDATLATFNRKIHVLNPKQVNKFKESYNDLPKNDYVDSFVIADCLLFGRINKEVYNGDYRYKALQNLTRARFYAVCNLVKEKQRFTNVLFKKYSTMTQKKVFSDTFSTTALAVYEEFESAKALAKMDLQELTDFIMEKGKNRFPDPDSVAKAIQKAARSSYRLPKTVNDSVNQVLSISITSMKALESQIKEFDKAIAAQMELLPNVLISIPDIGPVFSAGIMAEIGDINRFGNHAQLAKHAGLAWKQHQSGGFEAQTTRLINSGNRSLKYYLCEAAFSLVRCDKEYSDFYHLKYKEVNRYQHKRALALTARKFVRLVFVLLKDNRLYRPAK

SEQ ID NO: 442157 - protein, 370 aa, unidentified
MAQGSTLFIGLDVHKETIAVAYVAEEREAEVLSLGTIGTRQCDIDKVIRKLQAKGKPLHFVYEAGPCGYWLYRYLTKKNLKCWVVAPSQIPKKAGDRVKTDRRDAMQLARLLRSGDLTPIYVPVVEDEAIRDLVRAREDVLRDSKAAKVRLKAFLLRQDIRYEGRANWGPAHLRWLAKVVCPTPAQQIVFQEYVRAVSEHTERLQRLEAELQTQVQTWRWAPVVEAIQALRGVQVTAAVTLIAELGDLTRFENPKQLMSYLGLIPSEHTTGERRRQGSITKTGNSHARRALIEGAWAYRYPAKVSRHLQLRLEKVPKVIQDISWKAQGRLCKRYRRLVARGKQVNQVVVAIAREMAAFVWAIAREVKVTH

SEQ ID NO: 442158 - protein, 344 aa, unidentified
MPTIDYIGFDIHKKTISFCVKARDGTILEEGTIPALRNKLLAWAKARPRPWMGAMEATLFTGWIYDLLKPLAQALKVAHPPMLKAIAAAKKKNDKVDARMIADLLRCNLLPECYMAPVAIRDLRRMLRYRNLVVQQTTRMKNRIAGLLMETGTAYNKERLHGKAYFSELLGSLQEVPRSVVELLQLSRGQVEFFAAIQRRLLKGLREHPELSQRVMRLESIPGVGEILALSWALEVGEVDRLPSIAQAVSYCGLTSAQHSSAGKEQRGPISKQRNPHLQTILIEAAKLAPRYNPQLAAVHDRELQRGNRNRATLAVARKLVAYLMAVDKSGQPFQMRASDKEAA

SEQ ID NO: 442159 - protein, 297 aa, unidentified
MKKRSSSQQSQKVTAKTKSAQGRVTIGMDLGDKTSRYCMLDNDGEILREGQVATTKAGIVEAFGSLGRVRIAIEVGTHSPWVSRLLQKLGHEVIVANPRQVKLITESSRKDDRLDAETLARLARIDPQLLRPIQHRSEKAQGALMIIRVRAALIAVRTSLVNTVRGLAKSMGERLPQCDADQMGVARAVSLPPQLRQTLGPLLKEVESLTEKIKNSDREIEQIARKDYPETALLQQVGGVGPLIALTFILTIEDKNRFQKSRDVGCYVGLRPRRSDSGQSQPQLRITKEGDLSASGV

SEQ ID NO: 442160 - protein, 367 aa, unidentified
MENTIVHYEGAASLEAVGSKVKPRGGQIKIGLDMHARVYVAVAQYDHLLPKAARRLSPNEFVPWVEALLGQGHSVHVVYEACGFGFTLYRQLIAAGAHCYVIAPRKLDEACSRVKTDPRDASTLCQRLSRYLEGNTRELAVIRVPSQQEERARHVSRQRTQLVCHRQKLEAQGRSLLISHALPAPAHWWKEQTWRRLSKHLPEWVTLRLGMARPALLSLQEQIDALTSELEASAPSTLPRGLGKLTSVVLTREICDWHRFNNRRAISSYTGLCPGERSSGSRRVPGSVTKRGNPRVRAALVECAWRMVRFQPQYPPVQKRLAVLAKGSRALGAVRKKAIVAVARRLAVDLWRVHTGRRTAAELGLTI

SEQ ID NO: 442161 - protein, 328 aa, unidentified
MPVNVGLDISAYSVDVVIRQGDKASQPKQYKQTVEGHAALISQLKKAKPTLIVMEATGIYYFDLAVALADAGLPVAVINPKSFRHFAELKLQTSKSDGIDADLLAEYGQRMAPALWTPPDQQHQALRSLGRQINRLVGSRAQAKNRLHALKATRSTPALLIEDEQEGITTLERRIERLRQAALDLMAEAPMLQRQYEHLLAAKGVGEATALSVLAELCVLPRDLKSSQVSRHAGLDVRQHQSGTSVNRPGRISKAGNVYLRSALYMPALSAVRYDPNAKAFYEALVARGKKKIQALVAVMRKYLTGLWACLKTDTPFDSSRLFRPQGL

SEQ ID NO: 442162 - protein, 363 aa, unidentified
MVHVGVDLHKRLSQIAVLTADGELRQHRFHNDAARLEQFFAQLPPRTPIAIEATGTWWWLVDLLEGLGHQPVLSHPKATKAIAAARLKNDKVDAQRLALLLRGDLLPTVWIPPAALREARELVRHRITLVWLRSAVRNRLLSMLARRNLQPTRVKNWLTQSGQRELRALSLAPSPGTIRDDCLTLLPLLDAQIRRLDAEVVQRWGDDPRVQRLTTIPGIGPFIAIVLVLELGDIARFPSAKHVASYIGLTPRVRASAGRVRSGHITREGNRLLRWVLVLAATQASRRPGPLRTWVRMVQQRTGKKRARVALARRLAELVYHCWKDEVDYWTILRRGAVRGGARTWIWSSDRDLDWAAPFTPHG

SEQ ID NO: 442163 - protein, 331 aa, unidentified
MNYSHFVGLYVGKKTFDASLMSADEKELSHKSFDNTPTGIQSLLDWIAGYHLSLSKLLFCAENMGSYVTELSVSSVSMGFSLALVCPLTIKKSIGLQRGKNDRIDAKRIANYAVLHYRKLELYKLPDKDLVRLRGWIIIRDNLVKQKVSSIKLLETFSWMAKLADVTESISFLEEQLKSIKERILEVEEDMEQLIAASTSLYTNYLLLRSIKGIGIINAIVLLCVTDNFQRFDNPRKFACYCGVAPFEHTSGISIRGKTQTSSLANKEVKVYLTRAAITAISWDPQMKAYYKRKIAEGKHKASVINAVRAKIIARSFAVIRRQTPFVTLAV

SEQ ID NO: 442164 - protein, 432 aa, unidentified
MNPISVSSPPSKVAAWVGLDWADQQHLVCLYDVGTGQTELSCLEQKPEALQSWLGQLRQRFGGQPVAVVLEQARGAVIYALLSADFLVLYPVNPQSLASYRKAYVTSGAKSDSADAVLLMEMVRNSPQRFRSWTPDDADTRSLQLLTQNRRQLVDQCTAFTNQLTGWLKSYYPQALELAGELDSLQACDFLEKWPTLEALQQARPAQIRKLYLDYGKPRPESLEQRLEQIRRARPLTTDLAAVLSGTMMVRALIELIRPLRATLERFDQQIAALFRKHPDRLLFESFPGAGAVLAPRLLAAFGTDRDRFESAQDMQQLSGIAPVTEQSGKQRWVHWRWACSKFLRQSFHEFADHSRKWCDWAKALYQRLKRTGKGHHAALRMLAFKWIRILFHCWKTRTGYDEQIYLKSLEKRNPTLWAEAQALPPRKKKAA

SEQ ID NO: 442165 - protein, 366 aa, unidentified
MSAVPVVPATPLPISKRKGQLMSMVRNVVGGVDTHADFHVAAAVDHNGGLLGIESFGADVAGYEDLCGWLCSFGPLARVGVEGTGSWGVGLSRFLDAAGVETVEVDRPNRQARRKQGKSDATDAVAAARAALSGEASVTPKTRNGPVEQMRVLLVARRSARTQRIATLNQLRHLVFCAPEPIRVRFKDRYKTGLVTEAANMRPRKGSDPVTYTTNTVIRDLARRIQSLTAEMRNIDRTLVELLEQAAPSLLALYGLGPDTAATLLVTAGDNPDRLHTERGWARLCGVAPIPAGSGKTSGRWRLNRSGDRNANAALYRIVLTRMSSHPETRAYVTRRRTEGMSTAEIMRCLKRYVARQTFKHLPTEA

SEQ ID NO: 442166 - protein, 328 aa, unidentified
MKKKFILGADISKHTIDIHCFGKPDCLTISNNSKGFKELIKWIKKQVSRDFEGVIIVMEYTGIYTYNFENFLHAESIDYVKRPALDIKRSAGIKRDKTDKADARMISKYGWQRREELQPMKPLSSTQLDLQQLMAYRDKLVADKSSYQSRIKELKGQMQQKLNQHIIQSTENIMQLLKEEIKKTEAAIKELVTKDEALAANYELVQSVKGVGFSTTVHMLIKTENFTRFDARKFACYCGVAPFKNESGTSIRGKTKTSHLANRKIKSLLTMAAISAINHDPQLKTKYEQKLQEGKAKMVALNIIRFKLIERIFSVIKRQSPYILSTAA

SEQ ID NO: 442167 - protein, 355 aa, unidentified
MSSEKYIGLDVHQATISVAIMDSQGKIIMESILETKASTLLEFLAGLRGSLFVTFEEGTWAAWLYDLLKPHVAEVLVCNPRKLPLLKQGNKSDKIDARKLAERLRLHDLKPVYHGENGVRMLRELARSYLTVVKDLSRVMNRLKALYRGWAIPCAGRDVYYTRHRRQWLEKIPEAGTRRRAEQLYQQLDMLQHLRQQARRELLAESRKHAITAKLRQIPSLGPIRSALAVALIQTPHRFRSKRQLWTYSGLGLETRDSGEYHYVDGQVRRRKKQATIRGLNKDYNHDLKGLFKAAAIRASVLPGPFQEFYQRSLAKGIKPTMVRLTLARKIAAIALTLWKKGEDFDIDKVNSQAA

SEQ ID NO: 442168 - protein, 327 aa, unidentified
MSASCEQIFIGIDISKASLDVAIRGQSKTQQFANSDPGIAALLVNLKGLKEVACVLMEATGGLEKLLARQLVLAGYAVIISNPRQAHNFTQSLGQLSKTDASDAKALAHYAHTLWHSDRRDALLVRLPSQQEDALAALVARRSQLVGMRVAESNRRAMAHALQKKSIEQMLRAIDGQIKALDKDITANLDTHFKARLDLLKGLKGVGLATKATLMASLPELGQLNRRQVGKLVGVAPLNHDSGKMNAKMGTYGGRSNVRWVLYMAGLSAVRYDPVIKAFHDKLRAAGKPPKVALVACMHKLLTIINAIIKSGKPWQANYACPQAVQT

SEQ ID NO: 442169 - protein, 314 aa, unidentified
MPDQMFVGIDVSKARLDVAVLPSGEVFAVDNTAPGLTELLIRLSDIQPQLVVLEATGGLEQAAMLAVHEAGLPVTVLNPRQVRHFSRALGKHAKTDRMDAVLLARFAQTLQPEAHVPSDASQRALEAMLARRRQVVDLLTMERNRLHSSRDAYVQGDVQEVITYLEGRREQLDQALQDAVQHDPKFQTKYTVLTSTPGVGPVMALTLLAQLPELGSLSRQKIANLVGVAPLNWDSGTARGHRRIWGGRAEVRQVLYMSAVSAVRWNPTLKAVFDHLVQKGKPTKVALVACMRKLLVYLNAMVRDQAPWHVQPVV

SEQ ID NO: 442170 - protein, 347 aa, unidentified
MVTLGSDSHKRSHTLLAVDGNGCPLEERKVPATPAGHMEALAWARRWPERRWALENCRHLSRLLERDLLTAGEAVVQVSPKLMGKARRSGRELGKSDPIDALAVARAALREAHLPVAQLEGKSRELKLLVDHREDLVGERTRIQNRLLWHLHELEPGFEVAASGLLRAVVLAEVRRRLERHTGVVAEIAVDLVGRLTELTTSAKRLQSRIESLAGELAPSLLSLPGCAGLSAAKLVAETADVNRFHSSAAFAMHNGTAPIPVWSGNHERHRLNRGGNRQLNVALHRIAVTQIRLGGEARVYVNRRMSLGNTKTEAIRALRRQISDEVYRRLRRDSSERLTAPNAVAA

SEQ ID NO: 442171 - protein, 403 aa, unidentified
MKVYIGIDWSEAKHDVLFLNETGAAIAQMTIPHGLEGFEQLEHTRQRLGLELNSCIIGLETAHNLIIDFLWSRGYSRIYVVPPTTIKGNRSRFRHSRARSDASDALVIADCLRTDQGRLQPWKPDQPLTRHIRAKVSLINYLTKEIVRLSNRLRSVLLRYYPAALNVFSGWPTLIGLNFIQSYPTPQKAQALTQALFRAFTRKHHYPQSRVAACFARLQADYPEASASTVASLQDEAVLLASFLQRTLKAKSSSLRELGHLFSDHPDAPIFASLPGAGDLLAPALLGKFGDDRERFPSPSSVQALAGTCPVTDSSGKRRIIRFRRACDREFRYIAQQWARASLERSVWANAYFQTVYGRCQSINHAYRCLANRWLAILWKLWQSHEPYDEAYHLNQRAKHSKR

SEQ ID NO: 442172 - protein, 359 aa, unidentified
MQKYELNFNGENVYVGIDVHLKQWHVCVRTAHVSKKPFSQPPSALALKQYLENCFPGGTYFSAYEAGFCGFSVHYELESAGIHNIVFNPADINDTQKERSRKTDAVDCIKICRNLMNNELKAIYVPSREELGLRGYLSARDTAVKKQRAAKQRIKSLLNRNGVKIPDELFPTSKTHWSRHFNRWLEQVATDLGSGEGYRLNDLLKDLHHAHSQVLAAGRRLNEVISAHHMDTNELLLSIPGIGRLTAARICLEVPHVSNFVNSDHLASYIGFVPDVHGSDDNVYVRGITYRRRDLLRSAFVESAWSAIGRDPAMGLAYSNYIKRGLKPNNAIIRIARKLVNRVFFVLRERKRYEIANVR

SEQ ID NO: 442173 - protein, 337 aa, unidentified
MKYSGIDLHSNNSVVVVSDEADRVLVRRRVPNDAVAILALLAGHRAELVGVVVESTYNWYWLVDALQADGYRVHLANPAAIKRYEGLKHSGDEDDAAYLAQLLRLEILPRGYICPPAARAVRDLARKRVQLVRSRTAQVLSVENMLSRQTGAGMRSYAVQRLTAQAVASFGFHPDVERALCANVAVIQTLNREIDKLEQRLHQCVRWRPEFRLLTSVPGIGQTLATLIMLEVGTIERFAAVGNFASYARCVDSARMSNGKKKGQGNVKNGNAYLAWAFVEAANFARRYCVEAQHFYERKKARTNGVVATKALAHKLARACYHMLKENQPFDVKRCFA

SEQ ID NO: 442174 - protein, 413 aa, unidentified
MTDETKWYAGVDWASESHLVFLADDGGRKVGKRTFKHGGEGLAEMAAWLMATSGASKPSQIHVAIEVPHGPVVETLMERGFKVYAINPKQMDRFRDRFTLAGAKDDSRDGEVMSSALRTDAHCFRLLALADPVVVELREWSRIAEDLGGERNRLTNRFREQLWRYFPAILELEADLASEWLLNLWETVPTPHKAARIRDTTIAKLLKSHRVRRFDAAQVLSVLRAPPVRVAAGTAEAASAHIATLIARIRLVNRQLKQAHQMLDALTARLAPTEAEPGQTKQHDVEILASLPGVGRIILATLLAEASDALQRRDYAALRSLTGVAPVTKRSGKSCIVVRRYACHARLANAMYHWARTAIQHDPTSRSKYAALRSRGHSHARALRSVADRLLNVACAMLKSGTTFDEPITKKTA

SEQ ID NO: 442175 - protein, 387 aa, unidentified
MNVVTDKSEPLTAIHTQLGAIFVSLELSRSSWLITSLSPGGGEKMSKHSVRGSDFAGLMQRFAQLQEKAKLRTGRSFRIIVVHEAGLDGFWLHRALQNEGIESHVVDAASIATSRRRRRAKTDKIDGETLVRTLLAYKRGEPRVCAMVKAPTPGEEDRRHLCRERKALTAERVRHVNRIKGFLFSQGISGYQPLRRDRRQRLEELQTGDGRALPQHLKALVSRELDRLELLLKQIKTVEAARDELLAEEQTAKLAPAPMLLDIRGIGPEFAAILWSEGLFRPFENRRQIAAYAGLAPTPWQSGTVDREQGVSKAGNPRLRTTSIQLAWLWLRNQPRSALSVWFHERVSRNGGRLRKTTIVALARKLLVALWKYVTAGVVIEGVTMKA

SEQ ID NO: 442176 - protein, 379 aa, unidentified
MYRILKIGMDVHTTNYTLCAMEDKFGEDGQIIAQVTVAPDHKLILNFIRRIKEKMDPQGKDEIDVECGYEAGCLGYSLYHLLTACKVKCKILAPTTMLAEKGPRIKTDKRDAKLIADCLANGGYHAVHIPTKEDNAIKEYIRMRDDHLLMLKQTKQRMNALCIRHGYIYEGTKWTVPHMKWLQQLQLDPIVREGMDEYITTYGELMAKIERYDRRIQELANQAEYRERVKKLECFLGIRTHTALSLIVETGDFSRFRKGNIYAAYLGLAPGEHSSAESGGHLGITKAGNTHLRKLLIEASGGICKGNIGYKSKDLKARQAGNPADVIAYADKANTRLRSKYYRLTRHGKKRNVAIAAIARELACFVWGMMTDNIHGNAA

SEQ ID NO: 442177 - protein, 369 aa, unidentified
MNKFSKYVGLDVHQETIAVAVADTAGEVRYMGEIVNTPEAIAKVVAQLKRGTGRLAFCYEAGPCGYTICRQLRELKQDCQVVAPSLIPKKPGERVKTDRRDALSLARLHRAGELSPVWIPDEAQEALRDLTRAREDMKHLQRQAKQRLLSFLSRHGHRYTGRSRWTQAHWRWLEGIKFARPEQQIVLQEYIDTVQACGRRVASLDREVETAAHASPVWPVIEALMALRGISLLAAVTVVAELGDLARFSGAPQLMAYLGLVPSEHSSGKRERRGGITKTGNSHVRRVLIEAAWTYRHAARKTAILQRRAERTAPEVQEIAWSAQKRLCQRFRNLMARGKLKNQVCTAIARELVGFIWAIGQHVIPLSRA

SEQ ID NO: 442178 - protein, 409 aa, unidentified
MQYFVGLDWAAREHAVCVVDGRGAVVTQFTVAHTAAGMTDLAARLVKVAPAADLRIAIERPTGLVVDTLVEGKFAVVPIHPNVVKSSRPRYSAAQGKTDLGDAYLLADLLRTDGHRFRTLTPLSDETKALRGLVRVRDDLVGQRVATANQLRCLLEQFWPGAAAIFADVDSPIALEFLDRYPTAQAAASLGEKRMAAFMARHSYSGRRSARELVERLRGAALSTAGELEAEAKGECVRALVTVLRAMVAQLATLTAAIEHAVDAHPDGKVVTPLFRSGRVCAAQLLAEIGDDRGRFVSGDHLAAEGGMAPVTRESGKYRAVTFRWACNMRLRAALSTLADTTRHTVPWARAVYQRARDRGHEHAHAIRILGRAWCRVLWTCWQKHVPYDPTKHRAAQQFTLRPVNQEAA

SEQ ID NO: 442179 - protein, 420 aa, unidentified
MAYRIAGIDVHKKMLAVVVADVEVQGEYQFERIRYGSNPEPLRLLAAWLIEHEVEEVVMESTAQYWKPVWGALERYWKPSCQKREGAGPMSGTLHLAQARSNRGRRGRKKDFPDAERLVKRLVADELVLSFVPDAEQRLWRTVTRRKYQLTRNKVRLQNQLEALLEEAHIKLSSLVSDLLGVSARRMLKAIADGGTDPAALADKKLRATPAQLCDALGACAELQPIYRRLLKMFLEELQLIEQQIGQLDQEMAALLSQHPDCVQRLSEIPGLGVDSAQQIIAEVGATAATFPSGKHLSSWVGACPGDEESAEVSRSHRSPKGNRHMRRILNQAANAAVKSKGTIFEIVYRRLVSRLGHNQTIGAIAHRLCHLIWIILHRGVRYEERGPSVNTKSRRQRTSRMIRELRNLGYRVEPLGTPA

SEQ ID NO: 442180 - protein, 425 aa, unidentified
MKASTQLSCFAALIGLDWSDGKHDICLQIAGDDRRESLVLVHSPEAIDEWARALRKRFGGKPVAVAIELAKGPIVYALRKYEFFVIFPLNPATLAKYREVFTHSGAKDDPTDAELALEFLLKYPERLQPLNPQSPQMRALQQLVEMRRRLVDDQTRITNRITSALKNYFPQALQWFADKNSHLFCDFLQQWPTLKAARQARRSTLERFFHEHNVRKSTLIAERIDAIKGARPLTEDEGVIEPFALLVSVLAEQLRATLHAIETFDREIAERAPAHPDFPIFDSFPAAGPVFAARLLVAFGEHRERFPSPVDLQRYAGVAPVTERSGNSCWVHWRLQCPTFLRQTFVEWAALTIPRSFWAAAFYEQQRSKGKSRQAALRALAYKWIRILHRCWLTGQPYDESRYLNALKKRGSPLLEHLAQPTSTA

SEQ ID NO: 442181 - protein, 456 aa, unidentified
MKNFLGIDVSKGYADFALIDEQKQPIVQNFQLDDTPDGHAKLGDFIRTLFKQHQDLTVVAAAESTGGYENNWLDCLTKLQRCYAIQVTRLNPKGVHHHHEAKLNRAITDAISARLIAEYTLSHQELIQFDQPDETYSLRKQWTLIKLLNKQKTQLLNQLDNLVYQSNTELMVYCRSSWPVWLLQLLGEFPTAKELAQANIGQLAKIPYLGTDKARKILNQARQSVASATDPVSGEMIKTVIAEIIHKEKLIAICKKSLIENCSLPDVELLASIPGIGKFSSVGLIIEIGTWLRFASAAKMASFFGLHPILRQSGDKTWVARMSKQGSSEVRALLFMCAMVAIRHNPVIKDLYAYSLAKGKSKMSALGICMHKLMRIIYGVLKSGKAFDPAIDQANRTRKPEQRKSKKQETRRFQPVDENAPVSARQNKKRKEQNQSQGELVTICEIKAPALSHCAT

SEQ ID NO: 442182 - protein, 449 aa, unidentified
MSRPQVIDDQEHERVHERVAAVDVAKDTGMVCTRTPHPARPGARRATVWTVKARMGAVRALGRQLKRDGIEVVTLESTSDYWRIWFFVLEACGLAVQLVHAAQAKNLPGRPKTDKLDAMWLARLTELGLLRASFVPPKAIRDLRDYTRARTRLVQERTRCWQRLEKLLEAALVKVSSVASKLTTISAQDMIKAMIAGQRDPQVLAALARTRMKAKHDDLVQALDGMFDDHHGELAGLLLDQIAFLDHRIEVLGARAAELTAAMPAAWGVEPDGTTGPDAGATAGAPVLNAVARLAEIPGISENLARSVIAEVGLDMTRFPTAGHLVSWAGLCPSARQSGPRSRPGKKGQGDTWLRGALGQAATGASRTATFLGERYSRIVRRRGKAKAQVAVARSILVIIWHLLNNPEARFTDLGYGYYQARTDTDRKLRNHIRQIQALGFEVTVTKTT

SEQ ID NO: 442183 - protein, 459 aa, unidentified
MILRMGIDIAVRAPHQASLADERGELLWSGHRFRTTVADLDALWARLPKEFQAAEVTVVMEPTRNAWVPLAAWFRRQGARVVLVSAERSSDLRAYYAKHTKSDRLDSVLLARLPLLHPEGLHPQRGLGPGDPLRRATKMHSTLVKRRTTSIARLDALLEILGPDWHAAFSADLTNKTPLQFLAAGYADPHTVCRLGRARLTRFLYRHSRGAFGEIHAERILAAARASLDLWGEDICFPDLAEDIAVEARLALALTAEVKELDERIAVLVRDRDPHSIITSAPGVGAITGAVILGRLGDVSRFQSLSAVRAFSGLVPSLDASGVSGRHGSPTKRGDHLLREALFISANQARRLDPTLAAKYHRLMIDGKHHNSALCHIATTLLTRVAACWRAQTPYQIRDADGRPISAHEARAIISERYSVPTKIRQARTTTGTGRRSKESLSAPSTGPSNTHAKHTGAA

SEQ ID NO: 442184 - protein, 372 aa, unidentified
MEERSKIHVGLDVHKDSISVAVAEPGRTPGRLIGKVPHDVHKLLKVLAKVGTAEQLHIVYEAGPTGFGLQRALQAKGYSCEIIAPSQIPRRPGDRIKTDSRDSVQLAECSRAGQLSAVWIPDPDDEAIRDLSRAREDAVNSRTQARHQLKGFLLRHDVRYTGKTSWCGAYYRWLGTLNFGAGAAQTAFTEYWQAVTAADDRVDRLTKALQASITSWRFEPVVGALQALRGVAAITAIGLVAEIGDLERFAHPRKLMGYLGLVPSEHSSGERTSRGSITKTGNAHARRLLTEAAWNYRFKARICKQAQIRQQDLSEPIRRMAWTAQLRLTQRFAALNARGLQANKACIAVARELAGFVWAIGMQAQREKAEAT

SEQ ID NO: 442185 - protein, 393 aa, unidentified
MHNCLAIDVAKGKSMVTLVSSNGEVLIDPYEVNHSIIDFTNLLNRIKKLKLDNISVIMESTGIYHRPIERFLVENNFKVFVINPIYGKMKKRNLRKTKTDKEDCFNLVNLFISNTFKEYIKPDQLYLDLNALSRQYFALDELCVNIKNRYRNLVYLCFPEYENIFKDSLIYSNIALKFIEAFPHADIIFNTRINKLQNFFKKHKFRYWKSKAFKIKEISSSSYPSVNMNDEIVSNLSQIARLVNEYQKAIDIIKYKITFLAKKSKYFEPINSIYGIGEFTTSIIIAELGDINRFNNIKELTAYCGLDPSIKQSGKSINVHGPISKSGNKYMRKILYITCSNIIRLTAISKSENDIEIYYRKKRNEGKHHYASIVACTTKLLRKILALCKQLDN

SEQ ID NO: 442186 - protein, 391 aa, unidentified
MIYVGIDVAKDKHDCHVFDSDGVVHYDNFSFPNSKDGFEKFLALVTDLAKKQRDKLKVGLEDTGHYSSNLLEFLRANGLDVVRFNPLSVSRTRTSGTLRKTKNDKGDARYIAALLVAATTKYSNIPTQSIVALKSLTRARYRLVKEMQPLKNRFRRLLHLLFPEIQGFFTSHYGNTCLNLFAVLPSAQPIAACDIRKLTALLKSFSKGKLGRVKAEKLKDIAKNSIASHNTGSACELALMAERILFLEKQCGKLEDEITVIMNELNSPIITIPGIGIVLGATILAEIGDIHAFATPAKLLAFAGAEPSTYQSGKFTAAKTPMVKRGSRYLRNALFLATSSCFLHNALIRDYVKKKRAEGKHHYIAMSHGMKKITRIVFAILTKNIPYSDAV

SEQ ID NO: 442187 - protein, 370 aa, unidentified
MKKKVLYVGLDVHKKTTDVAIAPGRSNGKVRSYGKIDSTVDALNKLIKKLQVDDKELRFVYEAGPCGYQIYRHLDANGIDCSVVAPSMIPRRSGDRIKTDRRDALNLARLFRAGELTSIYVPTVEDEAIRDLIRCRDDIKRFERKARQRLLSFLLRHGYQYSGKRNWTKGFYNWLATVKFSHSAQQVTLHEYIEATNECSQRIKRITEQIQVHAEEWSRARFVKAYQALRGVSLIVSTTVAAQIGDMRRLPNPKQLMAYLGLIPSEHSSGKTVRRGPITKTGNSHVRRALIEAAWTYKMQARISTVLLKRQQGLPKSVCDISWKAQTRLCARYRRLMARGKTKQTVITAIARELSAFIWAIDQEMQVAHE

SEQ ID NO: 442188 - protein, 409 aa, unidentified
MEVLYERCCGLDVHKKSVVACLFISQPAGEPVKTIRTFGTMTADLLALADWLMEAGCTHVAMESTGVYWKPIWNLLEDAFTLLLVNPRDSKAVPGRKTDITDAEWITDLLRHGLLRSSYIPARPQRELRELTRYRTSLVRERTAEANRLQKTLEGSNIKLGAVATDILGASGREILQALVAGATDAAALAQLAKGRLREKLPELERALVGSFTAHQRFLVAEQLAHIDFIEAAIARVSVEIAERLRPRAEAVARLDTIPGVGPYLAEALIAEIGTDMSRFPSPAHLASWAGMCPGNHESAGKKRSGRTRKGSPWLRTLLVQAAHAGARKKDTYLGAQYRRLAARRGKSRAAVAVGHTILIIAYHLLRDGTDYYDLGSRYFDEHDRRAVERRLVHRLEGLGYRVSLEPAA

SEQ ID NO: 442189 - protein, 415 aa, unidentified
MEDLGLRALHRRVAGIDVHRMLHVVTVLIEQPDGSMQRQAREFGGFRRDCVALAAWLVELGVELVVMESTGIYWKSVYAHLENAGVRAWVVNAHSIKYVPGRKTDMADSEWLAVLARFGLVRASFIPPKDLRELRLISRYRRKVSGMCASEVNRLHKVLDDGGIKLGGVVSDINGVSARAMVSGLIEGKPVEQLLALAHGNMKSKREDLLASLQGDLSARHLFVLGHIHAHIETLHSELAQIDRYLLDAMQPYAWAHGLLQTIPGIDRIGAALILIEIGDDMGRFGCAERLASWAGLCPGNNESAGKRKSGRTGHGNSTIRFILCECANAARMTKSTLASKYRSLMVRKSHKKTIVAIAHKMLRLIFLILSRRQPYLDQHIDYAAMSAKKNAPRWIKQLKIIGRWPEPKPAAAGT

SEQ ID NO: 442190 - protein, 386 aa, unidentified
MVIIGIDPHKSTHTATAVEPHTNRVVATISIKADLGEYRRMRRWALQFDDRRWAVENAEGLGRHLSSWLLARGEQVVDVPSTATARVRQLSRGGGRKNDQIDAAAAACVAALQGEGRALRAEDTTDVLALLDESRMNLAQSRVRLVNQLHALLRDLIAGGAPKDLSATTAATMLRRVRPAGDSERVRKQIATGLVTQIRSLDALLKANAQQVREHVTASGSTLTDTVGIGAITAGRLIGRTGRVGRFPSPAAFANYAGAAPIEIASADKARHRLSRTGDRQLNAALHTVAITQIRTPTSRGHAYYNAKLAEGKTPREARRCLKRRLADHIWRTMTADEHRLAASPGGHSGATTHSSATGLTPTASSSDKSLPEPTNRDYTTPRPAA

SEQ ID NO: 442191 - protein, 361 aa, unidentified
MHDSITWVGMDVHKENIVVAAINGAGETTARWETPNTAKGKERLAKRLAEWGNVRCVYEAGPCGYDLRRFLEEKKICCDVIAPSLIPKKPGDRVKTDRRDAEKLARMHRMGELTTVHVPTPAQEALRDLVRAREDANEDLVRHRHRLQKFLLRQGRRFEGKSWTRDHWRWLRSQKFPEGNAEAVICEYILGVDQELERIGRLDEQIEEESKNPEIAPAIARLKALRGIQTLTAMTILSELIDLNRFPSPRQLMAFVGLIPGEHSSGGKQRRGSITKSGNSHVRRVLVESAWHYRHSPRCTGEAIKKRREGQPPEVIETARKAELRLYKKFTRMVMRGKRTTVAATAVARELAGFVWAIGRI

SEQ ID NO: 442192 - protein, 361 aa, unidentified
MELHVGLDVALESTSVCIVDATGGKVLETTAASEPEALCLAIRPHVAAIERIGIEASATGMWLARELKAEGLPVTVVEARHMRSALSAMRNKTDRNDAHGIAQMMRMGWFRAVHVKPAETQRLKTFLANRRLLKRKLIDLQNHIRGALRVHGLKVGTVAAGRFDARVRELIEDQDDYLFRTMIESMLEVRGVLYDNFRKLHRMLLLIVKHDAVCRRLMTVPGVGPVAALSFRVTIDDPHRFARSRTVGAHLGLTPRRYQSGSSIDWGGRISRMGDIDARAALCEAAASLLLRVRRYCALKAGGMRIARRSGMMCAIVAVARKLATILHRMCLDETEFSWKSGAKVTEKRPRDPATGRLLPC

SEQ ID NO: 442193 - protein, 304 aa, unidentified
MFGIGIDVSGENLDVAVHEQAFRQFKNNKRGWASLIRWLQRWPAKQVVLEASGGYEQKALDALHEAGLPMVRINPGRGRSFASATGKQAKTDRIDAMVLAHMADVLKLTRYVPPAAWQRRLGELCQRRRHLVQMRVSEHQRMRAFSEPGLISMLNQHLREIQKTIKQLDTTIAALLAEQEGWRDFAKLKGAGPVLMATLACELPELGRLSGKAIAALVGVAPMNRESGNWKGRRSITGGRAVVREALYMAALTAKRYEPRLKEFFESLVNQGKPGKVALVAVMRKMLVILNARKRDAEAQMASA

SEQ ID NO: 442194 - protein, 364 aa, unidentified
MTRLHYVGIDVHKETMDVLVYREGEQHVFLERTIPNRDKTVKKLFGKLLEEGSVIACYEAGCMGFVLQRLLEGMGVSSIVVAPGKVPKRSGDRVKTDRRDARDLAQQLRAQTLEAIHIPSGEDEAVRDYLRAREDVRIELKKTKQRIHRFLLRHGYVYESSRYWTLQHDRWLRGLEFERLMLKESFDEYYFMMKELTERLRGMDKRIEEIARSEVYAERVQRLRCLKGIEYLTALWIVCEVGDFRRFRNAEAFMGYLGLVPREFSSGERRRQGGITKTGNTHLRNLLIESSWHYRYKSAPSKRLTARREGQPAEIIGYADKAMRRLQGKFIHLILKGKTPQAAVTAVARELAGFVWGMMVGQTA

SEQ ID NO: 442195 - protein, 399 aa, unidentified
MDDDTFWVGLDLGLTRTSVCIMNGQGFPLNEFECDSEVATLTEALAAVAIDRIGGIAVEAGTGTYIVRKLRGAGFPVVVFEARKAHKFLALRRNKSDASDARGLADLVRIGQNSVSQVHLKTDECQRLRSFLVVRQRFVLMKLAVEGVLRCNFALHGRRLESSHTRKALLRRTETIFASLRSEEGIDLEPELAPLVMVCDSVRAYLEKSDRDLQAIASSHPVCRLLMEVPGVGPICALSFYSAIGDPNRFRVASHVGAYLGLVPRRYQSGAVSRTLGITKNGNRLTRSHLVMAAAVFARRAPDCPLKDWYLALRGRAGPKRARIALARKLAVILLAMWKQGTHFELDRTGPSGVLSERGPTETVPVAPVGGDWRSQSGTEKVTSRSHLRQGSGDNTPGA

SEQ ID NO: 442196 - protein, 384 aa, unidentified
MAEQIFKYSVGCDISKDTFNVCILEVSQEQSKVKASHKFKNETKGFKEFDAWVKKHKRHDVPTGFYMEATGVYYENLAWYLFEQEYNVFVLLPYKTKHYLKSIGIKSKNDKIDAQGLAQMGAEQKHNPWRPHSKSIYVLRALTRQHESVTKLKTSLQNQLHANEHSAVRNATVKKQLNATIRLLEKQLEELAGEISKLIDADEKLNEKYSHIDQLRGISKLSWATVIAETSGFETFENQRQLVSYAGYDVVENQSGKHVGKTKISKKGNSRIRRILYMPSLVSVRLKEPALFNLYQRVHERTGIKMKGYVAVQKKLLVLIYHIWKNDKAFQSDYSKTFGEEKSKLLFPFGFGETIKESSPDKRATQDEHSYELSSKVLFPLAQI

SEQ ID NO: 442197 - protein, 374 aa, unidentified
MTMMHHRDIRYLGLDVHKATISVAIAEQSGAPTTYGRIPNDPAAIRTLMTRLGGPQVELHVAYEAGPTGYTLHRQLTHMGISCIVAAPSLIPKQPGNKVKTDRRDALKLARLLRSGDLTPVWVPDEAHEALRSLVRARADAKADQLRAKHRLSKFLLRQGCWPPSGVRNWSQRYFTWLHQLEFEHLPDRIVFADYLAEVTAAGERINRLEAALHRCAQNSSQVALIRGLQAFRGIGFLSAVTLVAEAGDLRRFRTAPQFMSYAGIVPSESSSAGKQQRGSITKTGNSLLRHVLGEAAHHARLAPRVTSKVKQRQADVSPELVALAWRAQVRLHARYRHLSGRIGALKALTAIARELAGFIWAAGQLPQEGPAAA

SEQ ID NO: 442198 - protein, 322 aa, unidentified
MVAVMIGVDPHKASHTAVAIGLAEEPLGELRVRACAAQAEQLLAWAAGWPQRAWAVEGAGGVGHLLGQQLLAAGERVLDVPPKLAARVRLLQAGNTGKNDPNDAFSVAVAALRSPGCLQARRDDHAAVLKIWSKRHKDLGRTRTQAACGLHQVLCELIPGGVPGQITAGQAARILGSITPADAVAAARCQLAADFTEDLRGMDAAIRDTRKTLATAVAAARTSLTGLFGVGPVIAVAVLGDVRAVSRFPNRDHFAAYNGTAPSRCPPAAAKSGGCPGAATGGSTTPSTWPRSPRSATGTARAAPTTTRNWPRARPAKRRCAA

SEQ ID NO: 442199 - protein, 392 aa, unidentified
MRFAGIDIASETHVVAVVGADSEMQIKPTPFTEDATGYQKLFAVLGAPGDVLVAMEATGHYWKNLFAVLATAGFAVALLNPLRTHRFAGEDLERTKTDAIDALGIARFAAQKHPPPTPLPDAATEELRELVRLRERLLQDFGDRLRQLHRLVDLGFPEFTRYVHSLDSELASAILHDYPTAAAFHRAAVNRLAGLRYDGRHRVGPELARTLIDAAQRSVGQHHGPAYRVQVRYLCEDLDLLRRRLRELDADIDGKLREHEVGSLLTTIDGIGTTTAARLIAELGDPAHFRTPGALAAYVGVIPGLKQSGKQKHARAGLTPLGNARLRAALWMPTLTAVRKNPWLRAYYEQLRARGKLPKVALVACMHKLLFAVYSVAKHRQPFVPTIPQAHV

SEQ ID NO: 442200 - protein, 313 aa, unidentified
MAKLTSKITLGIDVAKDALVIYDWSTAELITLVNDKVSVKRWLKSLHGPIQIAIEPTSHYHLEVVEEALALGHETYLIGPRQLAHYREAVNVRNKTDPQDAWLLARYLVHEVDELRPYRPQCRQAQQLWTLLKRRAVVVNARQKLQQSFAEVQLSIRALQTQMQRLLQRIDLQICKLIQALGWSRHYQLCQSIPGIGPLNAAALVAAYHRGAFANSDTFVAFMGLDVRIRESGKYRGKRKLTKRGEAELRRLLYCAAQPARSYHYFETYYQRQLNKGLSKIAAKVTLARKLARIAFTLMQNQTMFIKQPEITG

SEQ ID NO: 442201 - protein, 384 aa, unidentified
MEAKRNEVDPLEPGRHRCARVEMCSNHSRDRGSTMNVTTYGLDVAKRVFQVHWVEPETGEVKRKRLARTEVSAFFARRESGVVAMEACGSAHHWGRRLQGLGHEVKLIAAQFVRPFVKTNKTDAADAEAIWEACQRPRMRFVAVKSAEQQAVLSLHRIRQQLVKIRTMQAHQVRGLLYEFGVVVPQGWRVLLAQAGPILADATRCPAPELVRRELLRQLDGLRTSTTRIAELERQIGGWQRRESECQRLAAIPGVGRLTASAVVATVADARTFRSGREFAAFLGLVPRQAGTGGRVKLLGISKRGDPYLRTLLIHGARAVLRSQSRADRTLDPWLKGLLARRPKNVASVALANKMARTIWALLAHGRAFDRSWSRAARPIPALH

SEQ ID NO: 442202 - protein, 336 aa, unidentified
MFQLGIDVSKKTLGLCLLREGVKGRVKTRKLQNDINAVSAVIAWLSKQHCKPEDVHIIMEATGVYHESLAYGLHKAGGRISLANPHRAREFAQGMGMLTKNDRVDAYMLACYGVLKAPEPWLPPPEEVRHLSALLRRRDALVADSTREKNRLEKYLATDTPSVIAESVEAMIGQLNAEIKRLDSLIRSHLNQHPELKKDFDLLTSIKSVGYQLCLNMLVILRSHDFATAEQAAAFLGVVPVEKYSGTSVRGCPKLSKIGPPEIRAKLYLASLCGLRFNPLMKAMYERLCLRGKAKMCAIGALMRKLVHWCYGVLKTQKPFDVGYLSSYARSACKAA

SEQ ID NO: 442203 - protein, 370 aa, unidentified
MSNQLFVGMDLHKSTSTFCVKTKEGEVVREAKILTDRSQVTEFIRSLKAEVSIVLEPVSQWYVYADLLQSLDCDVHLAHPMKVKAIASARIKTDEIDASVLCDLLRGNLLPEAYFSSKEVRSWKEVVRHRASVLNLRRQTKNKVHAILHKQALEHPYSNLFGVSGTRWLKHLTLPEPFATNLTDLLDCVAYLDQKVKMAEKRVEILVEHHPQAELLTTIPGISYVSALTIISEIGDIHRFPSAKKLCGYAGIVPSTYSSGGKTAHGRITKTGSKWLRYVMIEVAQHQQLCKKTPGFGSYYLKMKKRKGTNPATVATARKLLAVIWRMLTDNRPFSVTPPDRHFGKSSPITATTSRTLATKLSSPVEVLST

SEQ ID NO: 442204 - protein, 416 aa, unidentified
MLFIGDDWAEDHHDLEIEDEDGRRLARVRLPEGLEGVTRLHALVAQHAPLSCAELPPEQVAAQVVVGIETDRGPWVTALRAAGYQVFAINPLSAARYRQRHSTSGAKSDAGDAHVLAEIVRLDRDHHRPVAGDSDLADAIKLLARAHQTAVWERTRQVLRLRSALLQYFPAAVQAFEDLAAPDALSVMGRAPNPDQAAKLTRGQLVAALRAARRHHVEAKAEALLAVLRAPALRQPVTLQKAYSAVVLGQVGIITALNKQIAGLNEVMAEHFGRHPDAEIYLSQPGFAVVLAARTLGEFGDDTDRFANARARKNYSGQSPITRASGKKSVVLARYATNRRLGAALHLQAFAALGASPGARAYYDALRGRNIGHHAALRQLASRLVGILHGCLKTGTLYNENVAWQHHRTDTQHAAA

SEQ ID NO: 442205 - protein, 457 aa, unidentified
MKRKSKRTKGLEEAHPFSSLSRVNLHAAGVDIGAVEIVVCVAGDENTQIVKAFGNYTVDLQAIGGWLKEHRVKTVAMESTGVYWIPLFEELERQGFECLLISSRSMRRVAGRKSDISDAQWIQTLHSYGLLEGSFRPQGELVALRTLLRHRSQLVEHRSPHVQHMQKALLQMNVQLSQAVTDIMGVTGQTIIRSIVAGVRDPQTLASMREPGCKKSEEEIGKALTGTWREEHVFILQQSLAMYDFYTQQIQACDEEIERLYGLTRPDWEAGEVQALSGRKRNSHSKNLPHNPEAIRKHLKRISGVDLSVVDGFGVSLAQTVIMEVGTDMHKFPDEKHFCSWLGLAPKHEISGGKVLKNSTLKTKNRAGQAFRMAAQSVKQADCVFGVLYRRLRARLGPAQATVATAHALARVVYRMLKFQVEYEPLSVNEYQRRYEEQQIKYMRKKAAKFGFQLVPA

SEQ ID NO: 442206 - protein, 356 aa, unidentified
MAKGITTEHGITIGMDVSDRFTEAYAMDGQGEWVESWRMPTKQEALRSGLSRYPGARVVLEVGCHSPWISRQLQEEGFEVIVANPRRVRLIAESDKKNDRSDAEQLARLGRLDPELLSPIVHRGEQTQRDRVLVLARDGLVRARTQLINQVRGFAKSLGSRLPSSSSESFPKHVRGAVSDDLFPGLGTMLAMIEQLTAEIRSMDREIERLGRERYQETDGLRQVSGVGPLTALTFVLTLEDPRRFAKSRDVGAYLGLRPRQRDSGGQRPQLRITKAGDALLRRLLVTSAQYVLGPFGPDTDLRRFGLRLCERGGKSAKKRAAVAVARKLAVLLHRLWITGEEYQAVGYRAAGKRAA

SEQ ID NO: 442207 - protein, 345 aa, unidentified
MEVSTIGLDLAKNVFQVHGVDKEGTVVARKTLRRAQMLPFFAKLSPCLVGIEACGTSHHWARELQNLGHEVRLMPPAYVNPYVKRGKNDANDAEAICEAVTRPTMRFVAIKSREQQAALSLHRVRNLLIGQRTQLVNMMRSQLAEFGIAIPVGLDRALQMARQIVDGEASVDLPPQAAHVIAMLCGLALDLHAQLRQLDLRLDALQRSDEVARRLATIPGIGPIGATALAASVADPHQFSSGRQFAAWLGLTPRQKSSGGKERLGRITKMGDKYLRQLLVIGATSMIRRAKTKPEAVDPRIVALLARKSTRVASVAMANKMARIAWAVMTRGEIYQAAHAPVLAA

SEQ ID NO: 442208 - protein, 333 aa, unidentified
MYRWEAVYGDSHGLASILGRRFCNLVGLNAAGETVIRKKCSRKQLLHFTANLRVRLIGMEACCGSHFLGRALRGQGHDVRRMPAQYVKPYVKTNKNDYIDAEAIAEAVGRPKVRFVPIKSDDQLNMQPLHRVRESWVGRRTSVINPIRGLLLERGITIRKGRRHAEEALPQILEDPNANLSGPLRMLRAQLQQELRQLQSQIDEVDVVIMKAASEHEASQRLMSIPGIGPVIATAIVSAIGNGTEFRRGRGFSAWLGLVPKQYSTGGTQKLLGISKRGNGYLRRLLVNGPRAVFQCREKQSSGLRACRTRAQRISIEVRSPRLHEDRIHSRRP

SEQ ID NO: 442209 - protein, 375 aa, unidentified
MKSITKFVGLDVSRDKIAVAVAERGVGAARYLGVYPNTLEAVRKLLNRLGRPEELHVCYEAGVTGYGLARFLRGLKIECMVVAPSKIPLVPGPRVKTDRKDAVMLAERLRTADLVSVWVPDEADEALRDLVRARKARMEDLKRAKQRVNMLLLRHGITKPEKTTPWSERYRAWLRGLELPQKNSQAVLQEYIIAVEEVEQGVRRLELLIKDTAANSPHAPVIQALQALRGVQVIAAATIVAEVGDFTRFAHPEQLMAYAGMTPRESSSGDRVSRGAIMKTGSAELRWICNQIAHSYRYSPKVAGDLARRLEGLSPEIQAIAWKAQIRLHKKLVRLMAKGKCRQVAVTAVAREFLGFAWAIGQKVCFETALGKRSA

SEQ ID NO: 442210 - protein, 435 aa, unidentified
MQAAIERCAGIDVGKKWLAVCIMVGALEAEPRTETRKFGTNVADLEQLREWFKEERITHAVMESTGSYWKPVFNILEETLTVYLANPHQVKPRKGHKTDNKDGHWLAHLLRHAMIQPSFIPPRPMRELRDLTRRRKKLVGAGASEKNRIQKVLEDANVKLGNVLSDVFGVSGQLMLDALLEGKAAAEEIAQMAKRRARKRIPELVAALEKHRMSDHHRRMIRFSLEHMELLEKQIVRLDQDIEAKIRDSGLVQQWELLQTIPGMQAGSSATILAETGTNMGQFGDEGNISSWAGVCPGNNRSAGKNKSSHTNKGNPWLRSALTECAQGAAKKKDCFLKDKFWRITTKHGGKRAPAVIAVAHDLLRFVFQVLSTGKPYQAKSMTPLEPQQRERMICHHLRRLGKLGVAVGQRQPRPLRPRRRTAANKGAASPAAST

SEQ ID NO: 442211 - protein, 482 aa, unidentified
MKPKPKEKTQNATGDPTQPHWHEMNRKQRLETMRKIQSEDLSLEMVHPDAAGIDIGNESHYVAVPPTRDSQPVQRFGCTTAELKAMAEWLKQCRIRTIAMQSTGVYWIAVYDILEGAGFEVYLVNARQTKNLPGRKSDVQESQWLMKLHTYGLLRNSFRPSQEIRRLRTYWRQRNDLVRSAGRHIQRMQKALTQMNIQLANVLSDVSGMTGQAIIQAILAGERDPHKLAVFRDPRVKASEEQIARSLEGNWEEDLLFVLKQEQDGYEFCQKQMAECDRRLEQYLQQREDRSQGACLPVEKRKERLKKKKGNAPQFGLRANLFRMTGTDLTQIDGIDVMTATTILSEAGWDMSKWKTEDHFVSWLRLCPDNRISGNKIIGKGRLPTNNRITVALKMAASTLRLSNTYVGAQFRRLRTKLGAPVAIKAMAAKLARLVYRMLRYGMKYVDQGAEFYEAQHRKRQISHLKWKAAKLGFQIIDAPAA

SEQ ID NO: 442212 - protein, 339 aa, unidentified
MKVTTFGLDIAKRFFQLHWVDMETGEVHRRQLKREQMAEFFATCEPGVVAMEACGSAHYWARKLVSLGHEVRLVAAKFVRPFVKTNKTDAADARAIWEAAQRPEMKFVAVKSEEQQSMLTLHRLREQLVKFRTMQTNQLRGLLYEFGVCLPAGRAKGMPAAIEALGQLEDTLPAMVIDALRQQMARIQALNEDIADIEKKLTRWKKQERLAANLMEIPGVGILSATAAVATMGDAGAFRNGREFAAFIGLVPRQSGTGGKVRMLGIRKRGNTYLRTLLIHGARARINLQKERDPWVDRLLARRPFNTVVVALANKMARTIWAMMAHNRAYQKNYATSIA

SEQ ID NO: 442213 - protein, 307 aa, unidentified
MFAGIDVSKSKLDVHLRPSGESFAVARDGEGLAALVEKLSGLTPSLIVLEATGGFETIVASALAAAQLPLAVVNPRQVRDFARAAGRLAKTDAIDAAIIARFAEVMQPEPRPLADEQAQLLGELVARRRQLIDMMTAERNRRRQLSSPRLVKALDHHLALLQQQLSELETDIGDAIRSTPAWREKDDLLRSVPGIGPKIALTLIAELPELGTLDRRKIASLAGVAPFNRDSGAFRGRRMIAGGRPAVRAALFMSVLVAIRRKLPLAQHYQHLRAAGKPAKVAIVACMRKLLTTLNAIIRDQKSWQNA

SEQ ID NO: 442214 - protein, 343 aa, unidentified
MLYLGLDVHSKWTTIKGFDPESGEIVELDRISNEKEAMSAALSRLPGPLYGVMETGTNSWAMYHELKPFFAQLTIVNPAQLWDRQRDRSAKTDRRDAWRMAQKLYRGEIKGIYVPDHHTQDLRVLVRGKVRATRWGTKLVNEIGSLLRSWGYVGSKSLLSKQGKGELEAAQLPGHSGRVLQLWRELLEKAQEIEQELEAAIKQEAKADPVCAQLQTMPSVGPFTALAVRAEIGDIQRFPSSAALISYAGLAPRVFQSGEHCTYGRVGHGGNSWLRYALVLLANRMAYHGKGSRLHQLYWRIQLRHHSNGAKIAVARKAAHLIYHMLRSGQPWQEPVPKERVRA

SEQ ID NO: 442215 - protein, 428 aa, unidentified
MNYNQNQKIAQITSQTLIVGVDIAKSKHVARAQDFRGMEFGKPLYFENTKPGFDGFSSWIQQLITTHDMDQAIVGMEPTGHYWLNLAHFLKEQDVKFVVVNPMHVKKSKELDDNSPTKNDVKDARVIAQLVKDGRYAEPKIPQGVYAELRAARKIRDLLSVDLQSVQGQIHNWLDRYFPEFLTVFKDWEGKAALQLLRLSLLPSELVKISDEEILAHLKKAVKRAVGLGKVRELKRVAGLSIGIREGSELAKLEIRILLDKYDLIKQKFEELEPRIDALLEQIPGVHQMLAIKGIGKDTVAGFLAEVGDLNDYSHPRQIIKLAGLSLKENTSGKHKGQTKITKRGRKTLRALLFRVVMPLVAKNSAFKALHAYYTKRPNHPLKKMQSLIALCNKLIRVLFTIGKKQCEFSEERMLQDIPHMAVMLKVA

SEQ ID NO: 442216 - protein, 406 aa, unidentified
MQVVHERCCGMDVHKKTVVACVRGDQGQETRTFGTVTRELLRLWEWLDQEQVSAVAMESTGVYWKPVYNVLESLAAEVMVVNAQHVKAVPGRKTDVKDAEWLADLLRHGLLRASFIPARPERELRELARYRRTLIDERSDVVRRIQALLEGANIKLGDVASDVMGVSGRAMLWALANGQSDPQELSKLAKASLRGKRAELILALEGSMGDHQRSMLRRQLQQVEFLEGQIEELSQEIEERMRPFQVAIQWIDDIRGLGQRSAEAIVAEIGVDMTRFPSDKHICSWAKICPGNHQSAGKRRTGATGKGNGWLQTALVEAAWSASRQKGTYYHALYHRLAARRGPKRAIVAVAHALLTAIYHMLRDGVVHQDLGADYFERLDRDAAARRHIRRLEKLGYQVSLQPIAS

SEQ ID NO: 442217 - protein, 356 aa, unidentified
MAEGTWVGLDVHARKVVAGVLDARSGEVRSLRAPALAAETVEWLRQFAAPIRVGYEAGPTGYGLARACAAAGIACTVAAPSKIPRAPGDKVKTDRRDAERLARLLRLGELVAVRVPDSHEEAARDLVRAREDTRGELMRARHRLSKLLLRHGLVYDASAWTLAHDAWLRRQSFASRPLALAFDESYAAILQAKTRRDALDRAIAELAGEPPFAETVGRLCCLRGVSTLTALGLTVELGDWTRFRPQSLGPFLGLTPSEDSSGERRRLGAITKTGNTHARRLLVEAAWHQRRPLRASAALERRRQGQAAAVRARADASARRLHARWQALEGRGKRRTIVAVAVARELAGHCWALATM

SEQ ID NO: 442218 - protein, 426 aa, unidentified
MSEVEWVKPEPQYAAFIAIDWADKKHVWCLQGMGSEKRESGELEHTPEAVEAWVVQQCQRFGTGPIAVAVEQSRGALVFMLSKYEAMHLFPVPPTMAAKMREALYPSGVKDDPRDADLLLDVLLKHREKLRRLLPDTEATRRVQNLVEERRKLVDERTEQSNRLTSHLKIYFPQILNWFEHLDTELVCALLLRWPTLEELQRVPPAQLRTFLRKHHCRNQELNERRIQEIRQAIPAIRDRALIEAKSTVVKVTVRMMRSLLEGIAALDEKIEEAAAAHPDFFIFDSLPGAGAVMAPRLLAAFGSQRERYGSAGEVQTYSGIAPVIERSGKKKWVHFRRACPKFLRQSFHEWAGHSIAQSVWARSYYQQLRSRGKGHHAAVRALAFKWIRILFRCWKDRVAYDEVKYLVALGRRGSPLAAVDVAISG

SEQ ID NO: 442219 - protein, 426 aa, unidentified
MDVVFLRCAGLDVHKKSITACRIVPDPTGQETEGIAELRTFGTMTLELLALADWLTEASITHVAMESTGEYWTPVYNLLEGTFTVFLVNAAHVKNVPGRKTDKADARWLAKLMRFGLLQASFIPPQGQRDVRDLTRYRTKLVQERVREVNRLQGGLERANIKLASVASDIMGVSGRAMLAALIAGKADPATMADLAKRRMRAKLPLLEQALTGVVRDHHRQLLAMQLAHIDFLDEQIAALNTTIATALRALSADASLSPQPLPRATASSALPLTGSTPLTFTRAVELLDTIPGVDQRGAEVIVTEIGIDMSRFETAPRLAAWAGVAPGNDESAGKQRSGKTRKGNRSLRAILTQLAHAAVRTKGTYLSALYQRLAARRGKQRAIIAVAHSMMRSVFHMLSRNESYRELGANYRCPENDLEIQGWRP

SEQ ID NO: 442220 - protein, 349 aa, unidentified
MRILAIDMGWFNSVSCLLDTERRKASYRRMKTSSEVFGSLIIEKAPDCVVIEAGPMAGWVRDLCEGLKMKLLVLNANDERWCWRNVKKKTDRKDALKLAKIVTYEEDVVEVHVPESAVRQWRQLLVYREKLMSGMVSIKNRLRAILLQTERYLPAGAKAWEGQEYEQLQGLARDLKDCPEDELWRGLVDLEVKRLAELQKHLDEVDRRLDEIARKKEPVRRLMEVPGVGIRTAAVVVSLIDHAERFGRGREVACYAGMTPRKFQSGTMDRDGRISRAGNGLLRKYLVQAAWSGKRSEPRMEAIYQRVRRKSSKRNKQAIVAVAKHLLMWTWAMLRDGTHWRGTLTAQAA

SEQ ID NO: 442221 - protein, 460 aa, unidentified
MAKKGDPRKKKSKAETGVPVIRPNVAGVDIGSTEHWVCGPASADGPGKVRVFRTTTPELKALANWLKRQGVESVAMESTYVYWIPLYELLESHGFEVVLVNARQLHNVPGRKTDMNDCQWIQTLHSCGLLRGSFRPGESICALRAVQRQLGNLVAQRSRSIQWMQKALDQMNVQVHRAVTDISGKTGMAIVRAIVDGERDPQRLAALRDKRCRKSEAKIAEHLTGNWRDEHLFNLASALRLFDMLEAEITTYEGRLTQELERLQPEDRRDAPAPAHPNPAKEKAIARRGDSDVRTALWRFAGCDLTRIDGISAGSAKIVLHEVGLDLSAFPTEKHFVSWLRLCPRVPISGGKPIRKRKNSLGANRIAGVLRMAALSLQRSKSALGAFFRRTARHKGGAVAVFATARKLAVLIYRMLRYGHDYTDLGEEAYEARFQQRRIAALRENAKSLGFMVVPASTAG

SEQ ID NO: 442222 - protein, 341 aa, unidentified
MEDITLIGIDLGKHSFHVHGQDRQGKALLRKKFSRKQLIEFLAKFHVCTVVMEACPGAHHMARQLAGFGHEVKLISPQFVRPFVKSNKNDFVDAEAICEAAGRPSMRFVTPKNEAQQTLSALHRLRESLVRDRIKSSNQIHAFLLEFGISLPIGHAAVRRLPAILAEHSLPPRLVQVLQRLHAHFKYLDEQIAEVEKDLAAQLADDDLGQRLMTVPGIGPITASMLASEVGDGKQYRCGRDFAASLGLVPRQYSTGGRSNLLGISKRGDKNLRRLLVLGARSYMQRLERQTGPLACWVRAMLVRRHSNVVACALANKLARIVWAIAAHHTSFEMKEAPMHA

SEQ ID NO: 442223 - protein, 349 aa, unidentified
MTEQRLSYIGERVYVGVDVHKETYTVTCVCQRQIVKTATVQADPASFAVSLLRWFPGATLYSAYEAGFSAFVLHRALTKTGITNIVVNPASIAVAANDKVKTDRRDAKKLAIDLADGRLRGIYVPTETEELARLLPRTRAQIVEHRATIARQIKAKLHQFGLITPASRRLISSRYLREIAAWSLPPELNVSLTLLAEQWRFATRQLIEMRRLLRDQAKAQEEIEKVYRSVPGIGEVVARTLATELGDMTRFANERGLFCYTGLTPSEYSSGASVRRGHISRQGSSRVRHLLVETAWRALPRDRVLKEIFDRIAATRVKKRAIVAIARRLTGRIRACFRQGTTYAIGTYA

SEQ ID NO: 442224 - protein, 316 aa, unidentified
MKTQVFVGLDVSKQKLDVAVRPQNRHFVTPNDDRGIKQLVKRLMVLKPQLIVLEASGGYEFLVTAALAEAQLPVALVNPQAVRKFAGAAGKLAKTDKIDAQVLAHFAEAIKPEPRPWPDQEHQVLKAALQRRLQVVKMIGQEENRLEKTYIPAVRRDIQEHLTWLRRRLDELNRDLDGQIRRSPLWQERDRLLQSCIGIGPVVSLAIIAQMPEMGRLPGKQASALAGVAPYNRDSGRLRGKRMIRGGRSYLRRMLYMAAVVASRFNPVIRAFYQRLLAAGKPKKLALTACMRKLVLILNAMLKNNQPWNQFITQAP

SEQ ID NO: 442225 - protein, 351 aa, unidentified
MKNHKYVALDVHKASVTMGVRDGAGKCVGHAVVQTKAETIKELIAGLSGTIHVTFEEGTQSAWLYDLLKGRVAECVVCDPRRNKLLESGSKSDHIDVDKLSELLYLGGLRSVYHGDHGTRALKELVHNYESLVKDQTRVKNRLKAIFRGRAISYQGAELYQLKERQQWVSKLNERGVRQRTEQLYEQLAALEPLVVAARQKMLRESRQQKASKNLQYISTLGEISVAELIGTVDTPYRFRSKRQFWTYCGLAVVRHTSSDYRFEQGELQRRRKSGPTRGLNQNYNRRLKKIFKTAALTGSHTGPFKPYYERLVQRGLSPELAQVTLARKIAAVTLNLWKKGERFDPKKLQS

SEQ ID NO: 442226 - protein, 347 aa, unidentified
MRFYTGQHRYYCGIDLHARTMYLCILEHETGKVLLHRNLRCEPERFLQAIEPYRTDLLVGAECIFCWYWLADLCAQHDIPFVLGHALYMKAIHGGKAKNDKIDAHKIAVLLRGGAFPTAYVYPRGMRATRDLLRRRLFFVRRRGELFTHIRIVFHQLNLPAPGGALLYPGNRAGLADAIPDPVVRASVEADLAMAARLDEIIRSLERTIRQRAKIDDPETYQRLQTIPGVGRILALTLLYELHDVARFPRVQDFLSYARLVKSQKSSAGKVMGTSGAKIGNAHLKWAYSEAAVLFLQRNPRGQRLINRLRSKHGRGKALSILAARLGRASYYMLRRDTAFDMDRFMN

SEQ ID NO: 442227 - protein, 348 aa, unidentified
MKYYAGLDVSVKETSVCIVDESGKLCRERKVPSHPEDLVAILSDPAFSLERVGVEAGPLSQWLFEGLAKAGLPVFCIETRHTKAFLDALQQNKSDRNDARGIAHMMRVGLFKDVHVKTLTSQKRRALLTARSLLQEKAIDLENEMRGLLRNFGLKVGHASGGTFERRILELVEHDTELAEIMEPLLAGRRKLREGLAKLEKRVLAEAKQDEVCRRLMTVPGVGPIVSLAYVSTIDIPNRFRHSRSVGAILGLTPVLKQSGEVSRVGHVSLRGDAMMRRLLYEAAQSMMTRVAKWCWLKAWAMKIAKRHGSKKAKVALARRLAVVMHRMWVEGSEFRWTREDTVSTIAA

SEQ ID NO: 442228 - protein, 413 aa, unidentified
MSASDSLASPVEVSDFAYVVGVDIGSQQAVYCVCQPDKSQVVKPTEVANSRAGEDALDHRLRQLAVPPQRMLIGLEATGRYSENLYQFLQEQGYRLCLLHPRQTHQFAQQRGLRAKTDRLDATTIARLLLSGEARPGYVPDELISTYRELERLHSQLTDDSARYQNEIQALLVVLFPEFVQVFADPCRPTALGVLKRYPGAQAILDAGVEALTSTLRELAPRHYGRPTAQELVRLASQSVATPLASSGRALSLKVLCDQLEHTLTNLAQIAHELDQLLDRDHGASGLKSTPEFGRKTVAVLRAELGDVTRFQRVDQVVAYVGLDLQVRQSGKWKGQVKLSKRGSGRVRRVLYAQDADCRLSFVALQRNLRPDEGVCGGGPATAHTFVGLLTNSMASTDHSACCLSPWLLHPFG

SEQ ID NO: 442229 - protein, 411 aa, unidentified
MKLFVGLDVSSFDIKVCFLNGEGDEISAFTVSNDLPGATYLRDEILKVTHNHPVDVLRIGLESTSVYSFHPSMYLHNDQSIRDLGGKVFVMNPKQIANFKKSYSDMDKTDEIDAFVIADYLRFGRLPMSVVKEEQYVALQQLTRARYQIVRQLTKEKQRFLQYLSYKCNTFTEEVESSVFGKAMLDLFLENYSLDELAQMPLEDLATYLQSKGKNRFPDPEYVAKSIQKAVRSSYRLDKVVEDSIDTILGTSITMIRAFESQIKELDKSIERILKAIPQTIQTVPGMGPVFTAGIIAEIGQIERFSSEEKIAKYAGLYWRKHQSGRFTADDTSLSRNGNQYLRYYLVEAANSVRRHVPEYRDYYTKKYHEVPKHQHKRALVLTARKFVRLVDALLRKNQIYTPKRSVIDEG

SEQ ID NO: 442230 - protein, 450 aa, unidentified
MHKSSEFKQINFNAAGIDIGAEVHYVAVPEGRDPEGQDVRSFGTFTSDLYAIADWLKQSQIDTVAMESTGVYWIPLFEILESKGFDVKLVNPSFIKNVPGRKTDVVDCQWIRQLHSYGLLKGSFRPEEQICVLRSYLRQRALLVSYASHHIQHIQKALEQMNIKLNQVIRDITGQTGMNIIRAILAGERNPKKLAQLRNSRCKNDAKTIAKALHGNWRQEHLFSLQQAVELFDFYQNQIAVCDLKIEEHLSDFEDRSNGQALGKSRKKSGRNKLAFDARTHLFQMTGVDLTKVDGLDSLTALKVISEIGLDMSRWPTSKHFASWLGLSPGSKISGGKVISSKTKKCASRAAHYLRLAAYSLHNSKTAIGAFFRRKKAQLGPAKAITATAHKLARTIYNMLKTGTEYKDMGQDYYEQRYKNRVITNLRRRAKQLGYELNYVKEQQELMQTV

SEQ ID NO: 442231 - protein, 414 aa, unidentified
MKSARNTLPTEPVNGITCGIDWARDDHALSIVDAKGREVTRKTIGHNVAGLRDLLSTLDSAGAREVAIERPDGPVVDTLLDAGITVVVISPNQVKNLRGRYGSAGNKDDRFDAFVLADTLRTDRARLHPLLPDTPATIALRQTCRARKDLVAHRVAVANQLRAHLRIVFPGAVGLFAAIDSPISLAFLARFGCQQRADWLSITRLTAWLANAGYSGRTDPRELHRRLTSAPRATNEVTGAEVTGAFVATLTALNAQITVLDDSIADQLAAHADAHIFTSLPRSGIFRAARLLCEIGDCRARYPTPEALACLAGVAPSTRQSGKITHVGFRWAADKQLRDAVCDFAGDSRRANPWAADLYNRARARGHDHPHAVRILARAWLYVIWHCWQDHTTYDPTQHRALQALLERPQPGAA

SEQ ID NO: 442232 - protein, 328 aa, unidentified
MKKKFILGADVSKHTIDIHCFGKLECLTISNNSKGFKELIKWIKKQVSRDFEGVIIVMEYTGIYTYNFENFLHDESIDYVKRPALDIKRSAGIKRDKTDKADARMISKYGWQRREELQPMKPLSSTQLDLQQLMAYRDKLVADKSSYQSRIKELKGQMQQKLNQRIIQSTENIMQLLKEEIKKTEAAIKEVVTKDEALAANYELVQSVKGIGFSTAVHMLIKTENFTRFDARKFACYCGVAPFKNESGTSIRGKTKTSHLANRKIKSLLTMAAISAINHDPQLKTKYEQKLQEGKAKMVALNIIRFKLIERIFSVIKRQSPYILSTAA

SEQ ID NO: 442233 - protein, 427 aa, unidentified
MSREGLCFSLLGVIVVEPLLLRELSAGQLVVAIDPGKVTNRVWVTTGERGLIGKPVSLPVLRDGVDELARLIAASGVRGSPVIGIEATGALHRAWAAEVERRWPGSLRLFAPSETQAARAQLGSRRYTTDDRDCAALVWLLRQGAGRPTPPSAIDALLGAVRHRRQLVDARRVLQQRLHDQLNGLCPGLSAPVGHGRVLELEDPSGRAVLACAVAFAGRAPTVRSLRARSPGRLTETNAGFWVGRWRRLLPPPPDAELRAQRLGRDVERWLGLRDDIATLETQLTDLLARSDGQILTSLPGVAVIRAAAFTAHTLPIERWPTAEHLHSATGLAPASYQSASLTRRGRISRQGLAEHRDALMGIAWGLSQHSPAFAQRDREYRARGFRPIQARVALARHACRLCWRLLSSQQPYDERRYDRARHRRGR

SEQ ID NO: 442234 - protein, 343 aa, unidentified
MQVTTVGLDLAKRIFQVHGVDAAGKVVIRRRLQRSEIAAFFADLPACLVGIEACATAHHWARLIGASGHQVRLIPPSYVKPYVRRSKTDAADAEAICEAVGRPSMRFVPVKSAHQQAALLHHRARDLLVRQRTMLINAIRGHLGEFGIIAPAGRHRVADLVNLLQGADDAEVPALAREALQSLFAELSALEIRIKVVEAVIMREHRSNAVSRRLTTIPGIGPITASALAGTIADPFAFKSGRELAAWIGLVPRQHSSGGKQKMGRVSKQGDRYLRRLLTVGATAVMRRLPGKTDGLSLWVRALLDRRPFRLVSLALANKMARIAWAIMVRPETYKASAMTAPA

SEQ ID NO: 442235 - protein, 453 aa, unidentified
MDTLHRVGAGLEVHTDPVVACVRRLDDRGQAHQPVKPLGTTPPDLLALLDGRLEQQVPIVAMASTGVYGKPVFNLLEGPVEVLLVNPEPVKKVPGRKTDVKDCQGIAQRLQHGLLQASCVPPRPIRELRDLTRQRTQRVGEKARGSNRIQKVLEDATLKLGSVAAEVRGVRGRDRLRSRLAGVDRAEALANLARGRLPDKLPQLRKALTGRVTQPPRFLVGMHLDPLTHLEARLGRLDQRIHQERDKDRPPEPPQPPPPGVAAATASAEKPGMPADGEESAAPGSGRRGRWPSLWLLVTIPGINRRTAEVVRAEIGSDRSRFATPPPLASWAGLCPGNNERAGKRRSGRTRHGNRWLRSILVQAAWAASHTRATYRSAPSRRLACRRGKKKALGAVAPTLLGMCSEVLRKGEAYQERGADYLDRLEPARRTKQLVRHLEKLGHKVTLEPQTAA

SEQ ID NO: 442236 - protein, 371 aa, unidentified
MNSIVYVGMDVHKEQCTLCCYSYDTDKVEYKQTIPSDYKLVLKYMEQVRSRYEGEVSFVCGYEAGCLGYSLYHQLKDHAVDCKILAPSTMAVTNTHHVKTDKRDAANIARCLAFHTYSEVYVPDNDDNDVKEYIRMRDDQKLYLKKVKQQILAFVLRQGKRFEGGKTYWTIAYLKWLKTLELSDLQRETLNEYLMTYEYLTEKISRFDERIEELASVERYEEKVKHMSWLLGIKTHTALSMIVEVGDFERFEKAPKFASFLGLVPSEDSSDTRVNRYSITKAGNSHLRRILVEAAQSYTRGNVGHKSVALKQRQKGNPPEVIAYADKANERLRRRFYKMTLNKGVNRNVASTAIARELACFIWGMMTEHVS

SEQ ID NO: 442237 - protein, 344 aa, unidentified
MHTTEAQKRLYCGADLHGNNVFLTLCDESGQRVMERRVKANLAAVNGALEPYWERIEQVGVESTYNWYWFVDGLRSQGREVRLANPAKMDQYEGLKATDDASDAGWIAEQMRLGILPQSYVYPPEVRPIRDALRRRMLIVRQRTQSLLSLESLFARYGLACPTAAELKDWKRREVSGLKLDSFTELQVESLLELVRKQDGLAQWIEGAVLKAVKPKAEFKRIQQVPGIGPVLAMIVVLESGDFGRFPSAGDYASYCRTVKSERQSNRKKKGENNRKNGNRYLAWAFAEAAVYAVRFYPRIGAWYECKKRRRNVPVAMKALACKLAKAAWHVMRGRDFDEAMLFG

SEQ ID NO: 442238 - protein, 349 aa, unidentified
MLIIGCDFHSRFQQIAMVDTETGELIERRLEHGNGEAKKFYAELQKPGRVGMEATGYAQWFEGMLAKLGHELWVGDAAEIRAAMVRKQKTDSRDAVHILDLLLTNRFPRIWIPSPEERDVRQLLRHRHKLVGLRTSLRNQLQALAMGQGVCRKKKLWASSGRAELKALGLDPWARRRRQELLEILDRLDSSLAELDRAVAQEAEHRPAARYLMQQPGVGPVTALMFVLTIGPIERFQRSKQVVSYLGLNPRESSSGGRQRLGAISKQGNSLARFLLVEAAQTASRYDEGLRRDYQRLKFRRGSAVAKVAIARKLAVRRYWKLREYSSPAPSTRTQGSPETSVVGASLSS

SEQ ID NO: 442239 - protein, 318 aa, unidentified
MDKEFAGIDVSKDMLDVATFTTKKEWHFANSETGIGQLIEALKALSPALVVMESTGGYETPLAYALYEAGIPCSVVNPREVRDFARATKKLAKTDAIDAQVLAHFAAVIKPEPRPLSDEQSQELEAILTRRRQITGMLTAEKNRMHTARKQVRDSIQAHIDYLEKELNHLNSNLTGRIEESPVQREKYELLQSVPGVGPNVSSTLLIELPELGTLNRRQIAALVGVAPINHDSGSKRGKRRIWGGRPQVRTALYMATLVATRFNPVINQFYTRLCGIGKAKKIALVACMRKLLIILNSMLKHRMPWHVTQPVLVSSTF

SEQ ID NO: 442240 - protein, 366 aa, unidentified
MDKKSSKKYGWFIGVDVSRNELDFAVMKAKVVLFHREIPNSLESIKDFIKELKMQQGFTISKAIFCLESTGFYSNHLLQVLCRFKANIVVENAVKIKNSPGNMRGKNDKIDAVRIAAYASLHHENLRFWFPRRPVIDQLAELTTLRLRLRVLYGSLTTPVKEQQAFVKKKVARENAQLCSRSIEAVKLDLLDVDEAILRVINEDEQLCRLRDLIVSVDYVGVVTATEMLICTNEFRDIKDPKKFACYAGVAPFPKESGKARVKSRVSHLANKKMKSLLHLCALQAMRHSPELRPYFLRKVELEGKPKMAVLNALRYKLILRIFACVNQNRKFEKTYVNSHVKKLKEIESESSESGKEEKETIIDVL

SEQ ID NO: 442241 - protein, 334 aa, unidentified
MESYFLGIDISKKKFDGALTLDGKNFYQVTSGNTSKEIGALFKTITKKFAMSYSQLVICMEHTGIYCLPLLEFLVENKIRVCLESPLQIKNSQGIVRGKNDKVDAKRIAAYAYKNRETLTLWHPQRLIVQKIKALLVTRDRLVKVRTILRVPITECEEFIEKSIYKLMGKSCQKSIQALERDIKSIEKTIDQLVKEDQSLKEQYSQAASVPGIGKITALNMIVSTGEFTRITESKKFACYSGVAPFENTSGTSIKGKPRVSSMANMTIKTLLTMGAMSAIQHDPFLRTYYKRKVAAGKNSFNVINAVRNKLISRVFACVKEKRMYQKDYKYGLA

SEQ ID NO: 442242 - protein, 358 aa, unidentified
MKYVGIDVHKKMCQAAILDEDGSLLDEIRFANTPEEIEEFSGKLSTFHDEVRAVVESTGNLWIQIHDRLEEHGFDVALSNPSKTRLIAEAKVKTDKVDARTLAALLRADMLPTCYVPGEELRSRRELLRHRLNMVKIRTGVKNRVHGLLDKHGLRMPGITPFSKENIAWLREQSFGFMDDAIVRSDLAVLEAVDGQVTLIEDKIATIAAEDRSVRLLMTMTGVGYFTAMLVMAEVGDVGRFRGDKEFASWMGLVPSVHQSGEKIRIGGVSGPGNKRLRWALVESAQAAVRFDPRFGGMYERVSRRRGKGCAVVAVAHEMARIMYFMLVRGEPYRGENRGLTERKLKSMSKKAFNGLRN

SEQ ID NO: 442243 - protein, 355 aa, unidentified
MTSTQYIGMDVHKESISIAVRNAAGKIVMECVIETKASTILQFFDGLRGDVHVTFEEGTWATWLYDLLKPQVTKVVVCDPRRNALLQEGNQNDRVDARKLAELLHNNQLRSVYHGDHGLRTLKELVRSYLTITSDLSRVMTRVKAVYRSWAIPCTGKQVYAPRHRAEWLGKISEPGVRRRAEFYYQQLDALRSLRQEVRRDLLAESKKHKAWKLLCQIPSIGPIRAAVLLGILQTPHRFRTKRQLWAYGGVGIETSSSADHQVVNGQLERKKKPVEIRGLNRNYNHDLKNLFKGAAIVAATKPGPFAEFYAELLARGMRPEMARLTLARKIATIVLMVWKRGVCFDAQHLKPQTA

SEQ ID NO: 442244 - protein, 344 aa, unidentified
MDDYAALDVSMETTCLCGMDAKGRIIGEGKVATDAAQIAKWLTEKGGKWTLVGLEAGPLSNWLHGELKALGFPVVLIETRNAKAAMAAMRNKTDRKDARGLAHLLRTGLFRAVVPKSMASQEIRTLLSARATIRRQLLDVENSVRGLLKNYGVRLGKGARVRLERLVSEALSGRERLAAAITPLVTVHGVLRRELAKLEGKVRALAKTDPVTRRLMTAPGVGPIVALTYRSTIDDPGRFRHSRDVGAHIGLTPKRYESGETRRDGGISKAGDRILRAALYEAATTLLTRSATWSTLKSWGVRQAKVIGSRRARVAVARKLAVVLHRMWADGTDFRFAKPESATA

SEQ ID NO: 442245 - protein, 356 aa, unidentified
MQTQVTKKIDFKGKDLYIGLDVHKKSWSVTILVEGMEHRTFTQPPDPRILFNYLQKMFPGGTYYSAYEAGFCGYGIHRELNDLGIKNIVINAADIPSSQKDQLQKRDPVDSRKIARALEKGLLRAIHIFDRDMEELRSLNRTRFYLMRDFRRSKNRIKSFLQYYSIFIPPEFDNNQWTLKFIGWIKQIQMKTSSGQDAFSNLIRSFEYNREQILILSRQIRIRVREYDKELYNLLKTISGIGPLTSSALITEIGDINRFPHINHLSSFVGLVPRVKQSGETSYNAGMTFRCNEYLRTLLIESSWQAIRLDPALMQYYQQHIINNKGQKVIIKVARKLLNRIRYVMKNRQPYVTGVA

SEQ ID NO: 442246 - protein, 312 aa, unidentified
MAIAVSEITLGIDVAKDELVICDWDTEQLTTLINNPAEINAWLSTLCGPVRLAAEPTSSYHLELVEQAHARGMTVYLINPRQLLHYRMAIGERNKTDSADAWLLARYLARESASLRAFKPLCGKAQRLWALIKRRGVATVTQQTLQQSFRDVQLPAKALFAEIRRVIARIDQHIRTLLRELHWWDDYQRCLSIPGVGPVNAAALTTTFHRGAFAGSDAFVAFIGFDVRLRESGKYKGQRKLSKCGEAEIRRLLFCAAQPARSYATFDSYYQQQLNKGLSKIAAKVILARKIARIAFSLLSNQQSFKKTPDRL

SEQ ID NO: 442247 - protein, 414 aa, unidentified
MDIVHTHCAGLDVHKKTVVAAIIVPDGKNGLQKETRTFGTMTCDLLALSDWLMGYGVTQAAMESTGEYWKPVFNILENNFEVLLVNAQHIKAVPGHKTDVKDSEWIADLLRHGLLKASFIPPLGQRELRELTRYRSTFVRERATLVNRVQKLLESANIKLASVATDVLGVSGRAMLEAIIQGQSSPAEMAELAQKRMRQKRDLLAKALEGYVKSHHRFVLTELLCQIDSLDETIERFNKQIEEYCHPFEEAVVLLDTIPGVGREVAEIIVSEIGIDMSCFPSADALASWAGVAPGNNESAGKRRSGKTTKGNKALSVALNQAAHGASHTKDTYLSAQYRRLAARRGKKRAIMALMHSILVIAYHLIQRSEPYRDLGGDYFDKRRPEATAKHLVKRLEQLGYSVSLQQPVICLVE

SEQ ID NO: 442248 - protein, 363 aa, unidentified
MQKISTMRTRRKNIFQGQLTVGLDLGDRSSAYCVLNEAGEIVLEHKLATTPEAMKQVFASMPRCRIAMETGTHSPWVSRLLTALGHEVIVGHAQKVRLITKSRRKDDRLDARTLARLARIDPELLSPVKHRSAQAQLHLTEIRARAVLVNARTALVNAARGLVKSYGERLRKCDTQQVRREASNGLSAELCKALEPLLEEIESLNERIKEYDRRIEKMAKEMYPETAVLKQVKGVGDLIATAYVLTLEDPHRFRKSRDAGCFVGLQPGRRNSGESEPQMHISKEGDEYLRKLLVQGAHYILGPFGEDSDLRRWGQKLAARGGKNGKKRAVVAVARKLAVLLHRLWVSGEVYEPLRNSQMSAVA

SEQ ID NO: 442249 - protein, 346 aa, unidentified
MMIIGCDFHPSWQQVSWLDTETGEYGEQKLVHASGDAQQFYRALAAPVLIGMEATGNSQWFIELVEDMGHVIWIGDAAQIRASYVRKQKTDKRDANHILKLVMENRFPRLWTPDREQRDLRQLVLHRHKLVMIRSRVKNELQHLSMNKGVQRKHKLWSQAGQKMLRELPLKPWAACRREDLLGLLAMLNQQIGKLDDSVQQAAEENPQAKLLMTQPGVGPNTALAYVLTIGDVSRFRRGKQVASYLGLIPREESSGGRQKLGSITKQGNRMLRSLLVEAAQVAVQHDPGLRKQYLHRCHQKPKAVAKVATARKLAVRLYWMLRTQVGYPEIVRIESSSGLPLVGAS

SEQ ID NO: 442250 - protein, 482 aa, unidentified
MATAKKSTFQRLSQGQLNRKQRRELERRLNAEDPGLEIVNRNVAGIDVGNESHFAAVPPGRDARPVQEFGSWTADLQRMVGWLKACGIEKVVMQSTGVYWIALFDLLEASGFQVCLANARYTKNLPGRKSDVQESQWLLKLHTYGLLRNSFRPPDQIRAVRSLWRLRDRHVKEAARAIQHMQKSLVTMNVQLSNAISDISGLTGQAIIRAILAGERDPAKLASLRDGRIKASPEELMHSLEGNWREDMLFELQQAVQAYDFYRKQIAACDQRLQQLMASLPSREMEVSPSTTKAATQPVGKKKSHKQKNVPGFDLRSELTRICGVDLTSIDGIDVMTAQTVLAELGTDFLRWEEEAHFAAWLGLSPSRDISGGKVLRQGTLKKVKNRVATALRIAANTLQFSDSYLGARFRSLRTRRGAPKAIKAMARYLACLIYRMFLHGQAWVDRGAREFENKRAQRQFLTLQRQAAAQGFKLVSANAPA

SEQ ID NO: 442251 - protein, 376 aa, unidentified
MGYHSEAFVGIDTSKLRNAVAIADAGRGGEVRFLGEIENTPAATAKLVRKLAAKYKRLTFCYEAGPTGYGLHRQIKGLGFECTVVAPSLIPKRPGDKVKTNRRDALSLAKLLRADELTAVWVPDGRHEAMRDLTRARETAMLDLRTKRQHVSAFLLRLGRPYPESRKTWTKAHMSWIASQTLEHPQQRLVLEEMMLAIRQAQERLQRLEQAIAAAVGEWSLAPLVTALMAMRGLDLIAATTLLAEIGDLSRFRTPTELMAYLGLVPSEVSTGDTIKRGPITKAGNRRARRMLVECSWSYQHPPRVGQAKQPKVDAAPPAVREIAWKAQCRLYRRYRTLIRNGKLKTVAIVAIARELAGFIWAVARVVTSTRFAAAA

SEQ ID NO: 442252 - protein, 410 aa, unidentified
MTLFCGIDWAESHHDVAIINDTGTVVVKARIGDDAAGFARLLDLFAEAGDTAVNPIPVGIETDHGLLVSALRATGRTIYAINPLSASRYRARHQVSGAKSDAADAVMLANIVRTDADAHRPLPVDTELAQAVRVLARAQQDAVWARQQLGNQLRSLLKEFYPAALDAFAGQPEGGLARRDARTVLAAAPTPALAATLTRARLRTMLAKAGRRRNVDHDVDRLYGVFRSDRLRQPPAVENAMGIQFSALLSQFEAACAAADDLAEAARTHFEQHPDAEIITSFPGLGLLAGARVLAEIGDDRTRFTDPRGLKAYAGSAPITRASGRKTVVSHRHIKNRRLAAVGPIWALGSLRASPGARRHFDARRAAGDWNHQAQRHLFNKFLGQLHHCLQTGCLYDEHQAFPPPLAAAA

SEQ ID NO: 442253 - protein, 310 aa, unidentified
MTLIYRTIGIDISKASLDIFDKASGRANRISNSVSDIKAYCDTLPVDGVRVVFEATGSYDSCLRQALGDAGIVFLRVNPQQARDFARACGKRAKTDRIDARMLAEMGEAIELPQRPQPSPEHIQLAELQQRRDQLVADRADEKKRRQTASSSAVTANIGEHIAFLDRQIVAIERQIDTLIKATPRLADLFRRLIEVPGIGATTAVVLMAQMPELGSLSSKAVAALAGLAPFNDDSGRHRGHRRISGGRSRVRRALYMAALSAKSRVARFAAHYQRVVERSALKKVALIAVARKLLVAINAMLKSGEPFRA

SEQ ID NO: 442254 - protein, 387 aa, unidentified
MSRNARVPIPVTTLDQDSTLVVVLELSARSWLVGARVPGIGRMSRYALAPSAEALAAWLGTAKARAGAAGRTVVRVVLAYEAGRDGFWLARYLEARGVEVYVIQPSSVLVDRRARRAKTDALDVEMLMRTLLAWLRGEPGVCSMVPIPEVAEEDGRRPVRERQGLIGERLALLNEIDGLLATFGITGYRPLRRDRRAQLAALRTPEGDPLATNAAARIGRILDRLELLMQQIAELEQARDAVLAKEAASGEAETMIRGLARLKGIGAELATVLVWEAYVRSFPNRKALGAYAGLTGTPFASGSTTREQGISKAGNRRLRSSLVELAWLWLRYQPDSKLAAWFRTRTGSVGSRMRKVMIVALARKLLVALWRFCRAGVLPEGAALKAT

SEQ ID NO: 442255 - protein, 369 aa, unidentified
MGEYSEIFVAFDVAKRKHAVAVAESGRRGEVRFLGEIENSGTAIERTLKKLSGRHGRLHVCFEAGPTGYGLYRQVQALGHACTVVAPALIPRRAGERVKTNRRDAVTLARLHRAGELTGVWVPDAVHEAVRDLVRARQAAADDLRRKRQQLLSFLLRQGRIYGAGGHWTLAHRRWLARQSFEHPAQQIVFQEGVDAIEDAAQRLHRLEKQLAIIVPSWSMAPVVAAFQAMRGASFLVAVTFAAEIGDVRRFDTPRQLMSFLGLVPAESSTGDTIRRKGLTLAGNRRARRALVEAAWTYRFPARVSEALRARLDGLPKAIRDIAWKAQIRLCARYRRLSAAGKKLPVVVAAIAREIAAFLWAIGREVAPM

SEQ ID NO: 442256 - protein, 341 aa, unidentified
MSIVVAGFDVHRSQITFDALDEESGELSRGRIASTPEAVGQWVERFPDREVHVAVEAGTGWLFVCEALSEAGAIPHLAEPAETSALRGPKRRAKTDREDARWLRTLLAEGRLPEAWIPPAHISELRTRTRLRKTLIDERTAWLQRVRATLFHHGVSGAPERLLGAGGREFLEQLELPASARERIEVAFAMVDALDRQLAPLERELRQLARRQSGCKALMAHYGVGELTAPVILCELGDVTRLSSSRKAVRCAGLDIGVHRSDRRSRAGKLSRQGSPQLRWALYESAQAACRPTSPDRADYLALKARGLTHPRASLTIARKLARRSFHTLRELGPRALEPAG

SEQ ID NO: 442257 - protein, 387 aa, unidentified
MSVDHQPEQTAVRTHLGAIFVSLELSRATWLVTCLLPGSGEKMSRHLVRGGDVVGLLAKFAELKAKVYTRTGRMFPIIAIQEAGLDGFWLHRVLEGEGVESHVVDPASIATSRRRRRAKTDKIDGEALIRTLLAYKRGEPRVCAMVKAPAPGEEDRRRICRERKTLIAERVEHVNRIKGLLFAQGIRDYQPLGRRRRERLDELTTGDGRALPAHLKAQISRELDRLELLLQQIEVVEAARDALLGQSAEQFSSAPAAMLMRVQGVGPEFAGIIWSEGLFRHFDNRRQIAAYAGLAPTPWQSGAVDREQGVSKAGNPRLRTTMIQLAWLWLRHQPCSGLSRWFHERVKRNGGRLKKPMIVALARKLLVALWRYVTAGVVIEGAVLKVS

SEQ ID NO: 442258 - protein, 379 aa, unidentified
MEQSSTLYVGLDVHKDSIDIAVADAPRDAEVRHLGSVAGGVTAVSKSMRRLVSAGHRLHIVYEAGPCGFVLQRHFTALGWRCDVVAPSSIPHPSGERIKTDRRDAMKLARLARSNDLAVVRVPDGADEAIRDLVRARDDAVREQRNGRHRLKALLLRNGTPYAGKCSWTAAHLRWLATVKLEHAAQQISFQEYLHSITESGARIGRLEQTMRDALADWSLRPLVQALQALRGVQLIAAMTLVAELQDFLRFDNARKLMAYVGLVPGEHSSGPKRRQGSITKAGNSAARRMLVEMAWHYQQGARVSASIATRQADLPTAVTAIAWAAQLRLSAKFKRLVARRVMKTKVVVAVARELAGFVWAIGREVQISGWQGVKPETA

SEQ ID NO: 442259 - protein, 423 aa, unidentified
MMKLKYSICCGLDVHKNVIVATIVTTNKDGISEYLQKSFSTINSDIQRFHNWLIENNCYHVCMESTGKYWIPIFNYLENDIDVCLTHPKYVKAIKGKKTDKKDSKWIADLYKFDLVRCSFIPPKDFRQLRELSRYRFKLVCMKSSEKNRIQNCMTISNVGIASVLSDPFGKTATEIMSYLLEHTADSMDEKAVRKLIKKGAKSKSDEIIEAIKGYTIETDQAKKLELARGHLEYLDDMITQTEVELYVRIKPYYEFVEFVSTMPGMTELSSTIVLAETGVDMDIFDDAKHLCSWCGLSPANNESAGKKKSVRIAKAGDYLKPMMVQCALAAIKSKKQPYFAIKYGRIKKRRGHKKAIIAIARMMMVCIYHMVSEKKPFTPTDYEELMDPQNHVESVVLNENNVFAYLESLGYDSSKLVKRNDN

SEQ ID NO: 442260 - protein, 406 aa, unidentified
MNQNTCITIDVSQNKSHIQGFIGPNKPLNKARTLRHTKQGFQFILTLKNLIESKINETPLIVFEFTGIYHKSLEKFLISQNLKYHIVSPLRAAKARNSEIREQKTDARDCLSLSKLFYSNNLGIFYSENETYSNLRKLNRYYDTCMKHLIKIKVNFRETLAVIYPNYNKLFSSIYSDDSLTFLKEFPHPSIYTSKSEDYILEILKNKWEHVESWTSSKVKKLTPLINEVVPGCNVTEPDIIMLLSYIAQIEYYLNQIKITVSKMNELAKKVPLYNLVHSLPGIQDILTCKFIAELGDISRFTNYKQIVAYAGIDPMIRQSGDKDGLHLKMSKKGNKRLRTILHLMVSSLIKTNREPNAIKDKYQKKTHQLNPLKPKVASMACANQLVRIIFYMHKASSTYIYQKCK

SEQ ID NO: 442261 - protein, 368 aa, unidentified
MKKNTSKTKKRTTTAEAREKFASFVGIDLGDKHCEVCVFNGAGEVQERLRLPMKGKDLEGYFGKLGRSRVALEAGGQSRWVAEVIERCGHEVYVSNVRKVAYISASDDKDDPGDAYKLAELVHFKPQLLHPIQHRSREAQADLSWIRAREALVESRTQLVNTVRGMSKAFGERLGKCSVEAFPAKRAEQVPEEIRGAVAPLLEMIDQLNEKIAYYDQMEEHIARQRYEKHDLLRQVDGVGVHTALSFMLTIGEAERFEKSRMVGPFLGLRPRKQDSGESRPQLGITKAGDEYLRKTLTNCAHHILGPLGKDSDLRRAGQRICERGGKNAKKRAVIAVARKLAVLLHRLWITGEVYEPLRNSKKKAVAA

SEQ ID NO: 442262 - protein, 442 aa, unidentified
MLRESTRVCVLAEIPPDRRRQARVASRRKEDAMEVMFDRVAGLDVGKDSVTVCVRTPGGRGGRRSETRSFKTMSGSLRVMRDWLVEAGVSIAAMESTSTYWKPPFYCLEEVMEVWLLNAAHMKAVPGRKSDVRDAEWIAQLLEHGLLAPSFVPPPEIRRLRMLTRYRLQLMGDRTRETVRLELMLEDASIKLSTVASSLNTVSARAMLTAMIDGESDPLRLAEMARGRMRRKIPDLAQALTGHFDTHHAQLARSILRRLRLVEQALTELDAVIAEACRPWQHELELLQTIPGVGETVAQVIVAETGADMSRFPTAAHLAAWAGLAPAMHESAGKKTPAGKRHGNKWLTAMLVEAAGSVGRMKGKNHLSARHAQLTRRRGRGRAQVAVAHSILVSAYWMLKRDEPYHDLGADWHSRRNNEAHTRRLIAQLERLGHTVILKPAA

SEQ ID NO: 442263 - protein, 391 aa, unidentified
MWCPKLVDAMVLSGCRINSSLTKMINYKLKAAPTAVSKEGNSQKGPKANRILIGVDVHLKSYQAAHKIDNGAVGVAQTFGSKEALLLYAQKQQELAKEVVVLYEAGPLGYKLYRDLKASDIECLVCAPRSGEQKRKRRKNNSIDARTLTSDLFNYLHGNEHALQRVRVPTQAQEQARVQSRQQDALVEERKRIGAIGNSLLLSQGYGSWSNWWRPKAFERLSKEVAGWIVKHLQRWVGVLRELDQQIQQAKVELSQKWHGPRPKGMGALSLVQLLAEVLDWNLYSTRRKIGCLAGMVPSEWSTGEGQRLGSITKVGLPALRRIITEMVWRMILFQPEYKAVQKWREVLEGSNRGLKKKAVVAIGRQLMVDIWRLQTGRITAQELGLIMIEG

SEQ ID NO: 442264 - protein, 432 aa, unidentified
MKVTRGMQRRATKSARRAAVVGTDTLIAGVDLAKKTSVVVFMRASDKAPLGRLRIPTSPAGLLELDRRGKELLRRMGLSRLLMGMEATGHYWKIMARTANELGLPYVIVQSFVLARSREFDDLTRDKNDQRDALLISELVAERRFTEVELDRGAWAELRLLAEARDQRRVERAAALHEQRALLELVWPELLAEIRLLDGSHVQACLSLGLPPAQIASMSLARFARLLQREHGERRFMGSMATRLWAAAGANRACDETAAALLRVQLAAQRIEAADRAVATLDARMAVTFEATGLGWMRGQIRGLGEILLVNLLALSGDPRRFDEAGCMVKLAGSNPTERSSGQVEASGGIPRRGRRTLRLVACQAATCLALHNPDFEAFFRHLTQRQHRQLAPKAARVAVANKLLRILWAMATAGQNYDSRLATRGRLADAA

SEQ ID NO: 442265 - protein, 451 aa, unidentified
MSSRKKVSAKTNTQMPTLHPHAAGIDIGAKAIQVAVPLDADKKPVRTFTTFTDDLLALRDWLKLCHVKTVAMESTSVYWIPLFQILEAAGLEVCLVNARHCKNLPGRKTDVSDCQWLQYLHSVGLLRASFRPPEHICAVRALLRHRAALVRYASDQVRHLHKALTQMNIQIHNVITDMTGVTGLLILEAILNGERDGQKLAALKDHRIKASRDTLARSLQGDWRAEHLFVLQQALATWKHYQQLMVRCDEQIEKDLATFEGKPTEHPLPPPATTHRRAQRNEPRFDARAELHRLCGVDLTQVPGVQVNTALVLFTELGPNFVTRFPTAKCFASWLGLCPDNRITGGKIISVKTRDVKSRSAEALRLAAQSLWRAKNYLGDCFRRWKGRLGTPKAITAMAHKLARILWHLLKYQEPYDPAVWAQAEEKLKKKKIQRLHQSAAALGFKLTTAS

SEQ ID NO: 442266 - protein, 424 aa, unidentified
MKVTYQICCGVDVHKSFLVATIVKTTGGIEPSYQKKRFSTFNNSILEFKQWLLDNDCHDVCMESTGKYWVPVFNLLEDEINVVIANPKWVKAVKGNKDDTKDSKWIGDLFRLGLVKGSYIPCKIVRILREYTRYRCKLVSCRSSEKNRYQNALTVCNVALDSVVSDIFGKSSTSIIDYRLEQSGTSINHEEIASKLLRSLKSKEDAVIESVEGYQMTDAQKYRMRLVRAHMDYITAEIKDVDKMIENMISSNPDFENAVQFLCTIPGVKCDSAITIISEIGTDMSQFSSSKRLCCWAGLTPGSNESAGKKKSVRITRAGVYLKPALVQCAHAAVKSDQSPYYKKKYESLVKRRGKKRAIIAIARMILTAIYQMLSTGEQWNPSDLYKIDVPEALIEKQKAKAIKQAKKLLQREGLLPPDEPVAS

SEQ ID NO: 442267 - protein, 352 aa, unidentified
MSIIAFDSHKYYTFARVEDENGQNVQECRIEHQRGNIVAFLRRQQPGSAVAVETIGNWYWIVDEIEKAGMRPVLVHAGKAKLMMGCINKTDKLDAKGLNMLQRVGRLPTVWIPPADIRDKRELPRVRMVFGVARTKLKNRIHSVLDKYGLQDEFEDISDIFGVKGMQRLNGVIEQLPEQTYCTTVLLLEHLEQTQQKIDCIEGRMKELFEETPQSILVETLPGVGFILAVVIIQEVGDIGRFSGAGCFASYCGATPRVHASGGKVRYGRLRPDTNHYLKWAFSEAGNSVALNSKRLPDRHVSQLYNRIRHRRNHGKAIGAVARHLAEATYWMLTEGEAYRERGLLEVSSTGA

SEQ ID NO: 442268 - protein, 347 aa, unidentified
MRFYTRQHRHYCGIDLHVKTMYICILDRTGQVLVHRNLKATPAAFLEAVAPYRDDLVVAVECMFTWYWLADLCAEHGIPFVLGHALAMKAIHGGKAKNDRIDSRKIAALLRGGVLPQAYVYPAAMRSTRDLLRRRLHLVRKRGQLLAHIQNTRAQYQLPEFGRRLAYPANREGISEHFTDPSVRKSIDVDLALLERYDGLITDLELTIVREAKRHDGDAFHRLRSVPGIGKVLALTILYEIHDIRRFDRVQEFASYARLVKCAHISAGKVHGSGGAKMGNVHLKWAFSEAAVLFLRHAPGGKQLLGKIEKQHGKGKALSILAHKIGRAVFYMLARGTVFSMDKFRAA

SEQ ID NO: 442269 - protein, 308 aa, unidentified
MSGKLYIGIDVAKAKFDVAIPDLYFGHYPNHADGFAAFLEWLDDKDVALIVIESTGVYSQGLIKSLCAAEYPVSVVQPSCPRYFARSIGLHAKTDPIDAQLLAKFGQVTKPRLHNPPTEETEALRQLVDRRDQVVEDMRREKCRLEACVSSHIRQCILHSIARLKEDIAALEAAIDELIADDVHLTKKTKKLTDECGVGQQTAVTLLAHLPELGKVNRQRISALSGLAPYEKSSGPVDRQRSIYGGRSRVRRALYMAAVSAARFHSVLSAFYQRLLSKGKPKKVALIAVARKLLVRLNSILQEPTAVV

SEQ ID NO: 442270 - protein, 475 aa, unidentified
MNVKGTKKKNQVVTANIFEQQELLKKAEAIKESLTASTWRELETNGKFDKNEKLSFISDDMLILGCDVGSETHYMRAIDTRGRELSKSVYSFNNDSEGFRSAKEWAVQIAAEHNKSQIVLGLEPTGHYWFCLAAWMISNGISVVQVNPYAVKQTKEVEDNSQMKDDRKDPKLIANLVKDGNFGMPYLPEKLYAELRRLSMFRDQLNEDRTRTINRMHREMKIYFPEYKDALGKVDGAFSLELLRQAPFPDDLISLGEDGIRKIWHDARLRGRGYSRAGEILQYAKVSVGIKDGAIAGKAAVKWFVQKILELDAELAVIENQINQKCQEIPHAGNILEISGIGENILSGILAEMGDISRFDDVKEIQKLSGLGLVACSSGKHKGETRISHRGRKRLRYWLFQAAKSAVAHAEEFKEQHMYYTTRADNPLKKMQSLIVIGCKLLRIICTILKKGIVYDPKKMLMDIRRVEKKEAIKA

SEQ ID NO: 442271 - protein, 380 aa, unidentified
MTEIQMAPAPDTIRNDRLYIALELSNTKWKIAFGNGFKIRLKTIMARDLEEFKQELQRSKKHFGMAEEVPVYCCYEAGRDGFWIHWYLCTLGIRNLVVDSSSIEVNRRYRRAKTDRLDANKLVTMLIRYMNGETKVWSVLHVPEEEDEDSRRLHREIQRLKKERTGHTNRIKSLLVLHGISMEIRKSFAGDVDKVVMWNGEPLPSRIKEEIIRQYRRYELTRQQLQALEQEKKEALKQERESSKKVLTLQNLKGIGSVSSWDLVHEFFGWRQFKNGKEVGAASGLAPTPYDSGGSQSEQGIGKSGNRRVRALMTEVGWYWLMHQPGSKLSRWYMERYGQGSKRMRRIGIVALARKLLIALWKYLEKGIIPEGATVKAYYN

SEQ ID NO: 442272 - protein, 386 aa, unidentified
MPKLNDLSRSLTRLDPDGTLIAVIEMSQWSWLVAGIVPGVERQPLKKLAVDESALLNLLDRWRMESEKAGRKIARIAVAFEAGRDGFWLARWLRAHGIEAYVIHASSVAVSREHRRAKTDRLDTELLKRAFLGWLRSERDHCKMVAIPTTKDEDAKRPNRERENLVGEQTRIVNRMKAALIRLGIRGFNPKLKKAAGRLEELRTPEGEPIPPNTLAELRRDMERRRLISDQIRQIEDARLERIEQAPGDGPHAMVRLLARVIGVGIETADMLVQEVLARNMRDRRAVARYAGLTGSPDESGTKRREKGLARSGNARVRRGMIQLAWRFLMFQKESALAQWFRARTETTRGTRKTMIVALARKLLIALWRLVREGVVPDGVVLRPAR

SEQ ID NO: 442273 - protein, 367 aa, unidentified
MNNMIPVSTKAAAGPKATVPPLTIGIDLGDRWSQLCFLNAEGEILEKSRLQSTPRSFTQRFEALAPARIAIEAGTHSPWVTELLTEFGHEVLVANARELRAISTSDRKNDQADAEKLARYARVDPSILRPITHRDSRTQADLLVIRARAALIRMRSLAINAVRGLIKPFGHRLSACSTDSFVTRCRTELPSEYSALLAPLLEQIASLTQQIQSADRQVEQLTKAKYPEAVALQNVPGVGPLTALTFVLTIGDEQRFIRSRDVGCYLGLRPRQQQSGERNPQLGITKAGDGYLRTLLVECAQHVLGVFGPDTTLRRWGLRLAERGGRNAKKRAIVAVARKLAVLLHRLWVTKQPYEPFFGVPTPMTTS

SEQ ID NO: 442274 - protein, 319 aa, unidentified
MKNSNVEFSEKEVFVGIDVAKDSLAVFVSRDKKDLEFENTGIGHQEIVKLCKRLDPTRICMEATGGYETKLMHVLFEAGLPASMVNPKQVRDFAKGHGFLYKTDRIDAEMLALFAQQIRPRISVLPTNEVRIMSALSRRRDQIIKMLTAEKNRLPLAHKEVRRELRDHISNLESRLLKIDEKIEAAFQNSSLWNNAQLIETVPGLAGVTSFTFVTEMPELGHASNRTISALAGVAPFTQRSGKWKGKERIQGGREHLRGKLFMAAFNVVQHNPHFRQMFERLTARGKPYKVAMVAIMRKLICLCNSLIKHQKPWNPALT

SEQ ID NO: 442275 - protein, 338 aa, unidentified
MHITTLGIDVAKNVFQLHGVDARGRAVFSRRVKRDQFFHTVASLPPCVIGMEACGSAQHWGRAFEQLGHTVKLMHPKYVKPYVKTNKNDRRDAEAICEAVSRPTMRGVSIKTVEQADLQAVHRTRSLFVKHRTAVINQIRGLLAEYGLVIGQSPEKVRPALVRFLDDPASGLTALARETFAELYAQLTELDARIERVTHRIECLFRAHPVCQKLAAVPGIGPMTATALVATVGRPHAFHNGRHLAAWLGLVPRQYSSGGKERLGGISKHGSRYVRTLLIHGARAVVQRAERRTDRQGRWLCALKHRKGTNVAAVALANKNARVIWALLAHDEAYRSPA

SEQ ID NO: 442276 - protein, 399 aa, unidentified
MSTIYSIGLDVHKDSIAVVIAPSASAEVRKYGVIGGTLDALDKLIKKLAQPSVELRFVYEAGPCGYVIYRHLKQRGFHCEVVAPSLIPKKASDRVKTDRRDAEQLARLFRADELTAIYVPDAEDEAIRDLIRARTTAMIGQRKARQRLKGFLLRLGFRYTGKSSWTDAHKRYLAKLLMPQPAQQIVFEEYIAAIDVETERLARLTQAVEYALPTWKWKPVVQALMTMRGIDILTGMTLVAEAGDMSRFDDPRQLMSFFGLTSSEHTSGDKRRQGGITKCGNGQCRRVLSEAAWQYRLTPKISAPLRIRQEKQTKEVRAISWKAQQRLHHRYKALSAARKKSVVVVTAVARELVGFIWAIACQMKAPEKLKPRAVLLKTSAVHTYTLDPSKTFKKETWKK

SEQ ID NO: 442277 - protein, 315 aa, unidentified
MAMPSSEHSTIIGVDVAKAELVIYEDSSGQLSTIANNKTAIKQWIKALHGKVSIAIEATNVYHLLFTDMVHEAGHTLYLMDGYALSHYRKGIGSRAKTDPIDARVLARYLKNEGANLTPWVPPSTLYRDLVSLFRRRAMLVQTRTALRLSWEGEPLLKSLLKSQLTSMKRLEDLIENMIKKLLDQAGLMPLVKQCMKVEGIGFLTAARLVATYQRGEFKSADAFIAFLGMDLRVAQSGKKKERSTLTKRGDPEVRRLLHNAAMSAGRTAAWKTFYEDKQSRGFKKTQVLVMLARKLARVVFALIRSGEEYRPKAA

SEQ ID NO: 442278 - protein, 335 aa, unidentified
MLYAAIDIHKRSFQAAVLDSESGEISEQRFGASREELSHWAMSLQGGVAAVAIEATTGWRWVWRELVALGFDVRLADPSEVKALRGTGKRAKTDRLDARWLVLLLAKELLPLSWLPPAEIQQLRDKTRLRKALAEDRTRWAQRLQAFLQHEGWPCARGRLLTAQGRRWVSGLALAPVARAQVETLLRLIDLVEDEQRALESELRRFARSDRRCQALETIYGIGPILACHILAELGEAKRFRRARSAVRAAGLDPVVADSGETTRRGHLAKHGSPELRWALVQAAHQARYRRSPDRALYGSIKARRKAAQPAVLTVARKLARRSYHVLHELEREAA

SEQ ID NO: 442279 - protein, 371 aa, unidentified
MADYREAFVGIDVAKLKNAIAVAESGREGEVRYFGEVDASYASMRRIIQRIAAKFDRLHFCYEAGPTGYGLHRLIQSLGHECMVVAPSLIPRKPGDRVKTNRRDALALARLLRAGELTAVWVPDEGHEAMRDLVRARAAAVETLRVHRQQISAFMLKHDRIYPRKKGWTMRYLCWLQEQQFDHPAHQIALQEMVEAVRVSKERVERLEKVIEEFVPNWSLAPVVRALQTLRGVDLIVAVTFATEVGDVSRFESPRQLMGYLGLVPGERSTGETVRRGAITKAGNGRVRHMLVESAWTYRHPPKVGARKLYRLEQAPPKVREIAWKAQSRLTARYRMLTGRGKRTTVVCTAIARELTGFMWAVAREAQAIRL

SEQ ID NO: 442280 - protein, 365 aa, unidentified
MASVSHLAPIHLGLDVHRDTISVGILGPGEEVPAVDKIAHDEPSVRRLVGRLGDRRRLRACYEAGPTGFELARLLHSMGVSCQVIAPSLIPKAPGDRVKTDKRDCRRLARLYRASELVAIRIPTPTEEAVRDLCRTRGDMVEDRMRARHRLSKFLLRHGQVWRAGKAWTLAHERWLVTQHFTEPALQTTYDHYRAVLASRDAQLEAIQADLAIWQDRAPFAEQVARLAAYRGVTRLGALHLAAEVGDWRRFARASAFMGFCGLVPSEYSSGQTTHRGHITKAGNVHLRTQLVESAWAYQHRPSVGARLASRQQGLDPQVVARAWAAQLRLCGRFRRLAARKPSTNIVAAAIARELAGFLWAEMTA

SEQ ID NO: 442281 - protein, 355 aa, unidentified
MNDTKYIGMDVHRESISIAVMNSAGKIVLEGVVETKASIILQFINGLRGELHVTFEEGTWAAWLYDLLKPHVTKLVVCDPRKNASMKQGNKSDKIDARRLAELLRLDHLHPVYHGEHGLRSLKELVRSYLTITKDLGRVMSRVKAIYRSWAIPCTGKQVYAPQHRAEWLAKITEPGVRRRAEFYYQQLDALRSLRREVRRELLEESKKHPAWKLLCQIPSIGPIRAAVLLGILQTPHRFRTKRQLWTFGGLGIETYSSADHRYVEGQLQRSKKPASIRGLNENCNHDLKNLLKGAAIVASTKPGPFQEFYTALLAKGIRPEMARLTLARKIATIVLIVWKKGVSFDAQHLKPQTA

SEQ ID NO: 442282 - protein, 422 aa, unidentified
MKKRRYKATNVKQVNWEVVAAQTQGERIIFGVDVAKEEFFAVLMKIDQSVIDTIKWTHPQQTRELSAHLLDDLKCSRLEVVLEPSGTYGDALRHHLSELGFSIYQISPKRVHDAAEVYDGVPSLHDAKAAYLIGRLHLEGVSKPWRALSEPRREQQALIAELALFESEWQRNLNRLEASLSRHWPELIQLQSLRRISLLSLIGEYGSPQEVAAHCNEAQLLMQRIGRGQLNAEKVRQVLDSSETTLGVPCTEGERHFLQILGRELVRSHQHVQKIEHRIEQIVVDDIVLRQMAQVVGKTTSLVLDASLGTPLDYPNPHSYLKALGLNLKERSSGKHKGQLKITKRGPGKARGYLYFAALRLLYRDPVIGAWYQNKVKRDGNLKIKAIVAIMRKLVLALWHVSRGEVFDSRKLFNTRTLGLTV

SEQ ID NO: 442283 - protein, 408 aa, unidentified
MFYKIAGIDVHKKVLMVVVIAASTPDCEPERRRFATMPSDLRRLLSWLQEKEVKEAVMEFTAQYWRSVWLALEPYMRLQLAQAFSNRAPRGRKHDFKDAERLVRRLIADELILSFVPNGEQRTWRNMTRMKTQLTGDRVRLQSQMECLLEEMRIKLSSVVTDLLGVSGLRILWALARGESDPKKLAALGEESLRCSEEQLIDALTGSPQPMHRQLLSPQLQRPQLIDEQIAKLNGMIAQALKPHQEAVARLAEVPGFGVDSAQQVIAEVGVHAKTFPSAAQLTSWVGTCPGKEESAEENHNSRSAKGNKYLRRVLNQVAHAAARKKGGYFQAVFRRQLPRLGYKSAIWAIAHRLCRVVWKILHDGVRFIEQGTECDPKLQKHRARTLARALRKLGYNVRITPINPSAA

SEQ ID NO: 442284 - protein, 420 aa, unidentified
MSFKILKFNCCGLDIHKTWIYACVGITDSNNRTEYKQARFSSFTKGLNELCDWLAKYNCTDICMESTGKYWIPVFNILERHNLWVTLSHPKYTKPMKGNKTDRKDAKWICDLYMCGMVKPSFIPPADIRELRDLVRYRYKLTCMITGEKNRAQNCLTVSNLKLDDVFSDVFGKSSRSITEQILQHPGKKFDVAPFIHGRCKTPIEEIQAAVDGAISKEQAVKLRQCLNHIDELEKHLKEIEQEILRLSDKYQAALDLIRTVPGFNKNPMTAIQVLSEIGGDMSVFPSAKHLVSWAGCCPRNDQSNKKIKSTRISRAGSYFKPVLVQVANGLLRSKKHPEITGRYKRIKARRGHKKAIIAICRMLLTAIWHILSDLKPYTAEGFRESRPVNESKVLTTSQALNLLKQRGYIIKDNLSSAMN

SEQ ID NO: 442285 - protein, 355 aa, unidentified
MATVYCGVDFHARQQTICYLTTEDGVISTQELKHDNKEEVRNFYSQLPAPVQVGLEAGGYSLWFEQLLEELGHEILLGDAAEIRRCARRRQKNDRRDAALMLDLLLRNEFPRIHRQTPVSREILRMLRYRHKLVKLRTIVKNSLQALAIQAGLALKAKLFTQVGVEQLRSLAMPPVMQLQREEWLQLLPTLNQRITDCEAWLNQQAATDQRVLCLQTHPGVGLLTSLAVVHTLDPVSRFPNQRKVAAYAGFDPCEDSSAERKRYLGISKAGPKLLRFLLVEAAQTAVREDAELKRFYQRLLQRRNKPKAKVAVARKLLIRCYILLRDEIDYAEFQRRAVAARLARETHRPLMPAL

SEQ ID NO: 442286 - protein, 348 aa, unidentified
MGGANHATVTTIGLDIAKSVFQVHGIDAAGQVVIRRQLKRRYVLAFFQKLPPCLIGIEACASSHHWSRELQALGHTVRLMPPAYVKPYVKRQKNDATDAEAICEAVTRANMRFVVTKTPEQQSGLVLHRARHLFIRQQTAVINAIRAHLAEFGIIAPVGRHGVEELLNVVADPNDKRVPEIARACLLAFGAQLRRLKEQILEFDRMIRAWHRSSETSMRLDDCPGVGPVLATALVATVADPKSFRSGRNFSAWIGLVPKQHSSGGKNRLGSISKQGDRYLRGLFVAGALAVIRYAKIHGTKHRPWLTALLARRPTKVAAIALANKIARMAWAMIAKGERYKEPIALAA

SEQ ID NO: 442287 - protein, 370 aa, unidentified
MAHSSTLFIGLDVHKETIAVAYVAEEREAEVVSLGTIGTRQCDIDKLIRKLQAKGKTLHFVYEAGPCGYWLYRYLTKKNLKCWVVAPSCIPKKASDRVKTDRRDAMQLARLLRSGDLTPVYIPSVEDEAIRDVVRAREDVLKDVKATKVRLKAFLLRQDIRYEGRANWGAAHLRWLAEVVCPTPAQQIVFQEYVRAVSEQTERLQRLEAELATLVPSWRWYPVVEAIQALRGVQFTAAVTLIAELGDLSRFDSPRQLMSYLGLTPSEHSSGERRRQGAITKTGNAHARRVLVEGAWAYRYPAKVSRHLQLRLEKVPTGIQDISWKAQVRLCKRYRRLSARGKNANQVVVAIAREMAAFVWAIAREVEVAH

SEQ ID NO: 442288 - protein, 380 aa, unidentified
MTKIIRIGMDTSKSVFVLHGVDAAERPVLRKKLRRRQVLEFFGKLEPTKIGLEACGGAHYWARELRALGHEVVLLPPQYVKPYVKRNKNDAADAEAICEAMSRPTMRFVPVKTAEQQAALMLAGMRDQLIRRRTQLSNAIRGYAAEFGLAAAKGLSKIEPLLARIAEDAALPELARELFAGYGQEYAGLQVRIAKIEAQLMAWHKGNELSRRMVEIPSIGPIGASLLAMKVTDPQAFRSGRDFAAWLGLTPKDHSTAGKTRLGVITRAGDENLRSILVAGATAVIQQVQRGRGHTSPWLVELVKRKPPKLAAVALANKTARIAWKLMVSGEHYDRTRSVGGSQAPVVDREERRAALCGGSAQRSSLRRATPSQRKEMARA

SEQ ID NO: 442289 - protein, 350 aa, unidentified
MIIIGSDFHPEFQQIAFVDTDSGEFLEKRLDHREEAERFYRELAARGVAVRVGMEASGHARWFERLLGELQFELWIGDAAEIRTRRVRKQKTDRQDAQLILQLLVENRFPKIWVPSGENRDLRQLLWHRHRMVQARTRIMNQLQAVALNEGLRCKKRLWREHGRRQLEAFRLAPWASRRRRDLLELMDRLNPTIAELTQAIEQEAEKNPAAHYLMTHPGVGALTALAFVLIIGDSKRFHCGKQIASYLGLVPLEDSSGKRRRLGHITKQGSSILRFLLVEAAQVTVRSLPEWRSKYFHLTMRRGRKIAKVAMARKLAIGLYWMWRKGWSYEQVKKFGSHVGQPGYRHGVK

SEQ ID NO: 442290 - protein, 433 aa, unidentified
MGLIVPTVMPPERADQPPSYDGFVGIDWGSQQQQVSVLDRDRRRMGERVVDHDGASLAQFVAWLWGLSAGQPQRVAVAIEVPRGAIVEGLVERGFHVFAITPKQLDRFRDRHSVAGAKDDRRDAFVLADSLRTDQPSFRRLRLDDPQLLVLRELSRAEETLLEAFRRSANQLRDQLHRFYPQMLQLCSAADAPWLWDLIDLAPTPAHAARLREEQVQGGLKAHRRRRLKAHEVLACLQTPARPVAPGAVQAAQAHCRFLLPCLRGLAEHLQACGQQVGALLHTLAEMPGEGAGPSDVAIVQSLPGVGRKMTAWLFAEAAQPLAERDYQVLRTHGGVAPVTKQSGKRRVVVMRRGGNPRLRHALYHMARVARQRDAHFNSVYAALRAKGQRHGQALRSIGNRLLRILMAMLRHRTCYDASRIHREPVVQMGETI

SEQ ID NO: 442291 - protein, 408 aa, unidentified
MQVLHPKCAGLDVHKDTVVACRRLVVKGKVQAEVRTFPTTSRGLMGLRAWLTQVECSHVVMESTGIYWKPVWHSLEDGFTLLLANPMHVRQVPGRKSDVNDAQWLAELLAHGLIAPSFVPERPTQELRDLTRTHTQLARELGRHTQRIQKTLEDADLKLTGVLSDILGKSGRAILRALIQGERDAARLAGLAMGKAKRKQPELVEALKGSFRAHHAFMVDLHLKQVEALELALAELEARIDAHLDPLRERVRLLCTIPGIGPTSAPVLLAEVGFDMSRFPTVGHLVSWAGLCPQMHESAGKRKSTRIRKGAPWLKAMLVQCAWPAVSVKNSYLRARFLRLKARRGAKKAIVAIAADILRAAYFILQRGEPYRDLGGAFFDRLDTTKATSRLVRKLQALGYDVHITPAA

SEQ ID NO: 442292 - protein, 356 aa, unidentified
MSRDIKYIGMDVHQEATVIAVLNGSGKLVMETILETQASSILQFLHGLRGELHVTWEEGTWAAWLYDLLQPQVEQVLVCNPRRNALLKEGNKSDKVDARKLAELLRTGMLRPVYHGENGLRTLRELGRSYQTIGQDLTRVMNRLKALYRGWGIPCAGTQVYAARYREEWLNKIAQAGVRRRAELLYQQLDGLQALRRNLRPEFLAESRKNKAAKLLRQIPCIGPIRAARLIALMQTPHRFRSKRQLWTYSGLGIETHDSAQFRFVGGQLQRSKKPQQLRGLNRNHNHEMKEIFKSTATRASCGRGPFHDFYAALLAKGMKPEMARLTLARKIAAITLTLWKKGERFDAEQLKTQVA

SEQ ID NO: 442293 - protein, 325 aa, unidentified
MNVLGIDVAKATLVVVLLVGERQQRAEFANSAAGQAKLLNWLTKRGATPLHACLEATGTYGDDLAQTLSDAGHTVSVVNPARIAAYAKAQAARHKTDQADAALIARYCQREQPAAWQSPAPELRELRALVRHLDTVQQQRQAEHNRLEAGGHPAAVTRAIQAHLTFLSEQIGTVEQQIEAHFDQHPDLKRQRELLDSIKGIAVRTATRLLAELGDWQRFANARAVVAYVGLNPREYRSGSSIHRRTRLSKSGNRAVRAALYFPAIVAKQHNPLVQALCARLTARGLCPKAVIGAAMRKLLTLAYGVLKSGQPFDPKYAQAASGQV

SEQ ID NO: 442294 - protein, 371 aa, unidentified
MYIVGIDIGKNHHEASIVSPEGKQIGRSLLFATTHKGADSLMSFIFKNIGNSPCVFGMEATGHYWYPIYSFLKAKGYTIYVINPIQSDSLRKMYIRQTKNDSIDSFLIAEVIRFGQFGTTSMADENILAMRQLCRYRDSVISSRTEIKLRIGTIMEQIFPEYEKQFSSLWVSTSMGILEKYLTPENIENAPIDELFEIIKDKSHNRLTRAKAISIKEAAADTFGIKIAQDAFSFQLKQLIDRMNFLDKQIEALDCQILEYYEKFDCYLHTIPGIGMIAAATILAEIGDINRFKSSSALVAFAGIDPTVRQSGEFSSTHNHMSKRGSPYLRHAIFLAATTCSFHNSPLNAYYKKKRDQGKHHLTATGAVVRL

SEQ ID NO: 442295 - protein, 360 aa, unidentified
MGNERTCVGLDVHAWSVTGHAVDTVTGEVWRRKLTPDRADVCGWVLGLPGPVKVVYEAGPTGYGLFRHLNDHGVSCVVAAPSKVQRPAGDRVKTDARDAALLARLLKLDEIVEVTVPSVEQEAARDLVRAREDVRADLMRARHRLSKMLLRQGIVYTGGKPWTGVHDVWLRRQRFDLPGRQQAYDAAYEAVQQVTDRRARLDAAIVAMAADSTYTPLTRRLCCLRGISTLTGFGLAVEIGDWTRFSGSTIGAFVGLVPTEHSSGNSRFQGSITKTGNTHARRLLVEAAWQHAKPYRTPGKTMRDRWELAPAPARLRGHQGNQRLHERWQRFTARKKNPVIANVAIARELAGWAWSLAVLE

SEQ ID NO: 442296 - protein, 401 aa, unidentified
MNAVGIDVSKGKSMVAIMRPFGETVSPPFEIKHTASDIHSLVELINSVEGESRIVMEHTGRYYEVLAHQLSEANLFVSAINPKLIKDFDNDSLRKVKSDKADAVKIARYALDKWHNLKQYSVMDELRNQLKTMNRQFSFYMKHKTAMKNNLIGILDQTYPGVNAYFDSPARSDGSQKWVDFASTYWHVDCVRKMSLNAFTCHYQNWCKRKKYNFSQSKAEEIYGKAKELVPVLPKDDLTKLIIRQAVDQLNSASTTVESLRTLMNETASKLPEYPIVMDMKGVGKSLGPQLMAEIGDVSRFTHKGAITAFAGVDPGVNESGSYEQKSVPTSKRGSGTLRKTLFQVMDALIKTKPQDDPVYLFMDKKRSQGKPYYVYMTAGANKFLRIYYGRVKEYLSSLPK

SEQ ID NO: 442297 - protein, 301 aa, unidentified
MKEASIIGLDLAKRSFQAHGALADGRVAFRKKLTREKVLGFLAEQPRCVVAMEACGSAHHWGRAIPDAGHEVRSIPPANVKPFVKRQKNDAADAEAIAEAASRPTMRFVAVKTEEQQARAMLFRTRDLLVRQRTQLINALRGQLSEHGVVAPQGPANVAILAQAIDDMTPSLPLLVVELARLHLDQIDGLSEKVAGLEKAIACEAKRGATTRRLQTMPGVGPITAMAIETFAPPMEVFRRGRDFAAWLGLGLVLCNTRPAASRFSGKLPKWAARYSSALILIIGAMVIVSWACRKGVQEGT

SEQ ID NO: 442298 - protein, 409 aa, unidentified
MSQMLVGIDVSLRSHHVQLMNEQGKELTSFSIPNDLAGADTLIQKIMETAKRAKSESVRIGMEATSNLGWHLAHYLQDQLQDQQPKTEIYVFNARKIARFKKGYDTLPKNDRIDAWVIADHLRFGRLPYAMTDTIQFQALQRLTRTRFHLMHSITRDKTYFLNQVYLKFSGLRQDNPFSNSFGSTSLAVIQELEPEQIVKMPMEELINFLKDKGKNRFKNPEEVAQYLQQLARSSYRLNKAMVDPVNISLASILSVINHMESEVRKLDKEIAKLMKGIPQTLVSVKGIGDVLAAGIIAEIGDIKRFDNHNALAKYAGLVWNQHQSGEFEAEDTKRVLTGNKYLRYYLVQAANCVRKHDTEYKSFYQKKYDEVPKHKHKRALVLTARKLVRLVYMLLSTNKLYTPLERRG

SEQ ID NO: 442299 - protein, 415 aa, unidentified
MALKIVYKICCGIDVHKTFVVACIASTNDKGVTSYESHRFSTYTSGLKTLLQWLLDRDCKDVCMESTGKYWIPVYNILESDCSIILAHPKYVKAIRGKKTDKKDAKWIADLFKHDLVAGSFMPPADIRQLRDLMRYRFKLTCFKSSEKNRLQNCLTVSNIQLGNVVSDTFGKSAQAILDKLLENPADTSFDLEPLVYKSLKKKLPELRDAIDGYITPEQAGKLKVIKAHYENLESRKAELEELILALAAPYQQELTILQTAPGISSPFTAIGIISEIGTNMEAFPSAKHLCSWAGLTPTNNESAGKKKSVRVSKAGCYIKPLLVQCANAVVASKKHPEIRNRYLRLKKRRGHKKAIIAIARMLLTALYHMLKNGENYNAELYQKSDLLPVDREITVEQALMIARNQGYKIKSATA

SEQ ID NO: 442300 - protein, 381 aa, unidentified
MTTAAPHNEHGNITEATLFVAFELSEKTWKLGFTTGHGQKPRERTMTARQQERILDEIAQAKRRLGLPETAPVVSCYEAGREGFWLHRFLQAHGITNQVVDSSSIEVNRRRRRAKSDGLDVRKLLSMLIRYAHGERQVWQVVKVPSVEAEDHRHLHRDLETLKQERASTTTRILGLLSSQGLRVTSLTTLPEQLEALRLWDGSPVPPGLRRRVLRVYAHHTFLSEQIAAVEAERRAQLHASTDARIDKVRQLMLLKGIGINGAWLLVMEFFGWRAFKNRREVGGLAGFTPTPYQSGESAREQGITKSGNRHVRWMTTELAWSWLRFQPDSALSGWFRQRFGSGGKRLRRIGIVAVARKLLIALWRFLETGVVPEGAVLKEG

SEQ ID NO: 442301 - protein, 321 aa, unidentified
MTYFGIDVSKVTFVVAYSSVKTNKTRTFKNTVNGVHEFVQTISASEHNCVLEATGNYSALLVYLLSEAGITISLENPLKIKNFARVMLTVTKTDEIDARLIALYGEKMQPAPYKLRSDAILVLKQKRTVLRQLKKQLVATRNLKGSMEVLPFFDPKCKKTIEKTITFLEKQIKEMEEELASLAQGEYKKHMDLLTSIKGIGVTLAAALIVATGRFSYFDNAKQLTRYLGLSPTYQQSGTSVNVKGHINRNGDSSLRSQLYVAAFSSLRCNTECKACFDRLRSNGKPGKVVVIAVANKLVRQAFAVVTQGKPYVDGFKSEKP

SEQ ID NO: 442302 - protein, 358 aa, unidentified
MVDKVTEAAVVGGVDTHKDLHVAAVVDQNNKVLGTQYFSTTRQGYRQMLAWMTSFGTLKRIGVECTGTYGSGLLPYFQNAGLEVLEVTAPDRMERRKRGKSDTIDAECAAHAAFSGIRTVTPKTRDGMIESLRVLKTCRKTAISARRVALQIIHSNIISAPDELREQLRNMTRMQLIRTLGSWRPDASEYRNVTNVYRISLKSLARRYLELHDEIADLDVMIAAIVDELAPELIKRNAIGYESASQLLITAGDNPQRLRSESGFAALCGVSPVPVSSGKTNRYRLNRGGDRAANSALHIIAIGRLRTDAKTKEYVARRVAEGHTKMEAIRCLKRYISREVYTLLRNQNRRINSIPITA

SEQ ID NO: 442303 - protein, 414 aa, unidentified
MDVVHTHCAGLDVHKKTVVASVIVSDGKEGLRKETRTFGTMTSDLLALSDWLMVYGVTHVAMESSGEYWKPVFNILENNFEVLLVNAQHIKAVPGHKTDVKDSEWIAELLRHGLLKASFVPPVGQRELRELTRYRSTFVRERATLVNRVQKVLESANIKLASVASDVMGVSGRAMLEAIIEGQASPAEMAELAQKRMRTKRDLLAKALEGRVKPHHRFVLTELLCQIDSLDETIERFNEQVEEYCRPFKESAVLLDTIPGVGREVAEIIVSEIGTDMSRFPSAGNLASWAGVAPGNNESAGKRRSGKTTKGNKALSTALNQAAHAASHTKDTYLSAQYRRLAARRGKKKAIVALEHTILVIAYHLIKRQEPYRELGGDYFDKRRPEATAKRLVKRLEQLGYSVSLQQPALCAAG

SEQ ID NO: 442304 - protein, 424 aa, unidentified
MSLEFVFCTRFYEISAVDITLHILRKECMIMILVGIDIGKNQHTFSIIDKNTGEILSNPSFFPNNREGFLFLIKKLNTYSKSDLLIGMEDTGHYHFALLKHFLDSRYTVALINPTTTDLTRKLQGGITKNDPLDSLTICDVIGSNQRNKPYRITKVNRFDLYEQKQLTRHHHNLKEELNTYKNRLQKCIDIVFPEFNSLFRSKYGIVYMNVLKTFSSAEKIANSDIRTIRKCFEYNKRGKRISLSAEQLKAAAKTSIGMPSVAEEIQIRHLVCQIEMIEEQLSEIDKKIEEFSLQNNSPILSIPGISHFSGTSILAELGDICNYTKAAQIIKFAGVAPYHYESSQFNAQHTAITKKGSRYLRKTLYQIIFPVIYHNKVFNVYYNKKLAEGKGHRCAQGHCVRKLLRIIYHLLSTGQTFDPALLR

SEQ ID NO: 442305 - protein, 319 aa, unidentified
MQDILETCCGLDVHKETVVACLLKGDRNNKPEAITRTFSTLIPSLEELKTWLEEENCRHVAMESTGVYWQSVYNVLESAFDGTIVLIVANARHMKNVPGKKTDMKDAEWIATLLRAGLLQGSFIPSQPIRRLRDLNRYRKSIVEEITSQKNRIEKHLQSCGFKLSTFLTDIFGVSGRAIIDHLARVGSISPEEVDPLVKKRARNKLNDIKQAVNGNMDRLQRDFLTILLKRLDESLEHLQLIEQKIDEELLKYEQQLKQLDGIPGINKIAAAAILAEIGIDMAQFKTAEHICSWAGLSPGNNESAGKKSPPVHSMGIPI

SEQ ID NO: 442306 - protein, 331 aa, unidentified
MEQHYIGVDLHKALFQACALQINGERLWERRFLRDAEGVAMFCERCDARTEVAVEATGPTWSFVDAIKPPGATVCVVDPRKTRLKAGFAAKTDRLDARRLADALRRDSVVSVYVPPPAIRELREICRGRHQLVRLRTRLAQMIRALLLRSGVADAPVSRLYSARGAAWLQDVRLAAEAERTLRRLERLLRAVQAEIVEAGSVVATHAAADPIAHALDAMVGIGPVRGLTLRAEIGDIARFRHGGRELASYAGLVTRVDRSASHCHYGRITREGSPWLRYVLVEAATNAMKRSDAIGQWARRLARRKGTGIARVALARVLCGEIVRVWPRSA

SEQ ID NO: 442307 - protein, 347 aa, unidentified
MEYFVGLDVSLETVNVCIVNAAGDILLEKKIAAEPAAIFHLLKSFCSPFKRIGLEAGPTSSWLYGELRAAGYGAICLECRHVKAGLSAMRNKTDRNDARGIAQLVRLGWFRQVHVKSEEAQRTRMLLVNRQQLLTKALDIENSVRGSLKVFGLRVGVVARRGFEARVLELVADDPILLAVTEPMLRVRQALLEEFERLDRLCQQLARRDPVCRRLMTVPGVGVVVALTYRTGVDAPERFSKSRDVGAHFGLTPKRYSSGQTDYDGRISRCGDEMVRTALYQAANVMLHHGRWSSLRSWAMRIAKRGSVKGAKVALARRLAVVMHRMWTDGTDFRWSDTSRMTAPTAA

SEQ ID NO: 442308 - protein, 429 aa, unidentified
MKKIRAYRAKQVKNVCMDRVLADRDGQRVEVGLDVGKENLFVVLRWGESDFERPWKVKNPLEIGDLVELLLELNRGRQMTVALEPTGTYGDPARQAFSDAALSVHRVSPKAAHDYGEIFDGVPSKHDGKDAAIVAELSAIGKSSPWPFEMDEWDEELSYWIDHMEARRQMLPMWYGRLEGQLARHWPEATNTLGLTSGVLLRCLATYGGPAGLAAEDVAVEQLRRWGRGRLSKEKCEELLSGARQTVGVHQSSINVRRLQEYAEQALECRRVVAESKKQLKLLTADHAVIQAQASMVGAVTACMLWVHLGDPRRYDSGFAYRKAMGLNLKVRSSGKYKGRLKITKRGHSQVRRWLYFAALRMIKEPDVKRWFEAKKAKNSADPLEAMRALVGVMRKLALALYQVGACGQEFDVSLLFPGSAGSSQTKAA

SEQ ID NO: 442309 - protein, 413 aa, unidentified
MVKTARKGGLMDFYVGIDVSKFKHTVAIIDEEGEIRKKSFDISNSREGFDSLLNELGLLGEKEQIKIGMEATGHYMNCLVRCLISNGYQVQIYNPSLISMFRDSESVNLAKTDNLDAMLIAKYVATHPFTSSPQISYLIGEIRKISRAKYFLFGDKTACYNHLLRYLDEVFPEFVSFFKKNEDGSRKNMGRNLFESPTIRWLLSEYTSPQKMARMRVETGETLRRMSKGAISFNRFNQLRELAKNSIGCSTEVDEQIIRNLITQVRIIDEEIDMLNELLEPLMEELNSPILTIPGIGVNLAAMIIGEIGDISRFSNPEKLIKFAGLDVRVYQSGTINHKGHIRKRGSPILRYALALSVQKLRIHSPVFSEYYYSKLKQGKATNVAIIATTRKLIRVIWKMMTTNQVFDNTKRD

SEQ ID NO: 442310 - protein, 380 aa, unidentified
MNLNTKLEAITDKTLIIGIDVAKKVHVARVIDNRGAELCNSIRFENSRVGFTSFTDYISKLKDLHEKNRVMIGVEPTGVYGHALIAYLQSVGLHVVYILGMQVKRVKELEDNSPSKNDLKDAKVIASLVKDGYYRKIRTFTEGILELKEATRHALQLTKKLTRIKCQIDNFLTQYFPEFNIAFNDKEKKTAMLTLHLFPLPEQICALSADQIVQAWYSNGVIKGIGMKKALQLRRLAAQSIGIKATKAALHAFQDLMSEYDLLAGQEKETWERIRVLLESNKDFKTIMKIPRMTLKLTAYLLAEVGDFRDFSHPQQIVRLAGFNLQESSSGKNRGPAKSPSAAVRCSGGCFTSSSLNSSRTLRQVGISCTSTTPQERTNP

SEQ ID NO: 442311 - protein, 422 aa, unidentified
MMGKERRWFVGVDWGSQEHVVSLYDDEGEKISQRRFAHGGTGLTDMIAWLLRASGGKPGDIHVAIETPHGPIVEAVLERGFNAYSINPKQLDRFRDRFTVSGAKDDSRDADVLADSLRTDMRAFRKLSIADPIVVELREWSRIDEELKVEHVRLTNRLKHQLWRYYPQMLELADDVGANWFLDLFEVVPTPEKAANVREKTIARILKNHRIRRFDATHVLSELRKPALSVAPGTIEAATARIRGLIERIRIINNQIKDAGRQLDRLCKNLSEPVADKDEETSPGQKTEQRDAAILDSLPGVARTVLATLLAEASDTLQRRDYHALRALCGSAPVTRRSGKSCIVVRRYACNQRLRNATYHWAQNAIQHDATSRAKYDALRAKGHGHARALRSVIDRLLNVACAMLNSGTLFNPEFASKQTTG

SEQ ID NO: 442312 - protein, 332 aa, unidentified
MENFYFIGVDVSKKKLDFCVMFEGKVVHEEETSNHQGAIMSLLHHLEEDYGIASGQMLVCAEHTGQYTFPLACACKAVECKLWLENAAEIKYSFGVQRGKNDRVDAKRIAIYASRFQDKVQYYERPTEDIERLKQLESERTLYVTDLAKYKGQMKDQKEYMPKSLYERKMKRLQALMDDLEEAIQSITDEMDEVIASCPVLFRQRELLMSIDGVGRVVATNMIIATEAFTRFGDPRKFNCYAGVAPFSYSSGSSLHSKARVSHRADKVMKRLLHLAAVAVTHRIGGELKKYYERKVAEGKNKMSVINALRAKIVARMFAVIKRNERYKPILS

SEQ ID NO: 442313 - protein, 458 aa, unidentified
MTNTYYIGLDVHKETIAIAYATGGTREEAVYHGPCGGSVLAAERALRKLAEKLGVEFSDLKVCYEAGPTGFVLARRLIRYGLDCVLMSPSKTERKPNEKIKTDKRDACKIARLFRNGDITQVRIPPVLDEAVRDVCRARTDASDDLTRAKQRLNAFLLRNGFNYSGKSKWTPAHMRYLRELVMPHDAHKAVLEEYMQAIDSGIERVERLVDRMKQLLENWEWKPVVKALMACKGFQEVAAMTVISELGDLRRFKHPRALMGFLGLVPGEDSSGPKHRQGSITKCGNSHCRWMLVECAQHYRKAPKIGSRLTTRQIGQSNEVKELSWRMQNRLHKRYVKLKARGKNENKTIVAIARELSAFIWELQVKLKLPIPGVEPQERPSYPASTNLGAAAPNPAELRQLDPVCSPLNPLRGLLPSRPPGEAGGSHPRNPKAPNPPNHNRIIPPATIIHEAEIQQI

SEQ ID NO: 442314 - protein, 388 aa, unidentified
MDVLYQSCAGIDVHQATAVVCILHGPLTSTRPKREMAQFDTTTKGLKACHDFLSQFHVEAVGMESTGVYWRPVWHELCDDFELILAQPAHMKAIPGQKTDKKDAHWIAQLTRIGLLPRSFVPDETIQELRELTRQRKHYVESRNRETNRIHKILQSGGIKLTTYIEDIMGASGRNLLQLLIDETPLTPRMIHQSVYTSLKRKVPQLLEALDGYFSAHHRFMLGQSLEIYDFYQEQIDCLEERMNGYLNLYDRPVEILDSIPGIDLITASVIIAEIGVDMSQFPTAGHLASWAGLCPGNNESAGKKRSTKIRHGNSYLKRCLCQTVFAAKRQKGSPLAERYYQIQSRRGPQKATIALAHQLLKIAYILLKENLTYQEFVLQKRLLETSQ

SEQ ID NO: 442315 - protein, 317 aa, unidentified
MTKIICGVDVSSISLDAFVGPSGPARSFRNTAEGIAELAAFCGQQSVELVAMEASGGYEKQAFALLWAGGVPVALLNPRAMRDFAKGMGLLEKTDRIDARVIAWFAAVKGSAPSAPASAEQQRLKALVTRLRQLTELQAAQRNQRLLVSEATVLESIADLLKVVASQMRMLEGEITALLASDPLWQKLDQALRSIKGVADRTVARVMAEMPEIGTLSNKAVSKLAGLAPLAHDSGKREGRRPVRGGRRNVRAILFVVAGVVRRHDPDFAAFHQRLSAAGKPRKVIRIALAHKLLVRLNARARDARKAFAGAGVCQSA

SEQ ID NO: 442316 - protein, 388 aa, unidentified
MRPISQTTTQKLSHCRPDDATLYASLELSRATWLVTALSPGSEKMSKYSTLGGDGAALLGLLRRLQARAERLAGGPVDIVVIQEAGLDGFWVHRLLNAHGIQSHVVDPASIAVPRRRRRAKTDAIDGETLLRTLLAWQRGEPRVCAMVVPPTPEQEDRRRTSRERAVLLQERVRHVNRIKGLLASQGITDYEPLHKDRRARLAALHTGDGQPLPLRLKAELLREIELVELLIRQIAEVEVERDIAAELDVEGNQSPVALLARLKAIGPQIAAVLYLEGLYRSFANRREVAAYAGLVPTPWRSGTIDREQGISKAGNRRLRHIMIELAWLWVRHQPDSALSRWFRARVGTERGRIRRIAIVALARKLLIALWRYVTHGEVPEGAVFKAA

SEQ ID NO: 442317 - protein, 349 aa, unidentified
MVTVGVDAHKRTHTIVAVDENGAEVGQRTVAATSAGHLEGLRWASQWPERRWAIEDCRHLSRRLTTELLVAGEAVLRVPTKLMAAARRGARTRGKSDPIDALAAARAALREPDLPVAQLDGPARDLRLLVDHREDLVAERTRIENRLRWHLHELQPGEEPPTRSLNRHATLRALEATLAGQPGVVARLARELVVRCRDLTVAINALEREICERVSGMAPRVLALLGCGALSAAKIVGEVGRISRFRSRNAFAMHAGTAPIPVWSGNHERFRLNRGGNRQINCALHRIAITQMQRPGPAQDYLTRRRAAGDTKTEAIRALRRRISDEIYRRLRADEAAANTQLRDFLAAA

SEQ ID NO: 442318 - protein, 404 aa, unidentified
MSAICGIDWASEWHDVRIADAHDGSVLVERRFAHDETGLAGLIDVLVEHRVERVAIERPDGLLVGRLLAAGICVLAIHPNQVAAARDRFRAAAGKSDRFDAMVLCELARTDQHRFALLAPCSDETLALRALVRAREDLVAVRVQLANQLRAQLDCFWPGAGRIFAAVDSPIALAFLARYPGPEDARSLGPKRLAGFLARHAYCGRRPVEDLLDRLRAAPIAAIGDLEHDARRAAVASLVTTLTPIVEQISQLTSQIAGAVRAHPDGPIFLSFFRDPKSVVTAAGLLAEIGDHRARYPTEASLAADAGQAPVAKQSGKQRHATFRWACDKRLRSHIGVLADSTRHWHPWAHDVYTRANARGKDHPHAIRILGRAWTRVLWRCWQDQTPYDPSQHGNLNRLLARRG

SEQ ID NO: 442319 - protein, 342 aa, unidentified
MSITTLGIDIAKSVFQLHGIDEAGKVVIRKKLRRSAVLDTLRKLEPCLIGLEACATAHYWAREISALGHEVKLMPPAYVKPYVKRQKNDMADAEAICEAVTRPTMRFVPIKSAERQGVLVLHRTRDLLMRQRTMLLNAARGHLAEFGLIAPQGPRRMLELIAQMREGAHTDLPEIARTALLGIGGQLDALAQQIQALERQLLAWHRRDTTSQRLETIPGVGIITATALAASVPDPSVFRSGRQFAAFLGLTPRQNSSGGKDRLGHISKMGDGYLRRLLVVGATSVIRRAETNPSATGAWVRSLMTRKPRRLTTVAMANKTARIAWAVLARGETYRAPALAEG

SEQ ID NO: 442320 - protein, 375 aa, unidentified
MKSITKFVGLDVSRDKIAVAVAERGVGAARYLGVYPNTLEAVRKLLNRLGRPEELHVCYEAGVTGYGLARFLRGLKIECMVVAPSKIPLVPGPRVKTDRKDAVMLAERLRTADLVSVWVPDEADEALRDLVRARKARMEDLKRAKQRVNMLLLRHGITKPEKTTPWSERYRAWLRGLELPQKNSQAVLQEYIIAVEEVEQGVRRLELLIKDTAANSPHAPVIQALQALRGVQVIAAATIVAEVGDFTRFAHPEQLMAYAGMTPRESSSGDRVSRGGITKTGSPELRWICNQIAHSYRYSPKVAGDLARRLEGLSPEIQAIAWKAQIRLHKKLVRLMAKGKCRQVAVTAVAREFLGFAWAIGQKVCFETALGKRSA

SEQ ID NO: 442321 - protein, 378 aa, unidentified
MKRILKIGMDVHTTNYTLCAMEPIIGEDDRVFATIKVTPDYKNILMFIENLKLKLGLNDEYDIQCGYEAGCLGYSLYNQLTAAGIKCVILAPTTMLTPQGVRIKTDMRDAYMIAQCLSYGGYHAVYIPTEDDDSVKEYLRMRNDHKLALKKIKQQINAFCIRHGFCYDGTKWTLSHLKWLKKLEITNGLYRETLDEYMASYEEQEAKIERYDKRIGEIAEQTRYHDKVKKLGCFLGIKTHTALSLIVETGDFERFAKGNQYASYLGLAPGENSSSDNIHRLGITKAGNSHLRQLLIEASGGICKGAVGYKSKELRARQNGNTAEVIAYADKANTRLRSRYYKFIRHGKKRNVAVAAIARELACFVWGMMTDNIEMKAA

SEQ ID NO: 442322 - protein, 343 aa, unidentified
MKLHVVGIDLGKTVFHLVGLDSTGRVVIRKKCSRTQLLAFTANLQVELIGMESCSGSHFLGRALREQGHEVRLMPAQYVKPYVQTNKSDFLDAEAIAEAVQRPRMRFVPIKTEEQLDLQALHRVRERWVMRRTAVVNQIRSLLLERGLTLPKGRRYVDQMLPRILEDAELGLSGSFRVLLAQLKLELDQLGARIEEMDRVIQKTAKENEDCQRLTEIPGVGPVTATALIAAVGNASAFRKGRNLAAWMGIVPGEYTTGGKQKLLGISKRGNKYLRTLFIQGARSVLQQRDKQAPGLSSWLAQLLARAHQNVVIVALANKLVRMAWAVLCKNERYRAPVLAVTI

SEQ ID NO: 442323 - protein, 427 aa, unidentified
MHYTQNDKIRQATEGTIVLGVDIGSEKNYLRAFEPNGIEITKKAISFLNTLEGFKSFEEIVTNMTVPLAGKKIIVGVEPTGHYWFNFADYCQSKNMTVVTVAPQHVKHSKEMDDNTQRKDDRKDPRVIAKLVIEGRYCIPYRPKGVYAELRVAYNRRCEIVEAETRAKNRIRRWFDLYFPEYRKVYGSVAAITGMVILKQAPLPQDIVSLGVDGILQIWRANKLRAAGLKRAKTLFEAAQRSICPPDAGRAVRMELWQLLEEYEYIKKQLHEADIMIGIVTAEIPEVNELMKIPGIGLITAAGMISEIGDIRRFDDPRQIQKLAGLAIVVNESGKHKGQSEISRRGRKRLRKILFQAALVLVRSNKEFKTIHEYFTTREKNPLKKKQSLMAVAAKLIRVCFGMVKNGTPYDPAKVLKDIRRAEPKVA

SEQ ID NO: 442324 - protein, 400 aa, unidentified
MGTDGITFVGMDAHKKAINVAMLLPGAHQPIEWQVANEPAAIRRLAKKLEREAPGEVRSCYEAGPCGYALQRELEAAAGIICEVVAPSLIPVKPGERIKTDRRDARKLAELQRANLLTVVHPPTTDEESMRDLCRCREDAQEDLTRSRQRMGKMLLRRGLVFRVCKKAWGKLHRQWLRGLSFEHVADQAVFGDYLLAIEQLEERVRTLEAQLTEAAERDPYREPVGWLRCFRGIDTVTAITLVAELHDFRRFGSARELMAYLGLVPSEYSSGASRHRGSITKTGNRHARRVLVETAWHYRHRSKSGETLRRRREGQPARVIALADRAQERLCRRYRHLVERGKPTPKVVVAIARELVGFLWAALVPAVSSQESVSDARPVTQKSRTSTIVAQRAPTDAVS

SEQ ID NO: 442325 - protein, 405 aa, unidentified
MLYLGIDQHKAQITVNLRNEHGDVIHQRQVSTNHAKIDDFFAQLKKQAAKTKGFMAIVEICGFNHWLIKKLEDYDCKEIVVMQPEKTSNKKTDRRDANALCELLWNNRKRLKNGERPNGIRRVVWPTPEDADVRQLASLRRHLVRQRSKCIIKIRACLRKHNLEQDCPVKQYTTKKAGEWLKTLELPLIDRLEIDVLLAVWKTLKTELLKVEKELATRSETDKNVLLLVVIPGITHLGAAALLSRIGDIERFPTPDSLANYFGLTPGCRNSGEKTQQHTPITKAGSSLARSILNTAVDHVVRKDKAMKDWHKGIKKRKGPKVARVAVMRRLATIVWHILKRQTTYQFHYDPIATVQTKTKPHKKSRSGFLRHDSGVQGIVHTQGVVEESKKNLPPGKCSAGEKVP

SEQ ID NO: 442326 - protein, 411 aa, unidentified
MDVLYPVCCGLDVHKKTITACLRFPSARARAEEVRTFGTTTRELLRLADWLTAAGCTHVAMESTGVYWRPVYHILEASFEVLLVNAQHVKAVPGRKTDVKDCQWLAQLLEHGLLRGSFVPPAPLRELRELTRYRRQLVQEHAREANRVQKVLETANIKLGDVATDVLGVSGRAMLHALIAGERDPERLADLARGALRQKADALREALVGRFTLHHAFMLQGLLDHIEFLDQQIARFDERIEEQTRPFGPAIERLDTIPGVGRRSAEQILAELGDDMRRFPTAAQAASWSGICPGNHESAGKRRSGRTRKGNAWLRSTLVESARAAVRNRGCYLSAQYHALARRRGDKKAIVAVAHSILVAAWHILRDGVEYRDLGPDHFDRLNRERLVQYHTRRLAELGLTVQLPGAQATA

SEQ ID NO: 442327 - protein, 392 aa, unidentified
MAGVRHMVGGTVRREVQTFKTTTKDLMALSEWLSAEGCTHIAMEATGIYWKPVWHVLGDSEFELVLANAAHVKNVPGRKTDVNDATWLADLMAHGLIRGSFVPDAHTQELRALLRTRKQFVRERSSHIQRLQKTLEDANIKLDSALSDVMGMSGRAMIEALIAGESDPDTLAGLAHRRVKAPPEELREALRGRVTKHHRFLLQLHLQQIDAIDAAISEIDREVDANVEPFRTAITILITIPGVSDLSARVIMAEIGNDMSRFPTAGHLISWAGLCPKNDESAGKRRSTRMRKGAPWLKTTLIQCAWAGARKKASYLQAQFHRLRARRGSKKAIGAVAASILTAAYHMLAHGTLYQDLGPDHFDRRAKATQTRRLVTRLHNLGYAVQITPLAA

SEQ ID NO: 442328 - protein, 428 aa, unidentified
MNYNQNKKIMQVTERTVVIGVDIAKHKHFARALNYRGVELGKAISFNNSSNGFASLSYWITELKKRHGLDHVIVGMEPTGHYWLNLEQWLRKHGMKQVLVNPAHAKKAKELDDNSPTKNDLKDAYTIAKLVVDGRYSEPHIPEEEYAELRLAMNHREQLVKDQNAIKCRIVNWLDRFFPEFTQVFKTWDGKAALSTLENFPLPADICELTAEEIVLTWRKTVSRSVGLKKAMELIEVARHSVGLDNGLSMARNTLMSLLRQYRMLENELNELECVVENLLKQIPAVSYMLDIKGLGVITIAGIIAETGNLTNYRHHRQLQRLAGLNLKENSSGEHKGKTTIAKRGRPRLRALLFRAIMPLVSKNPEFKALHKHFTTRENNPLKKMQSMIALCCRLLRVLFAIAKYEVPYNPDKVLESIKQQNNLSLAA

SEQ ID NO: 442329 - protein, 450 aa, unidentified
MNKGVKKTGKGKKEISFQLVNPMAAGIDVSVSEMVVAIPESLAQESVRAFGTMTCDLRELCNWLKECEIETVAMESTGVYWQPLFYMLLSAGFDVCLVNAAHVKNVSGRKTDESDAQWIQKLHSCGLLSGSYLPEDVQRSIRCLTRTRRSYTEEQNKHLNRIQKELESMNIKFHTIINSIAGVSGMAVLHAILDGERNPESFLPYIDPRVKASREEIIKSLEGNWDPTHLFLLAIHVASYKECQKTIEELDKELEKKLVLLEAKVNHGEVKSQPELTKRGHKNSPQAQVEQHLQNIHGVNVLSIYGMGMISALEILAETGIDLSKWRNENHFVSWLNLCPNNKRSGGKELSSKVPRRRANPASQAFKSAANALQRSQHWLGDYFRRMKSRGGNKYAIVATANKLAKIYYRMIQEKEEFKPINLQEYRTKFNQDKIAYLERKLQLLKNQAA

SEQ ID NO: 442330 - protein, 340 aa, unidentified
MSEITTIGLDLAKHVFQVHGIDAEGTTVLRKRLRRNQVLGFFSRLPRCVVGLEACATAQYWARELGALGHEVRLMPAQYVKAYVKRNKNDAADAEAICEAVQRPTMRFVAVKTAEQQAAQLLHRGREQLVRQRTMLVNALRAHLAEFGMVAAQGLRNVARLIAIVRDASDLRLPDVARQVLQVLSAQLEHIEAAIAALEKQLMAWHKANAVSQRLASIPGIGPIIATAIATTVADPGMFRSGREFAAWLGLVPRQNSTGGKTRLGGITKRGNRYLRRLLINGASANLLRSKATKADPWVIGLRRRRPPLVVAVALANKTARIAWAVMLRKTEYQPRAVAA

SEQ ID NO: 442331 - protein, 411 aa, unidentified
MPKIVYPICCGIDVHKSFVVACIAVTDKNLVTTYSKPKRFSSFTNDLRRLAKWLSDNNCHDVCMESTGKYWIPVWNILEPTCKLVLAHPKYTKAIKGKKTDKRDAKWIADVFKHDMVNGSFIPPADIRQLRDLVRYHFKLTGYTTGEKNRAQNCLTVSNIKLDDVFSNVFGKSASAITARLLENNEPFDVAPYVSRKCKTPIPEIQAAVDGMMCANQAEKLRIIRSHMDSLELCKTNLESEILTVAEKHLPQINLVSTVPGIGAFSAVAVIGEISVDMSVFETSRHLCSWAGLTPQNDQSAGKKKTTRISRAGVYLKPLLVQCALAAIKSNKHPEVRNRYNAIKKRRGHKKAIIAIARMLLTAIYNILKKNEPYNAALYRQSDKPPVHREVSVEQAIFILQRQGYLVTAST

SEQ ID NO: 442332 - protein, 340 aa, unidentified
MNKFTKKKVFIGIDISKDQLDLGLLKEENYGSFEDKKVPNSFSGFETILKWLEKKDVKLEDCLFCMEHTGTYGLLFFAWLSQMELDFTVEPGLKIKRSIGVTRGKNDKIDARRIADYAYSNRAKLEPFIMPSALLIQIKQLLTYRDQLTRVRTSLKNSLKSHCQYERVSGLKKITEEITSQIEEYGKRIESVGKQIETLIESDKELEKNYKLATSVKGIGFVIATFMLVTTNNFTSFENGRKYACYSGIAPFEHTSGTSIRGKTRVSNLANKKMKSLLSNGSNSACKWDPELKNYYKRKIAEGKDHNLVINSISCKLVNRVFAVVKRQTPFVLTYKQNFC

SEQ ID NO: 442333 - protein, 436 aa, unidentified
MSKNTFELTHPNAAGIDIGASSHFVAVPSDRDEQPVREFPSFTEDLYALADWLTACGVDTVAMESTGVYWIPLFELLESRGFTVYLVNARHVKNVSGRKSDVLDCQWLQQLMSFGLLSGAFRPRGDFCALREVARLRERLIREQARHIQHIQKALLLMEVISDVMGETGQKIIRAILAGERDGQVLAQLRNNHIKASEADIAKALQGNWREEHLFALKQAVALYDAYAVQLLECDLQLEKMLKGLARNGLKPDKPKRNHGKPKNAPKFDARTLLLQMCGVDLTRIDGIDVTTAFKVLAEIGADLSRFKNAKHFASWLGLCPGTKISGGKVISAATHGNSNRAAQALKMAAISLRSSQSALGAYYRRLCARMDKGKAVTACAHKLARLIYAMLTQGEAYVDQGQAQYEEKYRQRVIKNLTKRAGQLGFQLIPVTEGV

SEQ ID NO: 442334 - protein, 400 aa, unidentified
MISVGIDVSKGKSTVCILKPYGEIVSKPFNITHTQKDLSELSSMLFRLNDEVKIVMEATGIYHLPVLTYLQEKGFFVSVINPYLMKSYRNESLRKAKTDKIDSRIIANYGIDHWFKMKEFQTSGEIYEELKLLGQQYRHYMKLHLLSLAELTHLLDLTMPGIKNLLASWNETNRKDKRSDFVERFWHYDVITSMSEQEFTEEYILWAKEKKYVPSQEKAKVIYTLAQESIPTLPSETSSVKMMVTEAVRVLKEVDATLGLILSRMQEIAKTLPEYSVVREMGGVGNTLAPKLIAEIGDVRRFRNGKALVAFAGIDPPPYESGQFVGCNRKISKRGSASLRKVGYETMRSLKMRSRPEDPVYRYVVKKESEGKSKKSAKIAGLNKFLRIYYARVTELYKNI

SEQ ID NO: 442335 - protein, 332 aa, unidentified
MAEGGELVEQRIRTEPERFAAVLGKRPRARLLIEASTDSEWVARGLEALGPAGIVADPNFAPLYATRTRKVKTDRRDARALADACLLGAYRPAHRLSDPQRHVRGRLGGRDALVRTRTRYISLIRALLRQHGYRVPSGSAAHLIQRVQRLPLPGRWRSVVAPLLAVMRPLNEQLAYSDERIEPLAAQDPRVPRLRSVPGVGPVTAAACLAAVDDAQRFRHAHHLEAYLGLVPRESSSGETQRRGPITKAGHSRTRWLLLHAAVSILRRHPPEAEALRTWALRIAARRGTQVAVVALARRLAGILYALLRDGSVFEPQRVRPPRPTAPALVAS

SEQ ID NO: 442336 - protein, 400 aa, unidentified
MRAVFGIDVSKASSEVAILVNGEKVHGYTISNDALGFARLLGDLKTVHKPEIIFEATGVYSRRLQAFLEDNGYAYTRLNPLEAKKQLDSLRVRKTDQIDAEKLAQSQFVLNRKPTYVQEEVYQELRDLSRFYQNLTEDIVRAKNRLHKVLQVTFPELETILSTPTGEQYGNLVVAFPCKDFVLDLSKDELSESIRQSTSKRISDKRVAYLVEKLTALANQSYCAVKKTSPIMEEVRYYAKELLRLSEQRQTVLDQMVELAQPLPEYDILLSIPGIAETTATSIIGELGDIRRFQSANQINAFIGIDLRHYESGNFLAKEHITKRGNPYARKILFKCIHNIASASHTNPCHIADFYEKRKRQSQTTSTKPHTIASIHRLIRTMYYLIMHNKLYDYASTQNR

SEQ ID NO: 442337 - protein, 331 aa, unidentified
MKKKDVIGIDVSKLTIDAYLKLAQAHAVFGNDTKGFGQLVKWIRKHTDFKTEELLICFETTGLYSLQLASFLSQSNIDFVMENPIQIKRSMGLVRGKDDLVDSKRIAEYAYMRKEKLKLTQLPSEELIKMQNLLAIRERMIRQKAGYQASLSEYKRVLVQQQHKDFFLLLNNMINTLKKQIRKADEALMEIIYSSSKLLNLYTLLTSIKGIGVILAANIMVTTICFTKFNDSRKYACYCGTAPFKYSSGTSIKGRTKVSQMANKKMKALFNLAALSAIQHDPELKLYFDNRIANGANGMSTINIIRNKIIHRVFAVVKRGTPYVVMAKYAA

SEQ ID NO: 442338 - protein, 397 aa, unidentified
MIAVGIDISKAKSTVAVIDSDGTVLASPFTMAHTQPEMEAFVTYLKGLGEPTTILMEYTGHYHYPVLKKLQDEGFPVCIVNPYQMKKYGDVEIHKAKTDKKDALRIAAYALEKSYKLVPYSSMEQKYEDLKFLSRQYNQRISYVAKLKVQLIALLDQTMPGITRILPLNSRNPEKCALLLFIKRFKSFDEIHRIGKARFLASYDVLAKKTSERSASSKGLSIYELAVDSITTRGEDPYIWLSQNQCVDLLSTTQNAADEIISQMRNIAETIPEYKVLRAMRGVGDRLGPIILAEIGDIRRFHSGKALNSYAGNDAPPYQSGQFESRNRHISKRGSSALRKACYEVMQALKLTKPQDDPVYLFMLKKEQEGKPFNVAKMAGVNKFLRIYYARAMELYK

SEQ ID NO: 442339 - protein, 444 aa, unidentified
MSNRRGLSRGDKRRNARLSRLREVVRLDHAVLAVDLASTKQVCVLTDHVSRVLARRTVWCRPWGLVEVIEWGRREAVGAGYVGVTVSCEPTGHRWKVVAELADRAAVSLVCVQPLAVARARESEDYTRDKSDAKDALVIARLTTQLRVYLPERQDPTYARLRHLGALRMQYLTARGAARQRLRDLLECAWPAALEAAAKPLDSMTWLAAMDVAGCDPARIRALGRARFGRAVAARLPAWGATRACRRIIDAVYAATRDSRGVPAQRPAGLERAAYALTDLADARTQMDRVEASLVAVLDQLDLTGLVTSIAGLSAVGAATILAETGDLTRFDSARAVVKHAGLCPRENSSGNYTGKTTISGRGRPTLRLAAWRAVWGAVHANPVLAARYQHLTSREHNKLTDHQARVAIAGSLLRQLHAVVTTGTPWNPTTAAGSHRRTEVSAA

SEQ ID NO: 442340 - protein, 350 aa, unidentified
MKYYAGLDVSVKETSVCIVDESGKLCREKKVVTHPDDLVAVLSDPAFNFERIGLEAGPLSQWLFEGLAKAGFAVVCIETRNTKAFLKAQQLNKSDRNDARGIAHMMRVGLFKDVHVKTLTSQKRRALLTARKLLQEKAIAMENDMRGLLRNFGLKVGTIRAFKFDERIRELVEAAPDLAEIIESLLAARQKLREEFVKLDRKIRGEARVDPVCRQLMTVPGVGPIVALAYTSTIDIPSRFRHLRAVGAVLGLTPVLNQSGESSRIGHVSLCGDGMLRGLLYEAAQVLLIRVKKWSWLKAWAMNVAKRHGIKKAIVALARRLAVVLHRMWVDRSEFRWTREATPTTTDATA

SEQ ID NO: 442341 - protein, 313 aa, unidentified
MQNIIVAGIDVSKSKADLCILPDGIVATFSLDDDGIAALIENLRTSAVNLAVMEATGGYEAKLAAAIFHADILVAVVNPRQIRNYARAIGRTAKTDSIDAEVIALFARDVKPSPRALPDAEAAKLKELIDRRVQLVKVKTAETNRLQQASNAKVIASIKRTIRHLEKELKAIDTDIDKHIKDSPIWLEKAELLKTVKGIGDATTRILIADLPELGKLTRYQIAALVGVAPMNRDSGKYRGYRKISGGRSHVRHALYMATLSAIRYNPKIKAFHDRLKQNGKKGLVIMVACMRKLLLVLNAMARDNTTWNPKNA

SEQ ID NO: 442342 - protein, 456 aa, unidentified
MSRKRRSSKKTGTPVLHSLNPNAAGVDIGATEIYIAVPADRDAQPVRHFSTFTEDLHAAADWLKSCNIETVAMESTGVYWIPFFQILEARGLQVFLVNAHHVKNVPGRKSDVSDCQWLQYLHSVGLLRGSFRPEQEVCTVRSILRHRDGLVQMASSHVQHIQKALDQMNLQLHHVISDITGMTGLAIIEAILAGERNPQTLAKLRDGRIKATESTIAKSLVGDYRREHLFTLGQSLAAYRHYQKLIGACDKEIEQYLETFESKADPPEDPKWKSQDGQNTRGGKPGFDLQSHLYRIFGVDLTQIPGVHTLTTQTLLAEIGPDLSRFANAAAFTSWLGLCPDNRISGGKILSVKTRKVKNRAATALRMAAQSLYRSQSYLGHYFRRMRAKLGAPKAITAAAHKLARVIYHMLTTRQAYDETICVQNELQNRQRLEARLRKQARDLGLEIIPAKTGAV

SEQ ID NO: 442343 - protein, 419 aa, unidentified
MFKIFRKNCCGLDVHKTWIYACIGITDTDGKTEYKQARFSTFSKGLRELADWLAKYSCIEVCMESSGKYWIPVFNVLEKTCLVTLSHPKYTKPQKGNKTDRKDAKWICDLFMCEMIKPSFIPPPDIRHLRDLMRYRFKLTNILTGEKNRAHNCLTVSNLKLDEVFSDVFGKSAMSITYYILEHPGEHFSVEPFVDKRCKHPLEEIQAAVDGSISHEQAIKLREILFHIDELEVHRQNIEDEIMRLAAPYILQLDLIRTVPGFSANPMTAIAVISEIGTDMSVFPTAKNLSSWAGCCPRNDQSGGKRKSTRISRAGCYLKPLLVQVANAVVKSSKCPEFAERYRRIKSRRGHKKAIIAICRMLLTAIWNMLSKGEPYSPLGYLAEQKIKEAPFITKSQALNYMRSKGYIIMEDLLFKSPT

SEQ ID NO: 442344 - protein, 344 aa, unidentified
MYFIGVDHHKQVSVMTVLDEDGRELRNERVVNLRNHVQRFLEAYRPFTAVLEAGRASYVMADLLRELGGEVKMANPIQVKAIAHARIKTDKRDSRTLAYLLRADLIPEIYQREAWNRRAQRVMRMRAFWVEKKTEVMNKIRTLLAQQREEVRLEVEKRSGGLFSERGLKLLENLRFEEKDKEILGDLIQGYREIVAHIKTSDGTVRALYGEMEEAVRIDTVPGFAATLSVLTAVEIADVSRFRRVEELHAYAGLIPSTYSSGGRTYHGHITKQGNAWLRWAAVEAVKGACQKDLVLRALYSRLAKRKGRNIARIVVARRLLTIIYRVLTEKRDYIPELQKQSAA

SEQ ID NO: 442345 - protein, 419 aa, unidentified
MTRKRSKVCGIDVHKAFVVATTLDRDDNSETKRYKQNFGSLIELRDWILSSKCESVAFESTADYWRPLYMVLEPHITITVANAYHIKHIPGKKTDVIDSRWIAELELNGLITPSRICTGEHYDLRTLTRYRETLVNTRTVYKNKVHHQLDLCGIKLCDYMKDIFGKTGYPILKGTVERKSKEEIKESLPKKSRNKAERFFSAIPSDIPEHILFVLDSALTMIDNLTEQIKKVEERIKFLLNQRKRELRILMSIPGVGFIGTAILLAEIGNAHDFPNSDKLAKWAGLTPSVYQSANTNYTGPITKQGSPHLRRILIECAHAAVRSSGRLKNCFNRHFPGKGYKKAIVAVARKILRIAWHLLVNDEEFVDEDAKSKDVWIPKMPSVMQKIGIEKVIELLSRGAEMIIQEESREVMRLKLDT

SEQ ID NO: 442346 - protein, 353 aa, unidentified
MKGESSRNEVILGVDTHLDVHVGVVIDQAGKFLGGKSVSANSVGYGDLFRWASSFGCVATAGVEGTGTYGAGLCRQLTANGVRVIEVNRPDRAIRRLQGKSDPTDAECAARSVLSGKSTAIPKQQSGACEAMRITSVARRSAVKAKTQAINQIRALLISAPQDTREKLWKTKAIDCVSACSRIRSLGDTALLQTMTITLKSLARRWLMLSEELKQLDRQLDELTQKYAGQLRGRFGVGPQTAAILLSVAGDNPERLKSEAALASLCGVNPVPASSGKTIRHRLNRGGSRSANNALWTIAMVRMRSDPRTRSYVERRTSEGLTTKEIHRCLKRYIVRELFPVILSDLDNVRGDA

SEQ ID NO: 442347 - protein, 339 aa, unidentified
MIACGFDVHRAQITFDLVDHETGELRRGRVVPATRAQLRVWLSGVDTSRLVVAVEGTTGWRFVAEEVEAAGARAVLAEPGETRALRGPKRRAKTDRADARWLRELLERGELPLSWIPPQHLLELRCRVRLRQTLADERRGWLQRVHAQLFHHGIPVAGELAKPAAREWLQTAELSPAGRTAVETALATVDFLDTQLATLDDELHRYARAHPATRALVRLYGVGDLTAVAIYAAVGDARRFSSARKVIRLAGLDVTVHESDRKRQPGRISRQGPPMLRWAAYEAGLAACRSSSPDHADYLALRARLGHKTACLTVSRRVLRRAYHALVAVGDATLEPAPS

SEQ ID NO: 442348 - protein, 358 aa, unidentified
MKKIVIGIDISKEKIDASAIDVRDSQLGVLRLDYQVFDNRPMGFRRMLVWARHLMKGATLQDVLFCCETTGGYDRCLCDYIYGKGLDIWREGALQIKRSMGVRKGKDDKADSLMIAEYAMRHMDKAVIYESPNETIRELKALFLYRHKLVQEKAEKQVRAAHLTDTASKSKSMRFILRDARKSMKAIQKSIKECEKQILELIESDEELQRNYNHIVSVKGLSIVNATAFIAYSNNFRGITTANKMASYYGIASFRDRSGTSVDKKACVKYYSCSLLRATITQAAEWTVKENGIYRDYYLRLKTEGKPYGVIINNVKNKLIHLVFSLVTNDVDYERNHEFLRAKRKSEQAMSAQLKTFN

SEQ ID NO: 442349 - protein, 354 aa, unidentified
MQTIAPTDIVIGVDTHKHIHAAVALNGLGARLGTTSIPVSPKGYRELEVWACAFGCVRAFGIEGTGSYGAGLSRALVAQGHTVVEVNRPNRQVRHQHGKSDPIDAESAARSVLAGQATARPKSGSSAVEMIRQLKVVRDTAVKSRTRAMVTLKTLIINAPAALREQLDRLTGRVALVRHLAGLRPGPLTSTIASTKAALKALARRWLMLDAEIKEHDAALDDLTNRCAAGLKAAFGIATGTVAEMLILVGDNPERIRSEAAFAKLCGVSPVPASSGKTSRHRLNRGGNRQANAALYRVVITRMRGHQPTLAYVEKRVAQGRTKREIVRCLKRYVAREIFGHLCGCGGRISHETT

SEQ ID NO: 442350 - protein, 344 aa, unidentified
MTAEPTIVGIDLGKNWFHLIGLDARGATVLRRKVNRLQLAEYAATAPRCVVATESCPGSQYWGRVFTKAGHEVRILPAQFVKPYLKANKNDFNDAEAIAEAAGRASMRWVPLKTNEQLELQALHRVRRRFIIERTAVVNQMRALLLAHGIVIPLGRALFARRLPALFEDAENGLAPRLVVLLHRLRQRWLAIDVEIDQATRDLTEWAEQSDLCRRAATVPGIGPIIATAVVAAVGNGRMFARGRGMAAWLGLVPRQYSTGGKPTLGGISKRGNTYLRQLFIQGANALYLHMKRDRSSLGEWLRQIEGRSHRHGAIVALANKMVRICWKVLTSEQVDEPYPARVA

SEQ ID NO: 442351 - protein, 467 aa, unidentified
MKADKKPWQSLNRKERKQWVRRLQSQDPGLDVVHAQAAGIDVGNEAHYVAVRPDRDPEPVRRFECFTADLYRLADWLQSCGVKTVAMQSTGVYWIPLYDILEERGFEVYLVNARHTKNLPGRKSDVQECQWLLKLHTYGLLNNSFQPPSEIRVLRTYWRQRAEHVRGAATCIQRMQKALTQMNVQLANVISDLSGLTGQTIVRAIVAGERDPQKLAELRDPRVQASPKEIAKSLEGNWRPELLFLLQQEIEMYDTYQRRVAECDQQLQRQLISFPGSVAPKQREGEGKRKRAKPAKNAPGFDLGTELQRITGVDLTRIDGIDVMVAQTVLAEVGLDMSRWKTEAHFSSWLGLCPDNRITGDKVLSRGTRRVVNRAATALRMAANALLRSQTYLGAQYRRLRTKLGAPKAITAMAHRLARLIYRMLKYGQRYVDKGAEYYEQKYRNQQLQFLQKKAAQLGFRITEAQA

SEQ ID NO: 442352 - protein, 324 aa, unidentified
MKIYVGIDIAKLNHFAAAISSDGEILIEPFKFTNDADGFQLLVSKLESFDKNSIIIGLESTAHYGDNLVRYLVAEFYQVCVLNPIKTCQMRKNNVRKTKTDKVDTFVIAKTLMMQDDLRFISFYDLDMMDLKALGRFRQKTIKQRTRLKIQLTTYVDQVFPEIQYFFKSGLHQNAVYALLKEAPSPKEIASMHMTHLANLLKVNSHGHFTKEQAKELRVLAQKSVGANDSAISIQITQTIQQIELLDSQLEKIEAEMTDIMKFNDSVIMTIPGIGYINGGMILGEIGDIHRFSNPNKLLAFAGLDPSVYQSGNFQAKTSSIISS

SEQ ID NO: 442353 - protein, 310 aa, unidentified
MTPSLVYLGLDVAKTTLAGHCAQERFSLPNTAAGHRALLTRIRSANTPVQVICEATGGYERPLVAALQQAGQPVSVLHPTRARQLARGLGYLAKNDALDAAALARIGAVLQPAPTAAPTAGAALLAALVTRRDQLTELLRREKQHRETTTPAVLRRDLDQSLKALQKRLEKCEALIRQHLQAHPALAQKAARLQEAPGVGFVGAVTLLAALPELGLGSAARISSLAGLAPRDHDSGAFRGERHVHGGRPKIRRILYLCALSAVRHHPKLKPFYQRLRLAGKPPKVALTAAARKLLTYLHSALKNPLFQLA

SEQ ID NO: 442354 - protein, 338 aa, unidentified
MSVYAAIDLHSNNSVLAVLDESDRVLCQRRLPNELSVILRELEPFHNELAGVVVESTYNWYWLVDGLMAHGYRVHLAHTSAVPQYAGLKHGDDESDARHLAHLLRLGILPEGYIYPRAQRSVRDLLRRRFGLVRTATRLLLSVQSSWARHTGQGLSANAFRQLDDAAIEASLSDPIVRLSVLTQIKVWQSIQEQVRQMEKWVSESADCRRELIALRSIPGVGVTLSTTIALETGDVTRFAQVGDYASYCRMVKSERLSNGKKKGTGNRKNGNKYLAWAYIEAATFAMRFSPEIKRWYTRKCAKHHKVSALKAVAHKLARVSFFLLRDGGRFDVHRAFG

SEQ ID NO: 442355 - protein, 353 aa, unidentified
MKDQRTYFVGIDLHKDYSTITVLDEAGNELDQRNVPNDAEDFTIYFKQWEGKMKVALEATYNWYWLVDLLQRLGLEVKLAHPYKTRIIGEAKVKTDKIDSRILAQLLRADFLPTSFIADPKMRDDREWLRHRIYLVRLQTSVKTRIHCLVDKYNIRHGFSDLFGKEGIAFLHSLSFPERTQKCLEGLLRTLGYLQEELRPLRNEIIASGKEDEEARLLESLPGFGYFSSLLLLKEIGTVERFASPKKLVSYSGLAPGISSSGGKSYGKGITKQGNKYLRWLLIQAASSVVRTKKDRRLMGLYSRVQHRKNSKIAKVAVAKELLTIAYFILKHREPYDPMRLYRNDRRAILNGV

SEQ ID NO: 442356 - protein, 423 aa, unidentified
MEVMHERVAGLDVHKEAVVCCVRIVAGGKASRECRTFETTTAGLEALLSWLTQSGCTHVAMEATGVYWKPVWNILSDGKFELILANAAHIKNVPGRKTDVNDAMWIADLAAFGLIKASFVPEEKIQELRSLMRARKQLVREQTRHIQRIQKTLEAANIKLDSVISDIMGLSGRRMIEAMVAGVRSPQKLAQLADRRIKASPKALYDALHGRLTDHHRFMLQLHLGQYDALGSSIAQIDAQVDAAVARIDEEAAAGRGSFRDLTTLLDGIPGIASLAATSILAEIGTDMSRFASDGHLVSWAGLSPGQNESAGKRKSSRLRKGAPWLKTLLVQCAWAAVKKKDSYYKAQFNRLKSRRGPKKAICAVAASMLTAIYHMLKNGVEHNDLGASHFDRRPAAIKANRLVAQLAKLGFRAELQPLAQAA

SEQ ID NO: 442357 - protein, 300 aa, unidentified
MSWTVAIGVDTHKDMHVAVACDALGRQLDSCSLPATSAGYLALWRWAETLGEPAFAVEGAGSYGAGLARFLRAAGGNVYECERPRRRERRGGKSDLIDAALAARRLLAGEELSRPRGDGAREDLRLLLLERRGVVRAQTAALNQLHSALLAAPASMRERLSELHGARLVAACARVSVRAQEERVLVGVLRRLVSSGDPARMRSESSFAALAGTSPVDASSGRQQRHRLNRGGDRQLNRALHVIALNRVRHHGETSRYYGRLLDSGKSAREARRCVKRALARSFYRRLCELPRLQEVPLRA

SEQ ID NO: 442358 - protein, 447 aa, unidentified
MTHRIGPSRGDRRRNARKARLRGLIPREFAIVGVDLADRKQVFAVCDHDGGVHGRRSVNKRAWQLDETLGWAKAAAVEAGFAGVVVACEPTGHRWRVMLDQCDELGLTMVCAPPMLVHREREREDLTPDRSDAKDAVLIAGLAAQLRCYEPERPTAQWARMRHLGARRSELTTACGVVRQRMRSLLECVWPAALATAADPLASMTWRATMAVICARSVDGDPAAIRRMGWPRFQAAVRRELPRWGGHRVTWTIARELWDATTDPTGVIVHRHGALERVADALTDWQRLRVQRGAVEARMVHLLDELNLTSLVTTIPGLSAVGAAAVLAETGDPHRFDSGRALVKHAGLAPRDNESGTFKGTSRVSGRGRPELRLAVWRAVWGALPHNAVLSARHHHLRTREHNRLTDHQARVAVAGSLLRQLHAVIVGGVPWDARTAAGRQEVIAAA

SEQ ID NO: 442359 - protein, 340 aa, unidentified
MSKMQIGVDLAKSVFEVAVSTVPGRVQERRRVSRAALTPFFAARPPAEVLLEACGSAHHWGRELQRLGHTVRLLPASDVARYRDGNKTDRADAKALLEAARNEKISRVPVKSLEQQAVVALHRLRQGYLQTRTARINAVRGHLREFGCVIPVGAAQVVPRAYAALDQDAVPALLRPALHTVLEEIAALETRAEAVRTELIRLAAQMPDVQLLLTVPGVGILTATALVAFVGDIHRFRSGRDFAAYLGLTPREHSSGPVRRLGAITKRGNSYVRMLLIHGARSALRAGAVTTHPDDLRTWARALAARKGHNVAAVALANKLARVCWRVWREQRPFERREPR

SEQ ID NO: 442360 - protein, 347 aa, unidentified
MDHIGIDVHKKESQICILAEEGELLERRARTTPRGLPEVLGERPRARMLLEASPEREWVARSLEALGHEVIVADPNFAPMDATRTRKLKTDRRDARALAEACRLGAYRPAHRASDAQRHVRARLAVRDTLVRTRTRYISLVRALLRQHGWQVPTGSAEHFSRRVLALPLPGRLRSEVAPRLAVMRQVHQQVAYSDERIAAIAHTDARVRRLQRVPNIGPMTAAAFVAALDDVQRFRRAHEVEAYLGLVPRELSSGETQRRGRITKAGPGQVRWLLVQAAGSMLRLHDVRTADLRDWATRIAVRRGKGIAVVALARRLAGILFALLRDGTVYEPRRRAPHTVPQPVAA

SEQ ID NO: 442361 - protein, 388 aa, unidentified
MQTVADRPEAPTAIRTDLGAIFVSLELSRSTWLITSLSPGGGEKMSKQVVRGGDVAELLERFARLREKARARTGKVFPFVVIQEAGLDGFWIDRALQNEGIESHVVDPASIATSRRRRRAKTDGIDGEVLVRALLAYKRGEPRVCAMIKAPTPEEEDRRRLCRERKVLIVERVRHVNRVKGLLFSQGISGYEPLRRDRRRRLDTLQTGDGRLLPVHLKAQVCRELDRLELLLEQIKAVEAERDVLLAAQQVAAPAPAAMLLDIKGIGPEFAAILWSEGLFRHFDNRRQVASYAGLAPTPWQSGSVDREQGVSKAGNPRLRTTLIQLAWLWLRHQPHSALALWFEERVRRNGGRLKKTTIVALARKLLVALWKYATAGVVIEGAVMKRT

SEQ ID NO: 442362 - protein, 350 aa, unidentified
MSSIVRIGLDTSKNLFQLHGVDEAERVVLRKQVRREGLLRFFRELAPTVVGMEACGGSHHWARVLTELGHQPRLMAPEYVKAYRKRNKNDPADAEACCEAVSRPSMRFVRPKTVEQQAAQMLAGVRDQLVRRRTQLSNQIRGYAMEFGLVVAQGLCRIEALLLEIAGSETLPPLAKELFALQGREFAQLQATLREVENKLMAWHRQSEVSRRLVAIPGIGPIGATMLAMKVSQPEDFRSGRTFAAWLGLTPKDHSTAGKTRLGVITKAGDPALRSVLVAGAMAVIQQVSRARGTPSPWLAELLKRKAPKEAAVALANKMARTAWKLMVSGEKYDPAHQALSQTSNAPAMA

SEQ ID NO: 442363 - protein, 411 aa, unidentified
MDVLYSRCCGLDVHKASVSACILIHGPGGKERHLCRFGTMTQDIAELAQWLAAHGVTNLAMESTGVYWKPIWNLLEDQFELTLVNAQHIKMVPGRKTDIKDCEWIAELLQHGLLKGSFVPPEQVRELRDLNRNRAIIMQQRAAVSNRIEKVLEDANIKLASVASHVLGQSGLSMLRAMVDGVTEPERLAEMARAKLRNKIPELRLALSGHFEERHRFQMRELLDQRAFLDVKVAEFDQQIMERSLPFQDKIELLMTIPGVDQITANSMIAEIGADMTQFPTAQHLASWAGICPGNNESAGRQYGGKTRKGSRWLRRDLCQAAWAASHTKKTYLAAQFRRVAAKRGKQRAIVAVAHSIVVAAFYILKRNEVYREAGGDYFERANPAGLQRYLVRRLERLLGHKVVLEPANAA

SEQ ID NO: 442364 - protein, 340 aa, unidentified
MTIIIGIDPHKATHTAVAIGSDESELATVTIPATRQQTDKLLSWAEPFEERTWAIESAGGLGYLLAQQLVGAGEQVLDVPATLASRVRVLGSGRSNKNDPNDARSVAIAALRSPGLRAVSIADHAEVLRLLAKRNGDIGDRRTQVVCRLHALIAALEAGGIAKELNASDANGLLGTFEPSSPAEHTRHQLALELLADVRHLDGQLAESKQRIKVAVSASGTSLTEVFGIGPVIACSLIGYTGDVSRFASRDQFAAYNGTAPIEVSSGGRVAHRLSRRGNRNINHAIHMVAICQIRHTHSEGRAYFDRKVAEGKTKREAIRSLKRQISNTVYRHLVADAAK

SEQ ID NO: 442365 - protein, 318 aa, unidentified
MSKIFLGIDISKSNFDAALLIPDDKVKTKKFSNNKSGFKLLMDWLKTCSVSIGNVHACMEATGIYGEELADFLYSINCTVSIVNPAKIKGFGMSELSRTKTDRADSKLIARFCKTMNPAAWQPIKPEYKELQLLVRRLEDLQNLLQLEAARSNNVKKSIEFIIEPLSKQIKEINKLINDIINNDPELQKKQKLLETIPGVGKATIMQILSFINVENFSSVKQLDAFLGLNPKQRQSGTSVNKRCRISKIGNGNLRKTLYFPAIVATRYNPIIKAFYDRLKSNGKPAKVIICGAMRKLVHIIYGVLKTGKPFDASLAVI

SEQ ID NO: 442366 - protein, 338 aa, unidentified
MITQSHFIGIDVSKLTLDVYVKTSEQHLMADNNDKGFAFIISFLEQQQIDISDSLFCFENTGIYSKPLLHFMQNNQYVFIEAHPLDVKQSLGAVRGKNDKIDAVRLAMYAYRKREELKPTQALSPQCERLQLLASLRRKLVTERGGLVARRGEMTQVLRLPKEDVLIEVQDALIAELNKQIKIIEKQIQLLIKSSRELLTNYTLLLSIVGVGPVVATALLIYTGNFTKFTTARQFAAYCGLIPYDHQSGTSVQRGKQTSRLANQEMKSLLDRGATSVIAHDEDMKAYYERKVKAGKAERCVINAVRCKIVERIFTIVKEQRPYIRKASDYQIFKIKAA

SEQ ID NO: 442367 - protein, 431 aa, unidentified
MNRSVEFLSVGIDVGADFSLLAFALPSQELLGKPYKIIHSSQRSLNGAVEKIKTLSQKYQLPARVFMESTGLYHYPLYHKMKDAGFDVFVLNPLVTHAGRDLNVRNIHNDKYDSQKIALLGLRSGLKTSLIPSDQVISMKVILREYYAVKKEISMYICRLKNQLRQAFPQFLPLFSKVNGVTAMAILCEYPNPESLLNAGEHAVADFMKSVSHNGPLKVQKKAAALIQAAQDARSFGHWNHGISILIRHYIEMIRLLDVRAKTLLAQAKALLAEQDSKTLAHQTELLQTIPGIGFLSALTLICELGDFSAFKRPKQLFSYFGLDPIVRQSGNYNGTNLKLSKRGSPFARRCIFVIALQSISLNIHKEPKNPVLRTFYEEKCMCKAKMTAIGAVMHKICNLIFAVLRNDAPFVLQTPEQHNAAYLSKTHSVA

SEQ ID NO: 442368 - protein, 348 aa, unidentified
MGVFIGLDVSLSKTSVCVIDREGSVLWQGKVASEPGPLIARLAEWAGTIDLAGIEACPLSEWLHRGLREAGIPMMCIETRHAQRFLSSRPVKTDRSDARGIAEMMRLGHYRPVHVKSPAAQSMRTTLAVRMQLVASQLQIEGTIRGLLKIYGLKIGAIHRNRFAGRVAELLEMAALPELSAAIQPLLRVREGMRTERRAIDRTLAGLSRRDDITRRLMTIPGVGPVTSLAFKATIDEVGRFGTSRALGAHLGLTPRVYQSGEIDRSGRISKCGDRMLRHLLYEAASALMTRTRKWSRLRAWGVAVAKRRGIKRATVAVARKLAVIMHRIWVTGGEFEFGNPAAAAIAA

SEQ ID NO: 442369 - protein, 345 aa, unidentified
MHIASIGIGLGKTTFHLVALGDRNKVLVRKKFSRTQLLAYTANLPLSLIGLEACAGAHFLGTVLREQGHQVRLIPAQFVRPFVKSNKNDYRDAEVIAEAVERENMRFVPIKTEDQLDLQALHRVRDRLVARRTSVINQIRAFLLERGISFRKGPASLRRQMPEILENANEKLSTRMRRLLDFLWREWRGLQLQIESLNADVEQIASSDPTCVRLQQIPGVGPLVSTAVVSAIGNGAAFKKGREFAAWLGLIPRQWSTGGKTKLLGISKRGNPYLRKMFIHGVRAAVMRVKRDGSNLGTWMSGLETRAARNVVIVATANKLARISWAVLASGNDYQPRYKPLAFSN

SEQ ID NO: 442370 - protein, 413 aa, unidentified
MEIIYQCCCGLDVHKRSIAACVRRLLEDGGIHQDTRTFGTMTRDILELADWLAAAGVTHVALESTGSYWKPVYNLLEGRFRMVLVNARHVKHVPGRKTDVKDCQWLAQLLQAGLLRGSFIPERPQRELRDLTRHRSQLVGERSRAANRIQKILEDANIKLASVATDILGASGRDMLRALIRGETDPEKMADLARRQLRSKIPELRPALEGKVTEHHRFMLGELLNHLEYLESRIEGFSRRIEEVSRPFAPAIAKVATLPGFDQRSAQNVVAEIGADMDTFPSAQHLASWAGVCPGNNESAGKRKSGKTTKGNRWLGSALSQSAWAAARKKDSYFQAQYRRLAGRRGKKRAIVALAHSLLTIIYHMLKDASEYRELGCHYFDKLNAHRLLPHLLKRIKDMGYQVTIQELSQEAA

SEQ ID NO: 442371 - protein, 341 aa, unidentified
MNEVTLIGIDLGKHVFHVHGQDARGHAIFRKKLSRQQLLSFFSNLKAVTVVMEACAGSHWLARKLNAMGHVSKLISPQYVRPFVKSNKNDYIDAEAICEAASRPAMRFVEPRTEAQQLLAALHRTREGLVTERTATINRIHGILLEFGVVVPMSKVTLRRLPDVIALNDLPSRLLQIIQRLHEHYKYLDAQVVEIEKELVAQLREDENAARLLSVPGIGTITASLLASEIGSITQYACGRNFAASIGLVPRQKSTGGRTTLCGISKRGDKHLRRLLVQGARAVIQRAQKRNDRLGDWIRSMLIRRHSNVVACALANKLARIAWAVLTKHTEYQGSLLVHKS

SEQ ID NO: 442372 - protein, 374 aa, unidentified
MENIITYVAMDTHKKQHNIALHYPGQEEIVELTINNTLRDIKKMVKKIKRKAPGKVEFCYEAGICGFTLKRRIENMGCKCMVIAPSLVPTKPGERVKTDRRDAKKLLMLLKAGLLTEVHAPDEQAEAARELTRLRETARDNLKRIRHQILKFLTRHGYVYTEGGHWTQKHVAWMRTIKFTEPMLTKVFENYFNELIYCIGRLENLDREVEQLAGSDEYKEVVGLLCCFHGINTLTATTVMTEIFEFGRFESPRHLMSYLGLTPSENSSGEKQKKGAITKAGNKRVRRLLNETAWHYRHRYVPSSVLKKRRKDQPQWAVEIADAAGRRLSKRHRHLINNGKMPCQANIAVARELAGFIWFMITQHQARKNVRGVA

SEQ ID NO: 442373 - protein, 433 aa, unidentified
MLKLNYMSTLFVGIDVSSKTNAVYAMDFEENKYISSSFGNNQPGADKLVNMIAECMHKHKNLNTILIVLESTSVYSVHISNFLSTSEVLMPYKPYVFCVNPKAASNYRKSYIGMEKTDPTDAYLIADFGRVGRTKKLEPWRGGQFIALKRLTRHRMHLSECITREKTYMVSNLYLKFSELQLLEGDDKPFGSLYGATSSAVLTEFLSPQEIIDMPEEELLTFLAGKSRNRISDLSKTSELLRKAARDSYRLDKCMYEPLSISLASSFNCIHAYQKEIKLIEQAIEKCINGMNPNALLILQSIPGIGPIWASGILSEIGDITVFHSSDALAKYAGLYWPKGDSGDFTSEDNKMSKAGNPYLRCYLGEAANSVRKHIPEYADFYARKYAEVTKHQHKRALALTSRKLVRLVFGLLVKNQLYTGEKLDAEYNIKSN

SEQ ID NO: 442374 - protein, 387 aa, unidentified
MPQQNDLSRCLVTLEQDDTLIAVIELSQASWLVAGIVPAIERQPVKKIEADEVALLRLLERWRDEATKAGRRIMRVCVAFEAGRDGFWLARWLRARGIEAYVIHPSSVAVSREHRRAKTDRLDSELLKRAFLGWLRGERGHCSMAAIPTVEEEDAKRPNREHESLVSERTRIVNRMKSTLARLGVRGFKSTLRKASERLGTLRTPEGMQLPPNTLAELGRDMARLRFVMDQIKEIEAARLEQLARQPDEGAHAMIRLLARIVGVGIETADMLVREVLSRNLRDRRAVARYAGLTGSPDESGRRRREKGLAKAGNARVRHGMVQLAWRFLLFQKESALARWYRERTADARGGTRKTMIVALARKLLIALWRLVTTGEPPEGVLLRPAA

SEQ ID NO: 442375 - protein, 316 aa, unidentified
MTDYTTCSAGIDVAKAKLDIALHPGGQHLVVDYTAEGLKTLDRFLRQHGVARVGFEASGGYEWRLLAHLRKGSIPAARFQPVQVRAFAKSRLQRAKNDKLDALLIAAFTASLLEMPALPDARLDGLAGHLTYIEQFEERIATLKTMLEACRDPRIRRLQTADIKKLQAAHKAEVQLLVKTIVSHAEMNRKFRLIVSIKGVGVRSALAFVVRLPEIGSLSREEAAALAGLAPFDNDSGTRNRTRRVAGGRKRLRKSLFMAAFAAAQWNKDLKTFYTRLRENGKPHLVATIATARKLVILANAVVAKNRPWTESKMPN

SEQ ID NO: 442376 - protein, 466 aa, unidentified
MTTAKLWRNRKERKDWARRLRSEDPGLEVVHPHAAGIDVGNSAHYVAVRPDRDPEPVRRFECFTADLYRLAEWLKSCGVKTVAMQSTGVYWIPLYEILEEHGFEVYLVNARHTKNLPGRKSDVQESQWLLKLHTYGLLNNSFQPPAEIRVLRTYWRQRAEHVSGAATCIQRMQKALTQMNLQLANVISDLSGVTGQAIVRAIIAGERNPQKLAELSDPRIEASREEVAKSLEGNWRPELVFVLRQEVEMYDTYQWRITECDQQLQKHLASFANTVSPQSPEAEPSGKKKAKPTKNAPRFNLGSELQRITGVDLTRIDGIDVMVAQTLLSEVGLDMSRWNTEAHFSSWLGLCPDNRISGDKLLGKGTRHVVNRAATALRLAARNLIRSRSYLGAQYRRLRTKLGAPKAITAMAHRLARLVYRMLKYGQRYVDKGTEYYENRYRQQQIHLLQKKAAKLGLQITIAVQS

SEQ ID NO: 442377 - protein, 415 aa, unidentified
MTNERRWYAGVDWASESHHVLLTDGDGRKIGEKIFKHSGEGLAEMVAWLMATSGVAEPSQIHIAIEVPHGPVVETLIERGFKVHVINPKQMDRFRDRFTLAGAKDDSRDAEVMASALRTDPRCFRLLAVADPVVIELREWSRIAEDLGVDRNRLTNRLREQLWRYFPAILDLESDLGAEWLLDLWEAVPTPDKAVRIREATIAKVLKRNRIRRLNAAHVLDVLRKPPVRVAAGTTEAASAHITTLIARIRLLNQQLKEAHRQLDALTARLIPSEEAGPGQTKQHDVEILASLPGVGRIVLATLLAEAFDALQRRDYAALRSLTGVAPVTKRSGKSCVVVRRQACHDRLANAMYHWARVAVQHDPRSRSKYAALRSRGHSHGRALRSVADRLLNVACAMLKTGTTFNPSLATGKSP

SEQ ID NO: 442378 - protein, 436 aa, unidentified
MSSISILYRYEAVRKKLNIRKDVQMHYYVGIDIAKGFHVACVVNQDDKVIKKSLKFSNDENGFNELLLLLNSIDEVSTFTIGMETTGIFFENLYLYLSEKGFNVLLLNPYQTNRFREMDSMKKVKNDNIDALMIAALIKSGRYSKAYVSEDTYQSIKSLYRHKNNLLEEMKKHKRQISTLLAVVFPEMEQVIRDPFNVTGLALLEKYPTAKHYHHASVERILKTFRGIKGNNFNEEKATKLLELAKHSVYQGNGVDERAYVIKSHIRVIKLLQEELKELENEMLKLFNQTPQLESNEEQEIMNIIDNLRTIPGVSDKTIFALISECGDLARFKNNSHFIGYLGLYPTLEQSGNKLTYGAIAKRGAKLAKKALYQAAIAAIRHNEQLNKLFLDKVSQGRAKKEAVVIVARKLAHIILAIYKNNVAYNPQRVFQASLS

SEQ ID NO: 442379 - protein, 342 aa, unidentified
MQITTIGLDIAKNVFQVHGINAAEKVVVRKQLRRGQMMKFFAALPPCLIGMEACASAHYWARELTKLGHEVRLMPAKDVKAYVKRNKNDAADAEAICEAVGRPRMRLVRAKSAEQQGRLMQHRARDLLLRQQTQVINALRAHMAELGIVAAQGREGLKQLLKNIADEKDARLPIDARASLIVLAAQLQALHTMIGSIERRIVVQHRANEASKRLECIHGIGVIGASAITATVNDPGAFRSGRDFAAWIGLVPRQDSTGGKQKLGPISKRGDRYLRRILVVGAHAVLRWAKQNPGKYPWLTQLLARRPFKVVAIALANKMARVAWALLASGAKYRAPRLAAAT

SEQ ID NO: 442380 - protein, 344 aa, unidentified
MDHFSGLDVSVKETSICIVDDTGRNVREIKVASEPEDLLRVLANPIYHFKRIGLEAGPLSQWLYSALAEAGLPVICVETRHMRAVLKAQINKTDRNDARGMAQMMRAGLYRPVHVKTLRSQKLRMLLTHRKLLQSKAIAIDNDLRGTLRNFGLKVGVVRTVKFEARIRELVENLPDLAELVEPLLVVRRVLREQFVIQHRRLLAIVRDDEVCRRLMTVPGVGPVVSLTYRATVDVPARFRNSKAVGAVFGLTPAQHQSGESKRPGAISKCGDEMMRVMLYEAAQIMLVRSTKWSWLKAWAMQIARRRGMKKAIVALARRLAVIMHRIWVDGTEFRWTREVAAAA

SEQ ID NO: 442381 - protein, 386 aa, unidentified
MRTDVAPTPQPATVAQPATILVSLELSQKSWVITVQPPDVEKMSRHGIEAGDTEKLLSLLHHHRTRTAARTGATPHIVSIQEAGLDGFWLHRWLEAAGIESHVVDAASIAAPRRKRRAKTDGIDGETLVRTLAAWRRREPHVCSMVAVPTVEQEDRRRLSRERERLMKERIGLTNRIYGLLASQGAGAYDALKTDRWPALAALRTGDGGELPPQLAAEIRRMLVRLDLIMEQIKAVEAERDAMLAAEAAEHGPVVALLCRLYGIGPQFAAVLVLECLYRTFGNRRQLAAFAGLAPTPWRSGSINREQGISGGGNPRLRKTLIEMAWMWLRWQPGSALSQWFQQRAGGANGRTRRILAVALARKLLIALWRYVQDGVVPQGAVLKAA

SEQ ID NO: 442382 - protein, 366 aa, unidentified
MNQTINRAKTLFVGVDVHKDTHTAVGLSPFGEKMFEMTIGNEAEDFISLVEKTKVEANKTGLIPSFGLEDVHSWGERLSSFLVEVGLPVRAVAPILVDHNRQKTTHLEKSDPLDAKGVAEVMIQKIDTLPIYTITEDAKKAKNIRELSLEREWLVKERARLKNQLHLLLHRIHNTAYKTKFKDPFSLKAMRDWMKSMPKSTDSILAGRMKRAIRRLRDLRSEILEIESELDILIKKSGHTITTANGCGTVIAAEIIGEIGDIVRFKKPGGLAKYAGCAPRQHSSGKTIRFRKTRSGNRKLNRAFHRMALSQISRMGNDAGREYFKRKISEGKTKAQALVCLRRQMVNIVWMMMKHKTVYVYPQKND

SEQ ID NO: 442383 - protein, 422 aa, unidentified
MSYCPVAGIDVSKQFSDMCILSPDNKIFAQEKIYHDETSINRANALLQKAERLFFSKPVIVMESTSHYHLILFQFFSEHGYDVIVVNPLQSNSMKDFSIRKRKTDRVDAFKLAMMYRTKTLRPSQIPQTATRALRQLCRHRAELLNDVSSYKNRLTALLDQTFPGYDKVFSDVGGVTSCAVLVRFPTPTILLVEEESELVEVIAVASKSGYSFAKKKAGLLISAAQKAQAWGIHSCADETLIVCTIQMLRTLSESVLQIETAIDNLLAQIKEMRNNVSLLQSIPGVGSHSAALLLGEIGDISLFKKPKQLAAYFGLDPTERQSGSFRGTKNKLSKRGSPYARAALHMGVVNSICKRGKDSAANPVLLSYYEKKCKNKPAKVAQAASMHKLVFIVFAVLRDQKPFELKTPEQHAVEQGFVKAA

SEQ ID NO: 442384 - protein, 414 aa, unidentified
MEVLHPRCAGLDVHRDSVVACARVVDHGRVEHLAETFGTTTSELERLARWLAGHGVTHAAMEAAGVYWKPVWAVLAEAFELVLANAMHVRNVPGRKTDVNDATWLADLLAHGLIRASFVPPMAIQALRDLTRTRKQLTREKASHVARIDKLLQAANLKLGSVLSDIMGDSGRAILDALAAGESDPERLAGRVRTRIRASRAQVVEALRGRLSDHQRLLLRIHLGQADAIDAAVAEIDAELGERLEAYREAAARLTTIPGVSALSAAVILAEIGPDMSRFPTAAHLVSWAGLCPRNDESAGKRRSTRLRQGAPWLKTLLVQTAWCAARAKGTYLRALFGRLKARRGPRKAIVAVAAAILTAAYWMLRRGVAYADLGADHFDRIERTRLAARLARKLDELGFDVTLIPRGGVPVSS

SEQ ID NO: 442385 - protein, 323 aa, unidentified
MRKHITVCAGIDTGKYKLDVAIDGSPEQFQVDNTADGHAALSVWLKRHSVRRVGIEASGGYEQDVVAHLRRDGFVMVVFQPAQVRAYARFLLQKAKNDKIDAALIAACTAAIKKIHAPPDDRLAPFAARMTLIEQLTDQVGCYKCFREGSRQPQIRQFWTAEIARLNKLLRAELKGLAAAIRQHRDLAERLDLIKSVDGVGLKTAMAILVRMPEIGRVTREQAAALAGLAPYDDDSSTHLGMRHIGGGRERLRGALYNATLAAAFHWNPQLIALYERLTRAGKPHKVAMIACARKLLIFVNTVVERGTPWTKTMPQSLIRKAA

SEQ ID NO: 442386 - protein, 345 aa, unidentified
MDTHKDLHVAAVVDQNNKVMGTQFFSTTRQGYRQMLAWMTSFGALKRIGVECTGIYGSGLLHYLQNAGLEVLEVIAPDRMERRKRGKSDTIDAECAAHAAFSGIRTVTPKTRNGMIESLRVLKTCRKTAISARRVALQIIHSNILSAPDELREQFRNMTRMQLIRTLGSWRPDASEYRNVTNVYRISLKSLARRYPELHDEIADLDVMIAAIVDELAPELIKRNTIGYESALQLLITAGDNPQRLRSESGFAALCSVSPVPVPSGKTNRYRLNRGGDRAANSALHIIAIGRLRTDDKTKEYVARRVAEGHTKLEAIRCLKRYISREVYTLLRNQNRQINSIPITA

SEQ ID NO: 442387 - protein, 343 aa, unidentified
MKKVIAGMDLHSNNVVIGVMDMDGRRVAHQKVECKLSQVVKFLAPYKKQLEQVAVESTYNWYWLVDGLQALKYPVVLANPAGMAQYCGIKHADDTNDAFFLADLLRLKILPTGHIYDAELRPMRDLLRRRLMLVHQRTALMLSFKSLYTRTTGQEMTLSKLKELEIKQAQDLYDHPANQVIAGMQIKHIEQLTESIEKIEKAVLACAQELPYYAKLATLPGVGRILGMTITMEVGDIKRFADPGHFASYCRTVAAQRFSNTKKKGENNSKCGNKYLAWAFVEAANFARRYDQQCRQWYDRKAGKTSKVLATKALACKLAKAAWHLMAQGMDYDPKRIFGATSD

SEQ ID NO: 442388 - protein, 458 aa, unidentified
MEGKNDTKKNRKRQSRLLRTVQPDAAGIDLGSREHWVACPPLPDGSPNVERFGTTTPELSRLADWLKQQHIATVAMESTGVYWIPLFEILDSRGFAVHLVNARQISHVPGRKTDMLDCQWLQLLHACGLLRGSFRPGDDICRLRASVRERNSMVEQRSDWLRRMQKSLDQMNVCVHHAVSDISGLTGMAIIRAIIDGERDPRVLARLRDRRCQKSEDQIAEELTGNWRPEHLFNLGQALKVYDQFSALIADYDTEILKCIDSLQSPDVKDSPAPPPASKGKANKLLKQGQEPFRQALYRMSGIDLTTIDGIGVNTAGVILSELGPDLSAFPDEAHFVSYLRLAPNISISAGKKVPGRFKAVTSTRVSNALRMAATTLRNSKTALGAYYRRISWRKGASVAVFATARKLAQLVYRLIRYGQSYVDEGANAYEAHCTQRRLKSYTKALKEMGYKVEPLTA

SEQ ID NO: 442389 - protein, 320 aa, unidentified
MTVIGLDISQHTIDCFIKHHEKTGVLQIENNRTGFIKLREWLKTHKIRKPLIAMEATGVYYEAVAAYLSAYYSVSVINPLKIKNYGKAMFSRTKTDRADAVLIAEYAYRHADKIQKYETPTYEQNRLAKLLALFAQLNLQINQQQNRLHTAKDTFVLAAHRAVLDVLQKQLAATEREIRTCIQQQQGLSEQYNNLKTITGIGEKTAPVILHYLNLKRFRNANEFVAFAGLSPRIEQSGTSVNRQCGLAHYGHRRLKAAFYLPALVAYHRNYFPALVDNLTRAGKPKMVIIVAIMRKLAKICFYVHKSGKPFDRSRYQEKI

SEQ ID NO: 442390 - protein, 369 aa, unidentified
MGEHSEAFVGIDVAKGRNAIAVADGVRGGEVRYLGEVDASPASMTRIVRRLAEKYDRVQFCYEAGPTGYGLYRLITALGHACAVVAPSLIPRKPGERVKTNRRDAVALAKLLRAGELTAVWVPDVGHEAMRDLVRARSAAVETLRVHKQQVSAFMLKHGRHYPRRKAWSMRYLRWLQEQQFDHPAHQIVLQEMVEAVRLAKERVERLERTIEEFLPAWSLAPIVGALRALRGVDLIVAATFVSEVGDIGRFDNPRQLMGYLGLVPSERSTGDTVRRGGITKAGNRRVRHMLVESAWTYRHPPKIGKDKLYVLEKVPPKVRQIAWQAQARLTARYRALAARGKRTTVVCTAIARELVGFMWSVAHEVQPA

SEQ ID NO: 442391 - protein, 349 aa, unidentified
MTLFVGLDVSVKETAVCVVDDTGKVVCEQKVPTEPDDIVRLLASTGKDYGRVGIEAGPLSQWLVNGLTAAGLPVVCVETRHMMALLKAQQINKSDRNDARGIAQMMRVGLFKPVHVKTQMAQEQRMLLTSRKLLQRKLLDVESDLRGTLRNFGLKVGVVSTGKFEARIRELVAGFPRLTLVVEPLLAVRRAMRQQFAVLHKMLLDTVRHDPVCRQLMTAPGVGVVVALTYRATVDQPQRFVHSRAVGAHVGLTPRRHQSGEIDYDGGVSKSGDTMVRTMLYEAAQSLLTQSGKWSWLKAWGMRVAQRRGMRRAIVAVARRLAVVLHRMWVDGTEFRWSNSTTAVVPQAA

SEQ ID NO: 442392 - protein, 330 aa, unidentified
MALKIVYQICCGIDVHKTFVVACIASTNKQGVTIYKRHRFSTFTQGLKELLQWLLDNHCKDVCMESTGKYWIPIYNVLEKDCNIVLAHPKYVKAIRGKKTDKKDAKWIADLFKHDLVAGSFMPPADIRQLRDLMRYRFKLTCFMSSEKNRLQNCLTVSNIQLASVVSDTFGKSSQRILDKILENPDDTSFDIEPLIHGSMKKKLPELELAIDGFITPEQAGKLKVIKKHFEDLESRKAELEKLILALASPYQQELDLILTAPSFKNKFTAIGIISEIGVNMEAFPSAKHLCSWAGLTPTNNESAGKKKSVRVSKAGCYIKPLLVYCIVDI

SEQ ID NO: 442393 - protein, 352 aa, unidentified
MTTTLETILAIDLGRYKSVACVYQRSSREHNFRTFDTTPAELTKLLARHPSSLVVIEACANAGWVHDHAAAAGHPVKVANTAAESWKFQHLKRKTDHDDARRLAELEAIGQLPTVALPDPATRQRRMLIATRQELVGQRVRCQNRIRAWFAGQGLPVPRGAKAWTATGLAGIEEQSKTLADCQPDEVWKGLLNLAVTQYRFVVEQTEKQLDALASKDAATQLLESIPGVGPRTAEAVAAHLGDARRFATAKQVGAYAGLVPKQYQSGVTDRKGRITRRGPGVLRKLLVECAWCMLRYNPWARAQYARLTGGGASRKKPAIVALARKLLVRCWAMLRTGQRWRADPVPVPAKT

SEQ ID NO: 442394 - protein, 429 aa, unidentified
MQNESTPGARGPVFCGVDTHADSHWLCVLDWRGRKVLSRQFPADAAGYEALAGAIAAAGEPACVAMEGTSSYGAGLTRHLASLGMPVREALSPARMQRRRPGQGKCDESDAERAARAAMSGSKLGTPKSQDGWVDGVRCMLAARSGAVKARTSAINTARSLLTTAPEGLRSRFRGMAGPRLMEELPSVRAEGALGAALGALADLWAAARDAALDMERAIEASLEENCPALLAMYGCGPVSAAKLAVAAGDNPGRLRSEASFAAICGACPIPASSGKTVRHRLNRGGDRQANSALHEIARQRVMRDPETAEYAERARARGKSDREVMRCLKRYVAREAYRALMRPHEVRRPEDASELVAARRAARVSQVRAASILGTSEKYISMLERGQRELKPIRRAYEAWVEAGLPLDWDRQAFEAERKMDSKKHLAK

SEQ ID NO: 442395 - protein, 315 aa, unidentified
MEAAPVFIGIDVSKAQLDMAERPSGERAVLPHTEESITTLVERLRQRQPTCLVLEATGGLEVPLASALAVAGIPVAVVNPRQVRDFARATGQLAKTDAIDAQILARFAEAVRPAPRPLPDEAMQAFSALLTRRRQLIEMLVAEQNRMQRAPHPIQQQIQAHLTWLKQQLAALDEDLTHRIQSTPIWRAQEDLLRSVPGIGPVVSRTLLAELPELGTLTHKQIAALVGVAPLNRDSGTLRGRRTTWGGRAVVRAALYMSTLVATKHNPVIKAFYQRLRAAGKAPKVALVACMRKLITILNAMVKHRTPWRQSAQGT

SEQ ID NO: 442396 - protein, 345 aa, unidentified
MKITTVGIDLAKNLFQVHAVDERGRAVLRKQLRRDQMARFFANLPPCLIGMEACASAHHWARTLQKFGHTVRLMAPQFVKPYVKTNKNDVADAEAICEAVSRPNMRFVPIKSVEQQAVLSLHRVRQGFVRARTAQGNQIRGLLGEAGLIIPKGIVNVAKRVPALLEDAGDEVPVSFRQLIERLTEHLKELDRQVDELEAQIKAWHRGSELSCKLEKIPGIGPLGASALVASIADANSFDNGRQLSAWLGLVPKQDSSGGKPKLLGISKRGDVYLRTLLIHGARSAILAAQRKAVNTNVWLASLLNRRHPNIAAVALANKNARTVWALLAHGREFRADYAPEVSAA

SEQ ID NO: 442397 - protein, 365 aa, unidentified
MRKIAYLGMDVHAKHCVLGDMDFKGNFKGTQMFPTSEQNIMKALEAIKAKNKYLTLEEGNLAYWAAQVAAPYVTEVIPCDPKENALIYRGPNKNDKVDTRKLCRLLRLGELKRVYHPETDERAIFKAAAQHYMDLRDQQIALKQKIKAMYHHWGVIDVAGEAVYSTAKRDHYFRQIKHIEIRNQVSRLYYVMDQTESMQKNALKAMKQLGRKYPEIKQFQKIPGIGEILAHFFDAFIQTPHRFANKHRLWRYCRLGVTDRTSDGKPLGFKRLDRSGVAELKSLSYRAWMSALRGDNEVRRFYTTSLQHTFSRVHARLNTQRKIIATMYGMWKRGEPYNPKLFFGFASEWRCLNDTLPLTGLKCAA

SEQ ID NO: 442398 - protein, 343 aa, unidentified
MPHYVGLDVSQKTTAICVVDAQGKRLWRGVCATDPGPISARISQHAGVDAKVGIETGSMTPWLVHGLRAAGLDVACLDARRVKAALQMQLNKTDENDAEGLAQIMRTGWYRAVHVKSLDAHRARALLGARAQLVGMTTRLSNMIRGVLKTFGLLPGAGRGLRFDQKVEALLEGAPEIALVVRPLLATWRQLRQQIAVFDKAVLQQVRADPICRLLMTVPGIGALSSLMYVSTVENPSRFSRSRAVGAHLGLTPRRYQSGETDRSGHISRCGDALARTLMYEAATVILHRVKRPLHLKDWAEAIERRSGSGKARVALARKLSVILHSVWRSGEPFRWAAPALAA

SEQ ID NO: 442399 - protein, 429 aa, unidentified
MEEVDDVELVVERIAALDLGKAGLEACVRVPHPQRPGRRMQELRGYATTTAQLLEMAAWLRRWGVQRVVMESTSTYWKGVYYLLEAEGFDCWLVNAREVKNVPGRAKTDRADAVWLAKVAERGMCRPSLVHPPEIRRLRDLTRYRRALVQDRTRERQRVEKLLEDAQIKISAVLSDLHGVTGRAMMDALIAGQRDPRMLARLAKGHARKKTGQLEEALRGFFTDHHATILQMMLDNNDRISAQIAALDARIEEAIGPFSAQVARLADIPGVDSVAAAELIGEIGVDMTRFPSAAHLVSWAKFCPQTHQSAGKSRSKGRGKGNPWLAGTLGRIAFANCRSDTFLGARYQRLARRRGKQKALVATGNSILTVVYHLLSDPDARFCDLGPGYYESRISKHRRARDLATQLQALTGQHIVIHDGKAVITDTAA

SEQ ID NO: 442400 - protein, 429 aa, unidentified
MTAASSTTATTWVGIDVAKVMHQVLIETPDGRRRAMRVANTAAAIERLVTLLRAAPAPCVIAFEPTGDYHRALMHRLGLAGFMLQQVSSLAVARTRDAMYNSWDKNDPKDAQVILHLLKTGTTQRFVDPLVSRHHDLQEMANTYQQISLRKVRVQHAIVTHHLPLYFPEAERYLHSSRADWFTNVLRLTPCPAAVRQYTKPDFIAAARAAVRGHKADKTRWLADFYDTAGESVALPVHPDSAAIRMFRVVLEEYQQLCRRRKALEGDIVTRLAGHPDFERLQTMPGIGPILALLILAEAGDLRRFAHVRQFLKYCGFDLCTEQSGQFRGTTHLSKRGNARLRYACWMAGAVAVRMQQNSFRRKFEDYMRSDPLNRDRRRKAYTAVAAKMARVVYAVVTSGNDYRRFPEAARPGGRIPSPGAVEASPTTS

SEQ ID NO: 442401 - protein, 343 aa, unidentified
MRHYAGLDVSVKETSVCIIDESGKVCRETKVPSHPEDLARALHDRAWCLERVGLEAGPLSQWLFSGLAATGLPVVCIETRHTKAFLQAQVNKSDRNDARGIAQMMRVNLFRPVHVKTLTSQKRRALLTARKLLQEKALAVDNDIRGLLRNFGLKVGPIGASRFETRTRELVDGMPELAEIIDPLLEARRKLRELFAVLHRKLLVIVRDDTVCRRLMTVPGVGPVVSMAFTATIDVPARFKSSKAVGAALGLTPILNQSGESKRLGRVSLCGDGMTRTLLYEAAQVMLTRTTKWSWLKAWAMKVAARRGIQKAIVALARRLAVILHRIWVSGTDFRWTREVQST

SEQ ID NO: 442402 - protein, 419 aa, unidentified
MKTSKRKKVTLVNEKTLIVALDIHKDTHSGYFRTPGNEELESFPVQNSGYGFKKLWKKICYFQKKHGLDEIMIGFESSGPYAEPLCNFFRKKPVKLVQVNPMHTKRLKELTGNSPNKTDKKDPRVIADIISLGHALTVVIPEGAAAELRSLSHARERSVKDVTAYTNQLHDLMYKIFPEFLKIMKGTTTKSAFYLLKNCPLPEDIVQEGLGSLTHILKKVSRGRMGYERAQELFEAALNSIGIKEGKQSLLMEIKHLVCIRESAEQFINNLENHMEEYLEQIPYSQSMLSVRGIGTVTVAGLIGEVGNFKAFSTSKEIEKMAGLDLYEVSSGKHKGQRRISKRGRSLMRKLLYYAAVNTVKSNGIMHSRYQAMLARGMPKIKALIAIARKLLRLIYAIARDNSNYRENKIKTDTYIHAA

SEQ ID NO: 442403 - protein, 316 aa, unidentified
MNSKSQEKINIGIDTSQSQLDIYVRPTGVYFSVDNSPAGAKNAVSKLRKYQPTRVLVEATGRLEMNFVCAANEVGLPVVVCNAGQVRQFARSTGRLAKTDKLDAQDIARYGEALQPPLTLLKPEKLREISDLITVRRQCLDMSTMQKNRLQRKPKSIRPPIQGILKSIQKEIERIDLKLDKLVDSIPQWRNQRDMLMSAKGVGKVVAYTLMSELPELGKLNRKEIAALVGVAPMNRDSGSYRGRRRVSGGRSKVRTVLYISIWSSIQYDPKMKATYERLVAAGKPKKVALVACMRKQLTILNTMMKNGAHWEEKYA

SEQ ID NO: 442404 - protein, 386 aa, unidentified
MHHATTLPVPERTCSRGDCATLFVSLELSRSTWVATALAPGSSKMSKHTLVGGNGRKLLDLLARLKTRAEQRIAAPVKVVTIHEVGLDGFWIHRLLQANGVKSHVVDPASIAVPRRHRRAKTDAIDGETLLRTLMAWRRGEPRVCAMTAPPSPSEEDRRRVSRERATLLRERIQHTNRIRGLLFGQGITNYNPLHKNRRECLEELRTGDGRSLPAHLKAEILREIDRLELVLRQISEVEAERDEMLRPAEASSPAALLMRLKGIGAEFATVLYLEGLFRHFENRRQLAAYAGLAPSPWKSGSIDQEQGISKAGNPRLRTTMVELAWMWVRYQPDSALSCWFRQRVGSERGRTRRISIVALARKLLIALSRYVTHGEIPAGAVMKAG

SEQ ID NO: 442405 - protein, 414 aa, unidentified
MRRVLERCAALDVHKKQVTACARILGQGGELEELTVEFSTMAADLLAMRDWLKQLGVGHVAMEATGVYWKPVYYALEDDFRVLLVNAQHVKNVPGRKTDTSDAQWLCQLLECGLLRASFVPPKPIRELRDLTRYRKALIRERASEANRLQKTLEDAGIKLSSVATDVLGVSGRLMLDALVSGTRDPEVLAELAKGTLRKKIPALKQALAGTFKPHHTLIVSHILAHLDYLDEAIAALSAEVERRLAPFAHQAELLTTITGVAERNSQVILAELGPDMSRFPSDRHAASWVAICPGNDESAGKRRSGKTRRGNPHLRAALIESANAAARSKNTYLRAQYEQVKRRRGHKKAIVAVAHSILIAAYHILKDDVPYQDLGDDYFTRRADPERIAKRLVAQLERLGHNVTLQPAEVAAA

SEQ ID NO: 442406 - protein, 394 aa, unidentified
MKLIGIDIGKNKHFFCVMDQQTGEIISQPVSFSNDKEGFDFLVQKIKSYPKDSILIGMEDTGHYHFALLKYLLDLQYTVALINPKTTDFNRKMQGGITKNDKLDTINICDVLDTPERKKQYRITKVNSFDLYEQKQLTRHHHNLKEEENVYKNRLQKCIDIVFPEFNKLFNSKYGIVYMNILKMFGSAENIANTDIRTIRKCFEIEGRGNRISLTPERLKECAISSIGISSSAEVIQIKHLTAQIELIEEQLTEIDKKIEEFSIQNNSPILSIPGISHFSGTSILAELGDISNYSKPSQIIKFAGVAPLHYESSQFNAQHTAITKKGSKYLRKTLYQIMLPVIRHNPVFNKYYQLKISQGKGHRCAQGHCVRKLLRIIYHLLKTNQQFDPQLLR

SEQ ID NO: 442407 - protein, 343 aa, unidentified
MESIYYFGLDVHKKTIAYCIKTVRGEIVRQGVVGAQRKALQQWLKEIPGAWMGALEATIFTGWIYDFLKPHARELKVAHPEMLKAITAAKKKNDRADAEKLADLLRVNLLPECTMMSEELRELRRILRYRNMVVRTATQMKNKMSGLLMEVGAIYDKQRLHGRKYFGELLERVEDVPDSVKELLQLSRSNLELFTAIQKKLVKTLRENDLIRERVQCLMSIAGIGEITALTWVLEIGDPARFHSSREAISYCGLCSAQRESAGKEQRGPLSKKRNKYLQTALIEAAKLAPYWNPQLAALHEKELTKGNRNRATLAIARKLVEYMLAVDRRGTPFVVESPSQVA

SEQ ID NO: 442408 - protein, 375 aa, unidentified
MKNKVRFLGLDVHAETIAVAIAEPDGEVRSLGTIANRAESIRKLVKKLGPVEQLKACYEAGPTGYVLYWQLAELGVACEVIAPTLVPMKAGDRVKTDRRDAERLARSYRSGDLTAVWVPDEGSESLRDLVRAREAAKQDQLRARHRLSKFLLRMGQRPAAGMKAWTAPYMAWVRQVHFTQVAREATMLDYLHEVDHMGERVKRLEQAITEAVKLAAPAVQEVVKDLQALRGIAEISAVTIVAELGSITRFDTARQLMGYSGAVPTEDSSGKRTRRGSITKTGNAHLRRIVVEAAWSYRYRPAIGPRLRQRQEGVSEPIKEIAWKAQVRLHKRSMKLAAAGKDQRKIITAVGRELLGFIWAIGIKAESAVMQKMAA

SEQ ID NO: 442409 - protein, 323 aa, unidentified
MEMPEDKVYVGIDVAKASMDVAVHQSQQRWSFSNDDEGIGKAVCCLREVAPALIVMEATGGIELPIAAALAAAGLPVAVVNPRQVRDFARATGKLAKTDAIDAQVIAHFAAALKPTPHPLPGAQAQEFDALLTRRRQVVEMLTAEKNRLSSAPSKAVREHIKAHIGWLERELANINSDLGRRVRQSPVWREKDALLRSVPGVGPVLSFTFLADLPELGALDRKQIAALVGVAPLNQDSGTMRGKRAIWGGRATVRATLYMSALAATRYNPVIRAFYRRLCAAGKAKKVALTACMRKLLTILNAIVKHQTPWEYGASPIMGPCH

SEQ ID NO: 442410 - protein, 419 aa, unidentified
MLNLGVCRPTHKPAVDQRLRAAPYKKHAAACRRPSPAGRHKILDQRPAHPLAVDVKQTTKSSPLFTNLRSCVVKKIATIGLDRAKNVFQVHAADADGSTVFNRKIKRADLLEFFAKLPPCLVGLEACSTAHHWARRIAEFGHEVRLIHPAYVKPFVKRGKSDFNDAEAINEALTRKTMRFVPVKSAEQQASAMIFRARTLAIRQRTQAINALRSHLAELGVATAQGTTGLKALIAIANDEHDGRIPASARFALQQILKQIEFLGEYIARLDREILARTKNDADIKRLMTIPGVGPIIAVAITALAPDLSGFKSARHFAAWIGLTPKSHSSGESQALGNISRMGNSHLRTLLVTGAMSVIRSAKTAERVSPWLAKLRKRRPFKVAAVALANKTARIVWALLIRGGNYIKPGGTVDVGTMA

SEQ ID NO: 442411 - protein, 344 aa, unidentified
MRNPNILAIDLAKNVFQVCKTDSQGNVVFNREVTRLKLKALLCKQQSSLVAMEACASAHYWARYARDLGHQVKVMSARSVKAFQTKQKTDKNDALAIATAASLQHIHSVKIHTVEEQALQALERARHLALAQQVAQSNQIRGLLSEFGVVIAQGMSALRVNIPLVLEDAENGLPNSFRAVLHRLWAQLNVQIEHVDMLTKQLELSVSTDPVCQQLMKLEGVGPLGALGLALRLGKGENFTNGREASANIGLTPKQHSSGGKERIGHISKRNADKRLRCILFQGALSVISNVIKRPARTTKEQWLKTLIERRGKKVAAIALANKTVRTAYALLKSNSEYQPQLLA

SEQ ID NO: 442412 - protein, 346 aa, unidentified
MKILALDLGKYKTVGCEYESESGTYRFQRSVTTPAALQKLVEEVKPDRVVIEVCSIAGWVCDLMRAMGIDIQVANTSDDAWRWRKVKQKDDRRDALKAARLSAVNQLREVYIPPREVRQWRALITYRRQLVRRRTQIKNHLRDLLLREGQILPRGSQCWNQEGLALLTSLACPFSEVGLTDLWRGELYEELQQLELLQARLATVEEKLNAIGKADARVQLLRTAPGVGARLAEAIVALLHEPQRFRKVSQVSAYIGMVPKAFDSGESERRGHITRQGSRLVRSLLVEVAWAGLRHNAWVRQTYQRLNGGKKARKKIAIVAVGRKLLVRCWAMLREQRAWDWQPQIT

SEQ ID NO: 442413 - protein, 315 aa, unidentified
MASDIYVGIDVAKDTLFVAILPGGESWEERITEDGLKRLIAKLRPVAPKLVVMEATGGYEAPILEALWKHNIPVAVVNPRMVRSFAKALGRLAKTDKIDATVIAQFAEAIKPRPKLPSYRQEKALGDLVARRKHILQMIVAEGNRKRRAVGEVQKLIEKHIKWLQKSLEEIEKKLETYINKTVEWREKSEILQSVPGIGKIVACSLMADLPELGNLNRKQIASLVGVAPLNRDSGNMKGKRGCWGGRANIRTALYMATVVAMRFNKTIKAFYERLCQNGKHKKVAITACIRKLLCILNAMMKNHVRWGEFKPAET

SEQ ID NO: 442414 - protein, 433 aa, unidentified
MNKIVERGAGIDIGKRFLLCCVLTGAAQEEPRSQTRRFDTTVPDLERLRAWLREENITHVVMESTGSYWIPVFNLLEGHFAVVLANPEEVKNRTGHKTDRKDAEHLADLLRHNHVRSSYIPPEPVRQLRDLTRRRVQITQDASRERNRVQKLLEQANVKIASVLTDVFGVSGYHMLLALLGGQASPAEIAQLARGSAKRKIPQLIDALDGNRMSDHLRFVIRSCLRHLACLEEEVEELDEEILRRMKLAPFQSAFMLLQTMPGVGELSAATILAETGTDLAPFPTAEQMASWAGLCPGNRESAGIQKGSQTTHGNPYLRMTLVQCAWAAARKNDSIFCARFQRIAPRRGQKRAIMAVAHLMLIVLYYMLKQGVPFRGAEYAPKQRRRQRRAHHHLRCLRRLGLSVQIMPGSESPVAHGFTGWVFSEQPVCCRG

SEQ ID NO: 442415 - protein, 415 aa, unidentified
MKEGEKSSSCRYIALDIHKHYSVVAGVDREGEEILPACRVEHFNLEDWLPKHLLQTDRVVIESTTNAWHVYDLLEPLVAEVLVANPIKVKQIACARVKTDKKDTLILARLLAANLVPTVWVPPKLVQELRQLISQRRRLVGMHTQVVNRMHSISHRHHLGHPKGKRFQEKDMGWRERLGKVERFQLDLDLETKKFIKEQIDQITKELRSMSHQEPWASQLMYLMQIPGFGVVTGMTVLAAIGDIARFETPKALASYSGLTPGVEQSGVKLRGKRITKEGRREFRWAMVEVAQRAVKADPHWKRLFTELERRMHRNQAIVAVARHLLTVVWSVLSQGKSYRHYSDERIAYKYYTWSWQLDEAQRKGLTRPQFVRYYLMRLGVGADLQQVALDPKHPHRLASESEILEMMTDLQPPG

SEQ ID NO: 442416 - protein, 349 aa, unidentified
MEIDTIGIDLGKTVFHLVGLSRAGEVVVRRKFSRTQLLRFTANLCVRLIGMEACGGSHFLGGRLREQGHEVRLMPAQYVKPYVKTNKNDYVDAEAIAEAVGRANMRFVPIKSDDQLDMQSLHRVRDRWVARRTSVINQMRGLLLERGITFRKGRRHAEACLPSVLEDADNRLSGLLRMLLAQLQGELRQLQSQIDEADALIAKAAREHEPCQRLMGIPGIGPLTATAVVASIGSGAEFRKGRSFAAWLGLVPKQESTGGKQKLLSISKRGNHYLRRLLVSGARAVLQCRDKQSPGLSVWLGQLASRVHTNVAAVALANKMARVAWAVLAKSEAYRPPLSVISTEALVCN

SEQ ID NO: 442417 - protein, 349 aa, unidentified
MKIVGCDFHPSFQQVAILDLSTGEVRELKLMHADGEADRFYRELEGPALIGMESTGNTLWFERLMEQLGHELWIGDAAQIRASYVRRQKTDKRDAGHILQLLIDRRFPRIWVPSSLERDQRQLLLHRHRLVRMRTAVKTELQHLALNQGLQQKRGLWSVRGRADLEKLPLECWTGRRRADLLKVLDMLEAQVADLDEAVDKVAFSNAQARLLMTQPGVGPITALAFVVTMGDVARFKRGKQVASYLGLIPRERSSGAKRRLGAISKQGNVFLRTMLVEAAQSAVRYDEEFKKEYAHRCHQKPKGVAKVAAARKLAVRLYWMLRTQTPYAKAVASKAVHNEGSPSHSLVG

SEQ ID NO: 442418 - protein, 409 aa, unidentified
MQPILKSCCGLDVHKSMVMACIAHGPLDNPPIFEIRKFSTMTNDLRSLSEWMKEYGVTAVAMESTGIYWKPIFNILEDDFDIVLANAQHIKNVPGRKTDVKDCQWIAHLFRNGLISGSFIPPREIRELRDLTRTRRKLVGAMTSEKNRVQKVLEDANIKISSVVSKVFGVSSLAMICALLEKDELSADEIAEMAKGKLKNKVNQLVEALNGNVTDHHRFLLKQHLGHIDFLVEEIKEFDEEIQRRLVPYQKEFKDIQSVTGIKGVSAASVIAEIGVDMSRFPDEAHISSWAGVCPGNNESAGKKKSGKTRRGNNYLKATLTESAWAAARTKETAFSAMYRNIAGRRGTKRALVAVGHQILIEVYRVLETGDRYQDAGAEAVTERRLKNREQRMVRELKRCGYNVSKVVV

SEQ ID NO: 442419 - protein, 370 aa, unidentified
MLDTTTFVGLDVHARSIKAVSLDVMTGEVRCATFGYDAGAVAEWVRSVDPRARCVYESGVTGFDLQKRLSGLGVDCVVGAVSKMIKPSADRRRKNDRNDAEFLARMLSVGNVVEVWVPDDECEAARDLTRALEDARDDLSRSKQRLSKFLLRHGLAFDERTPTGRRKGNWTRAHWSWIESIRFAEGADNDVLAYYVDAVRRAAEEKARLEGLVEAEARKPRWRRRVDSLRCLKGVDTATAADLVFEAGEFSRFGNARSFAAWVGLTPSEHSSGESDRRGAITKAGNKHLRKALVEAAWHYLTCSGRPKDLAKGQAPDRVARRHAAKGVRRLVERREALLARGVHGNKANVATAREFACWVWAVGLMAEEA

SEQ ID NO: 442420 - protein, 430 aa, unidentified
MKSNRQNAKIEAITEKTLVLGIDVGSETHYARAFDYRGIEYSKKPFKFSNTEAGFATFKEWILDLKERHEKDKVVPGMEPTGHYWFNLGKFLQDNEMKPVLVNPHHVKKSKELDDNNPTKNDRKDPKVIAGLVREGRYMIPYLPDGVYADLRTASNIRFQLQAELTRIQNRISRWFNIYFPEYKTVYGKPDAKSGMLILKAAPLPEDILTLGIDGVNQIWRDAKLRAVGKARAKTLIEAAEHSVGSKEGAVSARMEIRMLLEDYESRNTRLQEVMVLIEELVRKIPMAEKLLEIKGVGIRTVSGFLAEVGDISRFNNPKELQKLAGLALVENSSGKHKGETTISRRGRKRLRYLLFEVAMSLVSKNQEFRELHNYYTTRRLNPLKKMQSLVAIAAKLIRVFYAMLTKGVDYDPKKMVSDIKRPAVYLQAA

SEQ ID NO: 442421 - protein, 341 aa, unidentified
MMIIGCDFHPRFQQIAFVDQETGEYGERRLSHPEEAERFYRSLAGRQVRLGAEATGNFRWFRLLMQELGHEFLLGDATAIRAACPRKQKTDKRDARHILKLLVEDRFPGVWQPPAENENLRQLLLHRCRMVRMRTRVKNQLDAIAKSEGLLSKRIWCPMRRNQIEALPLSGWNVARRRDLIALLEEMNRRIEPLDEAVIKAAEQNPEACLLMTHPGVGPVVALAYVLTIGNWERFERGKQVGSYLGLTPTEESSSDKRRLGHISKQGNTLLRWLLVEAASTAQRYDPSWHRQYLRLSMCKHHGVAKVAIAHKLAVRLYWMLRSGNDYSKLMERGSHVGQSE

SEQ ID NO: 442422 - protein, 406 aa, unidentified
MNYLGIDVSKSTSRYVFLDSDGEKLAKSFTLQNHQQDFTKLLERLKELNLSADNLLIGIEATGIWWENLYCLLTENKYKVIVLNPHQTNKFREALRIKAKTDDLDAYVIAGLLRSQEYASSFIPEESIQILREITKLRFQLLKDRQDYERQASALLGLLFPEYPQTALKNPFTVSSMAILKMFPTAKHLAEAKPKNIEKIVRSIQGNNFNIDEIQSLIDTARKSIYSGRAKHDRGLNLNILLTQIETLQHAIAQLDQRMNDILSPSDSDDANSFPGANLLTIPGVGPKTLAAILSAVGSNGQAFAEGKHLIGYVGFFPRIYESGETRRDNKISTRGPKYLRWALYMAAVACLKHNREFKALYNRKISQGKSAKQALIYVAKKLAHLCLSMLKSGESYNPARVFMPV

SEQ ID NO: 442423 - protein, 322 aa, unidentified
MDKPVTPDCYVGIDVGKDRIEVHIRPDAIAFGCATDAKGLEQLLTRLKPLTPKVIALEATGGYEAIIVATLSNAGLPVAIVNPRQTRQFAGALGRLAKTDKIDAGVIAHFAEMAKLEGKPPADAERSELRALLARRCQLVEMAKSERQRGARADSALTRRSCRTVVRQLEAEIARVERAIGKLVDGSPLFQAREALLKTIPGVGKVVARTFIAELPELGTVDRHEIAALVGVAPINQDSGKWRGRRMIKGGRPQVRSPLFVACLSVIQHNKPLRAFYQRLVDGGKVKKLAIVAVMRKLVVIANAMVKSGKPWSATATPAAAA

SEQ ID NO: 442424 - protein, 455 aa, unidentified
MQTFYLGIDASKGYADFIILNSQKEVVVESFQLDDTFDGHCFLYELLMKFLTDHTDSIIYAALESTGGYENNWYNALLEFQGTLNLQTARLNPLGVYHNSKADMKRNVTDKISAQSVAEYMIAHPQKVSYQSQDHLASLRKQWGFIKMLTKQCTQLLNQLESLLYSANPEILAYCKDGVPAWVLKLLVKYPTAANLGKSKVSAVARIPFVSTAKAKELVLNAKKSVASASDEVTQQLVTATVKQIMHLKETIKAQSGIMARECAVPEVELLKTFIGISDSSGIGLMLNIQSVKRFKTVKKLAAFFGLHPKLKISGDGVSTVRMSKEGRAEPRQILFMVALTAITQNPLIREIYQEHVRQGMKKMAAIGLCMHKILRIIYGMLKNNNPFNPEIDRRNRQKPVSQRKPRQNKVRRYQDYDSNAPISRRQKTKRMEQRQSQSDNGAECGILAPIPFST

SEQ ID NO: 442425 - protein, 319 aa, unidentified
MTDQTLAKYVGIDVSKGQLDVAVGEQGEEWAERNDEGGIAKLVARLKAVQPELIVLESTGGLEKGALSALSRAGMRVALVNPGRVRAFARSLGLLAKTDKLDARLIARFAKAVQPSATRLADELEQHLAGLVARRRQLLEMQVAEQNRLLSTPPSLKANVEEHILWLQTALAKLDQEIQADIHQSERWKKHADLMRSVPGVGPVTAATLLAELPELGQLDRKKIAALVGVAPVNDDSGHRRGKRWIKGGRSSVRNVLYMAALSASKHNPLLRAFYQQLIQRGKEKKVALTACMRKLLIFLNAILRDLTPWKPVPKHFPS

SEQ ID NO: 442426 - protein, 314 aa, unidentified
MKMAMLSFCGIDVSKDRLDVVVLPEGWFFSVSNDTAGWAELVVRLRPLTVSAIGLEPSGGYERGIIRALLAAGMSVRRINPNKLRQFARARGVLAKNDRLDARLIAEYVAIMPTRVVQRDAAVERLAEIVTMRRQLCDEHVAAENQAAHLEDAMLRRLSKRRQMRLEADIRLLDKRLAEMVAANVALAQRYELLTSMPGVGPVLAFTLIALLPELGKMTRKQIAALVGLAPYDFDSGKLKGHRSIYGGRMPVRNVLYMAALSASRYSPALKAFHNRLADADKKSKVIIVAVMRKMITPLNAMLRDNAAWQPQSA

SEQ ID NO: 442427 - protein, 341 aa, unidentified
MMIIGCDFHPRFQQIAFVDQDSGEYGERRLSHPEEAERFYRELAGRPVRIGAEATGSFRWFRHLMQELGHEFLLGDAMAIRAACPRRQKTDKRDARHILTLLVEDRFPAVWQPSAENEHVRQLLLHRCRLVRMRTRIKNQLDAMAKNEGLLSSRVWSPKRRSEIEALPLPGWYAHRRADLLGLLDQLDERIRPLDEAVHEAAEDNREARLLMTHPGVGPMVSLAYVLTIGDWRRFPRGKQVGSYLGLIPAEESSGNMRRLGQVSKQGSVLVRWLLVEAAVHAQRHDASWHRQYVRLSINKHHGVAKVAIAHKLAVRLYWMLRSGDDYSKVMERGSHAGQSV

SEQ ID NO: 442428 - protein, 344 aa, unidentified
MDNHTQYSGFAGVDLAKKVMQIHFVTGDGEITDKQVKRAEFLDFFRNRTKCLIGMEACGASQDWARKLEAMGHEVHLMSPKAVKPFVSGQKNDYNDAIGIYKAMFNGVRRVPVKSTEIRDLQTLRRIRSQVTKDKVKEINHVRGLLAEYGIVMGKSITAFNKGISSALESLKERGDVSPLVAEELQTTVESIKTKIERQKRLDREIEQLARGCKNYENFLKTPGVGPFTAAMLCVLLCDPAIFANGRQFAAYIGLAPRSRGSGGKNFIIGIPSKFNCDSESRAVFVECAQALARYKNKSPWVDGILRRKPKKVAVIAIANKLARQVWAMANKGESFKQMTMLTA

SEQ ID NO: 442429 - protein, 334 aa, unidentified
MENIALIGIDLGKNSFHIHCQDRRGKAVYRKKFTRPKLIEFLATCPATTIAMEACGGSHFMARKLEELGHSPKLISPQFVRPFVKSNKNDFVDAEAICEAASRPSMRFVQPRTESQQAMRALHRVRESLVQDKVKTTNQMHAFLLEFGISVPRGAAVISRLSTILEDNSLPLYLSQLLLKLQQHYHYLVEQIKDLESQLKRKLDEDEVGQRLLSIPCVGTLTASTISTEIGDGKQYASSRDFAAATGLVPRQYSTGGRTTLLGISKRGNKKIRTLLVQCARVFIQKLEHQSGKLADWVRELLCRKSNFVVTCALANKLARIAWALTARQQTYEA

SEQ ID NO: 442430 - protein, 414 aa, unidentified
MDTLVERCAGLDIGKADLKACVRTPGKNARRVREIRTFATTTVGLLQLRDWLTGHQVTVVGMEATGDYWKPVYYLLEDTFEVQLLNARHMRNVPGRKTDVADSAWIAQLIEHGLVRPSFVPPPPIRRLRDLTRYRTAVVQERTREIQRLEKVLEDAGIKLSTVASHTLGKSSRAMIEALIAGERDPQVLADLALARMRNKIPQLRQALLGRFTDHHAFVCRTMLERIDTAENTINKLTERIEQEIAPFHQTVTRLMTIPGVSARIAQILVAETGADMTRFATAAHLASWAGMCPGHHESAGKHHGGATRKGDSWLRGALGEAATAAARTKNTYLQARYRRIAARRGTKRAVVAVGHTILTSAWHMITAEIDYADLGADYYQRHQDHRAATIRLVGKLTQLGYRVTLDDAATVAT

SEQ ID NO: 442431 - protein, 345 aa, unidentified
MEPMYYIGLDVHKRKISYCVKDSSGQVCAEGSLPATRFDLDRWMKALPQPWSAAMEATMFTGWIYDHLKPHAASLKVAHPLMLRAIAAAKRKNDRIDANKICDCLRCDFLPECYMAPTAIRERRRTLRYRNLLVRQMVQMKIKISSLLMEAGVSYNKQRLHSAGYFRELLATNPDIDEGLRSLLRQCRETVVRLGKTESALIRSLEDDRLLAERVERLMSIPAIGPITALTWALEIGEVQRFSSIKKAISYCGLCGAEMSSGNTVQRTPLSKQRNKHLQTTLIEAAKMAPRYSPTLALLFDREKQKGNANRATLAVARKLVAYLVAVDRRQKEFQTVERENRTAA

SEQ ID NO: 442432 - protein, 341 aa, unidentified
MSDYSYFCGIDLAKNHFSLHAVDQNGKVILHKSVTRSKLLTTIANMPLMRIGVEACGGAHYWARTLNKLGHDTRIMAVKYVIPYRTKGKNDLNDAVAICEAVQRPSTRFVPVKSPEQQAILSVHRMREHWVRERTALMNRMRALLSEFGLIIPVGRSSLMKQIPLMLEDAENELPHLARTVIADAYHHLGELNQRIADTEQVFDSFAKVSANVQRVMKVRGIGPQTATAILASIGNGSQFDKSRDFSAWLGLVPKQYSTGGKPRLGRITKHGDKYLRTLLVHGARTVIANLGDKQDKLSQWCRGVLERRGMNRAIVALAAKNARIIWSLLHNQTEYENYAA

SEQ ID NO: 442433 - protein, 321 aa, unidentified
MSLELLAIDLGKRSFHCHGIDSNGVILSRKVSRAKLLETIKELAPKAVTMEACASAHFWGRRFLADGRRVLLINPWFVKPFVKGSKNDAADAEAIYEAALRPTMRFVPVKSTEQQDLQSLHRARERVVCARTALINHMRGLLGEYGVILPQGAWRFLKQAQEAIAAADLSDLARGLFVDLFDELRALDVRLDKLDRQLLGVCRTNEACKRLSTLPGVGPVIATALIAAVDDGRNFRSGRELAAWIGLVPRQYTTGGKPRLGGIGRRANHYLRRQMIHGARAVMFRLTKHEDCRSQWLKGLAARRGFNRAIVALANKTARRV

SEQ ID NO: 442434 - protein, 424 aa, unidentified
MNCNQNFKISQVTEGTLVLGIDIGSNTHYARAFDWRGLELSKVFKFKNSFEGFQSFVLWVNDLCCKYNKSKVIAGLEPTGHYWFSLGELLKENNITIAIVNPYHVKQSKELDDNLQTKNDSKDPKVIAKLVIDGRYSFPYIPEGIYGELRVADKLKNDITQQIISIKNKIHRWLSIYFPEYEKIYSSIDSKSGFLLLKETPLPKDIVELGSEGIVERWKQTKLRAVGLDKAKKLEEAAKKSIGCKNITSSARFEIKLLIEDYEYKQNQLNSITEELNKLCEKIPMIKEIAEIKGIGIATAISFVAEVGDIRRFKSAKQVQKYAGLALKENSSGKHKGLTRISKRGRKKLRTILFRATIPLIGFNKEFSSIYNYYIERKDNPLKKKQALTAICCKMIRIFFTILSKGIKYDETKMLHDIKRPVAA

SEQ ID NO: 442435 - protein, 348 aa, unidentified
MAMTIVEAVRTVTGGVDTHLDVLVAAALDPLGGLLGSQPFETTPTGYKALLDWLEGFGEVGKVGVEGTGSYGAGLARFLRRRRVEVVEVDRQNRQARRRQGKSDPLDAIEAARAALSGRAQGQAKSRDGAVEAIRVLVVAKRSARQARVKALTQVRHLSITAPDQLRCRLKGLSVPALVAEGAKLRPSRSTDPVEAATKASLSSLAHRIQALDAEIAELDAMIDPLVAATAPDLLALFGVGPDTAASLLVAAGDNPERLRSEAAWAHLCGVSPLQASSGRVTRHRLDRGGDRQANSALWRIVMVRIAHDPDTTAYFERRVKEGRSKPEVIRILKRYVAREVYRHLPRG

SEQ ID NO: 442436 - protein, 343 aa, unidentified
MTLHILGIDIAKNTYQLHGADSSGKEVLKKRLPRHKLAAFIANLPACTIVMESCGGANYWARVFQRSGHAVKLISPQFVKPFVKTNKNDANDALAIVEAACRPSMNFVPIKQVAQQDIQSVHRIRTRVVKNRTALINEIRGLCQEYGIVVAPGAARVKTSLCTIIADGANELTVSSRESMQGLYEELVWTEARLKALDAKIRVLCRLNENCKRILKVPGVGELTATALVAAIPDPKEFRNGRHLSAWLGLVPRQASSGDKQVLLGISKRGDRYLRTLLIHGARAVLSHHKDAANDYSRWVARKKSTLSHNKAAVALANKNARIIWSMLNTGEAFSYGIQTDAA

SEQ ID NO: 442437 - protein, 424 aa, unidentified
MRITYQTCCGVDVHKSFLVATIVKTTGGIEPSYQKKRFSTFNNSILQFKKWLLDHECRDVCMESTGKYWVPVFNLLEDEINVVIANPKWVKAVKGNKDDTKDSKWIGDLFRLGLVRGSYIPCKKVRILREYTRYRYKLVSCRSSEKNRYQNALTVCNIALDSVVSDIFGKSSTSIIDYLLEQSGTSINHEEIASKLLRSLKSKEDAVIESVEGYQMTDAQKYRMRLVRAHMDYITAEINDVDKMIENMISSDPDYKNAVQLLCTIPGVKHDSAVTIISEIGIDMSQFCNSKRLCCWAGLTPCSNESGGKKKSVRITRAGIYLKPALVQCAHAAVKSDKSPYYKKKYESLVKRRGKKRAIIAIARMLLTAIYQMLSTGEEWNPSDLYKIDMPESLAKRQKDKAIKQAMKLLQKEGLLPLNEPLSS

SEQ ID NO: 442438 - protein, 344 aa, unidentified
MKEVITIGVDLAKNVFQIHGVDAEGSVVFRRQLRRSRMLPFFKKQPPCLVGMEACATAHHWARQLIELGHEVKLMPPHYVKPYVKRNKNDAADAEAICEAVTRPTMRFVAVKNTEQQSILMLHRTNELLTRQRTMLINAIRAHMAEFGIVAPTGVPQVKKLLRIIADADDARLPSIARSCLESLARQFVSLHEEIGAAKQQIHAWHLSNEVSCRLGTIPGLGPISSSAMAASVSDPDVFKNGRELAAWIGLVPRQNSTGGKQRLGKISKQGDQYLRWLLVVGAMSVIRQAKRRGTSNMPWLDDIIARKPAKVAAVALASKNARIIWALMKQGGIYQKPVTVPSV

SEQ ID NO: 442439 - protein, 378 aa, unidentified
MNKQEENTTTTDTGDDTVYFATEISGKSWLLGVHAPLVDKISLHKFKPQDAAGLISKVLQIRAEAEKKLGRPMKVMAVYEAGYDGFWYHRMLIEAGIENLVINPASLQVDRRARRAKTDRIDAQGMVRALMAYARGEDQVFSVVQVPSIEQEDRKRTLRERKRLVKERISHTNRINALLATQGIYDFKPMRGDRLEQFDALGLPECLGREIHRQLKRLAFVLGMIKQVEQERDAVAIDDNPDNKTAHNIRQLQRFNGIGPEFSTILATELYYRKFENRRKLAGFVGLASSPYKSGVMQHDQGISKAGPGRIRKTAVELAWLWTRFQPDSKLTKWFKARVGDMKGRIKKINIVALARKLLIALWRYLETGLIPEGAVMK

SEQ ID NO: 442440 - protein, 328 aa, unidentified
MHVAAALDPIGGLLGVEEFPVTPAGYAHLLGWLGGFGTAGLVGIEGTGSYGAGLARHVAAAGIRVVEVDRSDRQDRRRQGKSDPLDAVSAARAAQSGRARGAPKGRDGAVEAIRALMVAKRSARSERTQTINQARSLIVTGPDDLRARFAGHTVAALVSELAALRPRPGEAVGYATRIAVRELGRRAEFLDGQLARLDELIVPLVTSRAPGLLALHGIGPDTAALLLIAAGDHPERLRSEAAWAHLCAVAPIPASSGKVTRHRLNPGGNREANHALWRVVITRMSSHAPTRAYVERRSEQGLSKKEIIRCLKRYVAREVYRHLRTAAG

SEQ ID NO: 442441 - protein, 426 aa, unidentified
MAKVEHTADARVLVGIDISKHRHEVLIAAPGKQRRRKLTITNTIEDFRRLISILSEFGLPVRVGFEATGNYHRALMHHLGDAGFDLKLVSSVALARTREALHNSWDKNDPKDAQVILHMLEIGAVQVFHDPMVAGTNDIQELSKTHEVVSRAKTELWHRILTHYLPLYFPEAERFHRSSRTDWFLAFLEAFPSPHMITALPKESFVEAAWPVLGRRVGKSELLSDIYETSKASVALPVLPDSEAIRMFRLVLAEGRSLTRQRNEIEDRAVSLLSDLPDFRLLTTIPGIGPINAMTILAEAGDLRRFRHHRQFLKFCGMDLATVQSGMFRGQSKISKYGNARLRRVLWMAGQTAVLQRANSFRDKFERYISQDRHNPHLRRKACTAVAAKMARTIHAVVKYGEPYRPFFEGASPGGRTPLSKGRGGA

SEQ ID NO: 442442 - protein, 344 aa, unidentified
MEYVAIDLHLRRSQFRIGLQDGTVVKDGKCDTRRADFTRVFGDRAPLRILLESSTESEWVAQHLESLGHEVIVADPNYAPMYGSRSRKVKTDGRDTAALFDACRLGIYRRAHRVSAGQRARRQELRIRRHLVQMRSRGISLLRSVLRQEGWRLPSGSVERVDRRIAALPLPAELLAILAPLRTWLGELNRLLGLADTAVADLAATDPIARRLMTAPGVGPVVALTFQAVLDDPVRFGGDAARASAFLGLVPSEDSSAERRHKGHITKAGPRDLRALLVQASWAIWRGRRAAGAALRAWAQALAARRGRRIAIVALARRLSRILFAMWRDRTDFGVRLPRGTVAA

SEQ ID NO: 442443 - protein, 430 aa, unidentified
MTNLKVTPSESILVAIDVSKSRNDILIDILGASRHQRLVVLNTRSEHDRLIERLLAFGRPVIAGFEATGNYHRPLAFRLLQAGFALRLVSSVALARTREALHNGWDKNDPKDAQVILHMLKIGATQAYCDPICSGVNDIQELSKTHEVISKAKTELWHRLLTHYLPLYFPEIARFAGNSRSDWFLAFLEQFPTPASIMTYSKEEFIDKAWDVVGRKVSKARLLGDIYETARSSIGLPAAIDSPAIGMFRLVLAEGRSLIRRRDAIEQQAHAVLASNDDYHRLRQIPGVGPIIAMTILAEAGDLRRFHHHRQFLKFCGLDLATHQSGQFRGQTKLSKFGNARLRRALWVAGQVAIRQRDNSFRAKYERYIARDRDNSDLKRKALTAITAKMARTAHAIIKAGSDYRPFFEGPMPSGRTSLSRCREGASATL

SEQ ID NO: 442444 - protein, 401 aa, unidentified
MESPIVSIDVSNGNSHYMCFIKNNKRFGKVKKIDHDIEGFKRLLEDIQKLEAETNEKVCAVFEATGVYTKPLERFLSKNSIKTYIINPLESARKRKEEIHNKKTDKLDPISISKVYYDKEEMMELKKKDETYNWLRKKNRLYEDQLNHLRKYKVTFQNQLSICFPGYLDLFKDGYSDIPMTILKKYPHPDLLKNKKAETVARYLEKNTCHTHKVSLEYALKIIEFAKKTYPGCEKDDVEVEIFEILLDKVIETQRECEKTLNEMITVASTLEEYRYISSIDGIGPNLAARIIAEIGDIEEFKSREALVAYAGLDPHIYQSGDQDGKHLKISKKGNKYLRCLLFLAVGCSIRGAKDNPVNRFYQKKKQQSNPLNSKAAKTACTAKLLKIIYGICKNKTTYER

SEQ ID NO: 442445 - protein, 319 aa, unidentified
MIMTNVTFPQLIQRGCGIDVHLKVVVATIDGVGIQKETRSFNTFTSCLTEMKEWLLANGITHVAMESTGVYWKPVMRVLEEAIPKVWIVNARHIKNVPGHKTDKMDSEWICKLLLAGLLKPSYIPPKEQRQLRDLTRYRNKLIQTMAAEKNRMMRVLEDCNIKLSSVVANTSGVTATALIDMLCEGRKLTIEDIESVYHKKLSASPQELLEACTGFVEEHHVYMLQMIRKSIAQTQDLVDELSKRIKDILVKYDNVLELLKEIPGFNTKVVEDLVSEIGLDMSAFPSEKHLASWAGICPGNNESAGKKKAEESLMVTNK

SEQ ID NO: 442446 - protein, 336 aa, unidentified
MSVYVGIDVHRKRSQVAVVAEDGKVQLNKNTVNGTEPILRLIGDLPAGTPVAFEAAFGWGWLLRLLEDYGFDPHLVHPLQCKAIASARLKNDKVDAATLAQLLRADLLPEAWIAPAEVRQLRALLRHRASLVRLGTQQRNRIHAVVADFGYDRSGSYLSGPGRGWLAGLDLPAVSREIVADCLAVIDGLAPVIDRIDGELRLHAKADPRVKTLTTLPGVGQFTALVMLAEIGDITRFPSARKLASWAGLTPTVRGSDRTVRHGHISKQGSAWLRWVLNQAAQTAKRSAEFAATYASIAKRRGKKIATIAIARKLLTRAWHLLSEMQATGPATPPRP

SEQ ID NO: 442447 - protein, 376 aa, unidentified
MSEGISFAGLDVHKKSISVALLKPGAREPIEWQQANDAQSVKRLVRKLKREGGETVRCCYEAGPCGFGLQRTLCSAGIECEVIAPALIPLKPGERIKTDRRDARKLAELHRADLLTAVRAPTPEEESVRDLCRCRDDVREELMSARHRLGKFLLRRDLRYGEGRAWTQKHRRWLKSVQFEHRAAKATFDSYLHAIEVLEERMRAVDKELAAVAAEEPYREPVAWLRCFHGIDTVTVMTIVAELHNFRRFETPRALMAYLGLVPGEHSSGAKTSRGSITKAGNKHVRRILIETAWHYRHKPTVGANLRRRREGQPAAVIAIADRAQHRLHRRYWRLLLHNNKVPNKAVVAVARELVGFLWAALYDGDWSASGGCPTS

SEQ ID NO: 442448 - protein, 389 aa, unidentified
MPSVADRHDAPTAIQTNLAAIFISLELSRSIWLITSLSPGSAEKMSKHSVRAGDDAALLARFSELKRKASERTGKSFPIVVIQEAGLDGFWLHRVLQSEGIESHVVDPASIATSRRRRRAKTDRIDGEALLRALLAFKRGEPRVCAMVKPPTPEEEDRRRLCRERKVLIAERVKHVNRVKGLLFSQGVSGYEPLRRDRRQRLDELTTGDGRSLPMHLKTQISRELDRLELLLDHIKRAEAERDALLAAQQAAAPGPAGRMLLEFKGIGAEFAASLWLEALFRSFDNRRQLASYAGLAPTPWQSGSVDREQGVSKAGNPRLRTTLIQLAWLWLRHQPQSALALWFKERVNRNGGRLKKTTIVALARKLLVALWKYVTAGVVIEGAVMKDA

SEQ ID NO: 442449 - protein, 453 aa, unidentified
MKEPTPAGDQMSLEVVHPNAAGIDIGNAAHYVAVPPDRDPEPVRRFECFTQDLQAMAHWLEQCGIVTIAMQSTGVYWLPVFEILVQRGFEVFLVNARHTKNLPGRKSDVQECQWLMKLHTYGLLNNSFRPTEDICVLRTYWRQRDEHVQSASAVVQRIQKVLTEMNVQLANVISDISGLTGLAILDAILEGERDRYRLAELADPRIQASKEEIAKSLEGNWRPELLFVLGQQRELYREYQKRIRECDEALQAHLKNIHDKPKPESKPENPKAGKRAGTNAPKFDLRGELFRISGVDLTRIDGVNVMVAQTVLSEVGLDMNRWPTEAHFASWLGLCPDNKITGGKVFHRGSRQVKNRAATALRMAATGLWRSKTYLGAKFKRLRTQLGAPKAITAMAHHLARLIYRLLKYGTEYVDKGMAFYQQRYQQQQMKWMQKKAKELGLVITLAPAPEPV

SEQ ID NO: 442450 - protein, 480 aa, unidentified
MNVKARRTKKQVNVENQAIKLLSKEELGRKIKVIKKELRSYTWRDLETNGKFAKNDKLSFITDDMLIVGCDIGSENHYIRAIDVRGRELSRGAFEFSNTSEGFENAKAWVLALAAKHDKKQIVLGLEPTGHYWFALAAWMISNGISVVQVNPYAVKQSKEIEDNSQLKDDRKDPKLIANLVKDGNYGMPYLPEKVYADMRRLSMFRDQLTEDRIRNINRLHRELKIYFPEYMDAFGKIDGAFTLEVLKVSAIPADITALGVEGMKNIWHNAKLRGRGYSRANEIVSYAEKSVGLTDGTDAGREAVKWYAEQILKLDEQLAVIESTLHEKCMEIPYAEKILEIKGVGENILAGILAEMGDISRFDDVKEIQKLSGMGLVACSSGKHKGQTKISHRGRKRLRYWLFQAAKSAVSHADEFKQLHEYYTTRTNNPLKKMQSLVVIACKILRVIYTILKTGTTYDPQKLLKDIKHPAASQASMAA

SEQ ID NO: 442451 - protein, 319 aa, unidentified
MEKKIYVGIDVSKDTLDVAVHGDKQHWSFPNNETGITKAVSKFKELSPELVVLEATGGFEVFLATELVVAKIPTAVVNPRQVRDFAKSVGMLAKTDILDARIIARFAATVQPNPHPMPDIEAQELGALTARRRQIINMITAEKNRLNTAGKTVKPGISAHINWLEKELNEINRNIKQKVKDSPIWREKDELLQSVPGVGTNLSAIILAELPELGTLNRKQIAALVGVAPLNRDSGTLRGKRTTWGGRATVRTALYMATLVATRYNPVIRRFYERLREAGKATKVALTACMRKLLTILNAMLRYQTSWNFGVSQIFGHCH

SEQ ID NO: 442452 - protein, 415 aa, unidentified
MSETFSPMSPPGALAYVVGIDIGMESCLMCCLTMEKRQVIKPSQFSNEAAGFEWLFAHLEALKSTPDQILIGLEATSRYGENLYYALRSKGYRVCLLHPGQIHAFAQQRGLRAKTDRLDATTIARALLSEEARFGYVPSDQVVTYRELTRLQQQLTEEIVRYKNEIHALLVVLFPEFTQVFADPSRPSALTVLKAYPSAQAMREADPTALSQLLREQCPGRYGRKTADKLVQLAKSSVSSGVGVQGRSSSMRILCDQLEHTQNNLTLLQQEIERLLGTDPKAKGVLAISELGPMTVAVLRAELGDLDRFARMDQVVAYAGLDLQVKQSGKWKGQTKLSKRGSGHVRRILYLSALRSIRLPTSPFGTFYHRLVDRGLKKGMAVIAVMRKLLIVAAHLIQTQEDYDASKVGVQALRA

SEQ ID NO: 442453 - protein, 404 aa, unidentified
MPELWAGTDAGKAEHHCTAIDTDGRTVFSRRVPNDETELLELLGDVLDLADGDPVTWAVDLNAGGAALWIALLVSHGQKLIYIPGRTVHHASAAYRGSGKTDAKDAFVIADTARMRRDLQPLQETGEIAVDLRILTARRIDLSADRTRAINRLRAQMLEYFPALERAFDYSVSKSALVLLTGYQTPAALRRIGRARLATWLKNHGVRTANAAKSTADAAVTAAEAQFTAVPGEKTAAKMVHTLAREVMSLDQEIAELEALIEGRFREHPDAGVITSMPGIGDMLGAEFIAATGGDIAAFGSPDRLAGVAGLAPVPRDSGKISGNLRRPRRYSRRLLRMFYLSAQVAAMHCPVSKAFYRRKRDEGKSHKQAILALARRRLNVLWALIRDGRTFDVCLPGPAAAAA

SEQ ID NO: 442454 - protein, 339 aa, unidentified
MSLEIIQPKGPVQSQGPTHSSYAPVNVGVDVSKASLDVDMVPTPAPLQVSNDQAGFAKLLAHLSGRQVQRVVIEGTGGYERPVVRALREAGYVVCLINPRRARDFAKSIGALAKTDRIDAAVLARFGADVRPEPTAAPKLGQEHQAALVIRRRQLVGMRAAELNRLQQQQDVSALASVQTVIDFLSEQVADLDRQIEESIEADPQSAARDKALRQVPGVGAVVSRTLLAELPELGSVSRGRIAALAGLAPFADDSGTIKGKRSIQGGRFAVRRVLYMAALTACRVHPVIRSFHQRLRKAGKSFKQAIVACMRKLLIHLNELARKAVAVAPAASQTPAPT

SEQ ID NO: 442455 - protein, 363 aa, unidentified
MAMKAMTLVGLDVHAAQTHAAIVDPASGELRVSRLRMAPVEVASFLEGLGAGVVAVYEAGPTGFGLARAARERGIDVRVAAPGSIPKSSGDRVKTDRRDAIRLARLLAAGELGFAFVPSVADEHFRDLVRVIEDVRGDLMRARHRLGKFLLRRGERYPGPGRAWTVAHLTWVRGLDFEDVCSQAAFVEYLAAVELLIGRRQSLLAALEQQVPQCTHAPVIARLRCFRGLDTLSAAGLCAEVGNFARFPKPTLLSGFLGIVPSERTSDTKRRQGSITKAGPGHARRLLVEAAQHYRHRPAIGAALARRQHDQDPRVIAIAWRAQRRLHARWQHLHHERRKPAGVVAIAVARELAAFCWEAATLD

SEQ ID NO: 442456 - protein, 332 aa, unidentified
MVAGTRGSLNKAGSRKMTQLSRTAGIDTSKAKLDVAVHGGTEHWQVENAARGWRALAGELFRIGITRVGIEASGGYERGIIGHLRDHGFTVVVLQPIQVKAYARVHLRRAKNDTLDAALIAACAATVDPPRIAPDERLAQLAQHLTFVEQIEEDIARFKVRLEHVDEPRLRRMVVTDIARLKTRRSAELLRIVTALRRHDDLGRRLDLVLSIPGIGERTAIALIIRMPELGRVNREEAAALAGLAPFDNDSGKHKGERHIAGGRSRLRRSLFAAALPAAFRWNKALIELYARLIGRGKAHNAALIACARKLLIYANTVLCRGTPWLEKPATP

SEQ ID NO: 442457 - protein, 400 aa, unidentified
MISVGVDVSKGKSTVCILKPYGEVVSSPFEIHHVEKDMEDLDNLLSKLDGEVRIVMEATGIYHLPVVTFLHDKGYFVSVVNPFAMKKYAKDNSIRGAKTDRLDSIMIANYGIEKWFKLQRYEGTEETYAELKLLGRRYRYYMELHEKALQELTHVLDYVMPGIKKLFSSWNEANGKDKLSDFVERFWHFALITSMSLETFTDEYLVWAKEKKYHRSRSKAETVYELASSGIPTLSSSTPSTKMLVQEAVSVLRAVDSSLSLILTRMQELAKSLPEYSVVREMGGVGNVLAVKLIAEIGDVRKLHNAKALIAWAGIDPPPYESGQFIGSKRRITKRGSSTLRKVGYEVMRVLKSHSAPKDDAVYNYILKKESEGKSKKHAKIAGLNKFLRIYYARVMEVYQ

SEQ ID NO: 442458 - protein, 416 aa, unidentified
MDEPLSSYVTQGYIVGHREDPTGQKGGLFMTVYVGIDIAKEFHFASIMNHDGVPSKPFAFENNARGFHALLSACSSYSKEELVFGFESTAHYQDNLTFFLNNLGLKIMLINPLQVSALRKSTIRNTKTDRVDAHLICLALCHFHEHTTARDSVSSNELYQLCITRHDLVSKRSAAKIQLVAHMDRIFPELAHFFKGNLHLNTSYKLIEIYPLPSQIEKTRIDVLTKLLYHSSHGKYSREKAQELKCLASMSVGIPSDIFAFKAQLLVHQIEFLSRQIQAIEDKIKSFDSLQESPIYTIPGINIIFAAYILSSIQNITFFDKSCKLVAFAGLDPIVRQSGKFTASSTRMSKRGNSLLRYALIWTSWNVVLNNKTFADYYNKKRSEGKSHYNALGHCATKLIRCIHTMLTHQVAFNLE

SEQ ID NO: 442459 - protein, 337 aa, unidentified
MIVIGVDVHKHSLTAVAVDELGRTLAERNGPVEEQIVDWARSLSDARLWALEDCRHVTRALERTLQDHGERLVRVPPRLTAPQRHRSRTRGKSDAIDALAIARAGLQEPELDGPRPGEQTLRELKLLVDHRDDLVDERRRCQQRLRWHLHELDPGLHAPLGALDRAVWLDRLNRQLARREQTTQVRIARDLIARCRSLNRSIIELDRELHARTTTIAPRLLALPGCGALSAAKLLCEIGPIDRFRTDAQLARHAGVAPLDASSGKHRRHRLDRGGNRQLNCALHRIAITQGRVHAPARAYLERKQSEGKSRREAIRCLKRQLARTVYSTLKAEPALT

SEQ ID NO: 442460 - protein, 402 aa, unidentified
MNCVGIDVSKGKSTIAVMRPFGEVVVSPFEVCHTASELSELARLLKSLDGETRVVMESTGNYHAPVAWLLHDAGLYVSVVNAMLVHDYGNNSLRRAKTDKKDAVKLANYGLDHWLTLPRYVPEEDTRLMLKTCYRQYQQYSKVQTMLKNNLISLLDTTFPDANRLFTSPPRTDGSEKWVDFVAAFWHCECVCGLSEKAFAAKYQKWCRKHGYHFSEDKALDIYASACGHFGVMPKTDTAKLLVEQAIFQLRATSAALAALKQEMQSLAASLPEYPVVMEMFGVGPTLGPQLMAEIGDVRRFHSKKALVAFAGIDAPPYQSGQMDVRSRSISKRGSAALRRTLFLVMGVYLQSAPMGEPVYQFMDKKRSEGKPYRVYMMASANKFLRIYYASVTAYLNTQTQA

SEQ ID NO: 442461 - protein, 397 aa, unidentified
MRYYLGVDWADQTHAVWVVDERGTKVAMRTVPHTAEGLSEWGRELDEWRAHGTELWAAIERPEGRVVDFLLDHGVVVYPVNPKALDRARDRFRQSAAKSDPFDARVLADFLRTDHARLRALRPSSEAAQELKLLTDDYQRQIPLKAYYPRALEVAELPTALARDFLQAYPTPAALTALTERQWQRWARAHRMHEARTQELWAVLQRPQLPVPAHVVRAKARLMQSLVAQLTLVVEVVGTYREAIEDFFAQIPAAQWIRTLPIGDHGITAPTLWARLGDAPGRWESFRHLQAQAGTVPVTIRSGKQQVVRFRFACDKSLRYVIDHVAFLSLRWSEWARAYYAGQRARGHSYHQALRALSAKWLKIIFVMWERQVPYDEQYHLATMTRQQLRLRQKQIA

SEQ ID NO: 442462 - protein, 385 aa, unidentified
MTSTITRFQIIPAQFEIFAGLDVDKRSMSTTFSDHASLQKSLRLPYSATHLLNYVDKHFAGKRIAFVYEAGPTGFGLHDELVARNHTCLVVAASTVPTERGKRVKTNRLDSRNLSLRLRGGDLKGIHVPSRSYRELRHLVQLRDTQMQQLRATKCRIKALLLYEGIEFPDPAGRWNAQTIAALYALSCSSEVRFKLDHLIGTLYFHFNSAAAVQKRIRQFCKSDPELQQSITFLTSLPGVGWITAAQAVARVGNWRELKNVRQIAGFLGLVSSEHSTGEKENRGPITRSGDSRLRNKLIQCAWVAINKDPELRAFYRSVYQRQPKKVAARKAIVAVARKLTTRMYVVLKEQRPYVIRPDIAEAPLTAEETIGPRERLDASQNEQP

SEQ ID NO: 442463 - protein, 515 aa, unidentified
MSVDKSASLFCIQPEDTHRPATNMHRKQSLDYFNQSFERVPVRSRSTNEFSFADAYFNASTIRLSQNGSNACSPTNADQLNTKKKATPMNQNNQNQSFAAFIGLDKSDKKINVSLQRCGTAKIERSIIKGGAEALHAWVATLCTRFAHRQVAICLEQPAAGLIHGLMGYDFIVLFPINPMTLARYREAFTPSRAKDDPTDADFLCELVALHREQLKAWQPDDVCTRKLRHLTQARRRSVNMRTRLSNQLKALLKGYFPQALELCGDELTTPMACALLQKWSSLQQLKRARAETIRRFYYAQNARRGDVIEKRLALIAQAVPLTNDPALIESSIITVQALALGLRAVHTAISRYDREIARTFAQHPDASLFAALPGSGTAYSARLLAAFGSRRELFESAEAMLNFSGVAPVLKRSGQATLIHRRYARPLFVHQSFIEYANESIRHSLWARAFYQMHKAAQKSHWVIIRALAYKWIRILFRCWQERTPYDEIRYLRSLQKSRSPLLQYLAQPAIQTA

SEQ ID NO: 442464 - protein, 449 aa, unidentified
MAQRKRPTTQSAISLTHPNAAGIDIGSAAHFVAVPPDRDDQPVREFASFTTDLHRLADWLDACNVDTVAMESTGVYWIPLYELLQSRGFTVLLVNARHVKNVSGRKSDVLDCQWLQQLMSFGLLHGAFRPADQVCVLRSLSRQRAMLLRNQGRFVQHMQKALTQMNIQLANVISDVVGETGQKILRAIVDGERDGQALAKLRNARIQASEDEIAKSLQGNWRVEHLFALKQALDAFDFCATQLAECDTQIQAQLQALHVREDEPAKGKKRGRARNAPKFDLRTQLFQMCGVDLTRIDGIDVTTALVVVSEVGADMGKFPSDKHFASWLGLCPGTKITGGKVMSGKTKRCANRAAQALRLAAAALRSSQSALGAYYRRLCARMDKPKAVTAAAHKLARLIYAMLTHGQEYTDRGQDYFEERYRQRVLHNLAQKAKAMGMQLVPSPCDNTA

SEQ ID NO: 442465 - protein, 346 aa, unidentified
MMIIGCDFHPSWQQVSWMDRETGETGEQKLVQASGDAERFYRGLAAPALIGMEATGNCHWLVDLLAELGHELWVGDAAQIRASYVRQQKTDKRDAAHILKLLVEGRFPRIWMPSSEVRDLRQLLLHRYKLVMIRARVKNELQHLCLNKGVQRKHKLWTKAGQQVLRELPLKAWAGRRRDDLLGLMAMLDQQIEPLDEAVKAEAQRDQMALLLQAQPGVGPITALAYVLTMGDVRRFPRGKQVASYLGLIPREHSSGGRQHLGAISKQGNRMLRMLLVEAATTAVRLDPEFRKEYLHRCHQKPKAVAKVAAARKLAIRLYWMLRTQTPYPEVVRIESSPRVPLVGAS

SEQ ID NO: 442466 - protein, 392 aa, unidentified
MIFVGIDVAKNKHDCFITNTDGESLFNSFTITNNLDGFNDLYRKISSVTENITKVKVGLEATGHYSYNLLGYLLDKGFPTYVINPLHTNLYRKSLSLRQTKTDKVDARTIASMLMSDVNLKSYSDTSYHNEELKSLTRYRFDKVKERSALKVSISRLVCILFPELENLVPTLHMTSVYSLLYEFPGASFVASAHLTRLANLLSKASKGHYNKDTAVLFRQTARDSIGSVMPAKSLELKHTIKLIQELTSEIDEIEAAIKQIMDEEIKSPILTIPGISYRMGAIIIAEIGDFNRLDSADQILAYAGMSPSIYQSGQLDNYHFRMEKRGSRYLRYALDNATKYVCHWDKSFGAYLEKKRSEGKHYNVALSHAAKKLVRTIFAMERSGQSYIASV

SEQ ID NO: 442467 - protein, 438 aa, unidentified
MSNKVFFNLDDLFISVGIDVGADFSWMSIALPNQQFVGKPYKILHNSIDSLTTAVSKIKEAEELYSLESRIFLESTGIYHYPLFCYLRDKGFNCSVINPIITKNSTNINIRKVHNDRFDSKKAALVGLKPDLKVSLMPSDLALNCRNLCREYYDLMDNRSAYVNKLQGELRMVFPQYLGIFSKVTINTSLTLLETYTSPSAFLEADKQEIIDIIKSTARFGLTYAQNKYNAIIQAATDANQFGYIIDSNIKRIRLYISFIRKYDEEINNILESLHELVDANEDADFVKQIHLIETFKGAGFLSAVSIMGEIGDFSAFSKPKQLFVYFGLDPAVKQSGKFEGTKVQMSKRGSAIARRVIHTLTLQSISISRNGEAKNPVLREYYLKKCDSKPKLVAMGAVSHKVCNMIFAILRDNKSFEIITPQEHIKQYNASKCDMAA

SEQ ID NO: 442468 - protein, 340 aa, unidentified
MKHYAGLDVSVKETSVCIVDETGAICREIKVVSHPEDLLQLLQDPAWHLERVGLEAGPLSQWLFEGLAQAGLPVVCIETRHAKAFLKAQVNKTDRNDARGIAQMMRVNLFRPVHVKTLTSQKRRALLTARKLLQGKALAIESDIRGLLRNFGLKVGVVGAVRFEARIHELMEGMADLAEIIAPLLQARQVLREHFATLHRRLLAVVRDDETCRRLMTVPGGGPVVSLAFVATIDIPTRFRTSKAVGPALGLTPVQHQSGESRRIGRISLCGDAMVRTLLFEAAQALLTRVTKWSWLKAWAIRVAQRRGSGKAVVALARRLAVILHRMWSDKTEFHWTREA

SEQ ID NO: 442469 - protein, 391 aa, unidentified
MVCVGIDVAKDKHDCCILDSDGTIRADCITIPNNMDGFKQLLQTIRDCTKKSDKIKVGLEATGHYSYNILGFLLDNDLAVYVMNPLHTNLYRKSLSLRKTKTDRVDAKTIATMLLSDVDLKSYTDTAYHNEELKSLTRYRFDKVRERAKLKQSVSRLVTILFPELEKLVPSLHIASVYALLSEYPGAKQISEIHLTKLTNLLTTASKGRYGKDKAIQIRDAAKTSIGSVMPAKSLELKHTIKLIKELTSEIDEIEDSIQQIMDELHPPILSIPGVGIQSAAMILAEIGDFSNFESPDKILAYAGCSPSTYQSGKLTNCYAHMEKRGSRYLRYALYNATKYVCHWNPVFAEYLAKKRAEGKHYNVALSHATKKLVRLIYALQKSGKAYLVAA

SEQ ID NO: 442470 - protein, 361 aa, unidentified
MKVKAIGLDLAKNVFQVHGADERDRKLFNRQLKHAQMMEFFTKLPPCLVAMEACSSAHYWARKLTALGHTVKLIAPQHVKPFVKTNKNDAADAAAICEAAGRPDMKFVAAKSPEQQAIGALHAIRDGAMKARNAISNRLRGVLAEFGIRVPKGVSHVSKHVPEAVEDGSNELPTALRMALFDEYEQFKAMDAHIARIQKRIDQWHRSSAASQALERIPGIGVLTATSMVAQAGDPDAFINGRQVSAWLGIVPKQHSSGGKTKLLGISKHGDSRLRTLLIHGARSVLVALKRRLAAGADQATLTSTERWLLEMLKRRPANVVAVALANKNARTAWAVLKYGRPFEPGHVSLSPRARAALAAG

SEQ ID NO: 442471 - protein, 312 aa, unidentified
MIEHYHGGIDVSKDRLDVMVLPDRLCFSVDNNAAGWSELVKRLRGLSIAAIGIEPSGGYERGVIRALLAAGLSVRRINPNKLRQFARARGVLAKNDRLDARLIAEFVAIMPTRVVQHDPATERLAEVVTMRRQLCDEHVAVENQATHVEDAMLRRLNKRRLARLEADILLLDRRMAEIVASYADLARRYELLTSMRGVGPTLAFTLIALLPELGRMSRKQIAALVGLAPYDFDSGRLKGHRCIYGGRLPVRNVLYMAALSACRYNPALKVFHQRLAATNKKPKVAIVAVMRKMITTLNAMLRDDAVWLPKTA

SEQ ID NO: 442472 - protein, 365 aa, unidentified
MIVIGTDTHKASHTAAAVDGATGQVLVDRTVRARRRSFEDLLRWARGVSAERVWAIEDCRHVSGALERFLLARGERVLRVAPKLTAGARGSARELGKSDAIDAVAIARAAIRHGIETLPVAQLAGVELDIRLLVDHRERLVATRTRLINDLRWNLHDLWPELEIPSGGLIAVHRPERLAGRLARTEQTARVRIARDELRRIRELTRAINALEQELALLVAQVAPALLAERGCGVLIAAKLVGEIAGINRFATDAKLARIAGSAPIPASSGQTVRHRLDRGGNRQINCALHRLAFTKGLHDPDTADYLARKQAEGKTRREAIRCLKRHLARRVWHLLQPANTPPAHSPRPATTIHCNTPYNSLSLT

SEQ ID NO: 442473 - protein, 311 aa, unidentified
MDNVFIGIDVSKEYCDVAVIPDGTRKRFTNDEEGQEAVAAFMLPLKPGRIVIEATGGYEMGVVRVLADNLLPVVAVNPRQVRDFAKATGRLAKTDTIDAEVLAQFARAIQPDIRPLPEKEAQVFRALVARRRQLVQMLTMEKNRLEKSPPAGSKDIRNHIYYLTEALKKIDRDISRTIRKSPLWKEKETILTSTPGIGPVISCTLIAALPELGTLNRKEIAALVGVAPFNRDSGKHRGKRTIWGGRSHVRATLYMGTLSAIRFNPVIRAFYKRLVDAGKVKKLAITACMRKLLTILNTMMKNKTTWAEVRS

SEQ ID NO: 442474 - protein, 349 aa, unidentified
MAEQRIAYTGERVYVGIDVHKATYTVICVCQRQLVKTATVPAEPASLAVSLPRWFPGATLSSAYEAGFSGFVLHRALTQAGITNIVVNPASVAVAANDKVKTDRRDAKKLAIDLADGRLRGIYIPTEAEELARLLPRTRAQIVEHRATITRQIKAKLHQFGLIPPGSRRLMSSRYLREIAAWSLPPELQASLTLLAEQWRFATRQLLEMRRLLRNQAQAQAQIEKVYRSVPGIGEVVARTLATELGDMSRFTNERALFSYTGLTPSEYSSGASIRRGHISRQGVSRLRHVLVETAWRALPGDPILHAMFERIAATRGKQRAIVAIARRLIGRIRACFRHGTTYAIGTAG

SEQ ID NO: 442475 - protein, 391 aa, unidentified
MIFVGIDVAKDKHDCFILNSEGTVLADVFTIANNRIGFETLLSRIQSCSQGESKIRVGLEATGHYSYNLLGFLLDSGLATYVINPLHTNLYRKSLSLRRTKTDRIDARTIAMMLMSDVDLKSYSNTAYHNEELKSLTRYRFDKVKERAKLKSSVARLVNILFPELEKLVSSLHIAVVYALLSNYPGASYIANANTEELAETLCTASKGRYTKSKTAEIQVAAGVSIGSKMPAKSMELKHTIALIRELDKEISEVESAIDKITSQMDSPIFTIPGIGRHMGAMILAEVGDFSNFASADKLLAYAGLSPSTYQSGQLQNCYAHMEKRGSRYLRYALFNAAKYVCLWCPTFSAYLEKKRSEGKHYNVAISHAAKKLVRLIFAMQRSGKAFLADY

SEQ ID NO: 442476 - protein, 373 aa, unidentified
MPKYSTAFGMDVHLRSTTVCALDADTGEAVTRRFPGNPWGEIAGWMDGFPGPSLAAYESGYLGFAPQRELAGLGVECVVAAVSKIPRSAADSASKNDRNDAARMAKAILAHDISPVWIPSPEVEGIRDLAGAYDGATARLATAKQRLLAFLAKRGFVYGGTTPAGNPRKYWTYDFLRWLDKVRPEDDGGVRTLAALRNEVEAAAEARADLLSEYRAAVDASPIAAEVAALQSIKGCAFALVAAFSAEVGEFTRFRSGRQVTAYLGLAPSQRSSGDSVRLGGISGAGNALVRKLAVEGSWCYAAARHQPKLMPRDTGVPLEIRMHGRKGSERLLRRRKEMLARGVPAAKANAATAAELVRWLWALGAMCREATE

SEQ ID NO: 442477 - protein, 352 aa, unidentified
MNRKRKDVIKSDELFVGIDIHKRTWHVTIRTDEVEFFSGSIPGTWEALRRLLQRYNAQRIYAVYEAGYFGFWLHDYLTEYGVDCLVTPPSLVPQEYGNRVKTDRRDSQKLARLLAKGLLKRIWVPSAKERYHRQVIRRRRQLVRDRVRIQNRIKAELYFYGVDLPSPKGKWTQIYFDNLRRIRFKNSWMQKSFTCLLEQYEFLCSQINKQTQLLKELSQIPQYRDRVEILRTIPGIGVINAMEILLELQDLSRFQRAEQLAAYVGLTPSQYSSADKVRMGRITGIGKNSVRTALVESCWWLISKDKEMRQRYQKIKARAGAKRAIVAIARRLLLRIRRMLINAQPYKFEMIT

SEQ ID NO: 442478 - protein, 356 aa, unidentified
MATTRVASIEGFVKGFETWPFSIGIDVHKRSYHVAIRRVDGEAVTWVCPADPQGFVEQIDRLSIRVSAVAYEAGPTGFGLARTLRSAGIETLMAAPSRIPRAVSGGAKTDRLDCLRLADYAAKGMIRSIAIPTPQQEAQRSLERRRHQIVDSLRRSKQRIKGFLLFLGLPEPKEAEHWRRGVVEAVLALPLDPHARLTLESHLRELTFYQNELSEVEGQLRQMARQHRHVLTCLQSVPGVGEVVAMSYMLELFDPERFHRAEEVTSYLGLAPMVRHSGDKTPPGKLRPVGQSRLRSLLIEAAWMWRQYDPYARDLYNRFLSRMGIAQKAIAALARKLAVILWRLYVERRHYRPAVG

SEQ ID NO: 442479 - protein, 443 aa, unidentified
MKALPVLDPKAAAIDVGSEKLHVSIAGDAPKVFGTFTGELEALRDWFQQQGVQTVALEATGVYWLYLYEVLETAGLEIVVVNGRHVQNVPGRKTDMADCQWLATLHAHGLLRGGFVPPADIRRLQDYQRLRADHLIGAAGQVQKMQQALERMNIKLHDVISDLVGVSGLKVVRAILKGERRPGELLALCDGQIQKKKADRVKESLRGCWKKEQLFALRQALELWEAYQQKIADCDHELEALLHQMAGPLPPPDGAGSPEVKLAPAKPAGKNAPVIEKFQALLARLCGGRDLTQIPGLSVYLVLQLISEVGTDMTRWPTEKHFVSWLGLAGGSKQSGKRKGAVKAQRNRAGRMLCAAARALARSVDKALGGFYRRLRGRIGGLAANVALARKLAQLFYRLLRHGMEYVEKGLKSYEAKVLETETRLLRKLAQKQGFVLMPSSAN

SEQ ID NO: 442480 - protein, 420 aa, unidentified
MDDYRIAGIDVHKKMLAVVVAELTAAGELVFQRRQFENTEAGIHQMRHWFVECQVREVVMESTAQYWRTVWLELEEKFRLHLAQAMSNRAPRGRKRDYADAERLVRRLIAGELVLSYVPDREQRLWRMLAREKHLARRARVQQVNALEAFLEQIRIKLSCVLSDLTGVSAWRILDELAKGAQDPAKLAKLADPNVKCTREQIQAALAAAPHVRAEERAVLRQFLDRIELFGKQIADNDRLLAACLARYQDAVTRLAEIAGLGADSAQQMIAEIGPKAEAFDSPAQLASWIGVCPGREESAGVSKSDRSPKGNRPMRRLLAQCANAAIKAKDSVFELYYRRKVAHLGHFQAVWAVAHKLCRVIWKVLHDGVRYEERGSRLNSKQAAKQLQRLKRTLRLLGYDPNSLHKLQPNNITPGPSMA

SEQ ID NO: 442481 - protein, 343 aa, unidentified
MQVVRIGLDLAKYVFAVHGVDARGKVVLRKTLRRDSVSCFFANLPPCLVGMEASNGAHYWARVLTGLGHQVRLISPQFVTPYVKSNKNDRNDAEAICEAVGRPSMRFVPPKSAEQLAVQAIHRIRRRLVSDRVKLVNQVRGLLAEHGIVIPRDITQFRRGLAQIIASCAGGLSELVRSLMRELQEELVELDRRIASYDRRIREIFRNSEPCQRLGKIEGIGPITATALIAAVGDRTCFKNGRQFAAWLGLVPKQRSSGGRARLFGISKRGDRYIRTLMIHGARAVLGRARGKQDPRSLWLGKLRQRRHPNVAAVALANKNARIVWAMLSGDTAYEPALSVKAA

SEQ ID NO: 442482 - protein, 387 aa, unidentified
MEKMSSNVACAGMDVHYKFSNVTFRDAGGRIVSRQRLDHPDRQGLARRLGHWPEGIPVVMEASFGWGWLSDVVEDAGLAVHLSNCFKVEQMRQARGWVKTNKKDADLVSLLPFEPCDWWKVWRAPPEVRNRREQMRFRGDLVVSQTEVKNRIHAVFHRHGIFHEFSDLFGGRGRRFLVELCIGGSEYLSPEALQALRGQVKLLDHLRRQLADVARVLRKQLAKTPLIRRLDHIDGFGLILSHVLTAEIGQIERFRSHKALASYCLLAPRSNDTGQEDSSQSPKGRHLGLRGNRTLKWAFLEAARGAVRSGGRWRAMFDRVTAGGTKDRNRGYIKVARELVKVVYVVWAKGVDYQPIPPARPGCKSNKNKSRSGTGQLYHPMVHAVTA

SEQ ID NO: 442483 - protein, 348 aa, unidentified
MTVYIGVDFHARKQTISYLTTEDGEIKHLELDHSQPAVVREFYQQFQGQWVLVAFESSGYAAWFEELLEEFGYEIWIGHASTIRQFARRRQKNDRRDADLILELLVAGDFPRIHRYSAISRQILQQLRHRHRLVKMRTMVVNSLLYLASSRGVSLRAQVQSKRGQERLKQLALPTPLGEQRDIMCELLSDLQEKIAKVESWLTAQAETDVRVQRLRTHPGIGLLTGLCLVATLEQIERFSNARQVTAYIGFDPVEDSSGERHRIGSISKQGSRLLRFYLVEAGQAARRKDVELERVYQRLVVRRCHATAKVALGRRLLVRAYIMLRDEIDYAEFQRRGVAARSARSTA

SEQ ID NO: 442484 - protein, 403 aa, unidentified
MYQNTCITIDVSQNISHIQGFIGPNKPLCKARTMRHSNQGFQFILTLKDIIESKSNETPLIIFEFTGIYHKSLEKFLISQNLKYHIVAPLRAAKARNSEIREQKTDARDCLTLSKLFYTHSLGIFYSENQTYSSLRKLNRYYDTCMKHLIKIKVNFRETLAVIYPNYNKLFTSVYSDESLTFLKLFPHPSLYTSKSEDEILTILNEKWNHLESWSSSKVKKITPLVDETVSGCSITEPETLILLSYITQIEYYLNQIKTTIIKMNQLASKLPLYNLVHSLPGIQDILTCKFIAELGDISRFTNYKQIVAYAGIDPMIRQSGDKDGLHLKMSKKGNKRLRTILHLMVSSLIKANRQPNAIKTKYQKKTHQLNPLKPKVASMACANQLVRILFYMHKTSSTYQYK

SEQ ID NO: 442485 - protein, 437 aa, unidentified
MRIEKIAPGYAGIDIGQEQIFIAVSGQAVQAFGTHMADYRLAAEYLQRHGARQVAMEATGVYWIPLHDLLQAAGLAVTVFNGAYARNMPGRKSDVSDCQWHAMLHSHGLLVPCFIPSEEIRQLRCFYRLREDHLGIAAAHIQHMQKALDLMNVRLHVVLSQIHGVSGLRIIKAILAGERAALALAQLCDAQILKHKREAVLKSLEGNWQAHHLFALQQAVECYEFCQHQAVACDQQIAALLVRLNAAKPPPPPPEAGRKIKVVRHNAPQIDNLHGQLVGLAEGRDATRLPGISPLGFLKLLGEIGTDLSAWKSEKHFTSWLGLAPGSNQSGKRRKRLPRKKTVAGQIFREAVLSIAKSKYLALGAAYRRLKARKGAPIAITAIARKLAVLYYRLMTKGLDYVERGIADYEKKYQEQTLRYLNKLAAAHGFCISPKPA

SEQ ID NO: 442486 - protein, 367 aa, unidentified
MKKLTTTMMQRLFNKQDGRLTIGLDLGDRSSCYCVLDEAGDVLLEQKVSTTPKAIKEVFGAIPRSRIALETGTHSPWVSRLLSELGHEPIVAHARSVRLIGESRRKDDRLDAMTLARLVRIDPQLLCPVKHRSAEAQADLTVIRARAALVRARTMLVNATRGLTKSYGERLRGCNARGMNPKAAQDLSPELKRALEPMMSEIESVSERICEYDQMLESMTRNRYPEAERLKQIKGVGTLIALTYMLTLEDPHRFRKSRDAACYVGLQPGRRNSGQSEPQMHISKEGDPYLRSLLVQAAHHVLGPWGVDSDLRRWGMKLAERGGKRGKKRAVIAVARKLAVLLHRLWVSGDVYVPLRPSGRATLPAVA

SEQ ID NO: 442487 - protein, 388 aa, unidentified
MHYVGIDIAKRKHVAFTLNGEGEAVGKALRVSNDRDGFDKLLAHLGELETGVTVGLEATGHYWLALYSVLVEADYEVIVLNPLQVQAYRKSGIRKRKDDRYDAFWIADYIRISRRLLSPALQPDLVQLRELTRFRASLAQQIGDCKRRVIGILDRVFPEYETLFSNVFIKTSRQLLAEALTPEEFADFDLSELSQKLREASRGHLGAAKAEELQTLASRSVGVGFLGSALRVQMTCLLEQLALLEHQLADLNAEIEVVMERLPQYITSIPGVGPVTGATILAEIGDVHRFATPEKLVAYAGIDPVVYQTGQFRAASTRMSKRGSPYLRHALWQAAFAASRFDPQLRDYYQRKRAEGKAHGTVMGAVCRKLLHRIYIILKEDRPYVIRD

SEQ ID NO: 442488 - protein, 309 aa, unidentified
MATSSYVGIDVSKARLDVAVLGERPEKQVDNTREGIEKLVEWMQEIEPELIVVEATGGYQRAVVEALFHAGLCVAVVNPARVRQFARASGLLAKTDKLDAQLLAVFGQRMQPKRYEGKSEAEKQLSALLVRRKQLEEMLKAEQNRLRTISPVLRGSVERILTILKEEKKRLEEQIEQFMREQKAWQEQREILGSAPGVGKVTTATLLADLPELGKMDRKKIAALVGVAPMNYDSGKKRGYRKTKGGRTDVRSVLYMSTLVATRYNPVIQAQYQQLLKRGKLKKVALTACMRKFLTILNAMLRDQQPFRV

SEQ ID NO: 442489 - protein, 464 aa, unidentified
MTASKKLWRNRKERKEWARRLQSEDPGLEVVHPHAAGIDVGNSAHYVAVRPDRDAEPVRRFECFTADLHRLADWLQSCGVKTVAMQSTGVYWIPLYEILEERGLEVCLVNARHTKNLPGRKSDVQESQWLLKLHTYGLLNYSFQPVSEIRVLRTYWRQRGEHVREAATCIQRMQKALTQMNVQLANVISDISGLTGQAIIRAIVAGERNPLKLAALSDPRVHASQEEIAKSLEGNWRSELLFVLQQEVDMYDTYQKRIAECDQRLQKHLASLTHPLQVQPTTQKPKTKKPPAKNAPRFDLSSELQRVTGVDLTRIDGIDVMVAQTLLSEVGLDMSRWKTESHFASWLGLCPDNRISGDKVLNRGTRRVVNRAATALRQAANTLMRSRSYLGAQYRRLRTKLGAPKAITAMAHRLARLVYRMLKYGQTYVDKGTDYYEERSRQQQIQLLRKRAAKLGLQVAEIHA

SEQ ID NO: 442490 - protein, 336 aa, unidentified
MTLYCGIDLHSNNNFMSIIDGKDKCLFEKKMNNDIGQILNALKPYKRRLKAVAVESTFNWYWLVDALMAADFKVMLVNTAKVIQYEGLKRTDDRYDAFHLAHLMRLGILPTGYIYPKEERGLRDLLRKRMRLTQNCSCYIMSLKTQYQRQTGQALATNNIKSKRFQLPVVGDDNVQLAMTCNLNMIRALSQQVRALEKAIMQQLEPNRNFELLKTARGIGDVLAETILLETGDINRFSSPGNYASYCRCVDSRRESNGKKKGVGNRKNGNKYLAWAFMEAANFAIRYSAKAKQFYEKKASRTNRIVALKALAHKLSRACYYVMKQGVPFDEEKLFA

SEQ ID NO: 442491 - protein, 427 aa, unidentified
MSETKSLEIRVSVDVGSRSHQVAIGLSSGEVLEEFEIAHRVEGFEDLFSRIERHRKGNSYRVAVAMEGFNGWARPLDSMVRGRGYRLYNINNLKLARFKEIFPGAAKSDRIDARKGLELFQLRDHLPLAKEVLQEVVGTPHENEVLKRLSRRRRRLVDERVRVVNNLQADLQAVCPGLLEITKEAGNQWFLNFLISADTLPQLARLRRTTLLKIPSVGVKYARLIQDWQERAHFSEEVEWVSAMIQEDARRILELDETIKALEVKTAEVAETSTIAKLLRSIPGYGAICTSELAGEIGTIERFNKEGSLALYLGMATLDNSSGKYQGTKRPKHINTRAKAAMMTALDRHRKYVPQSQKYYEKKRAQGKSHNQAIRALGRHLCRIIYKMLKEKREYEVRPLKRDTQAKVTSRSSRIGQIGKKKISAKG

SEQ ID NO: 442492 - protein, 449 aa, unidentified
MKKLNSVRNGLPVINDHAAGIDIGSRFHVVAVPADLAEQPVRTFRAFTADLECMAQWLADVGVTTVAMESTGVYWIPVYEILESHGLHVVLANARDARAVPGRKTDVNDAQWIQRLHACGLLRASFHPDREIAALRSYLRLRERHLDYSAAHIQHMQKALTHMNIQLHHVVADITGATGMRIIRAIVAGERSEAALAAMRDTRCKSSIETIQSALVGNYQAEHVFALTQALAMYDAYQAQLELCDQQIAHSLLRLSQQNVPPSEPLPKPRHRTRQPNALNFDVRTMLYQLVGVDLTQIHGVGPYLALRLVAECGTDLSRWPTAHHFTSWLTLAPGCRISGGKVLSAHTRKTKNRVTAHLRLAAVTVGRTNTALGAFYRRLSARIGKAKAVTATARKIAILFYNAMRFGMDYRDPGADHYEQKYRERVVKGLHRRAAEFGFTLQAVEGVS

SEQ ID NO: 442493 - protein, 483 aa, unidentified
MSTQPKQRKGAAKKKAAAGKGKRRRKGMTLEDRPLLEPNAAGIDIGAREIFVAVPADRDENPVRVFPTFTEDLEEMARWLVSCGVTTVAMESTGVYWIPLYDVLEQHGVRPCLVNARNMKNVPGRRTDWHECQWLQFLHSVGLLRAAFRPDGEVSAVRSLMRHRTDLVQTAAQHIQHMQKSLTQMNLQIHHVISEITGVTGLAIVDAILAGERDPAVLAKLRDHRIHASEEIVQKSLVGNWKHEHLFTLKQSRQIYQQYQDSITACDEEIEKLVVAFEPRVDTEEHPLPPDRKGNQRKRKKRGVIPGTNPKTGFDMRTEAYKLFGVDVTQIPGLMMTPLRLFSEVGRDMSRWPTADHFASWLGLCPDNDISGGRVLWKGMRGTRNQAGQLFRMAAFGLHHELSPMGDHLRRMKSKIGPAAAQTATAHKIAIIFYTMVKKQVEYDASIWAQKDAEREKRFEAKLKRQAQARGYKLVKIEETIAA

SEQ ID NO: 442494 - protein, 400 aa, unidentified
MLSIGIDVSKGKSTVCGMKPGGEIVYTPFEVQHTREGMSELVSLLRGSGEEVRVVLESTGSYHCPVVAALLENGIFVSVVNSLRMKRFCSQSIRRVKTDQIDAMQIALYGLAYWQELQPTRLPENTYRELQLLARQYYQMTSILIKAKVDFNALCDQVLPGMQELMNDHAGRHKLSDFVLRYRHTTHILEMGETRFRKDYCKWAEKKGYRNRERMAALIFATAQNGIPVLPNAPSTQIVITEAIRVLHTVEASRDAILTQMQALAKTLPEYSLVREMPCIGDTLAPRLIAEIGDVRRFHSKRALIAYAGIDAPPYQSGKFSANNRHISKRGNRYLRKTGYEVMQSYVMHKPANDPIFTFIEKKRGEGKSGKLAMVAGLNKFLRVYYGKVTELYRSLPAIE

SEQ ID NO: 442495 - protein, 361 aa, unidentified
MQSTTIIAFDQHAASTVAAVLLPGQRTPALHSLTSDSVAILRFVRKVRREGGVQCCYEAGPCGFELHRAMTADGIPCDVIAPALIPRRAGDRIKTDRRDAAQLAILYRAGALTAIHVPTDHEEAVRDLLRCREDIRQDLLRARNRLSKFLLRHGRRFTATKNAWSRKHDVWLRAQTWPLPALDQTHRAYVRTVDEAVARLHTVETELRELTTLEPLRTRVERLRCFRGMDDITALTIAAELGDPRRFPSPRGLMAYVGLIPSEHSSGPSRARGAITKTGNAHVRRVLVEAAWHYRHHPFIGKQLRRRQQGAPPTALIPAWRAQLRLYRRYQRLAARGKPKQHVVTAVARELTGFVWATLTQ

SEQ ID NO: 442496 - protein, 410 aa, unidentified
MVAVACGIDWAQDHHDVAVVDETGVVVASVRINDDAAGLSQVLALLAEHDPTGGKLPVAIETSQGLLVAGLRAAGRQVFAINPLAVSRYRDRYRASRGKSDAFDAMVLANILRTDATAHRPLPADSELLQSLRVLTRAQQDAAWDQVTLTNRIRTLLRMFFPAALAAFERGGRHRLDSPAARVILAAAPTPAAAAALAPTELAALLRCAGRQRGIAAEADKLHGILRGEQMRQPAAVEQAMGLHLQGLVRQLDAVCQTLQQLEQRIDEVFTAHPDAKIVTSIPGLGVQLGARLLAEIGDDRGRFADARALRAFAGAAPVTRSSGKSSFVHARRAKNDRIAATGYVWALAAVRHDSHWNTRYRSRRAAGDRHIAALRRLFHLMLGKLHHCLRYNTLYDSSKAFAEPATSTA

SEQ ID NO: 442497 - protein, 359 aa, unidentified
MKTQSNKLDFTGQNIYVGFDAHKKSWSVTIMTDHLTHKTFSQPAKPETLHQYLVKNFPGATYYSAYEAGFCGYWIHNKLKSLGVNSIVVNPADIPTTDKERDRKNDKSDSRKIARSLRNNELTAIYVPSIKTLEDRTMIRTRSMLVKEITRFKNRIKSFLHFHGIEIPESFCNSSSHWSKRFTVWLESIEMTEKSGKESLNLLITTVKNLRVSLLQITKQIRGLSKTEIYKEQVDLLKSVPGIGLLTAMIILTELESIDRFGNIDKLCGFVGLVPSTYSSGEKDITGDITKRGHSILRSAIIESAWVAARFDPALTKSYNFYCKKMEPNKAIVRIAKKLLSRISYVLKNKQPYVCAIIK

SEQ ID NO: 442498 - protein, 312 aa, unidentified
MPAKTEPNYVGLDIAKDQLDYCLNETEEGRCANTSEGRAQLIKKLKYLHHPRVICEASGGYEKIVVAELLQAGLEVCVAQPARVRAFAYAEGLLAKTDRIDARLLRRYGQKVELRLALPVDAAAATLRELLEHRRQLTTQLSEVEGRMALAGPTLHKLLQRQKIFLEQQIEEVEKMIKEHVDHDPDLRSKSERLQQIKGVGPVLSATILAYVPELGNIESAQLSALIGVAPHPKDSAKCHAPRHIRGGRAQVRHVLYMAAVCASRHNPILAAFYQRLRANGKPATVCLVAVMRKMVCLMNRLIQDPSFALAH

SEQ ID NO: 442499 - protein, 318 aa, unidentified
MIKEFIGIDVSKGTLDATAYTSGKKWRVSNDDEGIDKLVKAIIGLTPVLVVMEATGGYETQMAYALYKAGICPAVVNPREVRNFAKATKKLAKTDTIDAQILAHFAAVIKPEPRPLSDEQSQELEALIARRRQVINMLIAEKNRLHMARKPVKDAIISHIEYLKKDLSQIDSELKGRIEESPVQREKYNLIQSVPGVGPNLAATLLIELPELGTLNRKQIAALVGVAPLNHDSGTKRGKRSPWGGRPQVRSALYMAALAATHFNPVISQFYKRLCSEGKAKKVALVACMRKLIIMLNTMIKYNTTWHIDQPVLAAVTA

SEQ ID NO: 442500 - protein, 380 aa, unidentified
MPDVSSTAPAQVRMWVAIDQHKLSLVAATLPVTGGQPEVMRVENTERAIRRFVQRLGGADGLAVAYEAGPGGYQLHRLLSSMGVACDVIAPSLIPVRAGDRVKTDRRDAKKLVRLYRAGELSFVQPPSPMQEGLRDMMRCRDDLRCARTAARHRVAKALMRHGHIYRQGKAWTLRHRAWIESQRLEDPLAHTALEHMLTHLGALDAQIAALDQQLEQIATHQPWADPVAWLCSFRGISTHTALGLLAEIGDFRRFAHPRELMSYLGLTPSEYSSGQQQHRGHITKTGNRHARRLLVEAAWHYCHRPRQSTRAARLQEHVPPEVTIRAWQAQIRLHHRHRVLAEHGKRSTVANVAVARELTGFIWGAMTKAPLREQEAAAA

SEQ ID NO: 442501 - protein, 348 aa, unidentified
MLADQLDFVIGVDTHRDEHTLALVQARSGGLVSEAAIAASRPGYAQALAFAEGCAPGRRAWAIEGSGSYGAGLARFLNERGERVLEVARAKREPRRSRRKSDALDALAAARSLLGQTKLARPRAGGSREALRALVTTREGAIAARRAALNQLRALLVTCPEPLRTKLRTLTPARLLGRCARLRAAQRTDTELAATTLALRACARRALAASAEERELTHAIHALVRSWAPQLLAEAGVGPITAAQLLISWSHRGRFHSEAAFARHGGSAPVPASSGQVVRHRLDRGGDRQLNRALHTIAISRRKTDPRTIAYLERRTRQGKSVREALRCLKRYLARHLFRLLETMPAHT

SEQ ID NO: 442502 - protein, 346 aa, unidentified
MLYAGLDLSRKRLDFHLLDGEGATLEIGAAPPDADGLDGLTERLARHGAPIRAAIESMNGARFVHDRLELAGWQVDIADAQKVKGLAPLACKTDRIDAWVLAELARRDLVPAIWLPDPRVRAERERARWRLHLVRHRSSLKQRVHAVLLTHGKPCPVSDLFGVRGRQLLARLGLPEPWQGTIEASLRLIDELDREIGECERELRRLGADHHYVPLLCTVPGISWVLAYTIAAEIGDIGRFPTPRKLVGYSGLCPRVYQSGERDLRGPLAKQGPRYLRWALVEAATHACTHPAYRQRYTDTKARIGKQRGAKVAQVDLARRLAEAIWHMLTREQPFAPAGATDPLAA

SEQ ID NO: 442503 - protein, 388 aa, unidentified
MPVTADQAQAQTATPIDLGAIFVSLELSKSTWLVTALSPGSEKMSRHTITGGDVASLFSCFATLRQKAQRRKGKLYPLVVIQEAGLDGFWLGRVLSKEAWIESHIVEAASIAMPRRHRRAKTDRIDGETLIRALMAWKRGEPRACSMVKLLTPDEEDIRRLGRERKTLIAERVFHVNRIKGLLFTQGIRDYEPLRRDRRQRLDEARTGDGRMLSRHLKAEICRELDRLELLLTQIKAVEAERDALIARETAETPPRAAALLGIRGIGPEFATILYSEGLFRHFDNRRQVAAYAGLAPSPWQSGNVNREQGVSKAGNPRLRATMVELAWLWLRHQPNSALALWFKERIARNSGRLKQPMIVALARKLLVALWKYVSSGVVIEGAMMKNA

SEQ ID NO: 442504 - protein, 360 aa, unidentified
MNATTVAVDLAKSVFQLAVADERWRIVETQRLTRTQFERWFVNRSVDMVIMEACGSAHHWARWLNGMGIEVRLLPAQYVRAYVKRNKTDATDAAALLEAARASDMRPVRVKSVEQQALQGLHRVRSLWMGTRTSRINALRGFLREFGITVPVGARTGLEAISRVLADPGSAVPELIRGTSRLLVEEVRLLEARIAQLERELAALARLSPACTTLLSIPGIGLLTATAMVAATSGNVTHFKDARHFASWFGLTPREHSSGSSRFLGKISKRGDRYLRMLLTHGARSVLRAAKVAEAAEREVCGVRRWALDVQRRSNHNKAACALANKLARICYATLRDGTPFGETERLNRKINRESFAMPA

SEQ ID NO: 442505 - protein, 391 aa, unidentified
MFFVGIDIGKRNHEACIINEHGQILAKTISFANTQPGGQKLLNWLKKFDLDLSATVVAMEATGHYWLTLYSFLRKQHLPVQVINPIQSDALRNMYIRQTKNDAKDAFIIAEVLRFGRYTTTALAEERIIALRQLSRFRFSLVDSISDLKRKVISVLDLLFPEYELLFSDLFGKTSSELLMDYTTPEEIVALDTQKLAEFLAKHSRNRFGLEKAEEIKLAANNSFGIDFALDAYRLQIRLLLKQIQLTEEQLSLLDEEISRILKSIDQNLITIPGVGPVLAAAILGEIGDISRFQTGAKLVAFAGIDPTVRQSGQFSSTHNRMSKRGSPYLRRALWLAATTSKLHNPIMQQFYEQKVSQGKHHLTAIGAVCRKLTYVIHAVLRDNKPYELKV

SEQ ID NO: 442506 - protein, 312 aa, unidentified
MAMLSFCGIDVSKDRLDVVVLPEGWFFSVSNDTAGWAELVARLRPLTVSAIGLEPSGGYERGIIRALLAAGLSVRRINPNKLRQFARARGVLAKNDRLDARLIAEYVAIMPTRVVQRDAAVERLAEIVTMRRQLCDEHVAAENQAAHLEDAMLRRLSKRRQMRLEADIRLLDKRLAEMVAANVALAQRYELLTSMPGVGPVLAFTLIALLPELGKMSRKQIAALVGLAPYDFDSGKLKGHRSIYGGRMSVRNVLYMAALSASRYSPALKAFHNRLADADKKSKVIIVAVMRKMITTLNAMLRDSAAWQPRSA

SEQ ID NO: 442507 - protein, 370 aa, unidentified
MNKNTTLFVGLDVHKESIAVAYAPDDRSAEVAYVGPVGTRQADIDGLVRRLHSKAARLVFAYEAGPCGYILHRYLTRKGLQCLVFAPSLNPKKAGDRVKTDRRDAVLLARLLRSGDLTPVYVPTVEDEAIRDLCRAREDAMAGLKAAKFRLQSFLLRLGLHYTGKANWNAAHLRYLAKVVCPTPAQQIVFQESVRAVDQQVERVQRLDAEIAEHVPSWRLYPVVQALQALRGVQDTVAITMVAEIGDLTRFDNPRQLAAFLGLIPSEYSSGDSRRQGSITKAGNGHARRALIEGAWAYRFPAKVSAHIQKRLENLPKPIQDIGWKAQVRLCKRYRRLTARGKHPNVAVTAVARELAAFMWAIAREVPITA

SEQ ID NO: 442508 - protein, 391 aa, unidentified
MRRLRIQEPPLTHIESTPLPDTLIVSKQQRQEGGADVGKTTAAKKYVAIDCHDSTLVFEVVSGGGDLEMKGTVATRAEVIRNVIDGLKAPLEIVFEEGILAQWLYEVLRPTGHRIVVCDPRKNRRQGNKSDRIDAHTLVTKLRLGELSPVFHETGSVQALKELSGIYQALVQDSVRVMQRAKSVYRARAIRCRGEAVYKAETRKEWLGQLTASARFRAGLLYEELDTIRPLRQKAKNAMIKEARRHPAYQILVSVPFIGPIRAAQLLATLITPWRFRTRRQLWSYAGLAVVTSSSAEQEVVDGKLVRRNRRPMTRGLNPNHNHLIKEIFKATAHDAARRDGAWKSFYEALVTKGMREEMALLTLARKIAAVVLSMWKKGVSFDPRRISPTT

SEQ ID NO: 442509 - protein, 489 aa, unidentified
MSTAPNNSKEKKDPTLDAQASKRKARGSHCPPGQGNRRRSKLRIAHRDAAGIDVGARVHYVAVPEERAEVPVRNFGAYTARLDELVQWLKECAIKTVAMESTGVYWIPLYQKLEEAGLEVLLVDARQAKHVPGRKSDVQDCQWLQQLHSYGLLSAAFRPQDSICRLRTLQRHRKNLVEYTAMWIQHIQKALNEMNLHLHHVLSDISGQSGLAILDAIVAGERDPRKLASLAHHRVQKSQAQIEAALTGDYRSELLFVLSQSLQNYRQIQQQIVQCDLSIEKQLAKMANCPNPSQDSEPRQQSAASAGGKPPKTKPKEALEISLAGHLKRILGVDLTTIPGLNVLTILTLLSEIGTNMAKWRNERAFVSWLGLSPNNKISGQRVLSSRTRKVVNRAATALRLAAMILGKTNTPLGSFYRRKRAQLGAPKAITATARKLGCLIYRLIKNGQSYQEPDLHIYELKYKDQILNSLRKRANSFGFDLVEAPKAA

SEQ ID NO: 442510 - protein, 409 aa, unidentified
MRYYLGVDWADQTHAVWVVDERGTKVAMRTVPHTAEGLSEWGRELDEWRAHGTELWAAIERPEGRVVDFLLDHGVVVYPVNPKALDRARDRFRQSAAKSDPFDARVLADFLRTDHARLRALRPSSEAAQELKLLTDDYQQQIRQQTRLVNQLTMTLKAYYPRALEVAELPTALARDFLQAYPTPAALTALTERQWQRWARAHRMHEARTQELWAVLQRPQLPVPAHVVRAKARLMQSLVAQLTLVVEVVGSYGEAIEDFFAQIPAAQWIRTLPIGDHGITAPTLWARLGDAPGRWESFRHLQAQAGTVPVTIRSGKQQVVRFRFACDKSLRYVIDHVAFLSLRWSEWARAYYAGQRARGHSYHQALRALSAKWLKIIFVMWKRQVPYDEQYHLATMTRQQLRLRQKQIA

SEQ ID NO: 442511 - protein, 341 aa, unidentified
MSEVRIIGLDIAKSVFQLHGVDDAGATVLQKRLTRARLLPFFEKLPPCLVGIEACATSHYWARELGKLGHEVKLMPAQYVKPYVKRQKNDMADAEAIAEAVTRPTMRFVGQKSPSEQSAMMLHKVRLMLTRQLVMITNATRAHMAEFGIIAPVGRGGVDRLLAIVDDETDEQIPAEARRCLQMLVAQLKLVKLQILDNDRQVLALARSTEIGRRLMEVPGIGPLVASALVACVPDPSMFRCGRNMAAWLGLVPKQNSSGGKEQLGSITKAGNRYLRQMLFAGAMAVIRRAMQGTRRTWLIRLLERRRPKVAAMALANKNARIAWAMMTSGEHYREPIAIAA

SEQ ID NO: 442512 - protein, 346 aa, unidentified
MDQITRIFVDTSKEFYQLHGVNTAEEPVLRRKLRRSQMVAFFAKLEPTVVGLEACGASHHWARVLGDLGHEVRQIAPQHVKAYVRRGKNDAADAEAGCEAMSRPRTRFVPAKSAEQQAALMLAAMRERLIKNRTQLSNAIRGHAAEFGVVAPRGLDKLAPLLERLSGDEAVPVLARQLFAQLGQEYERLQTELDAVEARFMAWHRADETSRRLTRIPSIGPVGASLLVMKTPEPQAFASGRHFAAWIGLTPKDHSTAGKQRLGVITRAGDEALRATLVSGATAVIRQVMASRSAPSPWLAQLLKRKPPKLAAVALANKVARIAWKMMLTGQDFDPARLAKPMPAAA

SEQ ID NO: 442513 - protein, 326 aa, unidentified
MEHTSRFVGIDIASSKVDICWDTAKDLSHQTLRYDEKIFDDFLTKHPGIISNVTVVGMESTGDYHLKAARYFLDKGFSVKVINPIITKENIRATVRGKKTDKTDAILIHKALSEGHGDCVNLNQLSDEPKELLRLSTTLSHITTQLILRLQSTKRKNLPGTEEIQKQLQEVINHLREVNKTIVEQATEDRSLEEEYIDSIPGFAIKLSAVIHHEIGDINRFHDAKALVAFTGLDPRIKQSGNLLNTTGRITKRGSPYLRAALFLAANVARQYDKDLAEYYTKKKNEGRSHKEILCMIGRKLLTRIHTVLKEQRAYRPNPVLSTKIN

SEQ ID NO: 442514 - protein, 352 aa, unidentified
MQATHSHPIIIGIDTHKSTHVAVAIDAQGARLAAISIPANMKGYLELEHWSRSLGDVQAFGIEGTGSYGAGLSRSLLSHGHKVVEVTRPNRQLRYSHGKSDSLDAEGAARSVLNGQATAHPKPQTGSSEMIRHLKIARDTAVKCRSQAMVTLKTLIINAPAELRDVLDQLKGKVTLIRHIAAFRPGVIDSTTASAKASMRALARRWLMLHDEIQAHEKELDRLVSERAPELLASHGIATLTVAEMLILVGDDPTRIKSEAALAKLCGVCPIPASSGKTHRFRLNRGGNRQANAALYRVAIVRMRSHEPTLAYVRKRTKDGKSKREIIRCLKRYIVREIFSQLCRPKTACLAA

SEQ ID NO: 442515 - protein, 356 aa, unidentified
MQDTLGVSKPTRKRKETPVEHQRQYVGIDLHRRRSVIVRITDDGEILETVRVANDPLEFALAAGRAGPGSEVALEATYGWYWAADLLEAEGAHVHLVHPLGLHWDARRVKNDVLDATELARRLFRGDLPEAWIAPPELRELRELVRYRAKLVALRISAKAQVHGVMGKLGILPPLEDMFGPGGQRHLDEMPFTGAYAIRIESLRDLLEVYERELTTVEREVARRLRGHSGYRAIQAINGVGPVMAAIFVAEIGDVTRFESAGHLCSWSGLTPRHRESDMKVTRGHITKQGSNLVRWAAIEAVARYHGGAPIAPAYERVAARRGAMIARVAAARKLLCLVYYGLRDGEIRCLAEAVA

SEQ ID NO: 442516 - protein, 343 aa, unidentified
MDQYIGVDVSLKDTAISIREDGKRIWRGKRASDPKLLAQVIRKHAPHAKRVVFETGPLSTWFYHALMAEGVPAICIEARHAQKILHETLNKTDANDADGLAQMAEAGFYKAVRVKAFDSMLTRTLVAARNQLLSISTQLSNQIRGMMKTFGLIVSNGKGRVFDGKVRELLAGNDALAAIILPLLDAWRGIRKRAADLDRQLLAVARQSQPTKLLMTIPGIGAVTAVSYVAAIEDPENFKTSRSVGAWLGLTTRRYQSGEVDYDGHISRRGDSHLRGLLYEAATVLLTRTRPGNESSLRSWGLKLRERLGFKRTAVAVARKLAVIMHSMLRTGEVFNASAGTAA

SEQ ID NO: 442517 - protein, 349 aa, unidentified
MRHIGVDLHKTNFVACFIAADDRQRIETYPLTRDGLARFTRQLNVQDEVAVEATQNVHYFYDQVRAHVTRVAVVATYRFSIIATSKKKTDKADASALARFLKLGYLPEVPVPSEQVRTLRQLLQARETLVSMRTKLKNMAHAAFSRNGIALTRAAFASRLSRARLMSRDDLPAADLLVLRACLRQIEQLDLEIKAVEDEVTRLGQRLKGLRRLLQVHGLNMLSAISLLAEVGDIALFDTSKQLVAYAGLATATKQSSETTRHGGITKRGRKRLRTVVIQAVLAMVNRTETPLMAFYQKKKREKGAGKAICATARKLLTIIFVLLKKELDYWYLEDRLYNRKLRALNAAA

SEQ ID NO: 442518 - protein, 397 aa, unidentified
MPKFDDLSRSLAALDQDSTLIAVIELSRSSWLVGGVVPGLAREPTKKLVPDAEGLLRLLHRWRDEAAAAGRPIARICVAYEAGRDGFWLARWLRARGIECDVIHPTSVSVSREHRRAKTDRLDLGLLKRSYLGWLRGEKRHCSMVAVPSREVEDAKRPLRERDRLVGEATRLVNRIKGLLTLHGIARFDLRMATARLRALRTAEGEPLPRNTLAELLRALERLQQIPAQIAEIEAVQREQLKEAPETGVHPTIRLLARVRGVGVMTAELLVREALSRPLRDRRAVARGACPRAGRRPDPGAGVTGAPDESGNKRREKGLAKAGNARVRRALLQLAWRFLRHQPDSALVQWFRRRTQDGRGTTKKAMIVALARKLLIALWELATTGAVPQGVHLHAVS

SEQ ID NO: 442519 - protein, 358 aa, unidentified
MRTIAIDAHSTTCELALLSKKGKLVMRREIRTNAKDLIDAVSSIPGKKELVIEETELASWLNRSLKPCVDKLVVSNPKQNKWIAKSELSNDKVDAFRLGRLYQGGYIKEIYHPEDGRQRFKELVLEYHDLDKQVVRYKNKIKSKYRQNGIFPKGAAVYSTENRKNWVEQLPDSCVVFQVNKWYKMLDLSVSLKEEVRKRVIKEGKKYPEIAKFQQIPGIGPIIASTVSAIIDTPFRFSRKNKVWSYARMGLRKKKSGRGYKPGGRERLSKDGNRILKKVTMTAVEGTLRSRDNPFRRKFHDLVINKHIDSSLGKLTIGRCILSTMIGMWKTGEDYSEEKLNISTGERYDQAVICRMKN

SEQ ID NO: 442520 - protein, 464 aa, unidentified
MSRKAQNQQERRSARPKVDWKALEVVHPDAAGIDIGGSEHWVAISPDRDEHPVRCFDCFTADLEQMADWLKARGVRSVAMQSTGVYWIPVFEILQQRGMEVYLVNARHTKNLPGRKSDIAECQWLLKLHTFGLLQNSFQPSDEIRAVRTLWRYRSGLVAQASSTIQRMQKALIEMNIQLTNVLSDLSGVSGMAIVQAVLDGKRNPEELASLADPQVKASKEVIAKSLRGNWRPELLFVLGQEMDSYRTYRKRIVDCDREVQQHLQRMESKVDLSTQPIGPRPKGKRARGNAPQVFDLRSELYRLTGVDWSQVDGIDVQVAQTVIAEVGADLKAFPSEKHFANWLGLCPTNETSGGRVLKRRTPKVVNRAKAAFRQAASTLIRSNSYLGAQYRRLRTRLGAPKAITAMARKLSCLFYRLLTKGQKYVDRGAQYYESRYREQQIRSLIKRAQRLGLQVLSPEVKPA

SEQ ID NO: 442521 - protein, 353 aa, unidentified
MKDCNAKAEGFVLGLDLGDRRSHYALLDQRGEVVEEGSVRTDQKWIRSLFANVPESRVVMEVGTHSRWVSRMSEEQGHETFVANARRLRWIFENDQKTDRVDAQSLGRVGRFDANLLYPIHHRSEPAQADLAILRSREAVVKARTQLINHVRGQVKAWGERLAKCAAKSFHKRVAGELPEELKPALETVVEIIGQLTVQIRNYEEQIEERSRDYPEIGQLQAIAGVGPLTSAAFVWTLEDPGRFRRSRQVGAYLGMVPRQDQSGERNPRLGITKAGDEALRRLLVQSAHYILGAFGPDCDLRRFGERLLEGEADKGKKRAVVAVARKLSVLMHHLWETGQQYDPFYQENRKAA

SEQ ID NO: 442522 - protein, 415 aa, unidentified
MEIVYPRVAGIDVGKKIVAVAVRTPGDRPGQRHQQLRKFKTFYPVLREMVGWLVAQGVTQVAMEATGVYWKPVFHALCEAEQLEVLLVNARHVKNVPGRKTDAKDAEWLAELCEVGLLRGSFIPPKEIAAVRELTRYRKKLIEARTSELQRLCKVLEDGGIKIDSVASSITTVSARAMVEALIAGERDARVLADLARGVMRKKLPDLAMALAGRFGAHHALLARMHLEHIDQLSGMIERLDGEIDQVVAPFAEQVGLLRTIPGIGERTAQVLIGEVGVDMSRFPTAGHLASWAGLCPGNNESAGKHHRGKTRKGNREVREALVEAAWAAGRTGTYLGARFRRLHRRFGKQGGSKAAVAIAHNLLVIVWFVLHDRAGYRDLGADWFTRHDNPDAKKRRLIRELQTLGYTVDLTPAA

SEQ ID NO: 442523 - protein, 455 aa, unidentified
MWIPHEVTIEFQGRKVLWTYSVSRGTITVSTVFYGRKSTHVGGSTPPASRGSCCVNWAVYVCFAPKATELLRSNEMTRMGWTGRAPAPDGSESTWGLARIRSTAMSRTSTVHAVTTIGIDMGKNTLHMIGLDTRGGIVLREKVSRGRITSRLANLPPCLIGIEAGMATHYVARELAAIGHDVKQVPPAYAKPFRQGHKNDFRDAHSVAEAVQRPTTRFVPAKTDEQLDLQALHRVRSRLVSERTAVINQIRGFLLERGIIVRQGLRFLRQALPDILAKRTDVLSPRMVRIVADLASDWRQLDERIEPVTDEIETLAKSDDGCRRVMTVPGIGPIISSAMVAAIGNGAAFARGRDFSAWIGLVPKQMSTGDRTILGRITKRGNRYLRTLFVQAARVILLRPASWPKHSFGVWLARAAQRLHRNVLAAALANKLARIAWTVLAQERSYEARIMKAAA

SEQ ID NO: 442524 - protein, 320 aa, unidentified
MDLVIARCAGLDVHQATVVATVRTPDDRGGRRRTTETFGTMTPDLLALREWLQAHGVTHVALESTGVYWKPVYYVLEDAFTLLLINMQDLKRVPGRKTDVRDSEWLAQLLECGLLKSSFVPPPPIRELRDLTRYRLQQVRDRAQEVNRLCKVLEDAGLKLTTVITDVMGVSGRAMLRALVAGTTDPGVLADLARGKLRQKLPALQRALQGRFRAHHAFLLQQILTKIDFLDETVERVTAEIDRRLAPFEATLAALDTIPGIDRVGAISIVAETGGDMSRFPSAEHLCSWAAICPGQNESAGKRRSGKTRQGNRYAPASSG

SEQ ID NO: 442525 - protein, 332 aa, unidentified
MRLIGCDLHASQQSIAMLDRDTGAVIEKTLKHDGEAVREFYASIPPPVVVGIEATGSMGWFLRLMEELAIECRVGHPVAIRKAEARRQKHDRRDAALLLRLLAEDRFPTIWMPSTELRDLRALLLHRHQWVRMRTRVQNALHAIAMAHGVRRGHTLWNREGQALYQHLDAHVDRLGARVKQVADERLRATLLMTHPGVGAVTALATEVFVGDPARFLDGKALASYVGMIPSEYSSGKRQRLGALTKQGNPFLRFLWCEAAAHAVRRDPDLQRFYRRKVAQKGFAKANVAAARKLGIRLWRSDRRRGILPSWPGAAVVSAVCAGMPVLALVLE

SEQ ID NO: 442526 - protein, 357 aa, unidentified
MKINEKKFIGKAFVGIDVHKSNWKVCVLGELNFKKEFSCDPYPKALETSLKNLLPDFEFECAYEAGFCGFWIHDALNEMEGISCIVVNPADIPTSDKERAQKEDKRDARKIAIHLKAGVLDGIYVPDKDFVALREIQRIHFTVTKDLARSKNRVKSFLFRQGIEICKEQFKKPSNHWSNKFINWINSLELCPKLKFVLEELMANVIRLRNQKLRILKQIREEIKSKQELEIRYNKLIKINGVGLISCITIITEVGDIKRFKTYEKFHSFTGLIPSTNSSADIEKIRGITNRANTRLRSVLVEVAWVSISKEPELLHYYNELKQRMNSNKAIIRVAKKIASKIRYELLKDDQELKVAA

SEQ ID NO: 442527 - protein, 392 aa, unidentified
MLYLAIDQHKTQITINVRNEYGDIIQKGQVSTKHADIDDFFSTFAKKARKVRGFMAIVEVCGFNDWLLEKLKKAKCNEIVVIQPDNSSNKKTDSRDADSLGALLWNNRKRLQGGQRPNGIRRIFPADPADAQVRQLTNFRQFLVTQRTRLINKIKGIFNKHNMLQDAPTEIVKTNKFRKWVEDVQLPVVDRMEVDAHLETWKLHDKQIIETESELVKRVEANPKNMFKLKSIPGISAMGAIILLSRIGDIKRFKNPRSLANYFGLTPGCHNSAGKQRIGGITKTGSPAARQVLNFAVNHVVRKDKSMKEWHKKLKSRRGAKTARVAVMRKLATIIWHMLRWDKEYQFHYDPPIVAKKRAGRRPAKEVLGGMSNNHQRQKTKTPLKRKNVTRA

SEQ ID NO: 442528 - protein, 394 aa, unidentified
MTAAHTQSTARTRVLYLAFELGWENWKLAFATEAADNPRIRSVKDRNLAALRHEIAATKAKFHLPADAPVVCCYEAGRDGHWLHRCLSAEGFRCHEVDSSSIEVDRRQRRAKTDTLDAAKLVSMLIRFENGEKRVWRTVRVPSEADEARRHLHRELEDWLDQRRQHNNRIKGLLAGQGLDATVDKDFPKQLDALRCWDGRPVSEELKERLLRQFEGWQFADRQVKDLENQRARSIRTGTDSCLDTVRQLLRLKGIGAASAWLFVMEVFAWRDITNRRQMGSIAGLTPTPYTSSTTSREQGISKAGNRRLRAMAVEIAWMWVLHQPQSELTKWFLRRFGTGSRLRKIGIVAVARKLLVALWRYLKEGTVPPGAVLVDWKAKMNSHRKPVAPAAAA

SEQ ID NO: 442529 - protein, 341 aa, unidentified
MKQNVCTVGIDLAKKIFHLVGTDPTGKIVWRKRLTRHALISFMAQLPPVTIGMEACGGAHYWARQLRHQGHHVKLMAPQFVKPYVKSNKNDMRDAEAIAEAVMRPTMRFVPIKDVDQQDIQALHRVRERLIGARTALINEVHGLMLEYGIVMPKGVAKFREAVVAKLEAEQDKLTALSQEIFWKLVKEFATLEDQIAFYQEKLETLATTHPECQRLMTIPGIGPITATALVAAVGDVGVFKNGRQFAAWLGLVPKQHSTGGQSQLLGISKRGDSYVRKLLIHGARATLRWVKLQTDSRSQWIRGVLARRGWNRTAVAVANKNARIVWALLSRGGVYGASAS

SEQ ID NO: 442530 - protein, 342 aa, unidentified
MISVGIDVSKGKSTVCILKPYGEIVSKPFNITHTQKDLSELSSMLFRLNDEVKIVMEATGIYHLPVLTYLQEKGFFVSVINPYLMKSYRNESLRKAKTDKIDSRIIANYGIDHWFKMKEFQTSGEIYEELKLLGQQYRHYMKLHLLSLAELTHLLDLTMPGIKNLLASWNETNRKDKRSDFVERFWHYDVITSMSEQEFTEEYILWAKEKKYVPSQEKAKVIYTLAQESIPTLPSETSSIKMLVTEAVRVLKEVDATLGLILSRMQEIAKTLPEYSVVREMGGVGNTLAPKLIAEIGDVRRFRNGKALVAFAGIDPPPYESGQFVGCNRKISKRGSASLRKV

SEQ ID NO: 442531 - protein, 405 aa, unidentified
MNAVGIDVSKGKSTVTIRKPGNVVLMAPRDIPHTQSAISALIEQIQSLEGDTKVCMEHTGRYYEPVATWLSDAGLFVSAVNPILPREYNDGTLRTPKTDKADSKRLAKFTLANWENLRQYSVMDKTRNQLKTMNRQFGFYMDQKTAMKNNLIALLDQSYPGANDFFTSPVRSDGSQKWVDFIYTYWHVDCVRSKTLKAFTEHYQNWCKRKGYNFSAEKARKIYAASLDLIAVFPKDETTKLLIHQSVSMLNAISRTVETLRIKMDELASTLPEYPIVMAMEGVGTTLGPQLMAEIGAVTRFTHRGALTAFAGVDPGKNESGQYVQKSVHTSKKGSPHLRKTLFLIMEGLIKRSPIDDPVYTFMDKKRSEGKPYLVYMTAGANKFLRIYYGRVKEYLASLEKSEES

SEQ ID NO: 442532 - protein, 367 aa, unidentified
MEKSSKVFVGMDVHKESIDITLAEQGGEVRRLGQIGGDRSSLLKMVRKQQSKGGERVFVYEAGPCGFWIYRELAALGERCMVVSPALVPKRAGDHVKTDRRDSERLASLARAGELQAIHVPDIRDEAIRDLVRGRDDAVIAQRRVRQQLKALLLRNEIRYVGKTSWTGAHRRWLSEMKLPEPAQQITFEEYIDAITVATGRIERLTRAIETQVLTWRFAPVVAALQAMRGIQFVHGVTLIAELGDLTRFGSARQLMGYLGLVPREDSSGEHRRQGSITKAGNSYARRALIEAAWAYRYPARVTRIIATRQTGLPKAACDIAWKAQLRLSAKYRRLNARHVNHNKIVVALARELSGFVWAIGQNVKPQ

SEQ ID NO: 442533 - protein, 344 aa, unidentified
MITIGIDPHKTTATAVASAAGGQQLDTVRLAVTAATCNQLLDWAQAWPDRQWAVEGATGLGRGVAQQLAAAGETVLDVPAVLAARARLLGSGSGRKTDVTDAASVAAVAQHHRRLRRVEAEDHTVALRLLSDRRDDVMGERTRCTNRLHVLLRDLRPGGAPVGLSATAAAELLTTVRPVTAADQQRKAIARSLIADIRRLDQTAKTLERQLREAVTASGSTLTEIHGLADITAAKILALTGDVRRFPDQHHYASYNGTAPIDASSGEQVRHRLSRRGNRQLNAAIHVIAVSQARDPGPGRDYYHRKIAEGKTPSEARRSLKRRLSDVVYHHLISDLAQATKPAT

SEQ ID NO: 442534 - protein, 442 aa, unidentified
MSNHSEAFVGIDTSKLRNAIAIAEGGRGGEVRFVGEIDSADAATRKLVAKLAAKYRSLTFCYEAGPTGYGLYRLIRSLGHECVVAAPSLIPKKSGVRVKTNRRDAVQLAKLSRAGELTAVWVPDERHEAMRDLSRARQAARKHLISKRQQISSLMLRRGRHYPGKTTWGPAHMRWLMQQKLEHREQRIAFEELLEGMRQEAERMERLEQAIREAVPEWSLAEVAIALQAMRGIDLVAAVTVLAEIGDLSRFQNPRELMGYLGLVPSESSTGDRVKRGGITKAGNGRARRILVEAAWSYRHPPRVGLEKQAKVAAAPRRVREIAWKAQTRLCGRFRSLIRKGKLPTIVATAIARELSAFIWAINREVLAPGAGFEIRNVPTAHSVTPCSQPSRPGLATADRVADASRRPALTAAARGVPAAARVGTKKRAPRSNKETGLEAGL

SEQ ID NO: 442535 - protein, 453 aa, unidentified
MAKVARKIKTKQGLRLKIVNPDAAGIDVADGEMQVCVPEDRDGENNRRFDSFTCDLRNICSWLKACRITTVAMESTGVYWLNIFLMLQQEGFDVVLANPLQVKNLMDEKTDEADAEWLMLLHSYGMVKPCFQPDSVARQIRNLTRHRSTLITTAGREVQHMQKAMEQMNIKLSTVISDILGKSGMAIIRAIIAGNQDPKSLAKLADGRCKASKDTIAKSLEGTWDEDLLFILKQSVELYDFYQGRVTECEQKIEALMMQYAAQVDAGVAKKLTRTKKRSTYKNAPDIDVEKYAHALWGVNLMSMPGMGAGALLQLIGELGYDFVSKFDTCEKFCKWCNLSPNNKITGGKLISSHIPKRKNPVGQILRLCANTVKSEKSEMGAYFRRMKSKNGYMQAIVATAHKMARIIYTMVKTKKEYNPKLVGCSEKELLERKIARTTRQLQILNQKLEDAA

SEQ ID NO: 442536 - protein, 491 aa, unidentified
MSGQRVRQKCNRARIYLQEDLRLIYSVGIDLHQGSHRARCLDERAQICDGFTFQTTPEGLTKLEERIFRDGANPIVVLEPAGLPWLMVAVYLRSQRPDCRLVKAKMQKVAALRRYLRGPVKSDRLDALTLAKMPFIDPEQLIEIYLPPAEIHALQRLTRQRKRMESDVSSRKVRISAILDGYLPGVRLAFSESWSSSFRAFLRGRVNPFAVAREGKEALHDYLSKASSRSRVQTHQVFLACQSVAHVCQMSMAVGTLNEDFFSDLQDEVARELKLLEIAEAESEALSRRIAEIYKKLHPSDNLVTIPGVGPHTAPIFLASVGDPARFRNQAAFANWEGVVPGAKQSSNVEAKGLRMTKAGPSILRMALYQAGEIGRRNDPGLAAVYYREMVHHGKNHRQAMGAVMSHLGARMLRVLKENRPYEIRDLEGKSIDKNEAKKLILSQYYVSEEVRRERRRRNTKTNRKRETATVSIYEAVDAPQAEQAKSVSRK

SEQ ID NO: 442537 - protein, 320 aa, unidentified
MQTKNAVIYAGVDVAKATLQLHLLGRQSELANTPAGLRQLLKAIQKVAGVHVICEATGGYEQAMVKALHEGQIPVSVTNPARVRAAAQAQGQRAKSDPMDAQGLTDYGQRFEPKATPPLSATQKQLVGLTQWLQQLIGGQAMAKTQAEHHQEPFVRRQHAKLILHLQSQIKAVEKQLEALLEQDAQLQERVNCLDDIQGVDPRTAWMVLAHMPELGQLNRHQVAALAGLAPWTRDSGTMKGKRCIGGGRPEVRVALYMASLSAARSNPVLSLLYQRLRAKGKLGKVALTAVMRRLLIYMNHQLKDLASKTTTEKTEEAKA

SEQ ID NO: 442538 - protein, 400 aa, unidentified
MHLTANISVPQKNFIAIDLHSDNAVICVRRNALNKAGELVGKNIWCGLVSIRDGLDSFVKALLPYCQDFDHVAVVESTYNWYCLADIFEERGWLLRIADPSTVSQANLKSSEDRTDAQYLAERLRVGSLKHYLPLSYSSRALWDLCRYRMAMVQDCASLKIKLINLYRNQLSKNLLVADLLDRCHNHMQSNYRFDPDILEEFKDPNIRLRVAFEVSRIAMLEEMIEECNAEIQKQCKDQELVKLCKTIPGCGPVLSAVICTEIGTMQRFKSAGDFVSYCRLCSTSKLSNGKSKGLGNDKNGNAYLSWAFTEVAQYASRNPVIREILQRLLRKYGGLRVKAIRTLAAKIARVTFYVLKNKQPFYAAKCFGIELTKSIKKKLTHKTLREDAAVVLPTVAGQA

SEQ ID NO: 442539 - protein, 399 aa, unidentified
MTKQLRILGLDVSKASVSACLINQKPNEPRNYYYKCNFLNLHANKSGIKELLALKPDIAILEPTGNNYSHIWKHHLANAGVKVLFVGHKELRHYRAYQLNLPDKDDNADALALACYYFDYLEQPNRFVAGYDETITKIRQLVFRLEHLNRVQSPVINKLRQELAWQFPEVALVESKRGASGLVPLLWGWIAQERNSKKYDYLYAQSIGTGIETSTRERAKIICSLQRQEVLVEQELRELLNDAGFEHYKKVFGVFNFGERLQWVVIAYIYPIEQFLVDGKPEIRICRGRNSGKPTKHHLSLRRFQKVLGMAPVQESSGDKRGTKTHNGSKLCRKALWQWVFTALEPRSRRRDTEVIKLLCEYLDKEKLSGKPVRLIRSRVAVKAIKMLFRELTRTNESN

SEQ ID NO: 442540 - protein, 357 aa, unidentified
MGKSIKNLSSVTIVGLDIAKNVFQVHGVDAKGAAIVARSVRRGGLLKFFASLPPCLVGMEACSSSHHWARALSELGHQVKLIPPAYVKPYVRRNKNDAVDAAAICEAVGRPNMRFVAVRSVENQAELMRHRARELLAGNRTRMLNALRGHLAEVGIVAAQGAQHAYGLKRLLTDGCDENGEIVVADCVRKALAPLVQQIDAIDEEIEAIDDHIKAQVKADDTARRLARVPSIGPITASAIVATIRDPSAFASGREFSAFIGLTPRQSSSGGKERLGRITKMGDRYLRKLLVVGACSVLNHRKGHNDALRVWADQLLARKAVKYKFKLTAVALANKVARIVFAILTRGGEYDERPVAA

SEQ ID NO: 442541 - protein, 360 aa, unidentified
MLYLAIDQHRKQLTVNIRSESGDVLLKRQVSTKWLGVRKFLEEVKQQSRSEGGFVAIVEVCGFNDWLMKLLKEYGCGELILIQPEKRSKKKTDRRDANSLGEILWVNRRRLLEGRSVQGVRRVRWPSLGDREDRQLTGLRKRLGQLRTRTINQVKYLLRKHNLEQECPTKGLDTIKGKKWLAELSLGPIDRLQMDQQLAQWKLWDEQIKKTAAEIEKRQAESKAAAVIATIPGCGAYSSLALASRIGPIERFPRPGSLANYWGLTPGCRNSGEASDRLGSITKEGSGMARFILGQLVLHVLRRDPWVKAWYGRIKRRRGSKIARVAVMRRLATTIWQMLKHNEPYAIGGPPRRKLKVHAA

SEQ ID NO: 442542 - protein, 342 aa, unidentified
MEHTTIAVDLAKSVFQVAVSHRPGRVDEERRLSRDRFLEFFAQRAPATILLEACGSAHYWARQLQPFGHVVRLLPPHDVRPYVRRNKTDRTDAKGLLEANRNEDIHPVPVKTIEHQAIASLHRLRSTWLATRTARLNTIRGLLREFGIFIPVGAHHVVARVRTLLLESTTVPVLLHTTLAAACDEIDVLEADMRAVERQLGALAAEMADVTLLQTVPGVGLITATALIALVADIRRFPSGRHFASFLGLTPKEESSALRRRLGAISKQGDVYLRMLLTHGARSFLWHAKAARQPTALQHWALSVEQRRGHNVATVAVANKLARIVWAVWTQPRPFVTDHRQP

SEQ ID NO: 442543 - protein, 387 aa, unidentified
MQKPHDNSKVCRAAFVQDSTLVVVIEMALTSWLVAGMIPGVDREPLKKIAPDPEELLQLLYRWRDEAIKAGREITRIAVAYETGRDSFWLARWLRARGIDAHVIHATSVAISREHRRAKTDRIDTAMLRRGFLGWLRGEPGHCSLAIVPTVAEEDAKRPHRERESLVQERTSTVNRMKSILIQFGVRNFNPVLRKASEKLDAVRTPEGIPLPPNAAAALRRHMERLRVIKEQIKTIERTRLQRLQRDPADKMNAMVFLLVRIIGFGVETAEQLVHEILFRDLRDRKAVARYAGLTGSPDESGSKRREKGLSRSGNGRVRTILIQLSWRLLKLQPGSELVLWYQKRTADAKGSRKPMIVAFARKLIIALWRYVNTGLLPEGFELKPAA

SEQ ID NO: 442544 - protein, 330 aa, unidentified
MKQSTTTYVAMDTHKKTISIALADGGRRGETRFVGEIQNRPDTVAKMVDRLAKKHGKLAFCYEAGPCGYGLYRQLTLLGHECVVVAPSLIPTRPGDRVKTDRRDAVTQASLFRSGELTPVWVPDDAHEAMRDLCRARQSAVEALRRARQQVSGFLLRHGRIYADGDHWTKKHRFWLAAQRFEHPARQIAFEELVQAMDEAKARRDRLAKQMQELLPSWSLAKVVTAIQALRGIAAIAAITIVAEIGDFKRFANPRQLMAYLGLTPTERSSGAKTARGAITKAGNTRARRMLVESAWTYRLPARMGLSGILCAGPGSHHAATKRSSNMMAN

SEQ ID NO: 442545 - protein, 342 aa, unidentified
MDYFAGLDVSVKDTSVCIVDGTGKIVREVKVASEPDALLGVLRNPDYCFKRIGLEAGPLSQWLFSALGEANLPVICVETRHMRAVLKAQINKTDRNDARGMAQMMRVGLYRPVHVKTLRSQKLRMLLTHRKLLQSKAIAIENDLRGTLRNFGLKVGIVGRTRFEERIEELVGHVPDLAVLVEPLLVVRRVLGEQIAVLHRRLLTIVRDDEVCRRLMTIPGVGPVVALTYRATVDVPARFRKSKSVGAVFGLTCSRDQSGERDRPGAISRCGDEMMRAMLYEAAQSMLVRSTRWSWLKAWAMQVAKRRGMKRAIVALARRLAVIMHRVWVDGTEFRWTREVTA

SEQ ID NO: 442546 - protein, 309 aa, unidentified
MKQSVVYIGIDVAKAHLDVAWAGTFRRLPNERSGHAALVRWIKQSATPVQLICEASGGYEQALLESMAEQDVAVTLVQAVRVRQYARAAGILAKTDRIDAKVLAAFGSAMQPQPTSPLSAEQKRLRQYEAQRRHLSRTLVAEENRLAQLSCTELRTLSRSLISKIKTQIKTLDRGISDLIAQDQTLCVKAQKLTAISGVGVRTAALLLAQMPELGQLNRRQAAALAGLAPFNHDSGSVRGKRAIFGGRRALRSGLYMAALSAARFNPILSNFYQRLRAKGKPHKLALTAVMRKLLLALNHTLKPLPCTT

SEQ ID NO: 442547 - protein, 338 aa, unidentified
MTAPYQLYVGVDIAAKSFTATWAARPERAPKAITFEQNPTGFQRFQDALAQSETLPTTTLVVMEATGNYWVALAVTLHQSGYIVSILNPGQVALFARSLPRRSKTDLLDAHLLIRFAAERQPAPWTPPEQVYHDLRQRLLVRDGLLHMRTQAKNQRHALQQWPVKIESALASLETVIAELDTQLSRLEGEIAEVLRNGAWASSALLLLSTPGLGLVTTAWLLVSTLNFSLAHSPEQLSAYAGLVPLERQSGTSIRGRPSIGHAGNARLRTALYMATLSAARANPTIRAFYQRLRAAGKPMKVARCAAARKLLHLAWAIVTKQQPYRSPACVQEELSTV

SEQ ID NO: 442548 - protein, 359 aa, unidentified
MRIIGCDLHARQQTLAMLDTITGEVAKATLKHEGNNVREFYSALPRPVRVGIEATGSMQWFVNLMEELGVECLVGHPAEIRAAEPRKQKHDRRDADLLLSLLVEERFPAIWLPTKELLDLRALLRHRHQWVCLRVKIQNALQAIALANGLRRGSSLWTQAGQHAIAALPLLPHAAYRRDELQVMYVKFEAEIEKLNQRVEQQAQERFGARLLMTHPGVGPITALATEVFLGDPSRFAGTKELASYVGLIPGEHSSGRRQRLGGLTKQGNPLLRFLWSEAAIHAVRRDPELKHFYRRKLIQKGLGKARAAVARKLGIRMWIMLRDRIEYNEFCRRGQRQPESGDACAGMPAARYGAKVTG

SEQ ID NO: 442549 - protein, 394 aa, unidentified
MFLVGIDIGKHKHSFCIINKETGESIVKPKFFDNNKVGFEELLFSFKGLPKKDILIGMEDTGHYHFALLKFLLDKKYQVALINPVTTDLTRKLSGSHTKTDKLDTLTICDVLTSNQRTKPYRISKVDRFDLYEQKQLTREHHNLKEQSNVFKNRLQKSIDIVFPEFNSLFKSMYGVVYMNILKEFGSADALAHSDIRTIRKCFDFKGRGKRIELTAEELKNAAINSIGFPSTAEVVQIKHLVNQIELVEEQIEELDKKIEEFSIANNSPILSIPGISHFSGTSILAELGDIHNYSKPSQIIKFAGVAPLTYESSQFMAKHTAITKKGSTYLRKTLYQIILPVINNNKVFKDYYNLKLSQGKGYRCAQGHCVRKLLRVIFQLLSTNTQFDPTLLV

SEQ ID NO: 442550 - protein, 347 aa, unidentified
MTIVGGLDVHRKQITFDYVDTATGLVRCGQIRPATRKTWRGWLAEHCPDGDGELAVEGCTGWRYVVEELRAAGAGAHLADPAETAARRGPKRRAKTDQADARLLRTLLLQGRLPESWIPPAHVVEVRTLGRLYRALMEERRAWQQRIHAQLYHQGCPPIRTLLSAAGRDSLATAELSAAGRQYVDAALRRIDELTAEIIPLRTQLVDFARRQPGCRALQARHYGVGWLCAAIIWAEIGDARRFHSSDQLVRFAGLDVTVYSSDGKRSPGHLSRQGSPELRWAAFEAAKCAARPGSPDYAYYHKVGAKLDGKRPALAVERKLLRRCYHTLRQLGDVALAAPAPVREAA

SEQ ID NO: 442551 - protein, 355 aa, unidentified
MIRSIHTHKVTHTLIALDDQGRVGTALRIDNTPEGWSQALRWSQEFEGERIWGIENSGSLGKGFAQFLLSQGEESVHEVSPRRTAQYRRRGRKQDKTDQADAVAIARLLVAEAQTLPVVQGDDLSTEMRILSDHRDSLLAEHTRLINRLHSQMLQIDPSYRQKSGPLTKKEGILYCQDLQLHAADSLLQTRLLIVRQLCDQVLRLDDEITEIKKAIQQKVRRSNTALVEMSSIGEIVAGRLIGELGSVPRISSAAALASLAGIAPVEVSSGGHRGFRVNLGGNRKLNRAFHIIALVQLRCNPLAKAYYQRKRSEGKTGREALRCLKRQLVNVVFRQFRSADVTSPPERRPEAVAA

SEQ ID NO: 442552 - protein, 360 aa, unidentified
MNEITRVGVDLAKRVIQVHAVDAAGRVIVAKALPADKFAAWCVQLPAGCRVAMETCGGAHHWARKLRGFGLDARLIAGHFVTPYRMAGKGGKNDANDAAAICEAAGRPHMRFVPVKTPAQQALLAIHRLREGYKQDRTACINRIRGLLTEFGIVFAQSPDALRQGLADVLEDASNELPGIARLALQEARLHWIELECHIASCDERITAHVRSDEQAKAAAQLSGIGPVTASALVATVGDFRQFKNGAQFGSWLGLVPRQNSSGGKTQLGRITKRGDDYLRTLLIQGAKSAVMTAHKRTDRISQWLVQLLARVGWQKAVVALANKNARIVWALLAKGRKFDPNYVSAKPGEVPPIPVVMPA

SEQ ID NO: 442553 - protein, 410 aa, unidentified
MTLFCGIDWAETHHHVAIIDSAGQLVAKKRIPDDPTGFAELIEMLTAAGDYAEAPIPVAIETPRGLLVASLRATRRPVYPINPLAVARYRERHVVSGAKSDPGDAQVLADLVRTDRHHHRPVAGDSELAQATKVLARAHQRAIWDRQRQLNRLRSILREYFPAALEAFGTDLAHPDAVGVLERAPTPALAAKLSASAIGACLRRGGRKRNVESRAQAIQKLLRAPRLDAPAAVAAAYGAQVRSLVAVAAEMTRQIAALEADLERSFESHPDAEIVRSLPGLGAVLGARVLGEFGDDPNRYQDGRARRNYAGTSPITRASGKKRAVLARYVRNRFLADACYQWSFCALTASPGARGFYDEHRAKGETHDGALRVLSNRLVGILDGCLRKRVAYDEAVAWGHRSSDGAAKAA

SEQ ID NO: 442554 - protein, 419 aa, unidentified
MFYVGIDIAKNTHEVAILSESGELLGTTMKVANTIPGAEKLLKHLVTLGVTVDNAVVGMEATGHYWLAIYSYLVGREYTVKVINPIVTDAYRNMSVRKVKTDKIDAVVITKVLRMGEYKEAPTADEQTLALRQLCRFRMFEVDSCSDLKRKSIALLDQIFPEYATLFSDTFGVTSREVLQNYTTPEALSQISNRKLTNFLDKASRGRFGKDKAMQIKDAAQNSFGITIATDAFAFQLRQLLEQIDFIEGQVEQLDAEISAYMSKTDSFITTIPGIGPVLGAIILSEVGDISRFEDGKKLVAYAGIDASVSQSGNFEGTQMHMSKRGSPYLRRALYTAAVVAAFHDPELSAYYLRLRQRGKHHGVAIGAIARKLCYIIFSVLSENRPFEQRLHNAAPENLDLIQPENDQDNRAFLSSKGD

SEQ ID NO: 442555 - protein, 377 aa, unidentified
MDSENIAAYIGLDVHKETLAVAIAAPERLGEVRYYGTINNEAQAVRRLFQKLQGLYGNILSCYEAGPCGFGLYHQLTAMNIKCQVIAPSRIPKSPTDRIKNDHRDAISLARLLRAGELTPVWIPDLTHEAMRDLIRARAAAKRDSRVARQRILSMLLRTDKRYAGKHWTGKHRTWLANQSFSQPSQQIAFQHYCQSLEQIEDRILQLDQEISRLLPEWSLCNLVCQLQALKGVGQLTAITLVAELGDFSRFSSPKQLMAFLGLVPGEYSSGNSIRPRGITKVGNSELRRLLYEAAWSYRTPAKVGAWLIYYRPDSVTQYSKDIAWKAQQRLCSRYRSLTAKGKKSQVAITAVARELTGFMWDIALAAQSSFSQQKQN

SEQ ID NO: 442556 - protein, 451 aa, unidentified
MANSKTRADRIISRQISHCTVEAAHLSAVGIDVHHDQLICCFQKLDPIAGELTSEHRNFGTTIPQLQEFAAWCRVREPSVILMESTGVLWFSPYRSLEDVGFDNDTLALVNARDVKAAVGRKTDAQDAERLAEYARLGKFHKSFVPSRPFRDMRMVSRDIIRLSDDISRQKNRYNKNLNSVGCRATSVFSDVHGKAARKILDAYIRGDRDFEEIVRSARKQLRATQQEILEAINFAMSDALRELLRSSYEHLQYLIARRDSQIALLERMQAPYQEYIDRLMTIPGVKELSARLLFCEFTNEQQSFPDAAHFASWLGLCPGNNKSAGKSSSGKTPKGNRWARKTLTEVAHGIGLMKRGALKALFQAFKERRGARRAVVAIAHKVAMIMFAMIWDGSEYVETTCSALRDTRVKRLLQTSKNLREQRTVITLSGQIVDKDTGELIGQLSVDAAT

SEQ ID NO: 442557 - protein, 427 aa, unidentified
MPYRIAGIDVHKKMLAVVIADVAVEGEYSFERRKFGAAASELQRLARWLVEQEVQEAVMESTAQYWRAVWATLEQYWMPVMQRREGAGPMAGKLHLAQAQSNRGARGRKNDFRDAERLLRRLVAQELVLSFVPDPAQRLWRTLTRRKSQLMQDKVRFHNRLEPLLEQMHIKLSGLLADLLGVSGRRMLKALAEGATDPAAVAALADPTLRATPAQLCDALAACVDLLPVYRRLLKMELEQLEFLEQQMDKLEREIAQLLQGHSTAVERLAAVPGLGVESGQQIIAEIGPTAAVFSSAKQLASWVGVCPGEEVTAGEAHSTRSPKGNRNMRRLLNQAAHAAVKMKGTIFEVTFHRLLSHMEYKEAIWTIAHRLCRLVWKILHQGVQYEERGPAVSAKAQRARLAKMIRDLTKAGYHVQLPAPVQANSV

SEQ ID NO: 442558 - protein, 433 aa, unidentified
MSASTGCDAALWLCGSEKGRTMSAAVYRFYVGIDWATEKHRVVVLDAERRVVREREVCHEGAALESFADWLTQLAASAVETVAVALEVPRGAVVDVLLARGFHVFALNPKQLDRFRDRFTVAGAKDDRRDAQVLASALATDLATFRRLEPEHPLLLELRELSRLEDDLQEELGRLTNRLREQLHRYYPQLLHLVPAADEPWLWTLLERAPTPSVAQHLPRATVRTILSRHRIRRVDTDAVLATLRAPALPVAPGTVQAAQRHLAVLLPRLRLIHQQRAECATQIEGLLERLGESQEHRDVPILRSVVGVGRVVAATMLAEASRLLAARDYHGLRAQTGVAPITRQSGRRTLVCMRYACNPRLRQAAYHWGQSAARHDPVSRAHYERLRARGHSHARAVRGVVDRLLHVLIAMLTAGTLYDPARRRLPVGEAVA

SEQ ID NO: 442559 - protein, 343 aa, unidentified
MQAVTTIGLDIAKSVFQVHGIDAEDNVIIRRQLKRRYVLTFFQKVPPCLVGIEACASSHYWSRELKALGHTVRLMPPAYVKPYVKRQKNDAADAEAICEAVTRANMRFVETKTPEQQSCLMLHRTRHLFIRQQTSVINAIRAHLAEFGIVAPVGRNGVEQLLDVVADSSDKRLPEVARACLAALGAQLRMLKTQILEFDRRIMAWHRSNEASKRLDEIPGVGPALATALIASVADPKAFRSGRDFSAWIGLVPKQHSSGGKDKLGSISKQGDRYLRSLFTAGALAVIRYAKIHGTKHRPWLTALLARRPTKVAAIALANKIARMAWAMMAKGERYKEPVTLAA

SEQ ID NO: 442560 - protein, 383 aa, unidentified
MQPTQHKNFTPDDALLAVALELSKGSWKIALHDGKRDKPAIHTVSDEEAPTRLAHAATVIEEMKRKWQLDQHIHVAVVYEAGQDAFWIGRALVDLGYEALAIDPASIPVERHARRAKTDRLDAIKLVTCLRAWLRGERDRMHVIQAPSPQAEAQRHLVRDRGEMQKECGQHRDRMRKLLRTVGCWDPVEGDFAQRLTRGEVLCHDGTAIAPELQERLSRECERLALVEQQLAALEKRLVKQLPPPVQERIVNLTRLKGVGEVGAMRLILELFWRDFGNRRQLGSCVGLVPQPYDSGESRVDQGISKQGNRRVRALLIEMAWMWLRYQPDSALANWFAQRTQGSGPNKRGKRIAIVAVARKLAIGLWRYVKDGEIPKGAVLKTA

SEQ ID NO: 442561 - protein, 424 aa, unidentified
MNRSEFKATIGLDWADRKHDIWIRPADGSKPMHRRVEHSPEALHAWVAELRARFPEGRVALGIETSRGPVISLLLAYDFIVIFPINPKAMKSYRDCFAVSGAKSDRPDAFLIEEYIRLHGEKLKPLQPDDTLTRKIGGWSEVRRQLVDERTALINQLQARLKTYYPLAVELLGGQFNTVMAAEFVTLWPDLESLQAADQEKVRSFFYKHNSRSKKKMEERLLAIKDARALTKDAAIIEPGRDLVRALAGMLKSLHKSVEQLEGKIERAMDEHPDAPIFRSFPGAGPNLAPRLLAAFGTQRDRFQSADEVSQFYGIAPVVIQSGNSRVTRLRRRCPKFGRQTFHENAACAAKSAKSQDWAKPYYEACRKRHEDKHHHTCRSLAYKLIRIYFACWKNKTEYRQQTYLQALEKSGSPYLVKAAAAGK

SEQ ID NO: 442562 - protein, 391 aa, unidentified
MFLLGIDIAKLNHVASCIDSSTNEVIFSNFKFKNDFKGFSALLDKIKSLDVKNLIIGLESTSHYGENLINFLFKQHFKVALINPLQTSHLRKANIRDAKNDRLDSLNIARSLIFGKLNFVSEKNIDCFSLKKLTRFRSNLIKQRSKAKIQLTSLLDLLFPELQYLFKSKIHSKTIYTLLKKYPSADEIAALKDDEISNLLYASSKGHFKREKSIELKSLAKTTVGIKDTSVSLHVIQLIELIELFDRQIKYIVTKITDTVNKLDTKLLSVPGINIIACAIILGETNNFDNFSNATKLLAFAGLDPKIRQSGNFSATSCRMSKKGSPYLRYALIFTAWNTVRHSEKFNKYYSLKRSQSKSHYNALGHVAHKLVRVIFTLIKKDISYQEEKLE

SEQ ID NO: 442563 - protein, 344 aa, unidentified
MQHYVGLDVSVKETSVCIVDKAGKVIREVKVASEPVAILAVLTEEALAIERIGLEAGPLSQWLYSALAEAGLPVICVETRHMKAALSAQINKSDRNDARGIAQMMRVGLYRPVHVKTMASQKRRMLLTSRQLLQAKALDIENELRGTLRNFGLKVGMVGTVKFEARIRELVADHPDLAAIVEPLLIVRRVLREQLGVLHRQLLEIVRHDEVCRRLMTTPGVGPVVALAFRATVDVPSRFTSSKAVGAAFGLTPHRQQSGEIDRMGGISKCGDAMMRKMLFEAALVLMTHSRKWSWLKAWGMKIARHRGMKRAIVAVARRLAVIMHRMWVDGTEFRWTRKEAAAA

SEQ ID NO: 442564 - protein, 402 aa, unidentified
MNAVGIDVSKGKSMVAIMRPFGEIVSAPFEITHTASDINSLVELINSVEGESRIVMEHTGRYYEVLAHQLSAANLFVSAINPKLIKDFDNDSLRKVKSDKADAVKIARYALDKWQNLKQYSVMDELRNQLKTMNRQFGFYMKHKTAMKNNLIGILDQTYPGVNTYFDSPARSDGSQKWVDFASTYWHVDCVRKMSLNAFIDHYQNWCKRKKYNFSQSKAVEIYGKAKELVPVLPKDAITKLIIKQAVDQLKSASTTVESLRTLMNETASKLPEYPVIMAMKGVGTSLGPQLMAEIGDVSRFTHKSAITAFAGVDPGVNESGTYAQKSVPTSKRGSSDLRKTLFQVMDVLIKTHPEDDPVYQFLDKKRAQGKPYYVYMTAGANKFLRIYYGRVKEYLSSLPES

SEQ ID NO: 442565 - protein, 339 aa, unidentified
MKLYGGIDLHSTNSVVVVLDEQDRVLLERRVTNDLQRVKDLLAPFREALCGVVVESTYNWYWLVDGLMAAGYRVRLANTAAIKQYEGLKYSDDAHDARWLAHLLRLSILPTGYIYPKGARAVRDLARRRMRLVQQRSLNLLAVQTTLERELGRRVSANAIKRTGSEVALLHGVEEPNVGSSLTANLAVMRCLDAQIERLEREIVSQVKLAAQFEPLKSVAGVGQILALTIMLETGEIGRFAKVGNFASYARCVQAKRISNGKKKGECNAKCGNAYLAWAFVEAAHFAVRYYPKVKRFYERKRAKSNAIVAIKACAHKLARAAYHVMRTQQPFDIDRAFA

SEQ ID NO: 442566 - protein, 349 aa, unidentified
MFLESKEESKMNSSVVGLDIAKNVFHLYTINADGKALKKMLRRKQVLEFFANFTTSLIGIEACGSSNYWARELTQLGHDVKLLNARHVKAFVKGNKNDFNDAEGIFDAVSRPNVRTVAIKTIEQQDIQLVHRLRQDAIKRRTALVNQTRGLLSERGIVINRGINQVREQLPELLEDAENALTTISRTAFAEQYERLLEIDKEIQKHDKKITQLCKANELSKRLMNVPGVGPMIASIVAADLGEAQHYGNARHYAASLGIVPKQHSSGGKPVLLGISKRGNRYIRTLLIHGARAVLRTCENKEDNLSLWLQKLIKRRGFNVAAVALANKNARILWALANKKEEYVSENYL

SEQ ID NO: 442567 - protein, 355 aa, unidentified
MIIIGVDYHPEFQQIALLDQDTGEVQEKRLSHPGEAERFYRALAAAGEKVRVGMEASGHARWFERLLAELQFQLWIGDAAEIQSKRARKQKTDRQDAQHILKLMLKDDFRQIWVPSWENRDLRQLLWHRHRMVQARTRIMNQLQAVAINEGLRCKKRLWRAGGRQQLESFRLAPRASRRRQDLLELLDRLSPTIGELNQAVEQEAEKSPAARRLMTHPGVGALTALAFVLIIGKVERFQCGKQVASYLGLVPLEKSSGNRRRLGHITKQGSSLLRFLLVEAAQITVRSLPEWRSQYFHLVMRRGRKTAKVAMARRLAIRLFWMWHQGWDYQQSRSSVRTQDSPDQAMVCTRTPSN

SEQ ID NO: 442568 - protein, 353 aa, unidentified
MARFVGLGVSQKLTALCVVDETGRRLWRGQCATDPGQIERMVKGHAGEDARVGIETGPMTPWLVHELRGRGLDVVCLDARHASAALKMQMNKTDQNDAEGLAQIMRTGWYRPVHVKSLDAHRARALLGARAQLVGMTTRLSNHIRGVLKTFGMLPGAMRGLSFDKRVEALLADHDDLAPIVRPMLVAWRQLREQIAAFDKAVRTLAKASPTCRLLMSVPGIGVLSVLAYVSTVEDPARFARSRSVGAHMGLTPKQYQSGEVDRSGRISKRGDTLARTLLYEAAVVLLTRVKRASRLKDWAQALAKRSGPGKARVALARKLSVSGEPLGSTILHSIWKTGKPFRWSEQELPQAA

SEQ ID NO: 442569 - protein, 427 aa, unidentified
MSKPSIGAMWAGVDWSDRSHDVCLVDAEGERVAAFKIPHSAEGIAELVKRLGALPTVGGVAIEAKQHLVVQGLLEAGIAVFPINPKMSRRWVESLSVAGAKSDPAEAFALADGLRHHHKHLRPLELDDELTRTLMAHCRAESKLITHRTALVNRLQATLKTYFPAALDWFSDWTKPTAWDFVLTFPRPEALQQASRRKLIGFLRRHHIGLSPIWEARLGQRTDAVAWPSDPVVVEVEAEMAITLAKLLRTLEPRLKLHRAQIETLFAQHADAAIFRSLPGAGRKLAPRLLSHFGSRRDRYDSAQALQLLSGCVPVSHQSGNSDPAYFRQACQKDFRTTMHLFASLSIQHSIWARACYERARGRGKPYAHALRIVGAKWLKIIFRMWQTGTPYDERAYLASLIRHGSPLIDHIKASNKCGELIEKHLT

SEQ ID NO: 442570 - protein, 387 aa, unidentified
MYYIGIDISKFKHDCAVIDDVGDVVTPSRSFANDREGFLQFKALLDSLGSETRIGLESTGHYGTNLKLFLESCSTTFMEFNPLLINRFIKSKSLRKTKTDAIDCEMIARYLMTVEYKPYPPSFYHTEELKSLTRFRDNLVRQRSRQLVELTNILDKVFPEFKPFFKGKFSTTAFHILINYSSPERIANMNSKSYETLRKLSRGRFSLADFTTLKHLARNTVGHPDDFLLSEMAMVIDIFSQLDSKVDETETLIEECVLEINPPMLSIPGIGVESAAVILAEFGDFSKFQNPAQLLSFAGMEPGYFQSGTSESAGKMVKHGSSYLRYTLMNCAQSVVNYEPTFAEYYAKKRAEGKTYRVALSHVAKKLVRVIFTLQTKNLVYDSDSLR

SEQ ID NO: 442571 - protein, 337 aa, unidentified
MNYSGIDLHSNNSVVSVIDETDRVVAERRLPNDLAKILALLAPWRPELAGVVVESTYNWYWLVDGLQAAGFVVHLANTTAIKKYDGLKHSGDETDARYLAHLLRLGILPTGTILPAEHRQVRDLARKRMQLVRSRTSHILAVENITARQSGTRITSNQVKQLDQTTVDQLHLPDDVALAVRANVAVIATLSAQIAIVEKRLQEKVAPRPDYALLTTVPGIGQTLATVIVLETGTIERFASAGNFASYARCVDSQRMSNGKKKSEGNTRNGNPYLCWAFIEAANFAMHFSTEARQFYERKKARTNSVIARKALAHKLARACFHMLKERKPFDVNRCFA

SEQ ID NO: 442572 - protein, 447 aa, unidentified
MTSAMESDEFRWFVGIDWGTAEHVVTVGDATGRVVEERPIKHTGAGLEQLLDWLTEVSAGQLAQMAVAIEIPRGAVVELLLERGAAVFAVNPKQLDRFRDRFSVAGAKDDHLDAQVLRSAVRTDRALFRRLALDEPLVIRVRELTRASEVLQGEFQALTNRLRELVHRIAPEWLTLSPNADDVWFWTMVEWAATPALGASLRRRKVQTLLTTSRIRRVAVDDVLTVFARPALAVAPGTVEAVTGHIQLLLPRLRLAQEQRRACEQALTTVLTELRASETAPPAAGGRSGTPSSSGPPMSGPGDVAILESLPGVGLVVTSSLIADAMPLLRLRDYQSLRAVTGVAPVRRQTGKNKRGMISMRYACNVRLRNACYHFARVSTQVDAAARHYYARLRARGHSHGRALRSVADRWLRILISMLTHRTLYDPTRFATAADHRPPTLAESTHP

SEQ ID NO: 442573 - protein, 367 aa, unidentified
MKDSSIVVGLDVHKNSIEIVTAETDGAMEVRHFGRIGGTMDALDRAVRKLVSKGLTLRFVYEAGPCGYEIYRHLTGKGFSCKVVAPSKTPKKSGDRIKNDRRDAETLARLERAGELTAIYVPREEDEAMRDLTRAREDAVKALKTAHHQLNAFLLRYGKLYPGKASWTPSHMRWLSDIALPHPSQQIVLQEYIMTVTVCTERTTRLTDQIAKLLPEWRMFPVVKALQALRGVAPIVAATTLAEIGDMSRFKNPRQLMAYLGLVPSEDSSGESTHRGSITKTGNGHVRRVLVEAAHAYGFPARVSRHLLKRQEGLSQPVLDIAWKAQVRLCGKFRRLMARGKLKTKVVTAIARELSGFIWAIAREVEA

SEQ ID NO: 442574 - protein, 402 aa, unidentified
MIYTNIVGVDVSKGKSAVAILSNGVCVHRFTFTHTKTGFQTLKHYLIKLSQPIIYFEATGIYSRPIQTFCECEQVPYVQLNPLSLYFQTSDLRRLKTDRTDALKIAQNALKYPHEPTHQFAPIYVRLRELTRFHEQVDDDIKLMRSKLHVALQQTFPELEYLFASRVSKLTLNIIELFPHPDYVVGQSRTKLKHTLIRQTDKKISDTKALRRAEELIRYAKLSYPAVSANSVQVDEVRYYARQIKMLLENKADLVKQLVETAKKVREFELFVSFPGIGDLSAAEIIGESGDLRRFDNANQINAYVGIDINRYQSGTYTRTDHINKRGNAHLRMILFFTVKNMIRQQAVAKNHIVDYYYRLKKGPHPKRDKVATVACMNKLIYCLYAMVQHHRKYDYAPHHGL

SEQ ID NO: 442575 - protein, 360 aa, unidentified
MECSEFKLELRAMDKILKQSLGFDVSQEKFDVALFVCGEDLAPREVASETFDNTKNGFKKLSQWYDKLIDKRLPIFACMKATGVYHEHLCRHMYTDPRVKVSVVLPNKSRKFIDSLDWSSKTDKLDAKALSLMGLNRKLRLWVPPKELYRKLRRLTREREHLSIAHSAQINFLHAMETEFGSCEENLMRVKQLKELIHQQIKAIDKQIENIVNSDDELKQEVALLKTIPGVGQQTAVVVLAETNNFQEVERSKQLVSYAGLDIRQKESGKWKGKTKISKKGNRHIRAVLYMPALTIIRGNSRLAQYYKCQIEKGKHKMTAITAISRKLLVLMYGVWKTKTVYQDDFNLHLSQMASGNARD

SEQ ID NO: 442576 - protein, 319 aa, unidentified
MTAKTAPVHVGIDVAKITLQVCLQGRQIEFKNSPADHIKLCTRLKAVAGSHVICEATGGYERAMVQALHNALIPVSVINPAHARAAAQAQGERAKTDRIDAVMLTDYGDRFKPEPTPQASQTQRELVELTQWLKQLVDAQSVAKTQAEHHDNSYIAKQHGMLLSHYQSQIKKVEAKLKALQERDLELRQRVECLDTIKGVGERTALLVLAQMPELGQLNRRQVAALAGLAPWTRESGTMKGKRHIGGGRPDVRTALYMAALSASRCNPVLSVFYKRLIEKGKPQKVALTAVMRKLLIHMNQSLKTLAAKSAPTEIIQKK

SEQ ID NO: 442577 - protein, 313 aa, unidentified
MRVFVGVDVSKDSLDVYRPDTAELIKIDNSEAAVADLCQQLQKKKRHLIVVMEATGGYERLLVNQLALHDLKAAVINPRRVRDFAKGVGMDAKTDPIDAKILSQYGEVVSPKPMAVKSEHEQKHAAFVARRNQLLELISQENNRLQQTWDDDVKQSIRDVLEMLKKQLKSIDSQLAKMLKADAKNQRTIEILQSAKGVGPVMISTLIAELPELGRLNRAEIAKLVGVAPINRDSGKKSGKRFIGGGRGQVRRVLYMATIVAIRHNEKIKTFYQHLKSKGKVSKVAIVACMRKFITILNLLVKKDQLWQTKTSV

SEQ ID NO: 442578 - protein, 406 aa, unidentified
METPEVRVGIDVGCRQHRVAIGDGAGRVLEEFDAAHTRAGLAQFFARVEHHTQRQPTARVVVAMEGVNGWARPLDQQIQQRGWQLLNVNNLKLARFKEIFPGPAKSDAIDARKILELLALRATTPVARTVVQEVTPHTETNDRLKRLTRRRRQLVGEKGRVLGRLQADLQAVCPGLVTITGHVGNRWFLHLLTFRPDLRQLARLRPQSVRQIRGVGGHYAAVITQWQPTAIFGRELEWVGPMIHADAQRVLALLDQIDALEAQIATLVQQSSLARRIDSIPGFGLVCSAELAGEIGTPERFASEASLALYIGMAQLDNSSGQRVGSKPARQVNTRAKGAMMTAADRHRKFVPQSQAYYERKRAEGKTHNQAVRALGRHLVRVLWAMLRHDRDYELREVTNHNEQAA

SEQ ID NO: 442579 - protein, 362 aa, unidentified
MFRPHTLYIRIRIVRKVSEPAFAMKDQDVTDVIRRKQQTAMRYIGIDVSKATFVVAYSSDKGGEIRTFNNTTTGIKQFIGALPKDGSIHCVMEATGNYSAMLLYLLNVAGIAVSMENPLKIKNFARAMLSTVKTDKIDARLIALYGEKMNPQPFKIQGEAILRLRQKRTVIRQLTKQITAMSNLRGSLACLPVPDKGAPHTVDETIEFLEKRRDRLQSELTDLVEVEFSRQLALLTTIKGIGITLATALIITTGGFTYFQNAKQVSRYLGICPTYEQSGTSVNIRGHINRNGDVYTRGLLYVAAWTASRFNTKCGETYTRLRQNGKPGKLAMIAVANKLVRQAFAVVTHDKEYVDGFVSNRP

SEQ ID NO: 442580 - protein, 451 aa, unidentified
MKASLVLGIDPSKSFFTATMLDARGEAIWKGRQFDMTREGIESLVSDLPEGDLSVGIEASGRIDDNLLAWFAEWALASREKRSVKIIRINPGQSSRFGGPKPRRDQTDGSDSEHVAEYTRVYALRLEAFNCDRKIQALSRLVSERQRLVLDLTATKNRIHEQLLVCFPEFVQLFTDPFAKLARAVLREIPTARSAAHRRPLSLARVKAGRKGPSLGVDRARELIALAQRSIASAGEDHDGQALVFLLDELELLEKRLTHIEQTFANFVDTQKGKVEADSDQGLPVARQIEVLDSIPGMGLIAASTLVLGSRGIARFYAGKALSAQWASCPERVQTGTSLNKTRLTARGDHKRRAMLYLNAQTACIFDPAFAFHKWRMIQKGLRPQQAVCAVMNRMARLSWTLVAQNKLYDVNHMLEQIKIHHADLWKTFLRLHQDDQFLWKNVEPKFKKIS

SEQ ID NO: 442581 - protein, 349 aa, unidentified
MHSPTVAVDLAKSVFELAIADAEGKITERLRLNRTRFSAFFVQRPSCRVLMEACGSAHYWARCIARHGHSVELLPAQYVRRYVRRSKTDRADAAALIEAARCDEIRTVAVKSVQQQQMLALHRLRSQWMSTRHRYLNTLRGLLREFGVVIPLGARVARSRIAQHLAQPSQEVPGALQPLMIQLLSDLDQLQQHILEVERQIAGSARADEVVQQLRQVPGVSLLTSTAMRATVGSIERFGSARRFASWLGLTPREYSSGERRRLGDISKQGDIYLRTLLVHGARSVLLAAHRQHIQGRPLDRLRQWALKCKQLRGHNVTTVALANRLARIAWAIWKYGRSFDGNWRAAVA

SEQ ID NO: 442582 - protein, 384 aa, unidentified
MTRYVGLDAHSKTCVFVIQDENGKIVREGSVPTTSEGLRTMRDRGDLDPGTMVALESGTMAFYVARRLTKLGLAPHVIHANEVRATALRPNQKSDRRDAIELCEGLRRQRYRTRVHVPSESIEQLRETLGRRRHFVRLKTMQVNAVKRLLRAAGLQPLGRALGSEAAWTKLLTAVAIDPVLHAFISSHRAVWRCAHEQIGVLEASLRVQQEPLQRDFDRLQTVPGVGPVVAMTVLAVLSDAHRFPTAKHAASYAGLVASTYDSGERVQHGRITRRGSSELCSMLCEAAHHAWRPNHPLNPYFASLCARRGYKMAVVAVAHRLCRIVYSMLRHGTDFDPNKLAVEKGHFEHRSVRQYRRKSSTATPNRRLVSDGRSANGSAKHER

SEQ ID NO: 442583 - protein, 357 aa, unidentified
MVKSSRNLSSVTVVGLDIAKSVFQVHGVDARGGCVVAKVVRRGQLLRFFSSLPPCLIGIEACGSAHHWARSLIALGHRVKLMPPAYVKPYVRRNKNDAVDAAAICEAVGRPNMRFVPVRSVENQAQLMRHRARELLAGNRTRMINALRGHLAEIGVIAAQGVQHAYALKRLLADGVDENGEIVVADCVRKALAPLIHQIDAIDAEIAAIDEEIATQVAADETARRLMTIPGIGPLTASAIVATVPETSAFASGREFAAFLGLTPRQTASGGKERLGRITKMGDRYLRKLLVVGACATLSHRKGHHDALRVWADRLLARKALKYKFKLTAVALANKVARIVFALLTQGGEYIERSAVG

SEQ ID NO: 442584 - protein, 315 aa, unidentified
MLYDGIKGRIKTRNIQNNRHSVENILRWLRLQHCGPEDVHVVMEATGVYHEQLATELHDAGFRVSLANPHRSREFARGMGIMTKTDKVDAYMLACYAFLKKPHRWEPPAPEIRYLGALLRRRDVLLGDALREENRLEKYLSTDTPADIISSCRRMAQLLREEVSNIERQIKAHIKASPALRRDYTLLSSIKSVGPQQGMHMLVVLRSHNFVSAEQAAAFLGVVPIEKRSGTSVRRRPRMSKIGPPQLRAKLYMSALCGKIYNKRMRNIYDEMCLRGKPKMVAIGALMRKLVHWCYGVLKTGTVFNDESLKPVLST

SEQ ID NO: 442585 - protein, 335 aa, unidentified
MEELNLNKAFFVGIDSHQEEHTAVIANRFEEEQNHLSFENSKRGIKQFLAWLEKIQDRKNLIIGIEGGGKTRKALIFSVLQKYQNVYEVNPLYTKQRRDYGTSGNKSDILDAKLVVEVLTKKLDKLPKLNLDDFQPQRLVLKRTVSFYEELVWQRARIKNQLRQLTKERSLALEKEERNILDSIIKEKKRRLRRIVKVENRLKEKLNLLLRDNGENLITIKGVSTILAAKIVSQTKGIKRFSNLNKFIKYAGIAPLEKSSGKTKRYRKNKTGNRKLNSAFYLAALNQLRWNNKAKEYFQKKISEGKTKKQALRYLMKRVACIVYGMLKSGKPYQA

SEQ ID NO: 442586 - protein, 341 aa, unidentified
MKVSTLGIDLAKNVFQLHGVDHEGHTILRKKLTRAKFVQFVIQLEPCLIGMEACSSSHYFARLFTRYGHEVKLIPPQYVKPYVKTNKTDAADAEAICEAVTRPNMRFVQIKTEEQQAVLALHTERGILIRERIACANSLRATLAEFGITIAAGQNHLTRELPAILEDGENGLSPFVRTSIYRQSKHIRELEEQVKQVEEALASWYRTQEACQRMAKIPGVGMLTATYVVAAVGNARQFSTAKQFASWLGLTPKEHSSGGKQQLGGISKRGDGYFRYLLVHGARALTAWVNRNGAVEENSWLQGLLERKHYNVAVVAMAAKTARIMWSILSHNTEYQPRQLA

SEQ ID NO: 442587 - protein, 411 aa, unidentified
MIKENYIYVGIDLHKETHTAVMIDCYNQKLGEVTFPNRPADFPKLVAKVKKCNTDGKTIVFGLENAYGYGRALAVWLIDKGYLVKDVNTAISHRQAKHRGAMYRKSDSDDAEAIALATLNMLDKLPDAYPNDAYWSLGQLVHRRDNIMKQRTRLVNQLHEQLCIAYPSYKQFFNNISRPTALYFWEHYPSRKYLKGKSVEDLRAELVPVSHNKCSTRTCEKILDAIAGDKVKNNAYQDARDMVTLSIVSDLQHYDKQLAEVDKMLEQMYKMLGCTLTTIPGVNVITAVKILAEIGDIKRFSNANKLAQFAGIAPLHLSSSGKGKDLATKQGNRRLQATIYFLAIQMVQISSKGTPRNPVVRAYYEKRKAEGKTSQQALICISRRLISIIYGMLKSGTEYRMPVMENTGETV

SEQ ID NO: 442588 - protein, 372 aa, unidentified
MSANGITWVGMDAHKNSIKVAALFPDRPDFVEWTEATTPEAVRRLARKLLREAPGEVRGCYEAGPTGYALHRQLETAGVICEVIAPSLTPIKPGSRIKTDRRDARKLAELLRAVLLTEVHPPSESEEALRDLCRCRDDARTDLLRARHRLSKFLLRRHCMYRQTKHHWGSRHLTWLQELRFDDPVSQSTFDSYFLSVQQLDERLHQLDERLAEYGGQEPYREPVAWLRCFKGIDTVTAVSLIAELHDFRRFRSARELMSYVGLVPSEHSSGDRERRGSITKSGNRHVRRLLVEAAWHHRHRPGLSAPLRLRREGQPARVLAIADRSQERLCARFRRMTARGTCQPKTIVAMARELVGYLWAVLHPAAAAASH

SEQ ID NO: 442589 - protein, 411 aa, unidentified
MRIVHQRCCALDVHKNSITACVLVWDGQEAVEERKKEFGAYRKELERLRFWLMASKVTVVAMESAGVYWKPVWHVLERQPQFKLKLVNAQHFHGVDGQKSDQIDASWLGELLQCGLLKGSFVPPQWQREMRDLTRLRVSLLQDQNRIQNRMEKVLEDANLKLGSVASDTLGVSGRRIVKAVIAGDKDPGWMADYAKGTLRAKRKQLEQALHGFVTDHHRTLLAMLLRQFDALERDIEYLEAEIRRRLTPHQGVVDRLAEIPGFGEVSAWTVIAELGLDMKVFRTPERAASWSGLCPGNRKSAGKRGHGRTRKGNRWIRRGLTQTALAVSHSKENYLRSFYWRIASKRGAKKARIATAHKQLKIAFLIIRDGVRYRDLGSNYFDRRNAERTKRRLVERLEGLGLKVTLEPVA

SEQ ID NO: 442590 - protein, 470 aa, unidentified
MTPRYQKNGRMPGAPARLRVINPHAAGIDVHATVHWVAVPAGDAPVPPPNHPPNLPPHVRSFGACTVDLIALADWLKACCVRTVVMESTGIYWVPLFELLESRGFEVLLVEPRQSRHVPGRPKSDVRDCQWLQRLHSYGLLSGSFRPTEQIIVLRSYLRQRQMLIRYAGQHVQHMQKALEEMNVKLTEVVSDVCGVTGMAIIRAILNGERNPVELAKLRNVNCKRSQAEIARALYGNWRAEHLFALQQAVTLYDCYREQLRVCDDQMQKYLGTFADRSQGRPRPRRHGRGRRERRRNDPAFDVAGALFWMSGVDLTVLEGIDPNTALVLMSEIGPDVSRFPTVKHFCSWLGLTPQHQMSAGKIRSRRVQRGASRAGRALRLVAQACYHAQNVLGAFYRRIQARAGAPKAIVATAHKLAERVYRLLKHGTDYVCQDIEKYEAANRQRVLKGLARKAATLGYRLEPTAASGT

SEQ ID NO: 442591 - protein, 387 aa, unidentified
MDEVEDEPLFADRVAGLDIGKAGVEVTVRVPGDTAGGRRRQETRTFGTTRRELLDLAAWLARWEVVKAGMEATGDYWKPVFFLLESRGLECELYNAGQVKALPGRPKTDRADSIWLAKITERGMISSSFVPPEPIRRLRTHTRYRRHLTQARTAEKQRVEKLLEDGHLKLSSVISDIHGVSGRDMLDALATGQRDPKALAQLARGSMRGKMGRLEEALDCSFFTDQHAAVLAMMLAAIDYHSTQITALTATIETLIAPYLHQVEQIDAVHGIGRISAQDIIAEIGTDMTVFPTTAHLVSWARWSPQVKQSAGKRKGSNSTGRGNPTSARPSAKQPWAPRSSPSPAARRRALPSASAGVGEGLGRHWQRSTTPCRFRPCPFACKQSAR

SEQ ID NO: 442592 - protein, 378 aa, unidentified
MTCKGRGRVAKLTRAMQYLTNTELSSPEETRRQFNGSKAVIKLGIDAHQEFYVVVMQEGGSNPKPPQRFAKEAFLYWAAKLKGRSEQVHAVYEACGFGFSLQRKLSALSINCYVVCPQKLDEQNRRVKTDGLDAKALCLKLDRFVQGNRDALAIVRVPTEEEEQLRAIHRQREQWVKARKQLEAQGRSLLVNHGLEPVQNWWKPRTFAALPVPQWMKELLQNSQPILLGLQERIAALTARLQSAAAPDQPRGLGKMTSVVIDREVGDWNRFNNRRQIASYTGLCPGEYSSGNTRLQSCVTKHGNPRLRAALVELAWRLVRFQPNYKPVLKWRAILAKGALATGAARKKAIVAVARQLAVDLWRIKTGRLCPEELGLIN

SEQ ID NO: 442593 - protein, 340 aa, unidentified
MDKLTTIAVDIAKRVFSVFWVDAESGEIGAKTMTRAKFEEFMRTREPSRVVLEAGGSAHYWARWLQRQGHEVRLIAAQHVRPFVRTNKTDAGDARAIWEAASRPEVKWVSVKSEASQAVLGLHRIRRQLIDMRRMQGNQLKALLYEFGVVAPVRVTAAQLEGWVAAGRVPRLIAARLGEQIERIGQLKREELALTKAITEHNADDALAKRLLAVPGIGPLGASALSAELTTGAKGYANARQYAVCKGIAPRLSGTGGKVRPGAISKRGDPYVRTLLIHGARSVIAHRRRAKRLSPWLSGLLERRPLNVAVVALANKMARTAWALAAHERTYQENYGAQAA

SEQ ID NO: 442594 - protein, 419 aa, unidentified
MFKIFRKNCCGLDVHKTWIYACIGITDTNGRTEYKQARFSSFSKGLRELDEWLTLYSCDEVCMESAGKYWIPVFNVLEKSRKVTLAHPKYTKPQKGNKTDRKDAKWICDLFMCDMVKPSFIPPPAIRHLRDLVRYLRKLTNMETGEKNRAQNCLTVSNLKLDDVFSDVFGKSALSITRHIIDHPGESFDVAPFVHRRCKTPIEEIQAAVDGAISPEQAVKLRQCLDHIEELEAHKESIVMEISRIVEPFSDTLSFLRTVPSFDSNPMTAVTVLSEIGSDMTVFPSAKNLCSWAGCCPRNDQSGGKVKSTRISRAGTYLKPLLVQVANALVKSKKHTEFGERYRRIKARRGHKKAIIAICRMLLTAIWNILKKHVSYTADGFRSERPENPSRILTTSQALQMLRARGYTIKDASSATAPA

SEQ ID NO: 442595 - protein, 371 aa, unidentified
MQEHSKFVGLDVHKETIAVSVAEAKGGEVRYMGEVPNTPEAVAKLVQRLRKEGESLSLCYEAGPCGYGLHRQLRELGQDCQVVAPSLIPKKSGDRVKTDRRDSLSLARLHRAGELTPVWVPDGAQEALRDLTRAREDMKHLQRQAKQRLQAFLLRHGKRYGGKSNWTQAHFRWMETLAFDHPVQQIVFQEYVDAVKVMTRRIEALDEQIAHAAAESVFCPVLEGLMALRGVSLITATTLVAEIGDLKRFTTAPQLMAYLGVVPSEHSSGPSKSRGGITKTGNGHVRRVLVEAAWTYHHPARKSAFLERRAERTPEAVQDIAWKAQKRLCTRFRRLEARGKLKVQVVTAIARELAGFVWAIGQAVPQPAARA

SEQ ID NO: 442596 - protein, 427 aa, unidentified
MTKSQDLKFNAIENTDAIVGIDIAKNVHWAGIILPNGKEIKKSFSFHNNKKGFESLVEIVKNVLTMLNFKKVIIGMEPTGHYWKSCARYLQKEDWIKVVTVNPKKVKDAKELDDNCQTKNDKKDCITIARLIKDARFFEPYLPERVWAELRNLSNTRAELVRKQNAVKNRLIATLDEYFPEYTKVFKQILSRTSEEILKRCPFPEDIKSLGKEELLKHIKETVKRGYSKKQVEKIYELAEESIGTTEGIKGAKFQLKVYIEEAEMLEKQIKMAEQELEEQLKETGFYESLLSIDGIGIVSAAMLVGEIGDINRFDSYEQIRRYAGLNLVENSSGNHKGKTTISKRGRGLLRSILYRMAFTMVNKNKEIKELYKYLTTRKENQLKKKQAMVAVIGKILQIIYAVVTKNEEYKAARVFTQERIVQLKAA

SEQ ID NO: 442597 - protein, 422 aa, unidentified
MTVRSVGIDLSITGAHRAEAIDETGQRCGDLSFRTTPEGLAALADLCFSGDSVPTIVLEPTGLVWLPIVLFLKARCPRSVIVRAKEQKVAALRRLLREHAKSDRIDALALARLPSVDPEHLEPIVLAGPEMQRLDRLSRRRDLLAASVGSRKARVSSFLMGIFPGLRECFEDSFSSRARWVYRHCLNPFLMERLAPGRLEDTFKKLTPNGTSAVIEREVTALLAVSRRLAALYRLSHGAKLVTEASFQAWTQEISMELELMEMEEKQISILEEQIDSTYRLVHPHDYLRTIPGIGDRVAPLLLAAVGDIMRFRDAKALCQWTGVIPRSHQSSHTRLKGMGMTMSIVDAPEVNWNFEVTRETIWRNIREIFNRLNIKVYIFNDRVEIRGHIPTEIIDVPQETTRPRREPIIYSGRGLGGWIRN

SEQ ID NO: 442598 - protein, 375 aa, unidentified
MNTIYIGVDFHARQQTICYLKTETGELVFHELKHQDKQQVQAFYAQFPGPVVVGLEASGYSPWFERLLEELGCEVWLGHATEIRRRARWRQKNDRRDAELILDLMLHDEFPRLHRPAVQSREVLRMLRYRQKLIKMRTMSKNSLQALAIQAGLARGSRLFTKEGQQQLSAAEMSPVMHWQREHWLQLIEPLNQQLLETMGWFKAQSKGDVCITRLRTHPGIGLLTSLCLVHSLQPVSRFGNSRKVAAYGGFDPVERSSAERKCFLGISKAGSRVLRYLLVEAVHTAVRKDEDLKRFYQRLAERRGRPKAKVAAARKLLIRAYIMLRDEIDYAEFRRRAVAARLARASHRPNVPESLIGQPASAERQEQLSRTKKK

SEQ ID NO: 442599 - protein, 341 aa, unidentified
MEQATTIGLDIAKHVFQVHGADGAGHVLFRKRITRVKLLGFLAAQARCVVAMEACAGAHYWAREIAKLGHHVRLIAPAYVKPFIKRQKNDAADAEAICEAAQRPTMRFVPVKTEEQQANGIVFRARDLLVRQRTQCVNALRGHLMEYGYVFPKGITHVETLVALVEDLQSSLPDSVRVILKLLVDTFTALESQITALDAEINQRSKSDPTARRLMTIPGVGPITSTAITALVPAAEGFPAGRDFAAWLGLTPLQKSTGGKQKLGAVSKRGERTIRRLLIIGASAVVQQTSRRGAPKGSWLAQMLARKPKMLVTVALANKMARIIWALLVKGGTYRTPAAAA

SEQ ID NO: 442600 - protein, 305 aa, unidentified
MFVGIDVSKDRLDIHVRPSGDAFGVMHDAEGITALVERLRELRPDLIVLEATGGLQTRVAATLAAANLPTAVVNPRQVRDFARAVGRLAKTDALDAEAIAHFAEAIKPEPRPLSDEESQTLQALVARRRQLVDMRTAEKNRRQQVKGAQLRKGLDDHLEWLAQAIAEIDQDIDDHIKRSPLWRAKEDLLVSVPGVGNTTARALIADLPELGSLSRRRIAALVGLAPFNRDSGKMRGKRSISGGRSSVRNSLYMATMAAVRWNPAIRTAYQRLVAAGKARMTAMVACMRKLLVILNAMMRDKTVWA

SEQ ID NO: 442601 - protein, 382 aa, unidentified
MAGTEPHAWGTGLMDDITYVGLDVHKATVCVAVAESGRGGEIRQVGVFENRPEILCKMAARLGKGGRRLSFCYEGGPCGYGLHRLLTGCGHSCIVVAPSLIPIKSGDRVKTDRRDAMMLAKLHRAGELTAIWIPDAAHEAIRDLVRARATAGQVLSKARQHLQGFLLRHDRIYRGVRAWTLAYRRWLTTVRFEHPAQQIVLQDYIHAVEDAEARRDRLTRQIEEMLPSWSMAPVVTALQAMRGVALVVAVTVVAEVGDFRRFANARQLMAYLGLVPSEHSSGSTIRRGGITKAGNALARRVLIEGAWTYRMTARVSRKLHDRLEPLSAAIRDIAWKAQVRLCARYRRLAAAGKPKVVVTTAIAREMVGFIWAIARIAQPALA

SEQ ID NO: 442602 - protein, 343 aa, unidentified
MQTVTTIRFDIAKSVFQVHGVDAGGDVVTRRQLKRRHVLAFFQKLPPCLVGIEACASSHYWSRELQVLGHTVRLMPPAYVKPYVKRQKNDATDAEAICEAVTRANMRFVPTKTPEQQSCLMLHRTRHLFIRQQTAVINSIRAHLAELGIVAPVGRKGVTELLHVVADPNDKRVPEVARACLAALGTQLLSLKQQILEFDRMIMAWHRSNQTSKRLHCIPGVGSMLATALVASVADPRTFRSGRNFSAWIGLVPKQHSSGGKDRLGSISKQGDRYLRGLFVAGALAVIRYAKIHGIKHRPWLTALLARRPAKVAAIALANKIARMAWAMMAKGERYQQPAALAA

SEQ ID NO: 442603 - protein, 319 aa, unidentified
MNTNTNQSITVGVDTGKTLLDIYIRPLDIYFSVTNDDDGIKKAIKEIKTHRPERIVIEATGRLEFAFAVACKKANLPISIINPAHIKKFAGAIGRLAKTDKLDAQLIAHYGEAIQPAESKLRPDTMQLMSDLLSRRKQLISMQTMEKNRLTILPKTLHKSVNALLKILMREIEKVDALMNEIIEDCPEYQAKNTIIQSMPGVGKVVAFSLLSNMPELGYITNKQASSLIGVAPINRESGTYQGQRKIKGGRHQIRTVMFMAMMSAMKCNPVFKSTYQRLVEQGKPKKVAIIACLRKMIVILNSMVRDGVMWDENMAKIQ

SEQ ID NO: 442604 - protein, 333 aa, unidentified
MNQKYCIGLDVHKGQTTYAVKNNKGVTVMEGECATQYKDISNNLSKYIDKSSVVMEACTSYYHLYENMKKNDIDVHVANVIQLRKCIGKNDKIDAERLADMYRLNALPESYIPPKEIQTLRIMINIYHNIVRESVRFQNQIGAVLDMKGEFSPVNDFSSKSGLLFLSQYLQKNNDFSVRYLYDEIADLNKKQEKIEIEIAGYIENNFAKEYELLTSIPGIGKILAAYLIAEICPIERFENKKKLRRYAGVIPIKEVSDKKVYATYLPKGSSRKLLRYALVMAANCASRFNNRLREYYLKKKKGSNHGHAIMCVASSLSDIVYHVLKTKQPYKK

SEQ ID NO: 442605 - protein, 473 aa, unidentified
MSKGSGTTRGDRRRNARRERLREMLPRDGAVIGIDLAEDKQAIAVVDHDVRVLARKTVKVKAFRLGEALDWAVGQARAKGFTHVTVACEPTGPRWLQVQRLCAERGLPLVCIQPLMSHIAREQQDYTTHKTDESDCVLIARLAVELHCYIPEELDETWAHLRHLGRRRAQLITSATASAQRIRDFLSVAWPAVTETCAQPLESVTWLAALQVVTARCGADPGRLAAMGVEAFTALVRSAVPGWGGKKGRGTICGRIFAALTGTEGVVVSSRRGLPRRCADEPGDLQRARAQRRAVEADMVAVLAELGLSRLADIPALTAVGAAAILAGTGDPRRYDSSSSVARHAGLSPSGNASGAFYGEAHISRRGRPGLRLAVWRAVWPMLRFNPVMAAKYQAMTSAADDAAQAAASQADAGSRQASAAAAAARARRARARVACAASLLRWIYSLVVHDTSWDPGIASGPASSQHTPAEAA

SEQ ID NO: 442606 - protein, 405 aa, unidentified
MNMLQKNESNVNKFVAIDLHRKNFFATIFNTETEKSSSFKIPFNRESIKNFASTLDKKTNVVIESTQGASLLYDFFSKFANKVIVANPSKLRVIFSSYKKSDKNDTENLLELLIADKVPEVYIMPKENREIWKLIKIRNSLTKTKTVLKNIIHSIIGSEGYNSPYSDLFGKKGKNFLISLPLSVNESWMIQELLPEIERIEEKIKKIDERITAFALDKKEIQLLMTIPGINIYGATAIFIKIGDISRFPTAEKLAAYFGVVPSTQSSDKKTRHGRITKAGCDIVRTILVNAGFYSVKGSKVIKNFYNGIAIRRGNNIARVAVARKLAKIIWAMLTRGKTFNEVNEESFKRKIKRFMHAYISGVIPSGNLLLQEILISNGYSIKDYKKEMEKEIFETFLSKSKEKT

SEQ ID NO: 442607 - protein, 343 aa, unidentified
MDHFAGLDVSVKDTSVCIVDDAGRIKREVKVASEPDALLTVLRNPAYRFKRIGLEAGPLSQWLFSALAEADLPVICVETRHMRAVLKAQINKTDRNDARGIAQMMRVGLYRPVHVKTLRSQKLRMLLTHRKLLQAQAIAIENDLRATLRNFGLKVGVVGAVKFETRVKELVDNFPDLAVLVEPLLIVRRVLREQINILHRRVLVAVRNDEVCRRLMTVPGVGPVVALTYRATVDVPARFRKSKSVGAVFGLTPARDQSGESDCPGAISRCGDEMMRTTLYEAAQVMLLRSAKWSWLKAWAMKIARHRGMKKAIVALARRLAVIMHRIWIDGTEFRWTREAAAV

SEQ ID NO: 442608 - protein, 413 aa, unidentified
METTFQTIFPRCAFLDVHKETLEATVRLLQGQRVQQETRRWGTMTGPLQAMADWLTAQGVTHVGMESTGVFWKPIYNILETRFTVVLTNPGHMKQVPGRKSDGRDSQWGAQLLQSGLLKGSFIPPRWQRELRDLTRYRSQLVAEQTRVANRLHKVLEDANIKLGSVATDILGLSGRAMIHALMEGEQDVAKLAEMAQGKLRTKLPELKLALEGRVTSHHRRMLRMLWKELAAVEEVIAEVDREVQEVTQPYTAQIEQMDGVPGIDRRTAEVVLAEVGPNVDPFPSDQDLSSWAGMCPGNEESAGKRRTGHTTKGNRWLRAALVQAAWAASHTKNSYLGAPYRRLVGRRGKNRALVAVGHSILVILFHMLKDGRPYSDLGRDFFDRVNHDRLIRYYSRRLAELGQKVTLEPLAA

SEQ ID NO: 442609 - protein, 336 aa, unidentified
MYSGIDLHSNNSVVAVIDEADRIVAQKRLPNDLTKVVGFLSRWKSELAGVVVESTYNWYWLVDGLQDAGFHVHLANTAAIKQYDGLKHSGDETDAHHLAHLLRLGILPTGTILPREQRAVRDLARKRMQLVQNRTMHILAVENIMTRQLGARMTSNQIKRLAAADIDTMPLSADVGLAIKANLAVIATLQEQIAVLEKRLQERVRPRAQYGLLTSVPGIGETLATVIILETGPIDRFAAVGHFASYARCVDSVRTSNRKKKGEGNVKNGNKYLAWAFVEAANFARRYCAEANRFHARKKAKTNNVVATKALAHKLARASYHILKEGKPFDVTRCFA

SEQ ID NO: 442610 - protein, 449 aa, unidentified
MSNGSGVSRGDRNRNARLGRLRELVPVMNAIVGIDLADKKQMVVVTDHDSRVLARRTFRCRAWDLGLALDWAGSQAASKGFAGATVSCEPTGHRWRVLGQLAADRGMPFVCVQPMLTSWARRSEDLTFDKTDEKDAVLIARLTAQLRCYVPEPVDEIWGRLRHLGARREQLIVETTSQVQQIRALLECVWPASLDAARQPFRSVTWAAAMSVIVERDGGDLARTRRLGLARLEALTGRLIVARGRRKPCRRIVRQLFTALSDPAGVLAHRPGALERVALLLQDWDHAQRRQADTEARMLTVLDELELTGLVTSITGLSAIGAAAILAETGDPHRFATARALVKHAGLAPREKLSGTFTGRTKLTGQGRPGLRLAAWRAVWGAQRSNPVYRARYQHLTSREQNKLRPTQAQTVVAAAILRQLYAVITSGQAWDPVIATHGKRHPVLPAAA

SEQ ID NO: 442611 - protein, 340 aa, unidentified
MKRTTIGIDIAKNVFEIYVEDGSNQVVARKRLSRKKMLPWFANHPPALVGLEACGGAHYWARELTKLGHEVRLIAPQYVKPWVQTNKSDAADARAICRAVQEPGMRYVGIATEAQQEVQALHRVRSRLLRNRTALVNQLHGLLLEYGVAVPQGRAALRKALATFLAEERGTPLLRQLLAEQQAELADWDHRLEAVTTRIEQEGAQQPVCQRLQTIPGIGPLSASALWVKLAGQAYQHGRHVAAALGLVPKHAGTGGKVRLGGMSKRGDRYLRSLLIHGARSVITHSREKQDPVSRWVRRLVERRGMNKAVVALANKNARVAFAVLSREQEYDATQVCRAA

SEQ ID NO: 442612 - protein, 356 aa, unidentified
MDQLTTVGIDLAKDVFAICVLDTTGAVLQRRVLRREAFMRWAEQLPRCRVAMEACGSSHHWGRWFSTRGHIARLIPAEFVKPFRPGGKNDAADAEAIAVAARQPTMRFVAIKSVDQQAILAWHSVRQGWQEERTALLNRTRGLLAEFGVVIARSADRFLRALPTLIEDTRLPDPVRAMLLEVREQLVALNLRLARCDQQITSHARSSDTARRASELLGVGPLTSSATAATVPDASVFRNGRQFGAWLGLTPRQHSSGGRTRLGHISLRGNVYLRTLLVQGARSTLQSALRADPAHASRLQRWIRQLHERKGYHKTLIAIANKHARMLWAMLAKGAHYDADAWQRHPMHRPLPPTAA

SEQ ID NO: 442613 - protein, 342 aa, unidentified
MTHYAGLDVSQKETTICIVDEQGRRLWRGTAPTDPEALTEVLRRHGHDLHVGVETGPLMPWLVHELRRRGLEVICLDARHAKAALAMQLNKTDRNDAEGLAQIVRTGWYRSVHVKSFEAHRLRALLGARRQLVGMTTQLSNHIRGILKVFGLVVGMAHGRSFSERVETLLADQPAVAGIVRPMLQVWRELKDQIARFDKAVRQEVRQRAECRLLMSVPGVGALSVLAYVSAIEHPERFRQSRNVGAHLGLTPRRYQSGEIDRSGRISKCGDELVRSYLFEAAGVLLTRVQRWSPLKAWAVRLVQRSGFNKARVALARKLAVILHAIWRTGEPFRWTNVEAAA

SEQ ID NO: 442614 - protein, 415 aa, unidentified
MKVVFTTCCGVDVHKTFVVATIITTPADSLQPHYQKKRFSTFNSDLNRFADWLLEHNCLDVCMESTGKYWVPVFNILEKRGIRVVIANPKWVRAVKGNKDDTKDSKWIGDLFRIGLVKSSFIPGLDIRILREFTRYRYKLVSMRSSEKNRFQNAFTVCNVALDSVVSDMFGKSATAITDYLTSDESFDPEHCVSLLQRSLKKKAEQVLESIEGFSIADEQKARIKIVREHYDFIEKMIAKVDTCVNEMVAKYEGEITLLCTIPGIDRNSAITIISEIGTNMGQFGSSKRLCCWAGLTPGNNESAGKKKSVRISRAGVYLKPALVQVAHAAVKDKTHPYYALKYERLVKRRGKKRAIIAIARMILTAIYSMFSTGEVWNPVDLFKIDMPEQLKEQQLAKAIKQATRFLEKQGLSVA

SEQ ID NO: 442615 - protein, 306 aa, unidentified
MKDNTKFVGLDVSKGKISVAIVDQGREKARYYGTISHTPEAIRKLVSKLGERENLLVCYEAGPTGYPLYRLFLSLGIECEVIAPSLIPQKSGDRVKTDKRDAVRLAQLFRAGELTSIYVPTPEDEALRDLVRAREDAKEDELRAKHRITKFLLRHEIRPPNKVGRNWSARYREWIYTLKFEFSCSRIVFQEYLQCLHEAEQRILRLEEEIQLQATEGVQAPMIQALQCLKGVAVVTATSLVAEIGSFKRFRNPKQFMAYTGLVPSESSSGDLRRQGGITKTGNRHVRRLLIESAWSYRYQPAVRDR

SEQ ID NO: 442616 - protein, 398 aa, unidentified
MPRTVDSLQPVGTVHPKTHPHNPRVDWIREKAPEHVPSKLLVEDRNSRNGRSLIGCDFHPSWQQVSWLNQETGETGDVKLAHEAGAADNFYRQFPTGSRIGLEATGNCQWFLELLAKLGHEVWIGDAAKIRASDARQQKHDKRDARLLLQLLAENRFPRIWVPSREQKDLRQLLMHRYKLVRMRAQVKNGLQHLAMNQGVLRKRKLWSRTGQQTLRELPLAPWASRRREDLFKMLSELDAKIKVLDEAVAVAAAQDARARLLMTQPGVGPITSMAFVLTLGDVSRFKRGKQVASYLGLIPREYSSGGHQRLGSIGKQGNRFLRMLLVEAAQSVVRHDESFRKEYVHRCHGKAKGVAKVAAARKLAIRLYGMLRSNTPHAGIVSSESRSRVPLVVPQAG

SEQ ID NO: 442617 - protein, 480 aa, unidentified
MATRAHPHPDLKAVPMLLNESLYIGIDIGKGKHVAGFLSQTLLERHERFEACPALVFENSREGFRLLIERIRSYSPLEHVFVLMERTGHYHRALEQYLQELDIPVYVMHVQSRPAGMLKTDKRDALTLANQLYSQLELGVQVANKVQLIRRLVPPTEAAAQLKGLIRHRYELIRESTQRKNKLTALCDEIFPELTRVVKDPNALVALALREKYPIPQALATASLTTLQQIRGGARSLSDAKLLELQRLAAQSIGTKDLARQRGLVLEQTQLIKELRLLREHVEQLETEIVSIVEHAREGQILLSFPGIGPVMAATTIAAVGSIHNFPSASALKSYFGWAPVVVQSGSTLDHSRLTRGGTRTMKQMLFLAVFQAIRLQDNEWAKLYDRLVKAKCPYDERTQSYVGKTRVIGRVAGQMTEAIYALLKRDAEILSKVLPGEVPPAPLLYDPEVHRKHRQGQYRPLKSTPLPNTITVLHPRSPE

SEQ ID NO: 442618 - protein, 348 aa, unidentified
MQVTTVGIDLAKNVFCVHGCDVNGKAVVRKQLSRRQLLNFVANLPPCLVAMEACAGAHYWAREIEKFGHQVRLIAPKFVRPYVKANKNDASDAAAICEAATRPSMRFVTIKSVAQQDVQAVHRVRQQLVKTGTGLANQVRGLLAEHGIVIGRGFAPLRRALPLLLEDRGNGLSAVMRELLGEIGERLRFIDDRLRKYDLTIHRLFRQDQRCQRVAAVEGVGPVTATALVAAVGNATEFRSGRELAAYLGLVPRHRASGGRTVLLGISKRGDRYLRTLLIHGARAALFRIERQRGARAIWAARLKLRRGANVAAVALANKNARLLWALLSSGQSYRSAPFSARVPQAGG

SEQ ID NO: 442619 - protein, 391 aa, unidentified
MIYIGIDVAKDKHDCFITNSDSEVLFKAFTIFNNLDGFNDLYQKIESVMDDVTKVKVGLEATGHYSYNLLGYLIDKGLPTYVINPLHTNLYRKSLSLRQTKTDKVDARTIASMLMSDVNLKSYSDTFYHNEELKSLTRYRFDKVKERAKLKTSVSRLVCILFPELEKLVPTLHMASVYALLSEFPSAKHVATAHLTRLTNLLSKSSKGRYGKDTAITFRDSARASIGSNMPAKSLELKHTIKLIQELDSEIDEIENEIKIIMDEINSPILSIPGINYRMGAMIIAEIGDFNRFDSPDKILAYAGFSPSTYQSGQLDGAYAHMEKRGSRYLRYALYNATKYVCHWDPTFAAYLAKKRAEGKHYNVAISHAVKKLVRVIYHLEKTKQQYIKAA

SEQ ID NO: 442620 - protein, 356 aa, unidentified
MSYDVKYIGMDVHKEAIVIAVQNESGKLVMESVIETKASSILQFLHGLRGELHVTWEEGTWAAWLYDLLQPQVQEVVVCNPRRNALLKEGSKSDKVDARKLAELLRTGMLRAVYHGENGLRTLRELGRSYQTISKDLTRVMNRLKALYRGWGIPCAGTQVYAARAREEWLSKIPQAGVRRRAELLYQQLDGLQALRREVRPEFLAESRKHKAAKLLRQIPCIGPIRAARLIALMQTPHRFRSKRQLWTYSGLGIATHDSAQFRFVSGQLQRSKKPQQIRGLNRNHNHEMKEIFKSAATRASCGMGPFHDFYAGLLTNGMKPEMARLTLARKIAAITLTLWKKEERFDAKQLKTQAA

SEQ ID NO: 442621 - protein, 362 aa, unidentified
MKQYIGCDVHKRYSVFVTMDESGQASRAVRVAHGNGELEGYLSSVPGGTPVAVETTGHWYWILDAMEKAGLEPHLAHALAAKRMMVSPNKTDKLDAKGLATLLRNGTLPEVWVPGGSLRDLRGLMRSRLALRRMGTGLKNRISSALARYGLPEQFRGDLFGKGEAATRCRQKSVAALPEYSRFATEQELDLLESVETCVTAVTEEISNSVGKLGWVRRLRTMPGVGEILGPTIYLEIGLVSRFPSPAHLAAYAGLVPRVSSSGGHTRLGRTRRECNRFLKWAFVEAAEVVVAHQESMSAKHVVRLYRRVKNNKPDRHGQAVVAVARHLAESAWHILEHNQDYREPQPTPGMIQRFHTTGRPL

SEQ ID NO: 442622 - protein, 366 aa, unidentified
MDRIYIGVDFHARQQTICYLKTETGELVISELQHQDKQKVRAFYQQFPGPVIVGLEASGYSPWFERLLEQLDCEVWLGHATEIRRRARWRQKNDRRDAELILDLMLHQEFPRLHRPAPASREVLRMLRYRQKLIKLRTMSKNSLQAIALQSGLAKGSGLFTKAGQQALSTAEMSPVMQWQREHWLQLLKPLNQQLLETMVWFKAQSKGDVGITRLRTHPGIGLLTSLCIRHTLQPVSRFRNTRKVAAYAGFDPVERSSAERKCFLGISKAGSRLLRYLLVEAAQTAVRKDEDLKRFYKRLAERRGRPKAKVAAARKLLIRAYIMLRDEIDYAEFRRRAVAARLARRGQGPTNVPEVLIGQPTSPAP

SEQ ID NO: 442623 - protein, 339 aa, unidentified
MKAYAGIDLHSSNNFTAVIDDQDQRLYGRRLPNTMDAVVSALQPFREHLKGVVVESTFNWYWLVDGLQAHGYKLHLANPSAIKQYEGLKHTDDRWDSFWLAHMLRLNILPEGYIYPKEERPVRDLLRRRLLFVKHRTSHILSLQSMISRNIGTNMSCYAIKRLDQEAAESLFTSPHSILAANSNIAVIHFLKERINLIEKAVRSRIKLRDEFKYLLTVPGIGDILALTIMLEVGDIARFPTVGDYSSYCRCVKSERLSNGKKKDENNRKNGNRYLAWAYVEAAHFATRFSPHAQAFYQRKMAKRNGIVAIKALSNKLARASYYIMRDQVPYDPERLFSQ

SEQ ID NO: 442624 - protein, 353 aa, unidentified
MSISTIGLDIAKSVFQLHGIDASGKAQLKRKLRRSELIAFFERQPRCTVVMEACGAAHHWARVPGGLGHEVKLIAPEAVRPFVKRGKRNDATDAAAICAAAARPDARFVAVKGLEQQGVLALHSARALLVKQQAMLADAMRGLAAEFGLVVPKGMGRLEELVALVEGDGTFPERARGVFAGLLGQRRATAGRIEDLEAEIVAHARGDDAARRLATVPGIGPITASLLAATVGDGIGDFKSARHFAAWLGLVPRQRPTGGRTVGGMPPTGRITKAGNREIRKLLVLGATSMVYRAEHWNSAAGARVRGLLERRPVRLATAALANKMARVAWALMARKEVYRAKGGVAAAAEAAA

SEQ ID NO: 442625 - protein, 316 aa, unidentified
MEHQQGVWVGVDVSKSELVVAVRPGGEFFTLANDERGVAQLSKRLSALGCTRIVMEPTGGYEAAVAAALWAQGLPVFVVNARWIREFARGLGQLAKTDALDARILALYAERAELEPRELPNEQTRELRALLLRRAELVEMLVMEKNRLEHAPQRLRRELNGHIDYLTKRLKRLDHDLDQMVKSSPLWREKSALLSSMPGVGPVLRASLLGQLPELGRLNRGEVASLVGVAPFPHDSGKLRGVRAIAGGRAALRRTLYMGALSAIVHNPPLRRYYFHLRDKGKPGKVALVAVMRKLLCILNVMLKTKTPWSPPCPAA

SEQ ID NO: 442626 - protein, 365 aa, unidentified
MQQLSMAPVARVGVDLSKRLYQVHAIDRSGHVVVAKPLSADRFFAWCTELPAGCLIAMEACGGAHHVARRLRLLGIDVRLIAGHFVTPYRMAGKSGKNDANDAAAICEAAGRPQMRFVPVKTADQQGHLAVHRLREGYKVERTALINRIRGLLTEFGLVFPQSPEALRKVLTDVLEDASNELTGVSRLALQRAHLHWANLDLEMKWCDERITAHVRSDAQATKAATLHGIGPIGASALVAAVGDFSQFANARQFGAWLGLVPSQKSTGGKASLGPITKRGDDYLRTLLIQGAKSAVMTAGKRSDRISHWLVQLKLRVGWQKAVVALANKNARILWAVLTRDQAFDPMHVPPVPMARRGPQAQPAG

SEQ ID NO: 442627 - protein, 361 aa, unidentified
MQSTTIIAFDQHAATTVAAVLLPNHRTPVLHTLTSDTATILRFVGRVQRQGPVVCCYEAGPCGFELQRGLSAHEIPCDVIAPALIPRRAGDRIKTDRRDAGQLAVLYRAGALTAIHVPTEQEEAARDLLRCREDIKTDLLRARHRLSKFLLRHGRRFTATKTAWGTRHQTWLRGQTWPIPALDQTHAAYRRAVDEAVERLRAVELDLRTLLDLEPLRPRVQRLRCFRGIDDLTALTIAAELGDARRFGSAPRAMAFVGLVPSEHSSGTKRARGAITKTGNAHLRRVLVEAAWHARHRPFVGRVLRRRQQGAPATVIAQAWTAQQRLYRRYQRLAARGKPSQHIITAVARELTGFVWAALIQ

SEQ ID NO: 442628 - protein, 403 aa, unidentified
MFNAVGIDVSKGKSTVSVLQPGGVIVRKPFDVEHSSSGLKALTDYVLSLGGDTRAVLECTGRYHEPVLRSLSGAGVFVSAVNPHLIRNFGNNSIRKVKSDPADSKKIARYALDNWADLQEYRIMDNTRAKLKTLNAQLDFFTKQKASAKINLISLLDMTYPGVNELFTSPARSDGSEKWIDYASSFWHVDCVRKIGLKAFTERYKAFCKREGYNYSDSRAKELFEASKELVAVFPKEQSYKDLIEMSIRQLRVITESTVRIKNEMNELASTLPEYATVMSMCGVGPALGPQLIAEIGDVSRFTHREAITAYAGVDPGVDQSGKRSVKSNRASKCGSARLRKTLFLIMTILLQTKPDDPVFHFLDRKRSEGKQYNVYMTAGANKFLRIYYGKVKAALAAQTVQE

SEQ ID NO: 442629 - protein, 361 aa, unidentified
METFSPHFKELAMKQVTYVGMDVHKKSITAVFGPARTKSESMKVSNDPKGWNRLADRLKAFDVQAVYEASSCAFEVYDEMTAREWSVVVVAPSLMPKSAKERKNKTDLKDAIELRSRLVAARVAGATLPTVWIPPVELREDRELVRRRLGLGESVCRIKTKILSLLQMHKVRDPGKSEWTQGHLKWLAGLCGGKGKLGAPVKRALESLLRELQFLVEEQKRLEKELESLAGEPRHQAQVEELRKVKGVGMLTAMTFLTELGDVRRFGNRRRLANYLGLTPSSYESGEATDRKGHITRQGPPRIRKVLNQAAWSHIRWHPETKRRFGKLAKRRGVKKAIVAVMRGLGIELWHRACAVIESAA

SEQ ID NO: 442630 - protein, 341 aa, unidentified
MKELYYIGLDVHKKHVSYVIKTSTGQLAGSGEVEATRAALSEWARAIDRPWIAALEATLFSSWIYDHLLPLAEQIQVAHPAMLEAITCSKKKNDRLDADKICDLLRCELLPQCYLAPREIRELRRVLRYRNLLVREAVRMKNKISGLLMEVGEPYNAAKLHRKKYFYPYLDTLQDTPESVKELLLISRTSLELFARLQRRLLRGLERHPLLKQRVERLQSIRGVGEVLALSWALEIAEVKRFSSLAQAVSYCGLCAAQRESGGKSYRGPLSKQRNKHLQRALIEVAKLAPHYNPRLRQVRDRELERGHRNRATLAVARKLVAYLLAVDRSGQPFVEESQAA

SEQ ID NO: 442631 - protein, 374 aa, unidentified
MKNVCGLDVHKDSIFMCIIKENGDKIEEKFGVLTPELDRLRDLLVYHSVGDIAMESTSIYWIPIWRVLYSDFNIKLVNPYFIKQLPGRKSDVKDAHWIATVLQKELIKGSFIPEPIIQELRLYDRRIFYLNRSLQHAEQNIDLILQRCNIRLSNYVSDIGGKSMQKVIDAIIEGTTDPNILLLLVHKRTRNKHGDEAIMAALTGVISKTDCMMLKLSREETCMYERQIEECYVEMNSICQTHFSQEIELLQTIPGIKKDSAMRIVAEIGVDMKAFITASAMVGWAGLKPRNEESAGKIKGRKILHGNKYLRILLVQCAWAACRTKGSRFFYKYQTLSKRMNHNKALLANARKILVIIWNILSKKQPFTTTYIAA

SEQ ID NO: 442632 - protein, 343 aa, unidentified
MEYFAGLDVSVKDTSVCIVDDAGKIVREVKVASEPEALLAVLTNPAYPFKRIGLEAGPLSQWLFSVLAEAGLPAICVETGHMRAALKAQINKTDRNDARGIAQMMRAGLYRPVHVKTLRSQKLRMLLTHRKLLQSKAIAIENDLRATLRNFGLKVGVVGTVKFEARIKELVENLSDLVVLVEPLLIVRRAIREQIGILHRRLLAIVRDDDVCRRLMTIPGVGPVVALTYRATVDVPSRFKNSKAVGAVFGLTPSKYQSGEIDRTGGISRCGDEMMRAMLYEAAHILLVRTTKWSWLRAWAMTIARRRGLKKAVVALARRLAVIMHRIWTDGTEFRWTRETVVA

SEQ ID NO: 442633 - protein, 318 aa, unidentified
MKFKDVVGIDVSKSTLDACLHSLEINGCFNNTKAGYRKLILWATKNTGLSIDKILICFEHTGLYSFQLASYLAEKQLNFIIVPGMEIKRSMGIQRGKNDKVDAQKIALYAFRRKDEITPYQMPEKSLTKLKQLLSLREKLVKQRAGYQATLKEQSKFLNKSENKLLFSIPEKLIRQLNKQINILEQEVDLLLEESPEIKKIYELIISITGIGRQTALYIIVITNNFLLFENHRKLASYAGVAPFPYVSGVSIKGKTKVSNLANKRLKSLLSSCAISAICNDPEMRLYYKQRTEKGIHKMNTINVVRNKLLARVFAVVR

SEQ ID NO: 442634 - protein, 340 aa, unidentified
MFTNFVGIDVSKSKFDLALIKGQNKDHVIQGVFDNTHKGIKTMSKFLEKEHQVRLSETIFCMEFTGVYCRPLTSFFVEQDCHVWIEMPVNIIRSLGLQRGKNDRVDAHRIALYAYKNRDDIKLWKPQRDIILQLRDLLALRDRLITSQKALTNPIEELIAMGAKNAAANVRKNCQKTLSAIENEIGQIEKNLDDIIKDDPQLKELFRLATSVPGVGKLTALFMICFTNEFSMYTNPKQLACYCGVAPFEHSSGTSVRGRTRVSHMANKVLKRMLHMGAMSVISRDPELRDYYQRKVAQGKNKMLVINAVRNKIINRLCAVIKRGYGYQSEIIFRERLVLS

SEQ ID NO: 442635 - protein, 388 aa, unidentified
MQTAADHPEAPTAIRHDLGAIFISLELSRSTWLITSLSPGGGEKMSKHSVRGGNVAGLLERFAQLQEKARARTGRTFPIIVIQEAGLDGFWIHRVLQNEGIESHVVDPASVATSRRRRRAKTDRIDGEALLRTLLAYKRGEPRVCAMVKAPTPEEEDRRRLCRERKVLTNERVQHVNRIKGLLFGQGVSGYEPLRRNRRQQLNELRTGDGRPLPKHLKTQISRELDRLELLLEQIKAVETERDALLGAQKVARPGPAAMLLDFNGIGPEFTAVLWSEGLFRHFDNRRQVASYAGLAPTPWQSGSVDHEQGVSKAGNPRLRTTLIQLAWLWLRHQPQSALALWFKERVARNGGRHKKTTIVALARKLLVALWKYVTAGVVIEGAVMKTA

SEQ ID NO: 442636 - protein, 346 aa, unidentified
MNMFIGLDVSLASTAACIIDERGKVMKESKVDSEPEALTAFLRGLSGSVMAVGLEAGPLSQWLHRHLTEAGFEVVLMETRQVKGALKAMPIKTDRRDAEGIARLLQMGWFRPVHCKSISAQEMRAVLTARKAVQKAALDIELSLRGVLRNFGLKMGKVSRGRYEARVRDLAVGNAMLETMSEALLRVRAGLRAELAGLERRLRDLAKEDAACRLMMTMPGVGPVVALTVKSAIDDPGRFRSSKDVGPWAGLTPGRYQSGEVDIVGAITRAGDVGLRTALYQAATVMMHRGKQSWLKAWGLQVARRRGTKRAVVAMARRIGVILHRMWTDGTEFRFTRSDAPNRAVA

SEQ ID NO: 442637 - protein, 386 aa, unidentified
MFYVGIDIAKNKHDLACIDETGEAVITNFRFANSYQGFHQLKLKLKQLSPITQDVQIALESTGHYSYNIMAFLRELGYKIFAYNPFIIKQFAKSQSLRKTKTDRKDALLIARKLRSDVTPEYYQTDDKSMEELKELTRYQNRLIQSRSKCKNLYIRLLDIIFPELHGIVSNLHNHFIYDLLTKYPSPQKIARAHFSSLLSIKRLTTDRAKQIQETAKQTIGNASPALSLELVQLIESIKHYDKQISQVQEEMNLLMAELDSPITSIPGIGSRLGAIILAEIKTIHNFKNPNQLQAFAGLDPAIYQSGQMDNTGHMVKRGSSYLRYALIQAAKLISMYSPHFKAYLRLKISQGKHYNVAVTHVAKKLTRIIYHLLKTNQIFDEAKLR

SEQ ID NO: 442638 - protein, 352 aa, unidentified
MSQPDNSKEETKMKLYAAIDLHSDNNVTVVIDEQDQVVYQKRLANDVAMIVEQLSVYRASLQGIVVESTYNWYWLVDGLMEQGYKVHLANTAAIQQYEGLKYTDDHSDARWLAHVLRLGVLPEGYIYPRADRPVRDLLRKRSQLVRQRTTNLLSIQNLMTRNTGSSLSANEIKGLDVQQVDELLPNGELALAVKANLSVMCGADEQTKILERTVTQRVKLSPQFSFLKTVPGIGQILALTIMLETGDIRRFSNVGNFASYCRCVGSQKISNGKKKGQGNTKNGNKYLAWAFVEAANFAIRFNAKIKSFYQRKKAKTKGVVAIKAVAHKLCRACYYIMRDHVAFDVTKAFGQK

SEQ ID NO: 442639 - protein, 399 aa, unidentified
MAQPILWAGVDAGKAAHHCVAINADGHRVLSKRVINDESALLDLIRAVTELADGRVVQWAIDLNSGGAALLITLLLNHNQDLLYIPGRTVHHASGAYRGDGKTDAKDAAIIADQARMRKDLHPFRHRDKTTVDLRTLCARRTDLASDRNRAINRLRAQLLEYFPALERAFDFAHRRAALILLTGYQTPNALRRIGAARLEKWLRDRHAYNAGDIADRAIAAANSQRTVVIGQDVAATVVARLARNVLDLNDELADVDALIEAKFQQHRLAPIITSMPGFGSLLGAELLAATNGDLTSFTSADRLAGIAGLAPVPRDSGRITGNLKRPRRYDRRLLRVFYLAANNSIKTSPESRNYYDRKRSQGKRHSQAVLCLARRRLNVLWAMQRDNLSYQPGMPRAA

SEQ ID NO: 442640 - protein, 369 aa, unidentified
MTMTSMKITVIGGIDTHKHTHHASAIDTEGRFLGHEEFAANDDGYQQLLVWMRSHGTIGSIGVESTGSFGAALTRFLTAAGVEVIEVNQPNRLARRMDGKSDRLDSEHIARAVLARTSTAIPKSKSGIVEAIRTLRVTRTSAVKARTQTFNTLWGIMIGAPSPLRDDLVVLTKRTLVNRCLRLRPETTELLSLAGQPERMLIASVKASLRDLARRWKALDEEIKALNANIAALVRAAAPDLLELHGVGVEIAGQFLVTAGDNPERIHSEAAFAKLCGVAPQPASSGRTTGRHRLSRSGDRAANSALYIITIVRMRHHEPTRAYVERRTAEGRTKREIIRCLKRYIAREIYKNLPRASPPPASNNLRHAA

SEQ ID NO: 442641 - protein, 363 aa, unidentified
MQTCEKARTLFVGVDVHKDTHTAVGLSPFGEKMFELTVGNYPHHFEELAEKVRQTAQTSNLSPRIGLEDCRGFGNRLASYLDKVGHSVVHVAPILVDHKRKKAAHPEKNDSLDAQGVAEVMIQKIDTLPIHKITQDSEIAKDIQELSLDREYLVKEQTRLKNQLHLLLHRIWNTEYREKFKDPFSVKALKYWKRSVPKSTSPFLAKNTKRKVKKLENLRTEIKELESDMEALIEKSGDTIRTANGCGIVLAAMIIGEIGDITRFKSPATLAKYAGCAPREHSSGKTYRHRKTRSGNRRLNCAFHRLALTQISRMGNKKAKTYFLRKISEGRSKQQALVCLRRQIVNIIWMMMKHKTNYNLQKN

SEQ ID NO: 442642 - protein, 526 aa, unidentified
MAKSKRNKRRQHIQKVKGRRFTDEIRNLNLEKVLIIPIDAGKNSHKALVANYFGDILYDSFEFANSITGVKMFDSIIQDVSSSINAQKVVLGIESTGHYYENLYRSLITLGYDVAIVNPCSVYAQRTGQLNWCKTDDIDLCAIGQVLIDNQATETKLAEGLYYNLKHLARLRRDEVTKRARLKIQIKTLCDHIFPGLQKSKIFSDFWGKASMLLLENYPTPNSIIRLGVKRLARFFKKHNTKLGLTTAQRLINLAQNSLTSEVSNIYAHLFNLKFKIADLRSADEKIRKLNVELAQHLVKTPGILLLSIRKINVPSAAEFLGEVGPLSQAGNAKKIIARAGLNPSRFQTAEYERADNPITKGGSNPLRNASLTIAHNLVGDDPHLVNKPANPYFRGFFDHLVNDEGKDKRLAKVACANKFIRIAWAMMTQKKLFCPPTWNQDRVADDPLAKLEKFLIENNAKDILEDAVHIAKEQLPVNYSSYVQQKENDIDSPVSSLTFEQERDPVTFPGPISSSLELEEVKPVV

SEQ ID NO: 442643 - protein, 365 aa, unidentified
MNFIGADLHKKSITLCVMDERLKILARKTVPCGQPDQIVESFRQFLPFKVVVEATASYLWFVELLEPLAEEIVLANPKKLRVIAESTKKTDRLDAQVLAEFLARDMIPRAYMPTPRQRQHRALVRHRQYLRGRMTSVRCKIRHVLADYNADRKDLFSARCGKSYFKQVALSDADGFVLKQLWSEWEDHQARLLATTRKIKAFIAKAPAREKEARAILKSAPGVGFVTAEVVLSEIGDVSRFGNAKKVCAYAGLVPAVRQTGGKKSKDLHITKQGSGLLRWALVESAWRLVKSSPKWSALYSRLRKRCGSKRAIVAVARKLLCVLYAMLKTSTPYKIIPAATPAEPPEPTRKRLVRVSTAAQAVTP

SEQ ID NO: 442644 - protein, 346 aa, unidentified
MKQIIRIGMDTSKYIFQVHGVDAAEQPVLRRRLGRKQMLEFFARLSPTVIGMEACGAAHYWARELCKLGHEVKLMAPQLVKPYVARNKNDGRDAEALCEAMSRPSMRFVPVKTAEQQAALMLTGIRDGLIARRTQLSNAIRGYAAEFGLITPKGLDKIEPLLARMAQDESLPKLARELFAVQGREYARLQAELKAVEAKLLAWHRADALSRRLAQIPAIGPIIATTLVMKTPDPRVFRSGRHFAAWLGLTPRDHSTAGKTRLGKITRAGDEILRRLLVVGATAVIQQARRGRGHPSRWLLALLKRKPPKLAAVALANKIARIAWKLMATGECYDASRLNAVPALTG

SEQ ID NO: 442645 - protein, 388 aa, unidentified
MALSSISRISDQEKKRGDIYHFMLLNNHRMEKILKQVLGVDVDQKNLVVTLGRLTEDLTVELYAHKVFANNKKGFLSLLKWVNSLTDRSISFQIVMEATGVYHESFAYFLDEKGYALSVVLPNKISNYMRTLDIRTVTDKSCSQAIARFGLERKLDCWKRPKKIYKRLQQLTRERAQIIDERTMVKNQLHAEKAEAGPNKNSLKRLESRIKFLKKQDAEIMKELNGYLKEDGTLAQQVKRITTIPGVGELTAMTVLAETNGFELIRNKRQLTSYAGLDVKEKLSGTSVHKKPKISKQGNRNLRKAMYFPAITAIKHNTNQKDLYERVTNKNGIKMKGLVAVQRKLLELIYTIYKNETVFDPEYENSVTTKKAVHAIQTGSKAVLEIQI

SEQ ID NO: 442646 - protein, 501 aa, unidentified
MVLDLVTNLLMERGIIANLPRLEDYDFHDQGRHTIPRSRYVMAKTKKPKPKTSIDFPVINAHAAGVDVGATQIYVAVPPDHYEPEVRVFQTFTEDLRDAAAWLLECQIKTVAMESTSVYWIPFFQILEEEGIEVCLVNARHVKNVPAAFKTDRRDSRWLRNLHAVGLLNASFRPEQDVCVVRSVARHRDNLTQAASKHVLHMQKALNQMNIRLHDVISDITGVSGLAVLDAIVSGERNAERLTQLCNSRIKAHPEIIQKSLVGDFRAEHLLTLKQSLASWRHFQQQISECDEEITQLLSAFAPVEDPPDPPARPKRYKRAQPAQTKRTTDTQRDMRDQMIKLFGVDLCRIPGLSVATVQLIFTEVGRDFSRFHTEHHFSSWLGLSPDNSSSGGKILSRRTRRTVNRLASALRLAANTLKRTSCALGAYLRKMKSRLGAPKGITATAHKLARIIYTLVTTRREYDESVFAKHEGRYQEKRLNSLMKEAAALGYEFVKRECVS

SEQ ID NO: 442647 - protein, 351 aa, unidentified
MSRRSSPSTIATIGIDIGKNTFHLIGLDQPGNIVLHLKTSREQLERRLANVPRCLIGMEACSGAHHIGRQLEALGHDVRLIPAQYVKPFLKGHKNDYRDAEAIAEAVQRPTMHFVRIKTPDQMDLLALHRVRSRLVSQRTGVMNQIRGFLIERGITVRQGPAPLRKALSDILSSSSPALSPRLVRLIVDLADDWRRLDERIATVSAEIEALAEQDGHCQRLMTVPGIGPIISSAVVAAIGNGTGFKQGRSFGAWLGLVPKQESTGDRTILGKISKRGNKYLRTLFVQAAHVVLVRRPSAAMRSLWPWIERASKRLHRNMLAIALANKLARIAWAVLARGHDYQPKTMTHAV

SEQ ID NO: 442648 - protein, 346 aa, unidentified
MKHYAGLDVSVKETTVCIVDEGGRICREMKVASHPDDLAEALKNPAWNLARIGLEAGPLSQWLFSGLAGAGLPAICIETRHAKAFLKAQVNKTDRNDARGIAQMMRVNLFRPVHVKTLMSQKRRALLTARKLLQEKAIAIENDIRGLLRNFGLKVGIVGVGKFADRIRDLSGDIPELRDIMEALLAARQRLREQFTVLHERLLSIVKGDTVCRRLMTVPGVGPIVALAFNATVDIPARFRNSKAVGPSLGLTPRLHQSGEDNRVGRVSLCGDAMMRTLLYEAAQVLLTVVKKWSWLKAWAMNVAKRRGRQRATVALARRLAVIMHRIWSDGSEFRWARENTAAVKL

SEQ ID NO: 442649 - protein, 346 aa, unidentified
MHYIGMDAHISSLDFAVINDTGRLVKASKVTTSVNNFMDFVRQITPPRIVYMEEGTLAAWAVEVCSRFGEKIVVTNPKENHWIGLSGQKNDPLDALKLARLARGGYFKEVHHPLGERRRFRELMEAYHDAVQSTTRIKNKIKAKFAQNGIACSGSTVYIKSHRKEWKEKLPQNTTIQLILEGLWRQLEQSEQTENDLLAEAKAQAKQYPEVKRFKALPGIGFIHAATISSILETPHRFANKRKVWMYAGLGLMQRSSGGKLSSEKLTTDYNRLLKCTLIQAAEAAIRTKDNPFRQKYLDMTLLRAVPPHRARLTVARQMLATLWAMWKKGEKYNPKLRCNLACKQN

SEQ ID NO: 442650 - protein, 365 aa, unidentified
MKFIGIDLHSNCFTVFIICGNGKKVKESYSLDDDSIRRFGKKLDKGSYVMLEASTNSFKFAELIKPLAKEVIIANPYKLKLISMTNKKTDHVDAEKLAIYLKMQVVSKEKLINPVYIPEQNIQELRSLFCTYKLLRKHIGATKNRIHSVLRQNLHPFTKQFIFGKKNRSQILNLELEPGIKFQLKFLFCELEHMENSIQEIEDRIHIVGSNYMREIDILTSMKGISVFTAIAIIADIATVKRFPNSKHFTSYLRSAPGVDSSNETTHITKTNKIGRKLSITLIAQSLNHFRDNNAKLNRWYNKKVENKSRGKVRMALCRRVFAEIYQMLKKGEYHYYRNELNHAGKMNEYCKFLDANGIKYKKSA

SEQ ID NO: 442651 - protein, 358 aa, unidentified
MNRIVRIGVDLAKNVMQLHGVDVAERVVIRKAVTREKFLEWFANLEPCLVAMEACTASHFWARRLREYGHDVRLIPPQFAAPYRKGGSSVKNDALDAEAICEAASRPHMRYVPIKTPAQQGALVLHRMRQGLIEERTALVNRLRGLVAEFGIFLPQGIHRFRERFAESVEDGGNELPGLTRVALLRGWTRIVELDAEIDWFDKQVAQHAKNDPNARRVTEMFGVGLITASAASATVGDGRQFRNGRQFASWLGLVPKQNSSGGKERLGRITKQGDAYLRTLLFQCARVTLTAARRRQDRLAQWVTQLVERVGYGKALIAIANKHARVLWAILAKGQRFDPAHDGRSAGLQRNEAPIAS

SEQ ID NO: 442652 - protein, 452 aa, unidentified
MKDQTKKKSAATNDQFQLAIINQQSGAIDVGSTMMMISYTDSEGQHHIIEACAYTDDLESVAIRLQEAGVGKVAMEATGVYWMVLYELLERYGIEVTLVNPKHFKNVAGQKTDVIDCQWLHQLHTYGLLRASHIAPDIYRELRSYIHERNTFQKYKSDTLNRIHKVLTQMNIKVQHLLSDIEGVSAMIILRAIVNGMKNPEDLLSLIDVTKLKADKADLIKSLKGIYKESYVHILKQTLKSYDFFKSQMKEYEILIESILKRMLPDDIKTEIKKKKSHVRKNQYSINIKEYLKHITGIDLTRIDGLDEISILEVISVTGLNVNKWPSSDHFASWLNLSPRQKISGGKLIGYQKRFTNNQATQSFRMAAQTMWQNKGPLGQLYRRLSYQKGSKKAIKAVARKLAVIFYHMLKNKQEYNQSRLQTDTEKQQHIRIARLKKEAAKYGYVLQNTAA

SEQ ID NO: 442653 - protein, 343 aa, unidentified
MAQPTIVGIDLGKNWFHLVGVNDDGAIVFRKRMNRAQLSQFATTTPRCIVATESCPGSQYWGRVFAGAGHEVRILPAQFVKPYLKSNKNDFNDAAAIAEAAARGSMRYVPLKTTEQLELQALHRVRRRFIVERTAVINQMRALLLEHGIVVPVGRAAFVHRLPGVLADANERLSPRLSLLLHRLRQRWLALDVEITQATRDLTEWAEQSPLCRRAATVPGIGPVIATAVVAAVGDGRMFVRGRDMAAWLGLVPRQHSTGGKPTLGAISKRGNTYVRELFIQGAQSSFVHLKRDQSSLGHWLRQLEARRQRQVAVVALANKMVRICWKILTSEETFQPYPARVT

SEQ ID NO: 442654 - protein, 340 aa, unidentified
MKTVYAGIDLHSNNSVVVVTDAEDAVVYRKRLRNELDAVLGALSLFADAVAGVVVESTYNWYWLVDGLMDHGYRVHLANTGAIQQYSGLKYANDASDARWLANLLRLDILPEGYIYPKQERPVRDLARKRGGLVRQRTANVLSIQNLLARNTGRSMSASGVKRLTDEDVDGMLGGEDLALAVKSTLAVLRCIGEQIAILEATILKRVRLRDGFRHLLSVRGIGPILALTIMLETGDIARFPSVGDFASYARCVGSAHISNGKKKGKGNTKNGNKYLGWAFIEAANFAIRYDERIQRYYQRKCAAGKHLLVAKKSVAHKLARACYHILCDQTVFDVTRAFA

SEQ ID NO: 442655 - protein, 370 aa, unidentified
MSGFERLLDYAETIKTKHALGKIVFGLEPTANYHKPLAEYLIKCGYNVVFVSGVAVVRNRQSLDGRWDKNDDKDSANIADLISQGKCQYYDHAPKAIRDLRNLLSLKRRLKKQEHGTTVRIRNNLLAQYFPEFDKYFGKGCSESLAIVKWCLKPSKIWNMEFDEFVHLVAPRIRTIGQEKRLREIWDLAIESIGCEAGEELDFEARFMIEDLQQIRESLKKVDEQIEDVCLGFPEYKCLLSIPGFGPDVSSNVIAAIGDSFRFENGRQVLKLAGFDLNAARSGNTSDKAVPVISKKGKAPLRYALYQAALIASIRNKDFMVYYANKLRGREREKGIKTKMLVKLAAKMLIIAWTLMKRKEPFDPEYLNIA

SEQ ID NO: 442656 - protein, 346 aa, unidentified
MDKFDPCGIEVSAQELVVALSRDGRAERLRSFPNTAEGHAALLRYLHSGSQRVRVALESTGLYGLDLAYALHRDAQIEVMVANPRAVRHFASALMQRSKNDRLDAEVLREFAARMPFQAWVAPSAHCFALCAVTRRLETLTEQSTAEKNRLHAASLSVAFPPAVRRDLQRSLRSIQRALARLTREAQRILEQDPLLNSSYHLLLTAKGIGPTSALRLLAETALLSEDLDVRQWVAYAGLDPREYQSGSSVHKKVRISKTGNRHLRRALYMPALVAVRHEPHLRAFYQHLLAQGKCKMQALVAAMRKLLHAVYGMLKHRQPYDGAKLYRLAENLYAPSSGHCSAEAA

SEQ ID NO: 442657 - protein, 401 aa, unidentified
MNAQPFGSGLAARVAGWVPKWIRYRCAQGVIDHGLHKHHRRPEMNRKTGMSAGQIMGMIDGMQVVGLDIAKLVFQMHTVDMATGEIVNVQIKRSKMLEHFANRAPCVIGMEACGGAHHWARELGGLGHEVRLLHAKAVRPFVSGNKTDAADARAIWLAVQQPGTKCVGVKSLSQQATLTLHRQRELLMKMRVMQTHALRGLLYEFGAVFAKGTKAMLGEVEAALESLSTKLPQMVLESLREQVARIKALGEDMAAIEKRLALQLRQDEAMRRIAEIPGVGVLTATAAIATMGDAHAFGSAREFCAWLGLVPKQWGTGGKVRLQGISKRGDAYVRTLLIHGARSVLMHAKEPGPWLEQIRARRPANVVIVAQAAKMARTIWAVTARQQPYQRGYRSVRPEAA

SEQ ID NO: 442658 - protein, 396 aa, unidentified
MELMDERGRVLARARLPEGVAGMARLHELIGEQLGEDADDAEVVIGTETDRGPWVAALVAAGYTVYGVNPLQASRYRERHGVSGAKSDRGDAHMLTDMVRTDSHQLRAVAGDSPGAGAVKVVARTHKTLIWERTRQVQRLRHQLREYFPAALEAFEDLDAPDALELLGKAPDPAKAAKLTRAQISAALKRARRRDIPGKATAILAALRSAQLGQPPAVTAAYAVTVRSLVAVITVLNEQVKTLQRQVEADFGRHPDAEIYLSQPGLGPVLGARVLGEFGDDPHRYASGKARKNYAGTSPLTRASGKKKMVMARFIRNDRLIDALMAQALSALGSSPGARAFYDAQRADGAEHNAALRKLANRLVGILHGCLKTRTLYDEATAWPHQEKTPQSDIAA

SEQ ID NO: 442659 - protein, 319 aa, unidentified
MAQNDLIVVGIDVAKDKVDACIRRFTLRQTLPNTAQGHRKLVAWLRKYKVGKAVMEASGGYEREWRNVLHNAGIEVRIVDPRRVRSFAQSAGRLAKNDPIDAEMIAWFAETFSQAPGQIPDAAREELAALAKARKALVDVKIRLQAQNEHAAPEPARKACARVLKSLAAEIDKLEAAISAKVKATPEFAERAEIIESVPGLAQATSAILIAGMPELGQVSDKIAAALIGVAPYDDDSGKRRGERYIKGGRRWVRNAIYMPCLGAATQCNPVLKAHYQRLLAKGKEPKVALVACMRKLIIILNTMLARRQKWNPGGHAMG

SEQ ID NO: 442660 - protein, 386 aa, unidentified
MKNNSTKEMKRINRTDNHIKGTSQAYQEQMILDMLGERNPIQPQEAPMKLYAATDLHSSNNYLAIIDENGERRFKQKLPNNPALILEALMPYKKEIAGIVVESTYNWYWLVDMLMAEGYKVHLANPVAVQKYSGLKHADDKHDAFWLAEMLRLGILPEGYIYPKEERPIRDLLRKRGHLVRLRTSLIISLQNIISRNCGKELDCNSMKRLKTNHVAPLLKDNEDLALAGSVSKESIDFLTRRIKEIESAVENKVKLQEPYSNLQTIPGIGKIIALTIMLETGHVERFADTGNYVSYCRKVHTKWMSNGKQKGKGNRKNGNKYLAWAFSEAAELARRFDSKAKAYYQRKKQQTNFMVAHNALAHKLARAAYHIMKDNVSFMPEKLFA

SEQ ID NO: 442661 - protein, 408 aa, unidentified
MAIIGMDIHRAFGEVVALEGKSRRRLGRIDMRRDRLAAFAAGLKKDDIVVVEATGNAAAVAEVLAPHVGRVVIANPKQVRAIAHAKIKTDKIDAAVLAQLYASGFLPEVWIPDENTQALRRQVTRRNQIVRQRTRLKNIVQSILHAHLIPAFPAVNMFGRKGRAWLAAQKLPEDEQLAIERHIREIDRLGEDLKVIQRDLAQYGLADLRVKRLMTVPGLDMIVATALVAAIGDINRFGSPQKLVSYLGLNPTVRQSGSGPSYYGRISKQGPGRARGLLVEAAWAAARAPGPLRAFFLRIRSRRGQHVAAVATARKLAVLVWHILTKQQDYLWVRPALHATKLRRLELTAGHAPARGQRGSAYDYNIKATREQERRRVQQAEKVYERFVAGWKRTGSKVRTSAAKEERQ

SEQ ID NO: 442662 - protein, 416 aa, unidentified
MNAISVGIDVSKGQSMVAAIRFPGETVWSPRKVMHTAAALERLAYDIKALGYNDGGEVRVVMEATGRYHEPVAQELHEVGNFVSVVNPKLIKDFGNNTLRKVKTDKADSHKIARYGLQNWNDLREYTPVEAARVKLKQFSRQYNLYSKMKVQLKNNLIAMLDQVFPGANELFDSPVKADGHQKWVDFVTTFWHCEYIADISEAAFIERYRKWCKRFGYYFSETKAADVYICSLGHITTLPKNANTKLLITEAAKQLTSISRMVEIFRAEMLRLAQMMPEYEVVTGLYGVGPTIGPQLMGEIGDVRDFLNRKQLIAFAGIDPGSDQSGKHCSESESTSKRGSALLRKCLYLAVETYVKRKPADEPVYQFYAKKRAEGKKYYVCTTAAANKFLRIYYARVKQHLDKILPEEDRFPCQG

SEQ ID NO: 442663 - protein, 339 aa, unidentified
MKLHCGVDLHGDNGMYGIMDETGKRIFKKRLPNDLEVVLQALEPFRDGLGSGIAVESTFNWYWLVDGLNKHEYRVRLANPAAMEQYNGLKNTDDETDAFFLAELSRLGILPEGYIYPKEDRPVRDLLRRRLLLVHQKTAHTLSFQNLVARERGEQISGSHIFKLSPGDVATMFTDPRLVLMGQTNIEAIAFLGKQIKNIEKAVLDEIKLKPEYEKLLTVPGIGKILAFTIMLETGDINRFKKVGNYTSYCRCVRSARLSNQKKKGENNRKNGNKYLSWAYVEAANFIRRFCPEAKNWYQRKLSRSKKVVATKALASKICKACYFIIKDQVDFDVKKMFG

SEQ ID NO: 442664 - protein, 392 aa, unidentified
MVKENFIYVGIDLHKETHTAVMIDCYNQKLGEITFPNRPADFPKLVTKVKKCNTDAKEVVYGLENAYGYGRPLAVWLIDKGYFVKDVNTAISHRQAKHRGAMYRKSDSDDAEAIALATLNMLDKLPDACPNDAYWSLGQLVHRRDNIMKQRTRLVNQLHEQLCIAYPSYKSFFNDISRPTALYFWEHYPSRKYLKGKSVEDLRAELVPVSHNKCSTKTCEKILDAVASDKVKNNAYQDARDMVTISIVSDLQHYDSQLTEVDKMLEQMYKMLGCTLTTIPGVNVITAVKILAEIGDIKRFSNANKLAQFAGIAPLHLSSSGKGKDVATKQGNRRLQATIYFLAIQMVQVSSKGTPRNSVVRAYYEKRKAEGKTSQQALICISRRLISIIYGM

SEQ ID NO: 442665 - protein, 446 aa, unidentified
MSDRSGLSRGDRNRNARLARLRQLLPPENAIVGIDLADDKQAAVVTDHDSRVIARRQVRARAWELGDLLDWAVARAAGAGFRSVTVACEPTGHRWRVLDQLAAGRGLALVCVQPLLVYRAREGEDLTRDKSDPKDAVLIARLASELRCYEPERADAVWARLRHLGARRNQLTTDATAQVNQIRDLLECAWPAVLGAAGSPFRSASWRAALAVVLDRCAGDLGRVRRLGAARFEAAVRRELPRWGAQRPCLRIIRAVFAALSDPAGVAAHRPGALERAHLALGDWRETRARLAATEARMVTVLDDLGLTSLITTIAGLTPVGAAAVLAETGDPARFATGRALVKHAGLCPRDNASGASQGKTSISGRGRPALRLAAWRAVWAALPNNPVMAARFTYLTTREHNRLARQQARTACAAALLRWLHVVITRRVAWDPAIAAGNTPARQAA

SEQ ID NO: 442666 - protein, 394 aa, unidentified
MFKLAGVRNQIGEPATMPSESTVHIAIELSVSSWLVAARLPGAEKSRLHRIEGGDTAALLGLFAELRSRASAKLAGEADVVCCFEAGRDGFWLHRLLTAHGVAAYVLEPTSILVSRRARRAKTDRLDAEGMLRVLVAWLGGDRQVCSMVRVPTPDEEDAKRTHREREHLVQEKLRIENRIQALLFTQGIRARPSLRSWARDMAELRTGDGRALLPLLRTELNRLRRRLVLILELIRELEAERAEAMAAAVNDAMVRKITALQRIRGIGSNFAAVLVREVLYRSFANRRQLASYVGITPMPYQSGGMDRDRSISRAGNPRARTTLIQLAWLWLRYQPGSALATWFRERVGLLQGRTRRIAIVAMARRLLIALWRYVETGVLSEGVEIRAEAAPMA

SEQ ID NO: 442667 - protein, 338 aa, unidentified
MIAVGVDTHKEQHLAVALDGLGQVLGEIVITTTLAGYSQFVCWLKELDENVLVGIEGAGSYGAGLCEYLQAERVEVFEVERPQRRERRTGKSDRLDALLAAKKVLTREGLSTPRGSGKRLALQMLLVGHRSAVSERSRLYNQLQALQVGAPYALRERIGQARNGAKLADRLTGMRTRPTASLQENTTLQVLRDIANRARALDAQAENYARQIEEMVCSLAPTLLEEPGVGPICAGRLLAFNPARFTSEAAFARANGTAPQPASSGKTVRHRLSRGGDRQINAAIYTIALSRSVHHAQSRAYMQRRITEGKTKREAMRSLKRHLSRHLYNQLTKTPLTT

SEQ ID NO: 442668 - protein, 449 aa, unidentified
MRPDVEAFDSEDDEQIVERVGAIDIAKASGTVCTRVPHASIPGRRVTKVWEVRSTTNAILALADELAEADIERVVVESTSDYWRPFVYLFQARGLSTWLVNARDVKQVPGRPKTDKVDALWLAKLNERGMLRPSFVPPAEIRQLRDYTRLRSDLTEERSRHKQRVEKLLEDALIKLSTVASDIFGVSGRAMIEALIAGERNPRVLAEMARGRMRPKHGALVEALTGRFDDHHAELARMLLDQVDALTTKIETLTTRIDELIAQIPAAAAPGIEDTGGNRGGDPATAPLSAVARLDEIAGIGVHAAQVIIAEVGLDMAQFPTAAHLVSWAKLSPRTIQSGPRSRSGKTGKGNRYLKGVLGEAAAGAARTDTFLGERYRRLVRRRGKQKALVAVARSILVVTWHLLADPHARFHDLGSDFYDQHLHKDRKTRNLVRQLQALGHQVALTPAA

SEQ ID NO: 442669 - protein, 427 aa, unidentified
MSKLMADVSSREYIGRRPEANKLCRKKYIRNKIPSGGLPMNYVGIDVSKYKHDCYIITEFGDVINEGFTFTNNAEGFGRLQKELEQCGAGNVRIGFEATGNYGINLKLFLESMGYEYMEINPLLVKEYIRSNTLRRTTTDKLCAKAIAGYISEKKYRPHPTSFYSKFALKQLTRLRNSLVTGRSRYLIQITNVLDCIFPEFKPLFGNKFSVTALYILANYPSPDAIANMNSRSYDILRRKSRGKFSMDKFVKLKSLAKNTVGVFDECYRIELETLLELYSQIDSKIGELETEIIEIINQINPPTSSIKGIGAISAAVIVSEFGDFSRFENPDKMLSFAGLEPGYFQSGTAEHNGRMVKRGSSSLRCTLMNCSRSIRLHNEVFATYFHKKINEGKPYNVAINHVAKKLVRLIFALETKGEMFDPAKLR

SEQ ID NO: 442670 - protein, 340 aa, unidentified
MKNYLFYVGIDISKLKLDVVLISSENSNISEHFVVDNNSKGVKEMINILLKKKIETTKTLFCCENTGVYTAPLSIYLNEKKFDYWIVPAIEIKKSKGISRGKNDKTDAKDIALYSLRNIDKLKLSTVDEIEIQQLKLLHSEREKVVKTIKLFETYSENDGYLPTSVCKTVDSINAKILKDMKLSLKKIELKVKEIINANEDLKQKFNLAKSVPGIGDQSALYILIVTKGFTAFSDSRKLACYSGVAPFEYSSGSSVRGRTKVNHMADKKMKSLLQMCALTAIKYDPQLKTYYLKKKEEGKNSMLVLNNIKNKIIQRVFCVVIRKTPFVNTFNFANNLQKK

SEQ ID NO: 442671 - protein, 407 aa, unidentified
MDLLKTVFGIDVSSRKSNVCIMVNGQKVNDYAISNDMVGFNRLLGDLKQVTKPQIIFEATGVYSRRLQAFLDMHELRYVMMNPLEAKRKTKDDLHQNKTDKLDALYLAKLQSEHPQRLAYVQNKEYQELMANNRIYEQASHDLITNRNRLHKAIQLTFPEIEHLMVNPRGKNYWSIVLRFPHPDIVLETKEADIIDFLKGLTGIGKKRANDIAQSLIRLAKVACPAVKKNSAHIRGLKMAINNILSAEEECQTALQEMAKLAPKRDLEILTSIPGIGENTALRIISELGDIRRFNNPSQLNAFVGVDPQVYESGNLTAHLSISKRGTAIGRKVLYLTINQIQSAKKAGNPCHIANYYEKRKRSSETASHKKAAIASIHKLLRTIFALIKNDQLYSYDVAKHNQRLLS

SEQ ID NO: 442672 - protein, 415 aa, unidentified
MALKIVYKICCGIDVHKTFVVACIASTNDKGITSYESHRFSTYTSGLKTLLQWLLDRNCKDVCMESTGKYWIPVYNILEPDCSIVLAHPKYVKAIRGKKTDKKDAKWIADLFKHDLVAGSFMPPADIRQLRDLMRYRFKLTCFKSSEKNRLQNCLTVSNIQLGNVVSDTFGKSAQAILDKILENPEDTSFDLEPFVYRSLKKKLPELRDAIDGYITPEQAGKLKVIKAHYESLESRKAELEELILALAAPYQQELAILQTAPGISSVFTAIGIISEIGTNMEAFPSAKHLCSWAGLTPTNNESAGKKKSVRVSKAGCYIKPLLVQCANAVVKSTKHPEMRNRYLRLKKRRGHKKAIIAIARMLLTALYHMLKNGENYNAELYQKSDLLPVDREITVEQALMIARNQGYKIKSATA

SEQ ID NO: 442673 - protein, 369 aa, unidentified
MEERIKFFVGLDVHADTIEVAVAEAGRQPACCVGRIAHDVPKLLKVLKRYGDSQQVHVVYEAGPTGYGLQRALAKGGYPCQVIAPSLIPKRAGDRVKTDRRDGLRLAELARAGELRAVWVPDPADEAIRDVARAREDAVKARMQARQQLKAFVLRHDLRYPQRTSWTKTFYRWLATLSFQSEGAQTAFTEYWQAVTAADERVGRLSDALVRSIEGWRFEPVVKALLALRGIDQISAIGLVAEIGDLSRFGHPRQLMAYLGLVPSEHSSGERVVRGSITKTGNTHARRLLTEAAWSYRFRARIGYGAQRRAEGLPQVIRDWGWKAQLRLSGRFARLQARGVHTNKVCVAVARELAGFVWAIGRQAQLEQH

SEQ ID NO: 442674 - protein, 344 aa, unidentified
MATYYIGADVHSNNTELAIEYRKQIVARYSVPTSIPAISAVLSSIQGKKILAMEEGPMAGWLYRNLHEKVDQLVVSEPRRNKLISSEGDRDDKIDSGKLAVLLRGNFLKAVHHTTDSHRAHLKHWINLYHDRVRDAVRAINKIRACCRMHGVRIPRRVVRNQFRRHTWLSELDNPVLKAQLHMFWIGYDATKEQVEIAKKQFSSYARKYPIIKSWCKIPGIGPIRATTIFAYLDTPWRFKNRARLYRYSGVGLVRMTSGKDKKGRPKPARLRLPWAVNRRLKNAVMGAAITAIERGDNAFKDYYQRMLANGITPVNARHSVARKIIATMSAMWKTGNAYDETLV

SEQ ID NO: 442675 - protein, 409 aa, unidentified
MRYYLGVDWADQTHAVWVGDERGTKIAARTVPHTAEGMIEWGRELDEWRAQGLELWAAIERPEGRVVDFLLDHGVVVYPVNPKALDRARDRFRQGGAKSDPFDARVLADFLRTDHPRLQALQPSSEAAQELKFLTEDCQRQIRQQTRLVNQLTNTLKAYYPRGLEVAELTTALAREFLQAYPTPAAVAALTERQWQRWARAHRLSEARTQELWAVLQRPQLPVPPHVVRAKARLMHTLLAELELVVAAVGAYRQAVEDFFAALPAAQWIRTLPIGEHGVTAPTLWARLGDAPGRWESFHHLQAHAGAVPVTVKSGKQQVVHFRFACDKALRSVVDQVAFLSLRSSEWARAYYDQQRARGHEHREALRALGAKWLKIIFVLWERQVPYDESYHLATMARQQLRQRPKKLA

SEQ ID NO: 442676 - protein, 348 aa, unidentified
MLIIGCDYHPGFQQIAFVDTETGEADERRLTHREEAEQFYRTLKTGKVRIGMEASGHARWFERLLIELQFELWIGDAAEIRTKRVRKQKTDRQDAQLLLKLLMEDRFPRIWVPDAENRDLRQLLWHRHRLVQMRTRVMNQLHVVALNEGVRRKKALWRPAGRSELESLVLAPWALRRRRDLLDLFDQLTPKIHDLTRALEEEVEKRPIARRLMTHPGVGVLTALAFELVIGTPARFGCGKQIASYVGLVPTEESSGDRRRLGHISKQGNALLRFLLVEAAQVTVRSQPHWHSKFFHLAMRRGRKIAKVAMARKLAVHLYWMWRQDCDYGQFEKLGSHAGEPVHRHGAQ

SEQ ID NO: 442677 - protein, 402 aa, unidentified
MVNVGIDLHKTQFTVCVRYAGGEEFDQYPTTEEGYTEFLGRASKWQASGEEVRVGVESTGNTRYFKNRMEDAGIGVTVINPSKFKVVNESVNKTDKRDASTIAKFLEVNMLPEAKLCSRTSEQLRRLLKVRTTLVRSEVVIKNQIHALFTAEGKEDVKGAMLQSKKGRKQVLNALNQWEHGLVVQPLVETIDRLEENINIIEKQLRELTEGDRMVELLMTIPGCGEIGAWTIRAYTDDIKRFSSPKKYVSFAGLAPWVQNSNETIRHGKITKRGPKELRTALVQVVMGLRRMKKKTCTWRLMQHYEAMRKTKISGKAIIATARKMAVIIWNMLNEDVEFDLSRMIDRKLAKKSESMRNLAELAELAEAAIFEDKKEKSEMPKIRIKKEKKTGVAGGKTRKVG

SEQ ID NO: 442678 - protein, 345 aa, unidentified
MAVTQLAQGGRTMKYIGLDIHKKNTQACVMNEKGKVLTNVRFPSNPKEINRFLDGIEASGPASIVMEATGFCMYIYDIIEARGHDVKVAHPLKIKALTAGRAKTDKNDAEMLAELLRLNAIPESYIPPKELRELRELTRFRQSLVRNSTTIKNQIHAILAMRGIVVPHVLRSSFSKKHIKWLRSLQISQLDDYLDIVELVESKITKADEDIGRICQGDEDVQRLKTIPGIGDVTATSFVAEIGDIRRFSSSEKLASYAGLAPLVRQSGEREWTGPISKHWNATLRYLLIEAAYSHIRFAKDSKLTRFFERKSQAKGTKKAIVATARKMLEVIYYMQKRGEAYHAH

SEQ ID NO: 442679 - protein, 409 aa, unidentified
MRYYLGVDWADQTHAVWVVDEGGTKVAMRTVPHTAEGLTEWGRALDEWRAQGIELWAAIERPEGRVVDLLLDHGVVVYAVNPKTLDRARDRFRQSAAKSDPFDARVLADFLRTDHAHLRAVQPSSEAAQELKLLTDDYQRQIRQQTRLVNQLTTTLKAYYPRGLEVAELTTGVAREFLQAYPTPATITALTERQWQRWAHAHRLSETRTQQLWVVLQRPQLPVPPHVVRAKARLMQSLVAQLMVVMEGVGAYREAIEDFFARIPAAQWIRTLPIGDHGITAPTLWARLGDAPGRWESFRHLQAQAGTVPVTIRSGKQQVVRFRFACDKSLRYIIDHVAFLSLRWSEWAHAYYAGQRARGHSYRQALRALSAKWLKIIFVMWERQIPYDEQYHLAMMTRQQLRQRQEKVA

SEQ ID NO: 442680 - protein, 348 aa, unidentified
MSITMIGLDTAKSVFQLHGIDASGKVQLKRKLRRSELIAFFEKQQPCTVVMEACGAAHHWARVLSGLGHEVKLIAPEAVRPFVKRGKKNDAADAAAICAAASRPDAKFVAAKGLEQQSVLALHSARTLLVKQQTMLANALRGLAAEFGLIAPKGMNKLEDLNALVEADEAFPEQARQVFAGLLGHCRATADRVAALEAEIVAHARRDDTARRLATIPGIGPITASLVAATVGDGIVAFKSARHFAAWLGLVPRQHSTGGRIRLGRITKTGSREIRRLLVLGATSMVYRAAQWNSVAGAWTRGILERRPVRLATVALANKMARIAWALMTRKEVYQAKGRVAAAAAAAA

SEQ ID NO: 442681 - protein, 337 aa, unidentified
MNPTKSNHKFCLGIDISKADYHVALLHRESGESIARSKFANNPQGHAKLLDWLAKHTGADLPVHACMEATGSYGESLADHLDGKVAILSVVNPRAIKAHGDSDLRRCKSDPADARLIADYCRSKQPRAWQAPSPAQRKNKAISRCLANLKKDRTRESNRLDLCSDKTVVKALKAHIKWIEKQIAKLEDELLAAVKEDAASARALELIVSIKGIGEKSAAYLIAELPDLTLLKNARQLAAYAGVTPRIFQSGTSGKTRTPMSKAGNRHIRKALFFPAMSAMRFNPICKAFAERLKEKGKPSIVIIGAVMTKLLHLIYGVLKSEKPFNPDILKKAQITP

SEQ ID NO: 442682 - protein, 319 aa, unidentified
METVTSSSVLYVGIDVAKEHLDLAFGATAAPEPIAYTAAALKQLVTRLQALPAVQVIVEATGGLEVPLLTALWAAGIAVARVNPQRVREFAKASGRWAKTDRLDARLLAQFGAALQPAATPLPSEASQTLAALVERRRQVVAMRTMESNRRLSAPPTVQARLDQHLAWLDAEIAALEQAISDFIQQNPAWAAKDGILQSVPGVGQVTARTLLAALPELGASDRKKIAALVGVAPFNHDSGRLRGKRFIQGGRYEVRSVLYMATLSATRFNPTIHTFYERLLAAGKAKKLAIVACMRKLLTMLNAMLRDKQAWNPKSTSC

SEQ ID NO: 442683 - protein, 323 aa, unidentified
MPTMIVGLDLAKHVFQVHAVDATGKVTIRKKLRRSEVLEFFKGLPPSLVGMEACGTAHHWGRELTALGHDVRLMPAGYVKPYVKRGKNDAVDAEAICEAVTRPTMRFVEIKSAEQQSGLMLHRTRELLVRQRTALINSLRGQLAEFGLIAPKGVWSIPELHALAQGATPAVLPDTVRSCVELIMGQIDDLQTRVQTIEKAIRVAHRASEVSLRLQTIPGIGVITASAITATIGDIKVFRSGRHLAAWIGLVPRQSGSGGKVHMGKISKKGDAYLRKLLVLGATAVIRYCRNKPQFAAWINALLQRRPARVVTIAVANKMARIA

SEQ ID NO: 442684 - protein, 338 aa, unidentified
MTSAKYIGLDVHQATTAAAVLDANGKLLMESILETHASTLRDFLAGIRGELNLTFEEGVAAEWLYGVLKSDVDKIVVCDPRKNALLKAGNKNDRIDARKLAELLRGGQLKQVYHGNRGVRTLKELARSYVVLTRDVTRVLNRIKAVYRSMAIRCAGQRVYHPRYRQQWLEQLAVPGLRRRAERLYQQLDLIQPVRQQARRELLAESRKHAARQLLEQIPSIGPVRAALLMAILQTPHRFRTKRLLWAYSSLGLVIRTSSDHDFKNGQLRRRPKQISVRGLNRNHNPELKNLFKSTALSASLRPGAWQECYQRMLAKGIKPAMAQLTLARKIAAVVLTL

SEQ ID NO: 442685 - protein, 423 aa, unidentified
MQNKIVVGIDVAKDFSYFAMIGPDNKQIGKQFRVNHTLEELEDVIKRMKEVETRLKSQCVLIMESTGHYSSILFNFFHRSNFEVYLVNPLQTNSIKNLQVRKVKNDKIDAYRIAMLFKLGELRPYLPPREDLAKIKVLCRHYYKLVDDSVMYKNDLIALVDQIFPGYQKIFSDITSLSSLYVLENYSSSKKLLNADRNELTSNLSAISKRGLDWANKKADALISMAKSAIKLKSAPITAEIALKSCIAILKAFYEQIKHIENEIIALSNDVEEIKLVDSITGIGPISAATIVSEIRNFENFSSAKKLVAFCGIDPAVMESGKFKGSKVKISKRGSRYLRRVLYIAALANIKQYHGKYINPVLAEYYQAKIQSKPRKVALVAVMHKLVNYIFAVLRDKKPFRVITPEEHMEVYAQKTTSAKQVA

SEQ ID NO: 442686 - protein, 345 aa, unidentified
MKKVIAGMDLHSNNVVIGVMDLDGQRLASRKLPCDLKEVVKFLAPFKRRLERVAVESTYNWYWLVDGLQALKYPVVLANPAGMEQYSGIKHADDTNDAFFLAELLRLKILPTGHIYDAELRPVRDLLRRRLMLVHQRTALMLSFKSLYTRTTGQELTLSKLKELEIKAAQELYEHPANQMIAGMQIKHIEQLTESIEKIEKAVLGSARELPYYAKLATLPGVGRILGMTITMEVGDIKRFAEPGHFASYCRTVEAKRMSNHKKKGENNSKCGNKYLAWAFVEAANFARRYDEQCRKWFDRKVARTSNIIATKALACKLAKAAWYLMAEGTDYDPKRMFGQPPATK

SEQ ID NO: 442687 - protein, 421 aa, unidentified
MRGPRRKRMKAAKESTLLVTVDIGVASNTGYCATGDGRDIKPFKFDNTREGFEKLWHMVVASKMRFGCDEIIAGYESTGPYAEPLAQYLMGKPVTMVQVNPMHTKKMKEVNDNSPLKTDDKDPRVIADIIRLGRTLSVVVPEGDAAYLRRLNNARERHVSEQTALLNQLQQLIFVIFPEFKTVLKNMKGKTARYLLTRYTTPEKISAVSKETLGEEMRKRSRGKYGHRDAELLIDLARNTVGIREGVTGIVLDIRHILIQLEAEARFVAEIEAEMVMTLQRIPCSGRLLSIKGLGVVSVAGLIGEVGDFSKFGTKSEIMKLAGLDLYEISSGKRKGQRRISKRGRSLLRKILYYAAIQMVRKNGIMFDYYTRLTNRGMLKMKALIAVARKLLGIIHAIVRDNRDYVGVYQAPRRRVIKKAA

SEQ ID NO: 442688 - protein, 391 aa, unidentified
MVCVGIDVAKDKHDCCILDSDGMVRADCFTIPNNMDGFKQLLQTIRNCTKKSDKIKVGLEATGHYSYNILGFLLDNDLAVYVMNPLRTNLYRKSLSLRKTKTDRVDARTIATMLLSDVDLKSYTDTAYHNEELKSLTRYRFDKVRERAKLKQSVSRLVTILFPELEKLVPSLHIASVYALLSEYPGAKQISEIHLTKLTNLLTTASKGRYEKDKAIQIRDAARTSIGSVMPAKSLELKHTIKLIRELTSEIDEIEDSIQQIMDELHPPILSIPGVGIQSAAMILAEIGDFSNFESPDKILAYAGCSPSTYQSGKLTNCYAHMEKRGSRYLRYALYNATKYVCHWNPVFAKYLAKKRAEGKHYNVALSHATKKLVRLIYALQKSGKAYLTAA

SEQ ID NO: 442689 - protein, 351 aa, unidentified
MAAKKRSVIGGVDTHRDAHHAAIIDSTGGLLADAEFPATSDGYADLLAWMRSFGRLVAVGVEGTGSYGAGLARHLGSHKVPVVEVDRPDRRTRRAKGKSDPIDAIAAARATLAGTAMGIPKTRTGPVEAIRALRVARQGAVKARTAAINQMRGLVTAAPETLRAKLTKLSAAVLVNRCATLTADLKRLHDPEQATAAALVGLARRALALTEEIHVLDRQLAPLVRRTAPRTSALFGVGTDVAAQLLTTAGDNPDRLHSEAALAHLCGAAPIPASSGRVRRHRLHRGGDRHANHALHTIALCRLRYDERTRAYQQRRITEGLSKQEILRCLKRYIVRDVYTALRADFAALTT

SEQ ID NO: 442690 - protein, 339 aa, unidentified
MGGVNAAMEVGKHRLEFVLGSAGELWSEANEPRAIKRLAKRLAQAGCVRVLIEGGSYQNVLVAALRAAELPVVIINPRLVREFAKSISQLAKTDHIDARVLALYGERVQPPVHELPDEQSQALRALWVRREELIEMLVMEQNRLEHAAKTLHRELRAHIDYLRNQIKHADDGLDRAVRDSALWDSYELLSSVPGVGPVLSVALLSDLPELGRLNRREIAALAGVAPFNQDSGTLRGQGKIEGGRLRCSTSPRWPQCAAIQCSNPFISACGLAVNRPRSHWSRPCAACCSFSMRCLKAIRAGGHHVPREAAGAIQAQTWSGACRRGEDWLRPTAGCASNP

SEQ ID NO: 442691 - protein, 348 aa, unidentified
MEKLIRIGIDTSKSVFQLHGVDSAEQPILRRKLRRGQFLQFFSDLPPAQLAMEACGASHYWARELQALGHEVVLIPPQYVKPYVQRGKSDAADAEAICEAASRPKLRKNFVPIKSTEQQAAQMLTKLRAQFIGRRTQLANSIRGYAAEFGLTAPKGLSRLRQLLADIRADATVPDLAMELVEALAGELTRVDDQIATLYKKLLQLHRSNEMSRRLAGIPGIGPVGATLLSIKVTDAHSFKSGRNFAAWLGLTPKNHSTAGKNRLGVITRAGDEMLRSVLVAGATAVIGDLRRGGNRIWPWLKALIARKPPKLVAIALANKMARIAWKLMISGERYRPIGGSAPMATPT

SEQ ID NO: 442692 - protein, 333 aa, unidentified
MHYVGIDVSKRSLDVCLLAEGSKGSRKTKTLSNGQDSAQNLAKWLILQKCELSQTHVIMEATGIYHEYLACGLHQMGILTSVINPCRSREFAKAMGIFTKTDAVDAYVLAFYGCLKQPEAWMPPEEEVRKLRALLQHRDSLLNDKLRIDNRLNTLKSTEAVQEVMDSLSLVNQYLKSEVARIERLISSHIAQHPGLKRDLKLLMSVDGIGKQIGWNMLAVLRGNNFKSAEQLAAYLGVVPVERRSGTSVHGRARLSKIGSSNIRANLYMGALTAISKNSHIKALYERLLAKGKMKMSALGAAMRKLVHLCYGVLHTQQPYDEKYKAKIINFSS

SEQ ID NO: 442693 - protein, 353 aa, unidentified
MAVKYVALDLHQASTSISIRDVRGRVVRREVVPTSAARILEVIDSAGGTIHVTLEEGTLSQWIYDQLISRVARVIVCDPRHNRLLAAGNKSDRIDADKLSDLLRLGALRSVYHERSAVSALRELVRSYNTLVEDTTRVMLRVKAIFRSRAIDCSGIAVYHPKNRARFLAALSDRGARLRAEHFYAQLDGLLAVRAQARHQMLEEAKCHPAVRLLRSVPFIGPVRAAEIVAMVITPERFRTRRQLWPYAGLAVTTRSSADHRFDHGTAVRSGKTINRGLNRNFNRTLKKVFKEAAASAVCSPGPLHDCYERLIARGMRPELARLTIARKIASIVLAIWKKGVPFDPAILNAQNA

SEQ ID NO: 442694 - protein, 421 aa, unidentified
MDTQMLSEEPIGVVHPRCCGIAVHKRAVQACLLVSTPGGRVRQEQRAFATTTDALLALADWLVAAGCTHVAMESTGVYWKPLYNVLDGQVALLVVNAQHIKAVPGRKTDVTDAAWIAGLLRHGLLRPSFIPDRAQRELRELTRYRTSLVQERAAEVNRLQKTLEGANIKAAGIATDILGKSGRQMRDLLVAGETDPAVLAQCARGRMKEKIPLVERALAGRFGSHQRFLVARQLAHIDFLDHAIAEVSAEVAARLAPFEEEIALLDTIPGVGRETAEALIAEIGADMGQFPSAAHLASWAGLAPGNHESAGKRKSGKTRKGSRWLRATLVNAAHAAGRTKHTAVGARYRALVARRGKKRGAVAVGHTILLIAYHVLRDHEPYDDLAQQPVVCHHAPHPNHLVQQLQEMGFDVTITPKAPAA

SEQ ID NO: 442695 - protein, 320 aa, unidentified
MVKMADYTPIVAGIDVSKAHLDAYLHPQGLNARFSNDKIGWRLLCAWLAKGNPETVVFEPTGPYHRAMERYVHDKGFAVARLDPRRARRFAEALGINVKTDPVDARVLARFGAYLKPAAAILPAQNLEHLKELVAARRGLVQQRTRCANKAKTATTHLLQKQLRQTEKLVRQHIQEIDDACRTIVRDDPGLSIRYDIVTSIPGIGDVSAMTLLADMPELGTMDAKQAASLLGAAPVAFESGTFIGKRHIRGGRALVRQAMYMAALVAARYNEDMKQKYHDLIKNGKPPKVALTAIMRKLIVLANALLRDQRKWAEIRACA

SEQ ID NO: 442696 - protein, 326 aa, unidentified
MKNSIVPKFVGVDISKKFIDVCFLSKKGNLEQHQIEQSSKGYRTLIKLIGQDAICVMEATSTYHLPLATWLYDHDIKVVIENPLKIKRFSQMQLQRGKTDKADARMIWQYATTIVANKIKLWRPKSVHIQELKQCDTLSQRLNKELTAITNTHGALEQLSVVNTEVKRIVARTIKQLKEALIDLDQQMQKLIKAHYNDSYQLLLSIPGIGPKTAVMLICQTDNFKNFDDVKKFLSYIGMSPRTYESGSSIKGKGHISKVGNGRLRSLLYMCSWTAKIFNPQCASLYEKMRQKGKPEMVIKVAIAHKLLRQAFGVIKRQQPFNIEYA

SEQ ID NO: 442697 - protein, 344 aa, unidentified
MKTVSLDLHGDATQVTLVEETGEVLFEMKVPTEREALRAVVGGIPGPKRVVYEEGPLSGLIHDALKDLCEEIISCDPSHNAMIALAEDASDERDARRLAQLAQLNAVRRVYVAPEPYRSLRSLLVHDHGLQRSITGVKNRIKGLCRRQGICRRGKAIYWRGQRAKVLEGLPNGALRWQMESLYRELDALRRERVGAHRVLGQITRGMPVIRRLQTIPGVGPITARTLVGWIVDPARFRSRNALHSYVGLGLGQGFTNWKPVGPARASKRGNREVKRVLFLAAGAARRSDSALARRYEARLRAGWPVSKALRDLARSLVEIAGCLWRKNREYDDARVAVPSDAPG

SEQ ID NO: 442698 - protein, 424 aa, unidentified
MTEDAIDIEWFCGFDWASQTHVVCLMDRNGRTIGERGVAHGGAELTEFCDWLVAQTGAPRARIGVAIETPHGPIVEMLLERGFAVFAINPKQLDRFRDRFTVAGAKDDRRDAQTLGDSLRTDRRAFRLLAVDDPTVIELREWSRIAEDLAQERTRLANRIGQQLWRYYPQMLQLADDLAAENFLALWECAPTPARAAQIDEAAVAKVLKAHRVRRIGAAEARRLLRQKPLLTAAGVTEAAVAHIKIAAERARLVNRQLKDAHQKLDALCDRLERPMSGETENEPGQRSEQSDVTILRSLPGVGRTNLAVLLVEAPEPLRRRDYQVLRVLSGVAPVTRRSGKTRLVTRRMACNERLREAVDHWARVAMQTDPKCKERYAALRRRGHTHGRALRTLGDRLLATACAMLKSQTLFDPERNTPQPASA

SEQ ID NO: 442699 - protein, 409 aa, unidentified
MEVIYPRCCGLDVHKREVVACLVSTAPDGTARKEVRAFGTMTPDILALADWLAAHEVTHVAMESTGVYWKPIWNLLEESFILLLVNARHVKAVPGRKTDVRDCEWLAELLRHGLLTGSFVPERPQRELRELTRYRTSLLRERTAEANRLQKTLEGANIKLASVATDILGKSGREILAALIAGETDSAELAQFAQGRLREKIPQLERALVGCVGAHQRFLVAEHLAHIDFLEAAIARVSAEISARVRPDEDAIVRLDTIPGVGRTVAEALVAEIGADLTRFPNAKHLASWAGLCPGNNESAGKRYSGKTRKGSPWLRACLVQAAHAAARTKGTYLAAQYRRLAARRGRAKAAVAVAHSILIIAYHVLTEGTAYRDLGGNYFDERDRQGMERRLVHRLEALGYQVSLHPAA

SEQ ID NO: 442700 - protein, 320 aa, unidentified
MRNAVGLDISKLTFNASAMVGNAEYSAKFDNDSKGLNQFSDRLKSLGCQNLHICMEATGSYYEEVADYFAQYYSVYVVNPLKISKYAESRFKRTKTDKQDAKLIAQYCRSAKESELVKRQKPTDEQYRLSRMTAAYAQIKSECAAMKNRHHAAKDEEAAKAYAEIIKAMNEQLEVLKEKIKEQTEKPNCKEGVKRLETIPAIGRMTAAVLFHHLTSSKFETSNKFAAFSGLSPQQKESGTSVRGKGKLTKFGNRKLRAVLFMPAMVAYRIRAFPDFIKRLEEKKKPKKVIIAALMRKLAVIAYHVHKKGGDYDPSRYKSA

SEQ ID NO: 442701 - protein, 346 aa, unidentified
MRIIGCDLHARQQTISMLDTESGEVIEKTLAHEGETVREFYAALPKPVLVGLEATGSMFWFLRLLEELGIQYRVGHPAAIRKAETRKQKHDRRDAALIRRLLVEQRFPQIWLPTAEQRDLRTLLQHRHQLVRMRVMTQNGLQGLALSQGLRRGAKLWSQAGQQALDSLPLADYSRTRRQQLQELRQQLNQRLQQLDQAVREQAEQRSGARLLLSHPGVGPITALATEVFLGDARRFPDAKAVASYVGMIPSEHSSAGKQRNGRLSKQGNPLLRLLWVEAARAAARKDARLKQFYRRKLVQKGLGKAVVATARKLGIRLWIMMRDQIDYTEFCRRAEQRCPHAGMPE

SEQ ID NO: 442702 - protein, 417 aa, unidentified
MPLNVVGAVLFVGIDWASAVHAVCVQDAAGRRVAAFTVEHTAAGLTGLMRRLARLGDPDTMPVGIERPDGRLVDALLQAGHPVVPVKPNAIKTWRDGEVLSGAKSDAGDAEVIAEYLRLRHHRLQLATPYTAQTKALRTVTRTRGDLVDMRTATTNQLTALLDAHWPGANAIFADVESPIALEFLTRYPTARHAQHLSAKRLTAFCVKHGYSGRRTGEQLLTRLRNAPTGATDEVLCEAVRDAVSALVAVLRTVGAALKNLGRSVVAHLGEHPDGEIFTSLPRSGQINAAQILAEWGDCRQAYDRPDAIAALAGVTPVTKESGKHRAVHFRWACNKRFRVAITTFADNSRHDSDWAAKVYADAGARGLDHPHAIRVLARAWIRVIWRCWIDQTPYDPSRHGNAVRLHQSGQTTSVAA

SEQ ID NO: 442703 - protein, 343 aa, unidentified
MTDVVIIGVDLAKNVFQLHGAAADGTVVFRKKFTRPMFQRFMADHPRCLVAMEACGGAHHCARELVRLGHEVKLIAPRYVKPFVKRQKNDAADAEAIVEAAMRPTMRFVEPKTMEQQARTIVFRTREKFVNQRTEAINALRAHLYEFGYIAPQGIGYLSRLEAVVDDPNSDLPELARDLCRALLNHIAQLTASIEDLKRRIDKISKEQETSRRLQTMPGVGPVGALAIETFAPPMDQFKRGRDFAAWLGLVPRQNSSGGKQRLGKTSKMGQRDIRRLLVTGAMAVVNWASRKGAAEGTWLARMLSRKPRMLVAMALAGKMARGIWAMLTRQEDYRNPVLVGVA

SEQ ID NO: 442704 - protein, 403 aa, unidentified
MNSVGIDISKGRSTIAVMRPFGEVVISPFEVRHTGSELSKLAKQLKSLDGETRVVMEATGNYHAPVAKLLHDAGLYVSVINAKLVHGYGNNDLRRVKTDKKDAVKLANYGLDRWLTLPRYVPEEDTRLLLKNCYRQYRQYSKVQTILKNNLISLLDTVFPNANRLFSSPIRVDGSEKWVDFVAEFWHCRCVSEKSQKAFTNKYQRWCRKHGYNFSEAKAHTIHAEACGHIDVIPKSETTKLLVEQAVAQLRATSAALAALKHEMQALASMLPEYPVVMDMFGVGPTLGPQLIAEIGDVRRFYSKKALVAYAGLDAPPNDSGDVTGRHKSMSKIGASSLRRTLFLVMSVYLQTAPLDEPVYQFMDRKRAEGKPYRIYMMASANKFLRIYYATVKAYLESLEHTA

SEQ ID NO: 442705 - protein, 338 aa, unidentified
MQLYSGIDLHSNNCVIAIIGDNQQSVLNKRLSNDLGQIIQLFQPFKDALQGIVVESTYNWYWLVDGLLDAGFKVHLANTTAIQQYKGIKCTDDHTDAQWLAELLRLNILPEGYICPKDYRSVRDLSRKRLWLVQQRTRNILSLQTSITRQTGKRLSANQLKKITEADLQAISIDENIYLAVNAHKQLIDHITAQERIITKHILAQIQLQSGFKQLQTIPGIGKLLALTIMLETIDVHRFASVGQFSSYCRCVKSERISNGKKKGVNNSKNGNKYLSWAFIEAANFSIRFDPKIKAYYQRKCVKKCRTVAVKTVAHKLARASYYILKDGVNFDVMKAFG

SEQ ID NO: 442706 - protein, 355 aa, unidentified
MNDSSPTFERYLALDVHKHYVVVGGVNAQQQVILPPRRLDLGEWATWLPKHLHPSDAIVLEATTNAWTFYDQIVPHAGRPVVAHPGLVKVIASARVKTDNRDVLHLAQLLAANLIPEVWVPPLEVRELRALLSHRRRLIKMRTMTRNRLTSVIHRYNLAPPRGELFTTAKYRDWWLQLQVSPTEQLRIRQDLATLDHLEPQIAEVGEELHRLSMVSPWAEQTPYLMQLPGFGIIVAMTVLAAIGDITRFPSAKKLVGYAGLGASVHASGETYRTGGITKSGRKDLRWIMVESARIAVLYHDYWKREYAHLEKRLGSNKAIVVVARKLLVVVWHVLTDREADRHVTPQKVADKFLW

SEQ ID NO: 442707 - protein, 410 aa, unidentified
MRRVIGMDIHRTFAEVVVWEDGRLRPAGRVDMTRAGLKGFGRNLTNEDEVVVEATGNAMAVVRVLTPYVARVIVANPLQVKAIAHARIKTDKIDAGALASLRAADFLPEVWLPDVETERMRRLVARRNQVVRHRTRVKNEVHAILHAHLVPPCPHADLFGRLGRLWLDGQPLPDDERAAIARHLRELDRLGEGLGVLDTDVAQAAIDDPAVKRLLTIIGVNLVVAAGLVAAIGDVRRFADPQKLVSYVGLNPRVRQSGLGLAQHGRISKHGRAHARAMLVEAAWAAAKAPGPLRAFFLRIRARRGHQVAAVAVARKLAVLCWHLLTKGADYQWARPALVANKLRAMELQAGAPAKKGNKRGAAYAYNVKQLRDREIDLARHAEHAYERFVQHWQPRRRMRRTGAANEERR

SEQ ID NO: 442708 - protein, 438 aa, unidentified
MSNKFIFNLDDLFISVGIDVGADFSWMSIALPNQQIIGKPYKILHNQMNSLATAVSKIKEAEELYSLESRIFLESTGIYHYPLFCYLRDKGFNCSVINPIITKNSTNINIRKVHNDRFDSKKAALVGLKPDLKVSLMPSDLALNCRNLCREYYDLMDNRSAYVNKLQGELRMAFPQYLGIFSKITANTSLTLLETYTSPSAFIEADPQEIIDTIKSTARFGVAYAASKYNAIIQAAHDANEFGYILDSNIKRIRLYISFIRKYDEEIKNILDAMHELIDANEETDFVKQIHLVETFKGAGFLSAVTLMGEIGNFSAFSKPKQLFAYFGLDPAVKQSGKFEGTKIQISKRGSAIARRAIHTLTLQRISTSRTGEAKNPVLRDYYLKKCESKPKLVAMGAVSHKVCNMIFAILRDNKPFEIITPQEHIQQYNAAKCDIAA

SEQ ID NO: 442709 - protein, 419 aa, unidentified
MEPNRFRHYIGIDWATEAHRICLLDHNGQLGAKVSIPHSGAGLDQLLEWLASHGVEPAFAAVAIETPRGALVETLVERHYAVFAINPKQLAHFRDRYTSAGAKDDDRDAWVAASALRTDEKAFQRVTIDAPEVIQLRELYRTADELREEIQRLTSRLREQLNRYYPQMLALYPSADQPVLWDLLELAPLPATAHQLTRPQVETVLRKRRIRRFTAGQVLEQLRATPLTLANGAAAAASEHALILVAQLRVIYELRKQTLKRLASIVKKMRQTATGSGAPSDAAIIASLPGAGILTTAALLSESSRAVAQRDAPALRAYAGVAPVTQQSGKSLKVSMRYACNNRLRNALYHFAMGSRRDPVARRHYDRLRGEGHTHARALRGVADRWVTVLMAMLRSGTRYDATRRKAWSAADAAAGATA

SEQ ID NO: 442710 - protein, 369 aa, unidentified
MKKNSINRGRCKETREKEGKRTIGMDLGDKTSRYCVLGASGAVVEEGSVATSRKGMTQVFGRMGRCRIAIEVGTHSPWVSRLLNSMGHEVIVANARQVKLISASSRKDDRLDAQTLARLARVDRQLLRPIQHRSEKAQQHLMKIRVRAKLVDTRTSLVNAGRGMSKAVGERLPACDADAMGLEQMAGLPAGLKETLKPLLELVESLTKKIKECEKEIEQIARIEYPETYVLRQVSGVGNLIALTFVLTVEDRERFQKSRDVGCYVGLRPKRSESGQSQPQLRITKEGDNYLRKMLVQGAHCILSHRGPDSDLKRWGLKLAERGGKNAKKRAIVAVARKLAVLLHALWVSGEVYEPLRNAEARQRMRQVA

SEQ ID NO: 442711 - protein, 313 aa, unidentified
MPVSLSKPIVGVDVAKNELVIYQADGDLLEEIPNTKTSIKQWLKALPGTVAIAIEATNIYHLDFADLAYEAGCTIYMVGGYELKHYREGVKIRAKTDALDAKLLARYLKNEAEELRPWTPPSPLYRQLLSLFRRRAALVQARVGLVQSWSNEPLLKAAFAEQVKSMQQLETLIEKTISDQLKEAGLLGQLKRCLKVEGIGFLTGARLITAFQRGDFRNADAFIAFLGMDLRVAKSGQKDARRSLTKRGDPEARRLLHNAAMSASRTKAWKGYYEEQRTRGFSTTQALVMLARKLARVVFALLKGQSEYQPKAS

SEQ ID NO: 442712 - protein, 428 aa, unidentified
MNSTSNNDHPHNDYAAFIAIDWADQKHAFCLQPAGQAKKETGTLEQKPEVIGPWVAKLRERFGGRPLAVAVEQSRGALIHALLSYDFLVLYPIHPTTVAKFREAFKSSGAKSDPLDTEQILEILTKHLELLKPLNPDTEQTRLLARLVEDRRTAVELRTSHLQALQAGLKEYFPQAIELLNHNLRSRLAADFLRKWPTLEAFQQAKPSTIKKFLYGHNVRSPEVVEMVLRWATTAKALTTDPAIIESSRRLCQLHAQVIQTLNPIIEQYDQQIQTVFQDHPEVQLFNNLPGAGPALAPRLLAFFGTDRSRYESAENAQSFCGIAPVTKSSGKTRVVYRRRACPKFDLQTFHEFARLSVAKCQWARNYVEYYLAKGKKYHTIIRALAFKWIRILFHCWQHRTPYNEEKYMKTLQQRGSIFATLHLEKKS

SEQ ID NO: 442713 - protein, 428 aa, unidentified
MIANSAAAPRGTFVAIDVAKLVHEVLVEPSTGRRQRWRVRNCLPDFVALRDRLHAFQPPVLIGFEATGNYHRPLTYYLSQCGFELRLLSSLAVARTRDALYNSWDKNDPKDTYVLLHLLKTGVTQRYHDPLVHAMNDLQELAQTHYQISLRKVQVQHSIMTHYLPLYFPEVERYYTNSRAQWFTQLLHRFPCPTAITRYSQDAFEQEAWTVVGRKVNTRGFLADLYATASQSIGLAVTEDSEAIQMFRVMLAEHQHLCATRAAIEHQADQALQSHPDYHRLRTLPGVGPILALTILAEAGDLRRFPHHRQFLKFCGFDLSTQQSGQFRGISRLSKHGNARLRYAFWMAANGAVRMRQNTFREKYARYIKADPQNPDRKRKALCAVAAKVARVAHGLIKTGTDYRPYFEALPPSRALRSRGPSRQVLTS

SEQ ID NO: 442714 - protein, 327 aa, unidentified
MDTVILEVPGMQTVLNVGVDVAKDMVVVASADERWPVQQVRNQRSALRAWLKTLPAGSRIGLESTGSYHELLADLAHASGHTVYLLNPMETRHYAKALGARAKTDRVDAMLLARMVAQEHAGLRAYTPPTPQQRQVDRLIRRRAKLVRLKGALKLTMANLEGLTGEVKAVVRKLDALLAKLDATMATVAAQSALHQQAQQRVETIVGVGPLVGMSLTNTLERVPFRNADAFVAFTGLDPRAKDSGQKTGRRRLSKRGPAELRRLLFMAAMAAIKTKVWKPIYDSYRIQGWSSTATLVIIARKIARAAWSIHRYQTTFNPDRLIRGLT

SEQ ID NO: 442715 - protein, 410 aa, unidentified
MELLHPHCAGLDLHKETVVACIRHMADGKVTTDVKSFQTTTQQLMDLSDWLSSQGVTHIAMEATGVYWKPVWHILSDGEFELVLANAAHVKNVPGRKTDVNDATWLADLMAHGLIRASFVPDEPTQQMRDLLRTRKQFVRERSSHTQRIQKTLEDANIKLDSVITDIVGLSGRRMIEALIGGETDPEALAALAHGRIRATKAELEAALRGRVTAHHRFMLRIHLNHLDALNTTIADIDKEVDANVEPFRAAVEMLTTIPGVSSLAAEVMVSEIGIDMSRFKTEGHLISWAGLCPKNDESAGKRRSTRMKKGAPWLKTTLIQCAWAASRKKGSYLQAQFLRIRSRRGAKKAIGAVAASMLTAAYHMLKDGTLYQDLGTNHFDNRDKAKQALRLVNRLQSLGFTVQITSMAA

SEQ ID NO: 442716 - protein, 361 aa, unidentified
MRRLVLKEVRNQCPPPPGEVVIIGVDLSRSKWVYACRWGGQERRRFGSAGELKHLQAVVREYQDRGCEVHVVYEACGFGYEIAWWVEEQKACVIVVPPSTVERAPGAQVKTDGLDAGSLALKYEQGSLKAIYIPSREQHELRQLSRTYGQVLKDRRRQQVRLRMLLQEHGYTPPLRGTGWCALERWLTAQQLPAPLAVCVEQLVALRTAASASARQLAKELRAVARLPHYAPLVKALAQQSGVGPFTAVRFVLEIGEIHRFPRADSLPNYLGLTPREYSSGELVHRGPVRKCGPGALRAWLVQCAWVAVHRRTDQALADCFDRLEVRVGRKKAIVAVARKLALRLRARWLAFEATPSAQAA

SEQ ID NO: 442717 - protein, 414 aa, unidentified
MEVKYERCCGIDVHKKTVVACVIVPGAKRGEVEKETQTYATMADDLGALGQWLQRKGVTHIAMESTGVYWKPVFNLLEGQFAIVVVNAERIKALRGRKTDVADAEWIADLLRHGLLPGSFIPSAQQRALREVTRFRTSVVNDRVRAVNRLQKTLEDANLKLASVVADVTGVSARAILDALLAGQTDPQALAALARGKLRKKTEELQKALVGTLRSHHRILVVELLCQIDYLDEAIARLDSEIATMVQPFQVELAQLDSIPGVSQRVAEVLIAEIGVDMAPFASAQRLASWAGMCPGNHESAGKRKSGKTRQGSPWLRRALTEAAHGAARTKKTYLSAHYRRLAARRGNKRAIVAVGHTILTISYYLLTRHTTYQDLGPNYFDERDREGVKRRAVRRLEQLGYQVALSPSVSSPI

SEQ ID NO: 442718 - protein, 483 aa, unidentified
MISSVGIDLSRTGRHQVRCLDEQARPCDSFTFDSTLEGLETLEKHVFSDGATPTIVFEPTGLAWIPLATYLRARHPDSRLVKARLQKVAALRKYIHGHAKSDRVDGVTLAKMPFIDSEQLEEAYLPPAEYHALQRLTRQRERLMKSITIRKNRIGAIVEGYLPGLRAAFTNEWSVHARAFYRSRLNPFAVVRDGKQALQDFLAGVYARGSQAQSHRLYRTCQTLSEFYKRAEAAGMVNEDFFNDLQDEIARELRLMDAEETEVEGVSERVEELYRRLHPSDNLRTIPGIGVRTAQVFLAVIGDPHRFRSQSAFANWTGVVPGANQSSDSEGKGLRMTKAGPAMMKRALYQAGDIARRYDPQLAYLYYREMVHHGKTHLQAMGAVMSHLAARILTVLQNDRPYELRDIDGRPVSKTEAIELIQSRFRVSEEIRQARRHRKSHEGRPQRRGTREAAEAPQSRHTPTSPMPVYSVTTGQSMDQMRT

SEQ ID NO: 442719 - protein, 344 aa, unidentified
MDIAVLGVDLGKNVCSVVGLDKSGAVVMRRKVRRETLIALAEKLPPCVIGMEACCGAHHLGRLFAAHGHAVRLMSPEYVRPYVKAQKNDDRDAEGIAEAATRPTMRFVELKSQDQLDMQTLHRSRDRLVGERTALINQLRAILLERGMVAPQGKRKLEQFLAVLMDGQGGAGLSSRMIVLVADARKQWAELDRRISAFDAEFVRWARENEDARRLTTIPGFGAIVASALVAAVGRAEAFDRSRDLSAWLGIVPRQFTTGGKPRLLGISKRGNTYLRKQLIHGARAALPFIAERDTPLGRWAKGLMSRAHRNVAVVAFANKLTRIAWAVLRRGERFAAGGLSMAA

SEQ ID NO: 442720 - protein, 462 aa, unidentified
MTVPKTKGRRKRATPVPTSLPAIRSLVAGLDVGSSEHWVCGPARADGQPNVRCFGTTTDQLQELADWLADHRVESVAMESTSVYWIPIWELLEARGIEALLVNARQLHHVPGRKTDISDCQWLQLLHSCGLLRGSFRPGEAITRLRALQRQLANLVAERTRCVQWMQKALDQMNVQVHRAVTDLTGTTGLAIVRAIVGGERDPARLAQHRDPRCRKSAAEVARYLTGTWRAEHLFNLASALRLFDALEAEIAAYDAHLLTAIESLQPPDRQAAPVPPHPNLAKEKAIRTHGEQPARTTLWRFAGVDLTRIDGIGAGAAQVVLTEVGPDLAAFPSEDQFVSWLRLCPRTPISGGKPLKKPRNGLGANRIAGVLRLAATSLQRSKTALGAAFRRIARHKGSAVAVFATARQLAKLIYRMLRYGHDYVDIGEQAYDRQFQTRRLAALTETARSLGYTLLPNAAAK

SEQ ID NO: 442721 - protein, 413 aa, unidentified
MERYYLGLDWADEAHAVWVVNERGEKVWAGKVAQTTEGLAEFGCRLHEWGGAEITIWAALEKPEGRIVDFLLDHGVVVYPVNPKAVDRARDRFRVSGSKSDPFDAHVLADFLRTDHGHLRPLVPNSAQAQELKLLTTDYERLVQQQTCLLNQLTTTLKEYYPRILEMFEDINTPTALDFLERYPAPQALAELTPEAWQDFVREHRLHKGPAAELWKRAKALQLAIPGHVVRAKVRLVRVLTAGLRIVRTAVADYHTAIERFFASMPAAEIARSLPAGKSGVVIPMIWAEIGDVPCRWESFRHLQAQAGAVPVTKRSGKCNLVHFRFACNKRLRHALDLLAFASLRHSAWAMGYYRQQRVRGHSHHQSLRALAAKWLKIIFVLWSRHVLYSEEHHLANINRQHKYQPTPMPVGA

SEQ ID NO: 442722 - protein, 311 aa, unidentified
MTDHTIGVDISKSHLDVFRLEDGAARRFENSVAGFRALSKWLSKAPVARIVFEPTGPYHKAFEVALGKTFPLVKVNPLQARRFAEAHGTRAKTDAVDARMLARMGVAFDLAPQTPCSREAIILRDLHVARTGLIKDRTRLRNRLQVQDVAVLKRQTKARLAQVNRQIAELDAEIKALIEAQQTTARSRDILCSMPGIGPVTAAAVLTLLPEIGTLDRKQVASLAGLAPITRQSGQWQGKAFIGGGRKPLRNSLYMPALVAMRFNPDLKTKYEDLRAAGKPAKLAIVAIMRKLIEMANALVKADRLWVKKGA

SEQ ID NO: 442723 - protein, 302 aa, unidentified
MKNKSFVGIDISKNVIDVSIFREDTNIKMFPHEVFNNTRKGFGDMCSWLKKSRVVLSQALFGMEFTGCYSLDLEKFLTSKNYSFCMLSTRIVKHHPMGTIDKRDKNDSAKIADFLYRYDGTECAKPYKLPSKAMQQLKQLVNERKFLVEQRTNFMNRMQMFETKEDSAMYESYIKKLNHDIEKIDQEECELMSKEEDVFDTFQNLLTIPGIGFVNATNIIAITRNFTAFDTARQYARYVGVAPCSHTSGTSVKWRARPSAHCNGQVKADLSMAALRAVEYDVEMQMFYNNSSLKFEYMAMRP

SEQ ID NO: 442724 - protein, 339 aa, unidentified
MTIVGCDFHPGWRQVAVFDAETGEIRELKLENGNGEAERFYRQLSAPALIGFEACGNTQWFEDLLDRLGHEVWMGDAAAIRASYVRKQKTDRRDAAHILKLLMESRFPRLWRPSAGERDLRQLLIHRHKLVGIRTRVKNGLQHLMLNRGVQMKRKLWSEAGQKALRALPLEGWAAQRRQDLLHLLSGLDPQIRQLDVAIERAAQENPRAQLLMTQPGVGPITALAYVLTMGDVSRFQRGKQVASYLGLIPSERSSSKRRRLGSISKQGNSFMRMLLVESAQTVNRLDEGFRKQYQHRCHRMARGVAKVAAARRLAVRLFWMLRTNTAYPEIAHIESSPR

SEQ ID NO: 442725 - protein, 327 aa, unidentified
MNKKKTCIVGIDVSKKTFNAHFGDKDGKYANNAKGWKKLAGEIPVNSLCAMESTGYYYYRLASYLHAKGFGVKVFNPLWVRRYMQSLGSKAKTDKKDARLIAQYADTKEVRERVGWEPLPPKLARMKMIVSLLARLTKMSTAARNMNEAIGLVFSRQDGLLASMDNVSFVCQEQMEVLQKELYGLVTEVYPDQFRLLKTVPSIGEKIAAVICVAAKGMENFGSCKQLASWVGLAPSVFESGTSVRGRAHIKKTGNAYLRALLYMGTLSAVRFCKPCGNLYDRLVARGKSKMLSRVAVMHRILKIAFGVVQSGVPYRGGMAVFSAAPT

SEQ ID NO: 442726 - protein, 420 aa, unidentified
MCWTHVDLLTRPGGVVVSVHVAPVTSSTIVVAVDVGKTSALLSVTDAGHHRLFGPSEFAMNRTGLAAVLARVATSVPLSGQVKVGVEAAGHYHRPVLDHRWPDGWEVLELNPAHVAEQRRVQGRRRIKTDVIDLEAITELVLAGHGSPVTDRDVVIGEISAWAVHRSRRVATRTATKNQLLGQLDRAFPGLTLALPDVLATKIGRLVAAEFADPTRLAGLGVNRLIRFAATRDLQLRRPVAERLVAAARDALPTRDAVIARRILAADLALLADLDDQIQSAETALGSLLPRSPYATLTSVPGWAVVRVSNYAAALGDPKRWPGPRQIYRASGLSPMQYESAHKRRDGGISREGSVALRRALIDLGIGLWLNEPAAKTYAHGLKDRGKHSGVVACALAHRANRIAYALVRDHATYEAARWA

SEQ ID NO: 442727 - protein, 369 aa, unidentified
MKQITTYVGIDAHKKDLFVAMLVGAAPTPVTWQVANEPGAVRRMVRKLERDAPGPVHVFYEAGPCGYALQRQVATDRIACDVIAPALMPRKPGERVKTNRRDARKLAELGRAGLLTVVQPPTPADEAVRDLARARDDAREDLQRCRHRLGKLLLRRGLHYAGKNWTQAHRRWVDSLTWSHAAERAVVEDYQLAIDHTEARLIELDARLAELATQAPYREPVGWLRCFRGIDTLTAMLILAELHDFRRFGSARALMAFLGLVPGEDSSGEKHRRGRITKMGNALVRRILVEASWHYQHRPGVGRGLKARRTGQPARVIAIADKAQQRLCRRFRRMLAEHKPAPKVAVAVARELAGFIWAALQPPVVASHG

SEQ ID NO: 442728 - protein, 347 aa, unidentified
MTIIRIGLDTAKHVFQVHGVDENEQTVVRRQLRRGEMEKFFGKLAPTRIGLEACGASHYWARLLRGLGHEVVLLPPQYIKPYVKRGKNDANDAEAICEAMSRPRVRARLVPVKSVEQSASQMLMGVRDSLLKRRTQLCNTIRGHAAEFGLVAAKGLDKIEPLLARIAADAALPALTKEMFAVLGREYAELGPRIAEIDKKMLTFHRSNEVARRLMEVPAIGPIGACLLVTKIIDPHAFRSARRCAAWIGLTPKDHSTAGKQRLGGITRAGDERLRAVLVSGATTCIQHARNKRGRPSPWLVELLKRKPPKVAAVALANKTARIAWKLMTSGERYDPNRGAARQGIAT

SEQ ID NO: 442729 - protein, 371 aa, unidentified
MNTIVYVGMDVHKESYTLCCYTYDRDKVEYKQTIPADYRMILKYMERIRERYESEVRFVCGYEAGCLGYSLYNQLKAHAVECRILAPTTMAITNTNRVKTDRRDAANIARCLAFRTYSEVYVPDEEDVSIKEYIRMRDDQKLMLKKIKQQILSFVLRKGKRFEGGKTYWTIAHVKWLRNLELEGLDKETLSEYLITYEYLVDKIKRFDERIEELAGKEKYNEKVKNMSCLLGIKIHTALSMLVEVGDFERFEKAPMFAAFLGLVPGENTTSDSVNRLSITKAGNSHLRRLLVEAAQSYTRGTIGHKSVVLKERQKNCSPEVVAYADKANERLRRKFYRMTLQKNINRNVAATAVARELACFIWGMNTGNIN

SEQ ID NO: 442730 - protein, 338 aa, unidentified
MAIGIDTHKHTHVAVALDRLGAQLDAFETPATSAGYLALYRWAHGLGEPAFALEGAGSYGAGLARFLQAAGCSVNECERPQRGERRQGKSDLIDALIAARRLLAGERLGTPRGLSGPREDLRLLLLERRGAIRARTATLNQLQALVVTAPARLRSRLSDRTSEQLARSVARLRPGEGEQAVVRSVLRRLGRRVLSLDAELAELDRELEAIVSALVPELIAECGVGPVCAAQLVVSSGDPARMATEASFAALAGTSPVDASSGKQQRHRLNRGGDRQLNRALHVIALSRVRYHGETAAYYQRLVASGKTTREARRCVKRMLARYFHHKLCSMPALALTT

SEQ ID NO: 442731 - protein, 382 aa, unidentified
MDTALSSGMKGEATRQGPSRTERHRCAKVELRHNHLRNGGPEMNATTYGLDVAKRVFQMYWVDAQTGEIVNRRFGRDELIRFLAQRPAGRVALEACGSGHWWARKLKALGHEVVLLHAKFIRPFVQTNKTDAADARAIWTAVQQPGMRTVAAKTEDQQAMLALHRMRALLVKFRTMQVNQLRGLLYEFGATFRSGRVAGLSEIRARMVELEGALPGTMVCGLRDQLNRIDGVEQDIDRLEKRIGSWQKQDAACRAIGEVPGIGKLTATALVATMGDAKTFKSGREFASFLGLVPRQSGTGGKIRLGSISKRGDPYLRTLLIHGARSVMCHAKVPTTWQREIQARRPANVAAVALAHKMARTAWAILAHGQAYQKGYVSVKPA

SEQ ID NO: 442732 - protein, 350 aa, unidentified
MDRYIGLDAHTSSCTVAVVGPSGRRLTSQVVETNARALVSAIEAIPKSRHLCLEEGALAGWLHEMLAPHVQEIIVTAVPQSRGPKSDKRDAFGLAEMLRIGAIPRKVYKQRGRFTQLAYLAKAYQMLVSDDVRVQNRIKSLLRSRGIQVAGSAVYTTTGRSTYTDRLPAEAMTMADLLYQQHDHLSDLRKQAQKEMIAEARKHPEYRCVKSCPGLGEVRAALLLPVIVTPYRFANKRQFWAYCGLAVISRSSSDWVRTRTGEWVKAPVQQTRGLNKNFNHTLKTVYKGAATTVVGQAQDEPLYQHYQRLLDGGTKPNLAKLTIARQIAAISLALWRNQEDYDQSKFKQPT

SEQ ID NO: 442733 - protein, 445 aa, unidentified
MRVRKTLRSRKPKLPKHLEHINPHAAGIDVGSRSHFVAVPPGSCEHPVREFTGFTDDLHRMADWLLECGVTTVAMESTGVYWIPVFEILESRGLEVRLVNARHVKNVPGRKSDVLDCQWLQQLHSYGLLEGAFRPSEEVCTLRGYVRQRGNLVRYAAAHIQHMQKALSQMNLHLSTVIKDISGVSGMRIIRAIVGGERDPVSLARLRDGRCKSSESTIARSLHGNWRCEHLFSLKQALELYEVYQAQIAACDREILEQLARFEGSSGSGGAPPVDLNEALLRISGADLTAIDGIDTLNALKIIAEVGTDMSRWKSAKHFASWLGLCPGTKISGGKRLSTKTKRIVNRAAVALRISAVSLKRSKSALGAYLRRQWARLGGAKAVTATAHKLARLVYSMLKHGSAYVDLGQSYYEERYRDRVVKNLKRKANTLGYQLVRNADQPASI

SEQ ID NO: 442734 - protein, 330 aa, unidentified
MLADQVDYVVGVDPHRDSHALAMVHVLSGAVVFETTIAASSQGYVEALQLVDAHASGRRAFAVEGSGSFGAGLTRFLTGRGERVLEVSRLRRERRSGGKTDALDAVRAARSVLGLERPATPRAGGERQALQALVAAREGAVNAKCAGLAQIRDLLITTPEPLRGELRPLTQAPLLRRLAATRPEGRRDPELRGSMLALRSVARRVLQLQAEERDLGRQVGPHAAAQLVLSWSHHGRIRSEAAFARLAGAAPIPASSGQTVRYRLDRSGDRKLNRALHLILVTRKRTHPPTRAYIERRIQEGKTRREANRCLKRYLARSLYRLLEHPPLPA

SEQ ID NO: 442735 - protein, 423 aa, unidentified
MISAAIERCAGIDVGKKFLAVCILTGPLDGEPRVERRRFGTVTAELESLRDWLKAEGVTDVVMESTGSYWKPVFNVLEGSLKVCLANPQEVRNRKGHKTDDKDGWWLAHLLRHAMIYPSFIPPRAIRELRDLTRRRKRLLSDATSEKNRVQKVLEDANAKLGNVLTDVFGVSGQLMLEALLEGKAGPMEIAQLAKRGARKRIPEIIQAVEGHRLSDHHRKMIRYSLKHMLFLEEQIAELDRDIAAQIGSAGLGQAQQLIQTVPGIQDRSAANILAETGADMQQFPSAKHLSSWAGVCPGNNRSAGKNKSSHTTGGNPWLRSALTECAWAAAATKNCSLKDKFWRVTSRAGGKKAPALIAVSHVMLTLIYQVLQTHQPFEDRKLPPLGEPHKQRMIRHHVRRLGKLGVAIPRIVYQPPDPSASH

SEQ ID NO: 442736 - protein, 405 aa, unidentified
MKIIALDVHRTFAQVAILENGKIRDAGRLELEREHILKFAERLNVEDEVVLEATVNTKAIVRLLSPFVSRVIISNPLLVRAIAWAKVKTDKIDASVLAKLHASGFLPEVWMPDEETERLRRVVAERVQLVSQMTRLKNRIHSVLHANLIPPYNASLFTKRGRKWLAEQPVAQDQRRVILRHAGELDRLGLELKQIDEDLAQTALQEPRMKQLMTITGVNMIVALSVLAAIGDIGRFSSPEKLVSYFGLNPRVRQSGDKAAYHGRITKQGRSHARAMLVEAAWSVSRTPGPLRAFFRRIREKRGNQIAAVATARKLTVVIWHMLSKGEEYIWSRPALLDWKLRKLELAAGYPSHRGGKTKGSAADYSLKSVRDLEREAVGHAEEVYRRFVIKWKQKSPMAKPVAPQ

SEQ ID NO: 442737 - protein, 428 aa, unidentified
MNAPLNNDNRQNDYAAFIAIDWADRQHVFSLQVAGQSTKETGTLEQKPEVIGPWVAKLRERFGGRLVAIAVEQSRGALIHALLSYDFIVIYPLHPSTVAKFREAFKSSGAKNDPLDTDQILQILTKHRDLLKALNPDTEETRLLARLVEDRRQAVDLRTGHIQALSAALKEYFPQLLELLNGNLASRLACDFLIKWPTFEAFQQAKPSTIKRFYYGHNIRSPRLIEKVLGLASTAQALTTDGAIVESGRRLSQMYAQLIQTLNPVIEAYDQRIEEVFHDHPEAHLFNQLPGAGAALAPRLLSFFGTDRSRYEAAGNVQSFCGIAPVTKSSGQTRVVYFRHACPKFARQTFHEFARLSVAKCQWARNYVDYYRGKGKKFHTIIRGLAFKWIRILFRCWKNQTPYNDTNYMEVLKKRGSIFATLHLEQNA

SEQ ID NO: 442738 - protein, 385 aa, unidentified
MGTQTFIPRDYDVFAGLDVDKKSIAVTFTDHQGFLKSLSMPNRVEYLVNHVRKHYGDKKVVFAYEAGPTGYGLYDGLEAHAYRCLIASPSMIPKAPGQRVKTNRLDSRGISENLRGGQLKGIHVPTALYRELRHLTQLRDAMVSEMVGMKQRIKSLLLMEGLEFPPAPAGSQWSFLVKKKLRGLPCSGTVRFKVDRLLDSLEFDQKQVLQTTREIRRFCQSDPELSRCIGHLQSLPGIGWIVASQLMARVGDWRQIKNIRQLPAFLGLVPTENSTGERTERGSITQTGDGRLRSKLIQASWSAIRQDGELREFFRTVAKRHPRHLASRIAIVAVAHKLCVRAAVVLMEQRPYEMRQKVQSAPLTQEETVPQGTTRREPVPGEKNS

SEQ ID NO: 442739 - protein, 358 aa, unidentified
MTTLMDDVTVIGGVDTHKHTHYAAAIDDHGRLLGHQEFPATSPGYDALRSWMRGHGIVAAIGVESTGSFGAALARELSRNGEHVIEVNRPNRIARRMDGKSDRLDAEQIARAVLGETSTAIPKSKTGMVEVIRTLRVTRSSAVKARTQAFNTLFGVMIGGPSHLRDELVDLTKRTLVNRCLRLRPETEDLLSLAAEPARMHLAGTKLALRDLARRWKTLDGEVKQLSSQIDALVTSAAPDLLQLHGVGTEIAGQFLVTVGENTDRIRNEAAFAKLCGVAPQPASSGRTTGRHRLSRSGDRAANSALYIITIVRMRRHEPTRAYVERRTAEGLSKREIIRCLKRYIAREVFANLPRPAA

SEQ ID NO: 442740 - protein, 355 aa, unidentified
MSQEKYIGMDVHQATISVAVMDGNGKLVMECLLETKAATILEFVQGLRGTLSLTFEEGTSAAWLHDLLKPHVSRLVVCDPRKNALLKEGNKSDRIDARKLAELLRTNQLKAVYHGEHGIRTLKELGRSYLTLSKDVTRTMNRIKSLYRSWAIPCAGTSVYAQRHRAEWLAKIVEPGVRIRAERLYQQLDGLQSIRQQARRELLQESHQHPAVKLLRQIPSIGPIRSALLVALLQTPHRFRSKRQLWAYSGFAVETHDSGEYRYVRGKVQRNRERITVRGLNDNHNRDLKNLFKGAAISASTRPGPLHDFYVARVAQGMRPTMARLTLARKVAAITLTMWKKGVSFDPQQLSRQSV

SEQ ID NO: 442741 - protein, 338 aa, unidentified
MIVVGLDVHKHALTAVAVDELGRGLGERTSAVSAEPLLDWARSLDRECLWALEDCRHVTRGLEHALLAAGERLVRVPPRLTAPQRRRGRRRGKSDAIDALAIARAALQEPNLDRPRAGEERLRELKLVLDHRDDLVAERRRAQQRLRWHLHELDPALRVPLGALDRAIWLDRLARQLARRGQTTQVRIARDLVARSRRLTRSILELERELAERTEVLAPRLLELVGCGPLSAAKLLCEIGPIERFRSDAQLARHAGVAPLDASSGKQQRHRLDRGGNRQLNCALHRIAVTQGRVYPPARAYLERKQGEGKSRREALRCLKRQLARTVYNTLKSEPSLT

SEQ ID NO: 442742 - protein, 410 aa, unidentified
MKAMNRVAGIDVHKNMLAVVAAPQGADEALWERRKFGTTVAELRHLAAWLQERGVQDVVMESTAAYWRPVWLGLEGHFRLHLAQAQSNRAPYGRKTDFGDTLRLIRRWWAGELRLSFVPDATQRRWRLICRAMGQLAEERTRLHNQIEALLEEGQIKLTTLVSDLLGLSGWRILQALAQGRQTAVEMAALADARVRATPEQLADALEGNLDEVCRSLLRQALARLELMEEQESVLRQELSAQQQQCQSVIERLCAVPGIQVLAAQKILAALGARATAFPTAGQLASWVGVCPGRNESAGISASQHCPKGHRPLRSLLAQLAWAAVKTKGSYFQEIFRRWIPKLGAKKAVWAVAHKLIRIIWRILHEQDTYVECGALALNEASRQRKKRRLVRGLRKLGFAVTLTPNPQSA

SEQ ID NO: 442743 - protein, 342 aa, unidentified
MIDTMIGVDLAKNVFQLHGASMSGEVKFRKKLSRPQFRKFMEEQPACIVVFEACGGAHYWARELEGQGHRAKLIAPQYVKPFVKRQKNDAADAEAIVIAAQRPEMRFVEPKNNEQIARGVVFRSRDRLVRQRTEQINALRSVLYEQGQVFPMGVRQMKKIAEFLELTDNGLLRLIREECEELLASISDLTTRIEAKTLKLKKLSNESEVSRRLKTIPGVGPLTAMAIEAFAPSMEIFRYGRDFAAWIGLVPKQHSSGGKARLGKVSKEGQVDIRRLLIIGAMSRIGWMGRKSIQDGSWLDRMIKRKPKMLVAIALANKMARTIWAVLTKEEDYRDPAKTAAA

SEQ ID NO: 442744 - protein, 341 aa, unidentified
MSTVTLIGIDLGKHSFHLHGQDATGKMVFRKKCSRQQLLTLLGNTPCSTVVMEACAGAHWMARRIQALGHQAKLISPQFVRPFVQGNKNDFADAQAICEAASRPSMRFVSARNEAQQTVSALHRVRESLVGERTGVTNQVHAFLLEFGISLPRGQAIIRRLPAVLAEHELPPRLVALLERLQENFKYLDEQIGQIERELFQQLREDERSQRLLEIPGIGPITASVLMTELGDAQQFGSARQFAASVGLVPRQYSTGGKPTLLGISKRGDKNLRRLLVQGARAIMQRIERRTDRLGVWVRQLLARRHSNVVACALANKLARIAWAILANGTNYRSEQAVSAT

SEQ ID NO: 442745 - protein, 371 aa, unidentified
MKQFSKYVGLDTHKDTIAVAIADAAGNPARYYGEISNTPAALSKLVKNLSPHGEGVAFCYEAGPCGYGIYRQLTEAGHVCSVVAPSLIPSKPGDRVKTDRRDSENLARLHRAGELTPVWVPDQEQEAIRDLTRAREDMKHLERQARQRLTAFLLRHGHRYTTGKSKWTQAYWRWLERIRFDHRVQQTVMQEYVDSVKQQQQRVADLERTMEAALADWALAPVVKGLMALRGCRLVTAMTVAAELGDITRFDSPRQLMKYLGLVPSESSSGQKTRRGGITKTGNGHVRRVLVEAAWCYRFPARKTAPLQRRAEQAPEAVQAIAWKAQKRLCGRYQALSKRGLMPQKTCTAIARELTGFIWAIACEVIPRRTV

SEQ ID NO: 442746 - protein, 347 aa, unidentified
MFYCGLDLASVSSYLYVTDGRGTKVAAGEVETSRQALRKRLEWFVGDGLTVAIEAGNQTAWIHEVLVELGAKVIVVNATKVKLIAESRRKTDKIDAKVLCELLRLDGLPHPVHMPGRPTRALRGLLVARRQLVTARTKICNVVRGMLRQEGIRLPAGKLTSLEAWRRLLEDGFEQPHLAVIVKAYFESFQTLTASIRTLDRELAARERQDPRSARLQTMPGVGRIASLTFLAAVDDVQRFGSARKLVGYAGLAPTVRSSGERTEYGPISREGRRELRAIWVQVAHVVAKDTHRETQPLRTWFNRIAKRRGKKTALVALARKLLVIAYHLLKAETVYDAKRLRGKKAA

SEQ ID NO: 442747 - protein, 338 aa, unidentified
MNYVGIDHHRQYSHMTMMDQEGQVLRSGRVPNLRAEIEKFLEGGETMEAVIETGRSSYTMVDVLEEMGVAVKIAHPHEVKAIARAKIKTDKRDSEVLAHLLRMNMVPEVYRRSKENRQAQRVLRQRSFYVSAMTALKNRVYAFLAQQREEILEVVARETNIFSEKGQKVLLGLDLVPREKKLLEALLKTYRHVETRIGESKAFVEKLYEESREAQFIRTIPGFGKYLAVLVAVEIADLTRFADPAHLHAYAGVIPSTHSSGDRTHHGKIIRAGNRWLRWAAVEAVWPAIRADFDLRCFYERLARGKGANKAKVAMARRLLTIIYKVLKEGRNYIAYPR

SEQ ID NO: 442748 - protein, 322 aa, unidentified
MSVKVLGIDIAKQKFDVALLSDGKTKHKTCKNSTEGFEILMVWLEKQGVQKVHACLEATGNYGEDLAIYLYEASHTVSIVNPACIKGFAQSELIRTKTDKIDAGVIARFCLAMKPEPWIPPTPAIRSLRALVRRVDSLVDMRSQEKNRISTAHESVVFLIKEHIAYLDQEIEKIRKQIADLIGQNPQLKQRKDLLDSIPGIGKATIPHLLAELNNLEKFNHVREVVAFIGLAPKETISGSSIKGKPRLCKIGHARLRKALYMPALVSIQCNPVMIAFYNRLKEKGKNGKVIVCAIMRKLVHVIFGVLKSGKKYDPNYKPASA

SEQ ID NO: 442749 - protein, 355 aa, unidentified
MKINESVLKDYDVYLGIDVDKKSFAVTAMSRYNTIGEQKMAANAVHLEHYIQNHYAGKRVLCAYEAGPTGYSLYDYLRSKNYPCFVVSPSNLLKMSNERVKNNRLDSQKIAGQLRSGELRSIRVPEEAYRELRHLVNARENYVEKRRQSRQRIQSLLLFENLYKQMKDPDKNWCRSYFEDLKLIECNPSVRLRMNTLISDHDYACGQLLMVYKQTRQFIADRPEIREYMRLLCTIPGVGFITAVTVLGRIGDPTLLQNVREIGCFVGLTPREWSTGDRVHKGSISHFGDGILRSLLVEAAWVAIRKDNELKMFYERLSRHNHPKGSAQKAIVAVARKLTMRIFRVLKDRRPYSVH

SEQ ID NO: 442750 - protein, 326 aa, unidentified
MVSSSLLPVVGLDVSKATLAVCYQLDRQIHHLEVSNDKAGFAQILQVCGVQSLFVMEATGTYYLALAYHLHEQGRQVAVLNPLVIRRFIQLHLGKSKTDRKDAQWLLRYGQQQVVKPWQPDESVLVECRQLEQVTEQLLKQKTMVSNSLEALQRQPVISPLAQQRLQQTWQLLDDQVQALEAELLTLLETRFSQEMKLLRSIPGIGRKTAGLLLLFAGGFTRLDNYRQLIAKAGLSPREYTSGTSVRGKVRITKMGGGLIRGKLFRCSFAAIKFNKTCKALYDRLVAKGKNGKVALIAVCNKLLKQAFAIVKSGVPYQADFARIPA

SEQ ID NO: 442751 - protein, 364 aa, unidentified
MQYINDTELSSHEETRCQFNGGTGAIKLGIDVHQDFYVVVEQVGASNPKPPQRFQKEAFLFWAARLKQKSSAEVYAVYEACGFGFSLQRKLSALSIRCYVVCPQKLDEQNRRVKTDGLDAKALCLKLDRFVQGNRDALATVRVPSEEEEQERAIHRQREQLVKARKQLEAQGRSLMVNHGLEPVYNWWKPRTFTALDAPQWMKELLANSQPILVALQQKIAALTVQLQSAASPEQPRGLGKMTSLIIDREIGDWKRFNNRRQIASYTGLCPGEYSSGNTRLQSCVTKHGNPRLRAALVELAWRLVRFQPNYHPVRKWRQILAKGALATGAARKKAIVAVARQLAVDLWRIKTGRLRAEELGLIN

SEQ ID NO: 442752 - protein, 312 aa, unidentified
MDAIVVGIDVSKDRLDVAVRPTGESFVFKRTGVGIEDLIVRLEALSPKMVAIEATGGFEAMVAAGLAGAGLPVVVVNPAQVRAFAQALGKRAKTDPIDAAVIAHFVEATKPKLRHMPDETTRHLAGLVARRRQIVEMIAAEGQRARRMSDKRLIKSIARLRKALKKELSAPDVLIGDQIRGSPVWAEKEDLLASVPGVGKTIARTLIAELPELGSLNRRQIAALVGLAPWTRQSGQWRGKSFIGGGRKSVRNSLFVGAMVAARYNPQLKSFRDKLVAAGKPKLIALVAVARKLITILNAILRDRRSWQQISA

SEQ ID NO: 442753 - protein, 339 aa, unidentified
MNVMIGIDPHKASHTAVAIDRAEDHLSSLKVRATHRQVDQLMDWAQSFEKRTWAIESVGGMGYLLAQQLVARGEDVLDVPATLASRIRVLATDRSNKNDPGDARSIAIAALRAPRLRAVEAANHAEVLRLLAKRNMDIGSQRQRVICRLHSLFAELAPGGMAKELYVSDADTLMARLDPQTPTQQMRFDLVLELLDDVRRLDTQIKESHRRIKVAIKASGTSVIDVYGVGPIHAAALIGYSGDITRFADRDAYASYNGTAPIEWSPGGRVVHRVSRRGNRKLNHALHMAAITQLRNPGTQGRIYFERKVAEGKTKKEAVRSLKRQISNSVYRQLLLDAR

SEQ ID NO: 442754 - protein, 345 aa, unidentified
MKITTVGIDLAKNVFQVHAVDERGRAVLRKQLRRDQMTAFFANLPPCLIGMEACASAHHWARTLQKFGHTVRLMAPQFVKPYVKSNKNDVADAEAICEAVGRPNMRFVPIKSVEQQAVLSLHRVRQGFVRARTAQGNQIRGLLGELGLIIPKGIVNVAKRVPTVLEAAGDELPASFRQLIERLTKHLKELDRQVDELEAQIKAWHRGSELSCKLEKIPGIGPLGASALVASIADANSFDNGRQLSAWLGLVPRQDSSGGKPKLLGISKRGDVYLRTLLIHGARSAILAAQRKSVNTNVWLAKLLDRRHPNIAAVALANKNARTVWALLAHGREFRADYVPEVSAA

SEQ ID NO: 442755 - protein, 341 aa, unidentified
MSLYIGVDIHARQQTVSFLDTADGSTGQVVLEHEGDDIKGFYGQFQGEVIIGIEACGYTNWFEELMEQLGHQLLVGDAAEIRRLARRRQKNDRRDADLLLDLLVHDEFPALFRYSKESREVPRQLRYRHKLVKLRTMVVNTLHALAINAGLSLRAQLLTKGGRKQLAGLQLSAISRQQRDELLSLVDELTRRIGTVEQWLQEQAKHDARVQRLQTHPGVGLLTSLCLVHTLGDLSRFSSTRKVAAYVGFDPMEDSSAERKAYGGISKAGSRLLRYLLVEAGQTAVRGDQHLKQFYRRLLPRRGKARAKVAVARKLLIRCFIMGRAEIDYAEFLRRAKKETE

SEQ ID NO: 442756 - protein, 368 aa, unidentified
MKQALFAGIDLHSNNVMIGIVDQSGRRLKHQKLGCDLKEITSFLEPWKPQLKSVAVESTYNWYWLVDGLRALSYPTKLADPAQIEQYSGIKHADDKNDAFFLADLQRLNILPTGYIYDPALRPVRDLLRRRLGLVHQRTALLLSFKSLYARTTGQAMSLSRLKAMEPNDTKTLYRHPANCLIALLQKEHIDKLCQSIELIEKSVLAQARELPCYQKLLSLPGVGRVLGLTITMEVGEISRFKTPGQFASYCRTVNSQRLSNNKKKGDNNRKCGNKYLAWAFVEAANFAKQHHQHCRRWFDRKAARTSKLIATKALACKLAKAAWYLMSQGSDYDPERMCPEGAMKEEKLKFVRAAASQKIGVGKNPFD

SEQ ID NO: 442757 - protein, 447 aa, unidentified
MGRARKRYVGLDVHKDVVEYCILDAAGKKVDGGRIVCEHSVLMRFATKTLSPKDHVALEATTNTWSVVDILEPHVAKIVVGNPLKTKAIAEAKVKTDKIDAMILAQLLRCDFLPTVWIPDAKTRVLRRLSTFRKSLVQDGIAAKNRIKGILNHLLLKQAITWTKDDMDELKKLDLPLHERTIMDCEIAVLEHLKTQIATVESEIKKLAYEEENVRLLMTLPGIDYNTATAVVAAFGDISRFKDADHAASYLGLVPKVKKSADTSRHGSITKAGASLARSLLCEGAQHLSRNEGPLGVFFRRLLQKKTWNQAVVAGARKLATIAYHMLKNKEPYRYAAVPRTQEKLRRLRTSVTGQKPERPRYRYDEKLREHIKKDSDVSVSFVPPIAEVYEKEGLPPARSFDKLSAGEQRVIKEMDLIEHVRKTEHLQVIAKPKRIRKTQSDPSCKG

SEQ ID NO: 442758 - protein, 383 aa, unidentified
MTGTEPQAWEMGLMENITYVGLDVHKATVCVAIAEGSRSGEVRQLGVFENRPELLLKLVARLGKGGRRLSFCYEAGPCGYGLHRFLSGCGHDCVVVAPSLIPMKAGDRVKTDRRDAVMLAKLHRAGELTPIWIPDAAHEAMRDLVRARATAGRVLSKARQHLQSFLLRHDQIYRGARAWTLAYRRWLTTVRFAHPAQQIVLQDYIHAVQDAEARLDRLTRQIEELLPSWSMAPVVTALQAMRGIALVVAVTVVAEVGDFRRFANARQLMAYLGLVPSEHSSGASIRRGGITKAGNVLARRVLIEGAWTYRMPARVSRKLHDRNEKLSPAIRDIAWKGQIRLCSRYRRLAAAGKPKVVVTTAIAREMVGFIWAIARIAQPTLQG

SEQ ID NO: 442759 - protein, 351 aa, unidentified
MERGVDTHKRSHVLVALDDEGRQLGTRTIANTPEGWAEALVWARGKQQHHRRWGIENGGSLGKGFAQFLLSQGEAVVREVRPQRTAQYRRRGRTQDKTDQADALAIARLLLAQGEHLPTIPRDDVSTELRLRSDHRANLLADRIRLINQLHAPMLQIDPDYPARSGALTARRGLLYCRDLLLLEADGVTLTRQLIVRQLVGQILGLDEEIGTITAALGERVRASRTPILALCGVGEVIAARLIGELGIVPRVHAAAALAALAGVAPVAVSSGGRGGFRLNRGGNRQRNRVIHLMALSQRRCDPRAQAYYAKKRAEGKTRRAAMRCLKRRLVDVLYRCFTRGTVEQPVAIAA

SEQ ID NO: 442760 - protein, 367 aa, unidentified
MEKPSKGAQMTVGLDLGDRFSHVVVLDGEGQVVEEGRVATREAALRQRFSGCSPMRIALETGTHSPWVSRVLKDCGHEVVVANSRKLRLIYENPSKDDRVDALYLARVARVEPALLSPVEHRAETVQKDLALLRSRDALVSARTQLINHVRGLVKSVGSRLPACSSRSFPKKVSEKTPDSLRAGLLPVLDEIASLNDRIKQLERQLQILCNESYPQTKLLRQVTGVGPITSLAFVLTLESPQRFPKSRTVGAFLGLVPGRKQSGGSDPQRRITKQGDRCMRRLLVNAAHYSLGPFGPDSDLRRFGLKIASRGGKNAKKRAIVAVARKLAVLLHHLWRCAEVYEPLYQENHKAGRRGKVARALATVGN

SEQ ID NO: 442761 - protein, 332 aa, unidentified
MKSVYARVIGIDVSKDTLQISDSRSKLTGVIDNLVSAIKSMITKLKKYKGNVLVVCEATGGLEYDLVDLLHEAQIKVVIANPAQMRHFAKGHGFLEKTDKIDAHVIRLFGEQVQTTPAAPRTPEQKRLTALTRRRKQVIDLLNQEKNRLGQCHFAETKLLIKETIENLVKQLESINLSLKDLIDEMAKTNRNISFLLGVKGIGYTTVATLLGELPELGSLSRTEIAKLVGVAPLTDKSGKQDNKRSIQGGRCTVRTALYLPTMSAMQHNAKISRFAKRLKRNGKPHKVVVTACMRKLITILNQMIKNQTAWDGTKKGDERASSSSPTCSISS

SEQ ID NO: 442762 - protein, 359 aa, unidentified
MQAQIKKLDFTGQNIFAGLDVHLKQWTVTIRTETISHKTFSQPPKPEVLYNYLTKNFPGGTYYSAYEAGFCGFWIHNKLKSYGINSMIVNAADIPTTDKEKKLKADPRDSRKIARSLVNGDLEPIFVPSIKSIEDRTLLRTRSSLVKDITRLKNRIKSFLYFYGIEFPEVFSKSDSHWSMKFMKWLEEINFTEKSGKDSFAILISEVKNLRSALLQANRLIRDLSKTEAYNTNVFLLRTIPGIGIITSLTILTELETLTRFSNFDKLCGYIGLVPSTKSSGDKEIIGEITSRGHSVLRSAIIESSWVATRLDPALMLSYNEYCKRMEPNKAIIRIARKILNRIRYVLKNKQPYKCLTVK

SEQ ID NO: 442763 - protein, 418 aa, unidentified
MTATDITASTLLVAIDISKHRHEVLIGVPGKKRRRRLTVMNTLEDFKRLTATLASYDMPVRVGFEATGNYHRTLAHHLGRAGFDLKLVSSVALARTREALHNSWDKNDPKDAQVILHMLEIGAVQFFHDPMVIGTADIQELSKTHEIVSRSKTELWHRILTHYLPLYFPEAERFHRSSRTDWFLAFLEKYPSPHMISAMSRDAFIADAWDVVGRKVSKERLLSDIYATATGSVGLPVHPTSDAVGMFRLVLAEGRSLIRQRDVIEARAIELLSDLPDYQLLTTIPGIGAINAMTILAEAGDLRRFRHHRQFLKFCGMDLATVQSGMFRGHSRISKYGNARLRRTLWMAGQTAVLKRTNSFRDKFERYISKDRHNAHLRRKAYTAIAAKMARTVHAVVNHGEPYRPFFEGVSPGGRTSL

SEQ ID NO: 442764 - protein, 339 aa, unidentified
MKKVFIGIDFSKLKFDAAIYSVDTKAIVSSEVFDNEQSGYVGFFQWVKENTCCQKSEMLFCGEHTGYYSGNLSVFLYESGYDMWLVSGLEMKLTQGIKRNKTDRVDACKIAEHAYRYQDKVVLFQPVSKALDEIRELLSYRERLVETRKVLTTSVNEMKRVKDNTSCDYIYQDSIEYIKKLNASVRDCERRIETLMKQDVALKTNYKLVSSVVGIGLVNAALIMVTTANFTLFDNPRKFGCYCGVVPFEHSSGSSVRGKTRVSKMANRRIKTTLTLAARNSVRFDPELKEYYERKISEGKNSWLVMNNVKNKLIHRIFAVVRDGQMYEKQYIHPLKQAA

SEQ ID NO: 442765 - protein, 460 aa, unidentified
MAKQRGKRKKDAKADATEGLPPLNLHAAGIDVGSAEHYVAVPSDRDAEPVRKFGSFTADLHRMARWLKDCRITTVVMQSTGVYWIALHDVLESHGFEVNVANARHTKTLPGRKTDVQECQWLQKLHTFGLLNNSFRPPEEIRTLRGYLRQRENLVAAAATCIQHMQKALTEMNIQLANVISDISGTTGLAILSDIVRGERDPYKLAMHKHSRIRASRQEIARSLEGTWRQELLFVLEQSLDLYQTYQQKIQTCDERIDGQLRSMEPRIDPMSEPIPEPRRGKDARGHQSGFDLRGQLYRITGVDLTRIDGIEVQNAQTIISEVGVDMSRWKTEKHFASWLGLCPDNRISGGKVLKRGTRHVVNRASTALRLAALTLLRSQSALGAKFRRLRSKLGAPKAITAMAHMLARLVYRMLKFGHDYVDRGVEFYEAKYQQHQLERIRKQAAALHMQLIPLTRVVS

SEQ ID NO: 442766 - protein, 324 aa, unidentified
MNVKTIGIDLAKNVFQIHGVDEHGKRLFNKQLRRAQMASFFANIPPCLIGMEACASAHFWANKLISMGHNVKLMAPQFVKPYVKTNKHDAADAEAICEAVTRPNMRFVPVKTAEQQAVLALHRSRQSFIKQRTAQANQIRGLLAEFGIVVPRGIQQLQRRLPELVEDADNPLPVLFRTQLSLLQHHMAYLFDVIATLDKQIEQCYRQNALCQRIGKIPGIGPVTASALIATIGKANNFENGRQLAAWLGLVPRQHSSGGKQVLLGISKRGDTYLRTLLIHGARAVLQSAKHKQDAVSSWANQLRGRLREGAESYAKALASDILR

SEQ ID NO: 442767 - protein, 369 aa, unidentified
MEKPITHVALDDSKQSIVVGILRPRGREPELRQIPNEPRHLRRLFERLKREGPVVTCYEAGPSGYDLYRQLTALGVPCQVIAPALTPRKPGDRIKTDRRDAAKLVRLFRAGELTPIHVPDEVAEAARDQLRCREDVQEDLLRWRHRLVKFLARHGRVYREGRHWTQRHWAWLRSQRFELPVLARTYEEYRCTVEQLLARAAELGREIAALAETAPYREHVGWLRCFRGIDTLGAMGLLTEIGTFYRFPHPRELMAYLGLVPSEASSGERERRGGITKAGNTPARRILIEAAWHYRHPPRLGAALTRRSQGQPKAGLAQAWQAQLRLHRRYRHLVGRGKRPPVAVVAIARELVGFLWAALTQAAPAARAA

SEQ ID NO: 442768 - protein, 402 aa, unidentified
MNAVGIDVSKGKSMVAIMRPFGEIVSAPFEIKHTASDINSLVELINSVEGESRIVMEHTGRYYEVLAHQLSEANLFVSAINPKLIKDFDNDSLRKVKSDKADAVKIARYALDKWQNLKQYNVMDELRNQLKTMNRQFGFYMKHKTAMKNNLIGILDQTYPGVNTYFDSPARSDGSQKWVDFASTYWHVDCVRKMSLNAFIDHYQNWCKRKKYNFSQSKAEEIYGKAKELVPVLPKDDITKLIIKQAVNQLNSASTTVESLRTLMNETASKLPEYPIVMAMKGVGASLDPQLMAEIGDVSRFTHKGAITAFAGVDPGVNESGSYEQKSVPTSKRGSSDLRKTLFQVMDVLIKTHPQDDPVYQFLDKKRAQGKPYYVYMTAGANKFLRIYYGRVKEYLSSLPES

SEQ ID NO: 442769 - protein, 326 aa, unidentified
MEHELHYIGIDTAKEKLDVDVLRPDGRHRTKKFANTTKGHDELVSWLKGHKIDHAYICIEATGTYMEPVAECLYDAGYIVSVINPALGKAFAQSEGLRNKTDTVDARMLAEFCRQKRPAAWEAPHPLERALRALVVRHQALTDMHTQELNRTETAREVQRPSIDAHLLWLEAELKRLEKQIKDLTDDDPDMKHRRKLLESIPGIGEKTSAVLLAYIGLKDRFAHARQFAAFAGLTPRRYESGSSVRGASRMSKAGHVSLRRALYMPAMVATSKTEWGRAFRDRLAANGKKGKVILGAMMRKLAQVAYGVLKSGVPFDASRHNPVAA

SEQ ID NO: 442770 - protein, 367 aa, unidentified
MKKVSTEAAKPSNKISRQKLTIGLDLGDRSSWYCVLDESGQIQLEQRIRTNVKTLQEVFAAMPRSRIALEIGTHSPWISRLLSELGHKVIVANARKVRLIGESRKKDDRLDAQTLARLARIDPKLLYPVKHRSAQAQADLMTIRARAGLVRARTALVNTARGLAKSYGERLRGCNVRKMSPEKAEGLSPELQAAMEPLLNAIESLSERIVEYNERIEKLAQDSYPQVALLKQVKGVGTLIALTFLLTLEDPHRFRKSRDVGCYLGLQPARRNSGQSEPQLHISKEGDPYLRTLLVQGAQHILGPFGTDCDLRRWGLKLAERGGRNGKKRAIIATARKLAVLLHRLWVSREAYEPLHNSSRMTMPAAA

SEQ ID NO: 442771 - protein, 407 aa, unidentified
MHIFGIDISKASAFVAHYEDETFVKELDLFYDSKNLLQFYTYLKCFEDKLLIFEATGVYSTIIRQFCINHNIKHICINPLEAHFKMKSLRRYKTDKVDAHKLAHLGFTLDEKYIIHHTSDEDIERKSYTRLIMRIEDDLTKLKTRLKERLSQVFPSLQDLVKHNYNIPNLRLINLFAHPQFVLNLTKQQLKKLIKQHNNCQKTHLENLTIKLVEWAQNTYITVHEEHPLVEEIKDITEDLIRLIGRKKNYVAKLKKLCADQKLYHVLLSINGVGEQNAALLTGELGNIDRFETNKQLNAFVGIDIVRYESGTVYKKDRINRRGSSVARKILYQMVELFIMNQHRQQNHICDYYYKLKEPPYNKHHKVAMIACVNKLIKVMHYLNTTNSRYDFERATRHLKDNSIKPS

SEQ ID NO: 442772 - protein, 320 aa, unidentified
MMAQNNFVVVGIDVAKDKVDACIRSLSQRQTFPSTAQGRRKLISWLRKHHVGKAVMEASGGYERDWAKALREAGLLARVVDPKRVRNFARSAGRLAKNDAIDAEMIAWFAETFAEATCQVYDAEREKLVQIVYARQALIDVQTDLQNRGEHSVPDVVQRMQTRLLKKIAAELATLEAAMVAMVRATPRFAELAEIIESVPGLAGITSAGLIAAMPELGQVSNKAAASLLGVAPYDDDSGKRRGERNIKGGRRKVRNLFYMACLGAATLHNPMLKVFYQRLLAKGKEKKVALVACMRKLIVILNIMIARREKWDPSRHASA

SEQ ID NO: 442773 - protein, 424 aa, unidentified
MSKKKSGLAGLQALFARVCGLDVHKKLVVACVRILNPKDGTVQSTLHKFGTMTADLLELRQWLAEQKVTNVAMESTGVYWQPVFNLLEGHFQVWVVNAQHIKKVPGRKTDMKDAEWIAQLLQCGLLRPSFVPDRQQRELRDLTRQQTKLVQQRNAVDNRIQKVLETANIKLGSVASDVLGVSGRKMIEALMAGEKDVTILAELAQRKLREKIPQLQRALEGELTEHHRFLLRQLLGQYDFLEKEIASVSERLGAVAPPSFRAAVEQLDAVAGVGERGARALLAETGTDMSRFPSHKHFASWAGRCPGNHESAGKRRSGKTPAANRHLDAVLTEMAHAAVRTKNSYFKAQYHRLAGRRGKKRAIGAVKHSLLVTVYFMLRDNRPYKDLGVDYFDKLNPQQRIRYHVRRLQELGQEVELSPMADAA

SEQ ID NO: 442774 - protein, 357 aa, unidentified
MEQRNKISFKGQNIYIGLDVHLKSWSVTILSETSVLKKYSQDASPEALHKTLTMRYPDAEYYSVYEAGFCGFWIHDRLTELGIHNIVVNPADVPTMSSEKLRKTDAVDSKKLAVCLRAKQLRGIYTPDAEALEIRSLIRLKNSITKDTIRQKNRIKSQLRYLGIDIPKEYLEPHSNWSKRFIAWLKDVQMKTTSGRQTLDLQIRQLEDLRRQNLEITRALRKLSHSEKFEDTLRLLMTVPGIGQTTGLALMAEIVDVTRFANAEQLAAYVGMIPMCHSSGEHEGVGDITLRKHAILRSNIIEAAWVAIRKDESMQLCYLNNCKKMVPSKAIVKVARKLVNRIYFVLKRRQPYVNAVA

SEQ ID NO: 442775 - protein, 374 aa, unidentified
MKTTKQISLDFTEQQIYIGLDVHLSSWSVTIATDYIIGRTFSISNTSTVLRSTKGNDTYGSLLQKYLHTNYPGGNYLSAYEAGFCGFSVHNELIRLGIENIVVNPADIPTSQKQEVQKNDRVDSLKIVLALRAGQLRGIHVPDISTLNDRMLLRVRAGIVHDIKRYKNQTKSMLNFYGIKYKTDFDGANLSFSRRFVDWIRNIDLGSSSGMEAKEVMLDKISTHREKLLRVTRKIRELSQNNRYSSDYYNLITIPGISLITSMAILTEVEDIKRFSNTKKFIGYLGLHPTYRASGETQQNGEITFRHNKYLRVLLVESSHIAVQKDPAMMQSFIQYRKEGKEYNVAIIKIARKLACRIYYILRDKHQYQTGVVI

SEQ ID NO: 442776 - protein, 374 aa, unidentified
MGNVIEAFVAFDTSKLRNAVAIAEAGRAGEVRFLGEIENTAVAVAKLVRKLAGKYGRLTFCYEAGPTGYGLYRQIEGLGYECLVAAPSLILKKPGERVKTNRRDAVSLVKQLRAGDLTAVWVPDPHHEAMRELTRARETAVEDLRRKRQQVSAFLLRQGLHYPGERAWTKSHRDWLASQKLEYAEHRTAFEEMLLAMRQAQERIERLEQAIRLAVPDWSLAEVVTALMALRGIDFISASAFLAEIGDLSRFRTPRELMAYLGLVPSEASTGDTVKRGAITKAGNRRARRILVESSWSYQHPPRVGKEKQEKLAAAPPAVREIAWKAQCRLSARYRALTRKGKLKTVAVTAVARELSAFIWAINRQIANSRAAAR

SEQ ID NO: 442777 - protein, 308 aa, unidentified
MTIATIGIDLAKNVFAVHGVDHNGKTVIVKSRVTRAALPGIIAGLPPCVIGMEACSGAHYWARLLRQYGHEPRLMAAKFVSPYRMAGKSGKNDAADAQAICEAVRRPHMRFVPVKDKGQQAMQCLHRTRQGFIEEKTAAYNRLRGLISEFGVIASQSTAALRYAAARHKDSLPAQVRQCIEDLLAHITRIEEQIAEYDRILSQVAKTDNRSQRLMKLQGIGPTTACALVASIGNAHDFKSGRQLAAWLGLTPSQYSSGGKSKPGRITKAGDAYLRTLLVQGARSVLINADKKTDSFSRWGCSLVERRG

SEQ ID NO: 442778 - protein, 377 aa, unidentified
MREKLRFLGLDVHAETIAVAVAEPDGEVRSLGTIANREESIRKLIRKLGPVEHLRACYEAGPTGFVLYWQLSQLGVECAVVAPSLVPKKPGDRVKTDRRDALKLARSHRSGDLTAVWVPDEDSEALRDLVRQREAAKQDQLRARHRLTKFLLRTGRRPPLGLKAWTERYMRWLAQVRYTQPAQEVTRLDCMNEVEHMSARVKRLEEAILEVVKLAPEPMQELIRGLQALRGVAHISAVTIASELGNISSRFQSARKLMGYCGVFPSEDSSGKRIRRGGITKAGNAHLRRIVVESAWSYRHLPRGGEKLRTRHQGIPAEITEIAWKAQHRLHKRYMTMMNAGKDQRKVMTAIGRELLGFIWAIGIKAEAAASKQQLAA

SEQ ID NO: 442779 - protein, 338 aa, unidentified
MKLYAGIDLHSNNSMLSIIDEEDRVHYQKRLPNELERILLVLASFKECLVGVVVESTYNWYWLVDGLMQAGYEVHLAHPAALVQYQGLKHSADEHDARWLAHLLRLGILHEGYIYPRESRAVRDLMRRRMQLVQTRSAQITCVQTQFARSTASSPSSDVIKRMEPEEVERLLQDANVGSGVRANLAVIGTLNVQIKRLEHEILGQVKLAAQFAPLLSIDGIGRILALAIMLESGAMERFAKVGHFSSYARCVQSQRLSNDKKKGEGNRKSGNKYLAWAFVEAAHFAVRYNPRIKRFYERKAAKTNKVVAIKAVAHKLARAAYHVMRERVAFDEQRAFA

SEQ ID NO: 442780 - protein, 484 aa, unidentified
MAKRTRSTFERINLERMNRRQRRELGQRLEKSDPGLEIVHPDAAGIDVGNQSHFVAVPGDRDTQPVREFGCWTSDLLKMAQWLKACGIRTVLVQATGVYWIALKDTVEQQGIEVVVANAQHTKNLPGRKSDVQECQWLMKLHTYGLVRGSFQLAEGMQGVRAVWRLRDRHVEEASRAVQHMQKALTQMNVQLANVLSDISGKSGQAIIAAILEGERDPAKLAALCDWRVKASAAEVAESLQGNWRDEMLFELDQARESYRFALKQIHSCDQKLESYLKVLPTRQVEITLPSPGPSPATVVRAVKDTRQRGYSPNIPGLRDELVRICGVDLTTIDGISVITAQTILAEIGTDMSRFPSEQAFVSWLGLTPSRDISGGKVLRAVRRKVPSRSGQALRMAATALRCSNSYLGARYRHLQKQLPSKASAVKAMARYLGVLVYRLLTKGQAWVDQGAARFEQKRKALNLASLQARALANGYRLVPVTAE

SEQ ID NO: 442781 - protein, 344 aa, unidentified
MTKNDIAVLGIDLGKNSCSLAAFDNTGALLMRKRMTRDAVVTFAAGLPACTIAMEACCGAHYLGRTLEAQGHTVKLMSPEYVQPYVKGQKTDDRDAEAIAEAATRPTMRFVTIKSEEQLDLQVLHRARQRMVGARTALINQLRAVLLERGIILPKGRASFKLRLGELIEDELAISDRARRLIEDLSSEWRSLDQRITAYDDELAALTRENAMARRLATIPGIGVINATALVAAVGDASAFGKARDLAAWLGLTPRQHSTGGRTKMLGISKRGNKYLRTQLIHGARAALPHLAAKPNRLGEWLQSMLARSHPNVVVVALAAKLARIAWAVLRHEEKFDHQAATVA

SEQ ID NO: 442782 - protein, 349 aa, unidentified
MRFYTGQHRFYCGIDLHARLLAVCILDQAGNIVVQTQLPAEKQLLLDTLAPFRPDVVVAVECLFAWYWVADLCQAEGIPFVLGHALYMKYIHGGKAKNDDIDAEKIGRLLKGGNIPVAYVYPKGLRETRDLLRRRMYLVHKRAELITHVQIVNAQYNLPAFEKKLIYAKNRAELKVAERFDHPHLRKSIEVDLALVDVLDERIAEVELYLERTVKIEDPQNYHLLKTIGGVGKILGLTLLYEIHQISRFPDVGEFLSYARLVRCAHESAGKKLGTGGKKIGNAHLKWAFSEAVCLLVRNYPAVKGWQARKEKKHGKKKTLGILAAKLGRAVYHMLRKKEAFDVRRFLGQ

SEQ ID NO: 442783 - protein, 421 aa, unidentified
MKVTYQICCGVDVHKSFLVATIVKTTGGVEPSYQKKRFSTFNNSILEFKQWLLDNGCHDICMESTGKYRVPVFNLLEDEINVVIANPKWVKAVKGNKDDTKDSKWIGDLFRLGLVKGSYIPCKKVRILREYTRYRYKLVSCRSSEKNRYQNALTVCNVALDSVVSDIFGKSSTSIIDYLLEQSGTSINHEEIASKLLRSLKSKEDAVIHSIEGYQMTDAQKYRMRLVRAHMDYITAEINDVDKMIENMISSNPDFENAVQFLCTIPGVKRDSAITIISEIGIDMSQFSSSKRLCCWAGLTPGSNESAGKKKSVRITRAGIYLKPALVQCAHAAVKSDKSPYYKKKYESLVKRRGKKRAIIAIARMILTAIYQMLSTGEQWNPSDLYKIDIPVALVEKKRQKLSSRLRSCCNGKDYFLLMNH

SEQ ID NO: 442784 - protein, 345 aa, unidentified
MQGVATVGLDIAKQVFQAHGADASGETRFNTQIKRENVLEFFSKLSPCLIGIESCATSYYWARQLSDLGHDVRLVHTSYVKPFVKRGKTDANDAEAINVALAQKTMRFVPVKTLNQQAAVTIFRTRSLFVSQRTQLVNALRGHLAEAGIVAARGIRNSSKLVTLMENAADTVLPTMMKEALTDVSDQMLRLDDLVIKLDKEIERRVQGDEDARRLLTIPGVGPKTAMCVIATVPDIHRFPSGRDFSSWLGLTPRTHSSGSRSVLGGITKMGNTELRTMLYLGASTLIVRDSKNPIGRWASRLRTRRPFKVAATAVANRIARIIWALLAKGGVYDPGYRQVSAPCE

SEQ ID NO: 442785 - protein, 373 aa, unidentified
MPKYSTAFGMDVHLRSTTVCALDADTGEAVTRRFPGNPWGEIAGWMDGFPGPSLAAYESGYLGFAPQRELAGLGVECVVAAVSKIPRSAADSASKNDRNDAARMAKAILAHDISPVWVPSPEVEGIRDLAGAYDGATARLATAKQRLLAFLARRGFVYGGTTPAGNPRKYWTYDFLRWLDKVRPEDDGGVRALAALRNEVEAAAEARADLLSEYRAAADAGPIAAEAAALQSIKGCAFALAAAFSAEVGDFTRFRSGRQVTAYFGLAPSQRSSGDSVRLGGISGAGNALVRKLAVEGSWCYAAARHQPKLMPRDTGVPLEIRMHGRKGSERLLRRREEMLARGMPQAKANAATAAELVRWLWALGMMCREGAE

SEQ ID NO: 442786 - protein, 402 aa, unidentified
MNAVGIDVSKGKSMVAIMRPFGEIVSTPFEIKHTASDIHSLVELINSVEGESRIVMEHTGRYYEVLAHQLSEANLFVSAINPKLIKDFDNDSLRKVKSDKADSVKIARYALDKWQNLKQYNVMDELRNQLKTMNRQFGFYMKHKTAMKNNLIGILDQTYPGVNTYFDSPARSDGSQKWVDFASTYWHVDCVRKMSLNAFIDHYQNWCKRKKYNFSQSKAEEIYGKAKELVPVLPKDAITKLIIKQAVDQLNSASTTVESLRTLMNETASKLPEYPVVMAMKGVGASLGSQLMAEIGDVSRFTHKSAITAFAGVDPGVNESGSYEQKSVPTSKRGSSDLRKTLFQVMDVLIKTHPQDDPVYQFLDKKRAQGKPYYVYMTAGANKFLRIYYGRVKEYLSSLPES

SEQ ID NO: 442787 - protein, 419 aa, unidentified
MSFKILKNNCCGLDVHKTWIYACIGITDSIKRTEYKQARFSSFTKGLNELCDWLAKYNCNDVCMESTGRYWIPVFNILEKNNIWVTLSHPKYTKPQKGNKTDRKDARWICDLYMCGMVNPSFIPPADIRELRDLVRYRFKLTCMITSEKNRAHNCLTVSNLKLDDVFSDIFGKSSRSITEQILQHPGETFDVTPFVDGRCKTPIEEIQAAVDGAVSQEQAVKLRQCLNHIDELELHKAEIEREIFRLSENYESVLNLIRTVPGFDKNPLTAIQVLSEIGGDMSVFPTAKNLVSWAGCCPRNDQSNRKIKSTRISRAGSYFKPVLVQVANALIKSKKHPEFATRYRRIKARRGHKKAIIAICRMILTAIWHILTDLKPYTPEGFLESRPVNKEKVLTTSQALNLLKQRGYTIKDDAIPVT

SEQ ID NO: 442788 - protein, 351 aa, unidentified
MRTEYFITMDTHCRTTDVCIKTTGGKLVRREHLATGIPQLRQVIESVPRPRQVVFEEGPLAGWLYRNLKDSADEVRVSDPRRNAHVAKEGDKDDPIDAEKLNDLCRGGFIKVVHQLDSAEKAAVKQVVGMYHDRVVRRVSEGNQLLALAKRWGVMLGRQALLSGQTRQWLATQLKEAAVPPRIVGIAEDLWKSFDQALEQEESLHGQICRLVRQDKMMARVVQLPGYGPVRAATLISYLDTPWRFKSRSALWKYVGIGLQRQKSGDGLDFVRVEQSCNRLLRNMVIGAAQCAINQKENVFARRYARWITTGLSSRNARRNVAREQVTAVWAMWKSDKAFDAGLIHDPSEKE

SEQ ID NO: 442789 - protein, 316 aa, unidentified
MRETAPTPAFVGIDVSKRRLDVCVRPAGECWAVAHDDGALPALLRRLVELRPALVCLEATGGLQARLAAELAAAGLPVVVVNPRQVRDFARATGRLAKTDRLDAEAIARFAEAVRPSVRPLEDAAGLALKALVARRRELVALRVAERNRLAATSVERVRQSLLAVIETLERQIAALDGDIDRQVKDSPAWRAREDLLRSVPGIGPTTARTLIAELPELGGLTRRRIAALVGVAPVSRDSGQMRGRRTVWGGRAAPRACLYMATLAAARGANPAIAGFYRRLRRAGKPGKVALTACMRKLLVILNAMLREQAPWRHA

SEQ ID NO: 442790 - protein, 339 aa, unidentified
MKCRTIGIDLAKSVFQACGVNQHLKPVFNQRLARRDFYAFMAEQPPTQVVMEACYSSHYWGRELTQLGHTVCLIPAQHVTPFVRGNKNDRNDALAIVEASQRPNIRFVPIKSEAQQEVMALHRIRERLIKNKTALTNQAHGLLSDFGIIFSQGERCFSVMAHIVAASSHVSENIKSLVAMLHEEFLGLKAKLKVIEAKLKQNLTQFPQAEILLSVPGVGYIIASALIACIDKGQAFKSAKDFAVWLGITPRQYASGSHSYMGKISKRGHRYLRKQLIHGARAVLNRYKNENDALKVWGESVAHRRGFNKAVVAIAHKLARIVWHLLQKDVMYQPQHIKA

SEQ ID NO: 442791 - protein, 439 aa, unidentified
MTLREGSSPGVVAGIDAAIVAAHHVAIRDGDRLVQFKVQPTLAGMAGLTERLRPFAGAVVTAEPTAGTWLPLGAAVTAAGCRFQLVEARATAKLRQALAGKNKTDRIDALMLADAGRLFDIPAQPIPTAGLIAIRRAVLRRHRATVDAHRAECRLWALASWAFPDVWRACQGHTLAQPILDRWPDLRSLGHAHVGSITEIVAKYSKSPNPARRADKIREAAGGWALFWMGRLDLDALAWEVGQMLDDIEIADRNQRAATTQALTLRAVHHGTTDVLMSIPGIGEIVATVTRGWFTGPGQFPSAKHAAAFVGLDPSRRESGLTASRSRRITKEGPPALRLAYYQAANVARRHDPQLAEHYRRLMVERNHNHISACCAVARKLVTRAWAIIETGKPYEIHDVDGRPLTPADATRRAGELAVPEDVRRRRRAHQQRSRLDID

SEQ ID NO: 442792 - protein, 392 aa, unidentified
MIYVGIDVAKDKQDCCIVDSDGVIINDCLRICNSSEGFELLYTSILSALSGQNISNVKIGLESTGHYSTNLQNYLYAKGFRLYILNPLATNLFRKAQTLRKTKTDKTDALVIAKMLFSDDAKSYSPVSYQIQELKSLTRHRYRMIGYRSKLKISITRLIDIIFPELPKHVWSSHQNSSYCLLTELSSPKDIASCHLTKLTNILNKSSQGRYGKAKAIEIKEAASFSIGMSVSSLSFELKQTIRLIQSVQTEIDALDAQIKKVVIETKTPLMTIPGISYTLAAIILSEIGDIDRFTTPAKLLAFAGLEPSTYQSGKYNASHTPMVKRGSAYLRWAMLTASRTVTMRDETFALYLSKKRDEGKHYYVAMSHVAKKLTRTIFYLLKTNTAFVPQM

SEQ ID NO: 442793 - protein, 339 aa, unidentified
MKIYTGIDLHSSNNYLVHINEDDKILLSKRLPNDFETIKQYLDPYKESIAGIVVESTYNWYWLADKLLDAGYPVHLANPSAIQQYSGLKYTDDKWDSRWLANMLRLKILPEGYIYPKELRSVRDLLRRRLLFVKQRTAHILSLQSTIARNLGIQISGSAIKKLTEDDINSLFDDYHLRIMAQCNLSAIRLFDEKDMQIGKEVIAHCKLKNEFKRLLTIPGIGNILAMTIMLEVGDIRRFPTAGDYISYCRCVKSEKYSNNKKKGKNNAKNGNRYLSWAYVEAANYCIRYCKKAEIFYQRKHASSQKKALAIKALSSKLARASYYIMRDDVIFDEDKLFA

SEQ ID NO: 442794 - protein, 330 aa, unidentified
MKVAGIDVDSKKTVVACHLDDKKKKPQKFDNTPDGHLSIIKALQKAGVTRVCLEATGTYHLDLAVALHDAGFEVMVINPKAARRFFDALQNRSKTDSVDATMLAEFAQRMPFEPWQRPEDDALRLRAYARRIAALKATRTQAKNQLHAATQTALTPPALIDDIKLRIAQLDAQIATLQAHAKALIDAAQELREAFELLVSVTGIATASALQILAELCVLPPELSAKQWVAMAGLDPRHFQSGTSVNKKPRLAKAGNRYLRMALFMPALSASRHDPNMRAYFLHLVEDRGLKKIQAICAVMRQLLHAIHGMLKTRTPFDSARFYGAAETVS

SEQ ID NO: 442795 - protein, 460 aa, unidentified
MVPDDRQVEVEEHEQIVERVAAIDVAKASGMVCTRVPHQTTPGKRITRVWEVAATTNAIIELADQLTRQGIERVVVESTSDYWRGFIYLLEARGLRVWLVNARDVKQVPGRPKTDKLDAVWLAKLNERGMLRPSFIPPAEIRQLRDYTRLRSDLTQERSRHVQRLEKLLEDALIKLSTVATDIVGVSGRAMLEALIVGQRDPMVLAEFAKGRMRGKRAALVQALTGRFDDHHAELARVLLDHIDALTIQTDHLTARIEELIAAVPAAQPPQDQSGLSHGHGGGGATDQGAHTQAAPVLLPTPDRLDEVPGIGSKAAQVIIAEIGLDMGQFPTPAHLVSWAKLCPRTIQSGAKHRAGTTGKGNPYLKGVLGEAAAAAAKTNTFLGERYRRLVKRRGKLKALVAVARSILVIVWHLLADPTARFHDLGADFYTNRTDTDRKTRNHIRQLQALGFTVTLTPAA

SEQ ID NO: 442796 - protein, 355 aa, unidentified
MAADEIAVIGGIDTHTDTHQAAVIDTVGRHLATEPFPTSPIGYQQLLDWLRSHGEVLAVGVEGTGAYGAELARFLSANGITVVEVDRPDRKARRDNGKSDPVDAYAAATAVLSGRAKGTPKSRNGIAEAIRALRVARSSAIKARTQTINQIRTLIVTAPAEVREQFRGLPTVELIDHLARSRPAGDLADPACAVRTALRRLARRYRALSQEIADTDAELKPLVTRAAPRLVALPGVGPETAGQLLITAGDNPERLKSEASFAHLCAAAPIPASSGRTNRHRLNRGGDRQANRALHTIVIVRMRHDRRTQEYVARRTAEGMSKKDIIRCLKRFVAREVYKHLPHPNITAAQLQQAA

SEQ ID NO: 442797 - protein, 371 aa, unidentified
MKEGITWVGMDAHKQFINVAMRLPGRQEFIEWKVTNEPKAVARLARKLAKVAPGEVRCCYEAGPCGYVLMRQLEAHAPVVCEVIAPSLIPTKPGDRVKTNRRDARKLCELHQAGLLTMVTPPSPEDEAVRDLSRCREKVKTDLMTARHRLSKWLLRHAVSYGAGKKAWTKAHRQWVRALRFDDLHEQMVFDEYLLEVEHREERLAYLDEQLLAVAQQEPYREPIAHLRCFRGIDTVTAVGIVAELHDFRRFHSPRELMSFVGLTVSESSTGNSQKQGGITKAGNSHVRRLLVEAAWHYRHRPSVGHRLRKRREGQPTSVISIADKAQNRLNRRYRRLTEKGKHSNIAVTAVARELVGFIWATLYPSYQAAA

SEQ ID NO: 442798 - protein, 326 aa, unidentified
MEKEKQYVGIDISREWMDAAWYEQEKVQHTKVSNNMEGYKELVRQCGSGNHYVMESTGPYYAGVALYLHKRGIAVSVVNALVIKRFIQMQLEKNKSDKKDALWICRYGMSQHPAQWQAPQEHIVRARQMLNAIALFTRQRTASINALDSLETMPVVSKESRQSLKRIIAQLEKEILGLEEKLQALLQEHEGAKLRALQTIPGIGKRAVAMMLIITDGFRKIENYRQLSCWAGLSPKEYSSGKCIRGKVHISKMGGRELRNILYMCSMNAIQHNKACKELYERLKAKGKNGKLALSAVSNKLIKQCVAIAKSEVPYDEKFISKKACF

SEQ ID NO: 442799 - protein, 451 aa, unidentified
MTTMGIDLAVRAAHVATLTDGRGQVVWTRRRFHNLHDELVAVSDAAGPPEELTVVMEPTRNAWVIVAAHFRAIGAKVVLVAPEQSSDLRRYFTKHTKNDRLDSLMLARMPLLHPEGLSPVSDLGPADALKRAVRRRVKLVESHLACRQRLDAMLDLLGPRYAEVLGVRATKTALHILEHYGNPYGIRRLGLRRLTDVVKRTSGGHWNTDQAARLLAAANEAITLWAGGGIDFDELAWDLASEVRVLRQLDDEIARLDTRIAGLYDRADPKGIIRSAPGIGDVLAGGILGRLGDANRFANLAAIRSFSGMVPGVNQSGFSETSPTITKQGDPGLRRDLWFAADLARHQDPQLAAKYHRLIVERRLHHFSAVCHIATTLLTRIGACWRNDQLYIVRDIDGQPVDREQAKAIIAERYSIPAEVRRRKPPAMSEPTKQESTNRSALARSAPTIRA

SEQ ID NO: 442800 - protein, 350 aa, unidentified
MKIRNTVGMDMGDKVHSICILDASGTVRECAEVSNTRAGIYKFFAKMEPSLIALETGTHSSWVSRILEELGHEVLVGHARKLRMIWNNPQKNDMRDAEMLARIARFDRKLLHPIQPRSMKAQCDLAAIKARDQLVKVRSSLIAHVRGLVKSVGARLPTCSPECFAKRAAEAVPEELALALEPVIVSIAELTVRIRHCDQLVQKLADEEYPATKRLQEIPGVGPITSLAFVLTLEDPKRFARSRDVGPFLGMTPRRNQSGQVDQQLPITKAGNAYMRRLLVQCAQYILGHYGPDCDLRRFGLKLAERGGKNAKRRATVAVARKLAVLLHSLWKTGEEYEPNRCRRQNRKTA

SEQ ID NO: 442801 - protein, 430 aa, unidentified
MEVIYPKACGVDVHKSFIVAVICDSTSVKPQYLRKRFSTFNNSLIDFRNWLLANDCQNVCMESTGKYYVPVYNALEGHISNVVVANPKWVRCIKGEKDDNKDAKWIADLFKLGIVRSSFIPNKDIRILRELTRYLYKLTNMRTSEKNRFTNALTVGNCKLDMVFSDIFGKTSSAIINTILSQNEYNDEDILKNIDKHCKSSNEDILNSISGISWQDAQKQRMNVIQEHIDYLDKSIKTVREIIDSIIAPYESAINLLCSIPGIDRKSAITIISEIGTDMSQFSSHYRLSSWAGLAPGCNESAGKKKSVKISRAGVYLKPTLVEVAHCAVKDKDNPYYTNKFNVLSKRRGKKRAYIAIARKILVAIYHMLSTGEFFNPTDLSKVETSDKDKIKFTKNNFMQSTKQLISLGLSIDDLQDLMQSKISESTPII

SEQ ID NO: 442802 - protein, 366 aa, unidentified
MKKISTVATNGKEIFKDHKLTIGLDLGDRSSHYCILNEAGEVILEHSFSTTAKGIHQVFDGIPRSRIALETGTHSPWVSRLLIQMDHEVIVAHARNVRLIGESSRKDDQLDARTLARLARIDPGLLGPVRHRSAKAQIHLTVIRARAVLVSARTALVNAARGLTKSYGERLKKCGTGQMNRKMAKGLSQELRDALEPLIGEIESLNGRIAEYDRRIEQIAKEIYPQVTLLKQVKGVGTLIALTYVLTLDDPHRFRRSRDAGCFVGLRPGRRNSGMSEPQMRISKEGDRYLRTLMVQGAHYILGPFGQDSDLRRWGLRLAERGGKNAKKRAVIAVARKLAVLLHKLWVSGEVYEPLRNNHKVVSAVA

SEQ ID NO: 442803 - protein, 399 aa, unidentified
MLAVGIDISKSKSVAAILNQDGSMHTSPFEFHHTQPELDAFIKYILNSNQSATILMENTGHYHYPVLKAFQEAGLPVCMVNAYQIKKFGDMDLRKAKTDKKDAVRIARYALEKSYSLVPYTSMEQKYEDLRFLARQYNQRMLTLKTNKVFLLNLLDETMPGITNILPLTTRTPETSLSVLFINRFKSYDRIKKMGKSRFLDAFEKIARKSRNRQTKTYGLAIYEAALRNITTRGENEYTLAAQDQCLELVCESQKAADSIILKMQTLAETLPEYAVLRSMAGVGDRLGPLILAEIGDIRRFHSGKALNAYAGNDAPPYQSGTFESHNRHISKRGNAALRKYCFEVMQALKLTRPQDDPVYLFLLKKEQEGKPYNVAKMAGVNKFLRIYYARAMETLKQQ

SEQ ID NO: 442804 - protein, 453 aa, unidentified
MTPPPPALPGSQTGFRKTRRRAPVSDRPVVDPLAASLLPTRGATLPEQTSQTVYVGLDWAAAIHAVCVMSATGKVLAEFTIQHTAEGVASLIGRLAKYGDPADVQVGIERPNGRLVDLLLEAGHCVIPVSPNAIKTWREGEVVSGAKSDAGDALVIAEYLRLRYHRLHPVQPYSVETKALRTVVRTRDDIVEMRVAATNQLSALLESYWPGAKEIFADVQSPISLAFLRRYPTAAAAAHLGEKRLAAFLTKHGYSGRRPAGELLTRLRRAPAGATDPVLNEAVHDAVLALVTVLEALNTAGKQLDRSVIAHLGEHPDAEIFTSLPRSGQINAAQVLAEWGDSRAAYDSPEAIAALAGVTPVTKASGKQHAVHFRWACNKRFRKAITTFADNSRHASPWAANIYAQARARNHDHPHAIRILARAWIRVIYRCWHNQQPYDPNLHGAAQRPSTAA

SEQ ID NO: 442805 - protein, 346 aa, unidentified
MTIIRIGLDTSKHVFQLHGVDEQEQPVLRRQIRRSELEKFFAKLPPTRVGLEACGASHHWARVLRGMGHEAVLMPPQYIKPYVKRGKNDAIDAEAICEAMGRPGMRFVPVKSTDEQAALMLLKVRDLLIKQRTMVANAIRGHAAEFGVIGAKGPTKLAVLLQQIAEDTSLPALAREMLATLGGQLAAIEMRLCVIEAKLMARYKADPRSRLLATIPGVGPIGAVSFALKVPDATVFRSGRHFAAWLGITPREHFTAGRQRLGKISREGDEGLRRLLVIGATAVIQQANRRAKSAGKGPAGHTSPWLAQLLARKPKKLAAVALANKMARIIWAVLVSGAAYRRPQAA

SEQ ID NO: 442806 - protein, 291 aa, unidentified
MNILKQTVGIDISFKKFDARFGTINTHQEVCLSASKSFKNSLAGFKLFLRWLKKHILVDNIPLVFVMEATGVYYEQLAHFLHCHGYQVAVVLPNKIRNYAKSLESKSKTDPLDAAVITRFGLERQLPLWCPPSENMKTLRDLCREYHALKTTTTEIKNQCHALNVSFKPHRESFKRKQRLLRFLNRQIALIEKELHYLLKTEPDLARRLKNIKTAKGLGEITILTVLAETRCFQLVTNQKQLTSYAGLDIVFNDSGFKKGKTSISKRGNKFIRKALFMPALSACRANPNRE

SEQ ID NO: 442807 - protein, 350 aa, unidentified
MSTRITVGLDMGDKSHSICVLDPDGNVVERGQVANTALAIRRRFGGQPQCLVALEAGTHSAWVSRVLEELGHEVLVGNPRKLRAIWDSDRKDDVRDAEMLARIARFDPQLLHPIRHRSPESQRDLAAIKARHMLVKARTMLIAHARGLVKSTGARLPTCSPECFHLRAPAGLPAELAAALEPLVKGIEELTRRIRHCDRLVEKLCREKYPATGRLRAIGGVGPVTALSFVLVLEDSGRVANSRSVGAFLGLTPRRDQSGGTDKQLRITKAGNGDLRHLLVQCAQYVLGAFGPDCDLRRFGLKLAERGGKNAKRRAVVAVARKLAVKMHHLWKTGCDYEPLHPRAPKVAAA

SEQ ID NO: 442808 - protein, 347 aa, unidentified
MKRIAVDLAKSVYQVAESIHVGRVDRRRRLDPEAFRRYVQEQPEPVEWVMEACGTAHYWGRVAQARGHRVVLLHPRYVRPYRRRNKTDRNDCDAILEAARCADMHPVPVKSHEQQQVQQLHNLREAWKKTRVQHINLLRGILRELGVAAPSGTQAFLRQACELIERPEVCALRGSLQMVLAEISLCEQAMRDCEEQLARWHADDDIVHKLDEVSGIGLLTASALKTAVGKPERFASGRHLSAWLGMTPNEYSSGERRRLGCISCKGNTYVRTLLIHGARAALLAAKRCQTRTPERLTQLQRWALQTAERIGHNKAAVALANKLVRICWAVWCHERRFSGDWQSARPA

SEQ ID NO: 442809 - protein, 342 aa, unidentified
MKLLKQVLGIDVAQKELVVTLGRLSDDLTIDLYAYNVFKNTESGFLKLSQWVEKLTQKDIKVRYVMEATGVYHQKFAYYLDERQADLSIVLPNKISNYMRTLEIKTITDKTCSEGIARFGLERKLDNWKKPKEIYRILKQLTRERRQITDERTIAKNQLHAEQSEAIPHISSIERLKKRIQFLNTLEKEIKDEITNSVKEHTDLMKDITNICTIPGVSILTAATVIGETNGFELIRSKKQLTSYAGLDVKEKLSGTSVKGKPSISKKGNRYLRSALHLPALSTIKWDDNFRDQYARIVAKHGIKMKGCVAVQRKLLELIYVIYKNKTVYDKDYESKKNSVPA

SEQ ID NO: 442810 - protein, 327 aa, unidentified
MAKHTTICAGIDTGKRKLDVALDCSSEQLQIDNAPEGYKVLSDWLRRHRVKRIGIEASGGYEQAVVAELRRKGFVVVVFQPAQVRAYARFRLQRAKNDKIDAALIAACTAAVKTIHAPPDARLLPFAEHLTMIDQIGEDIARLKNRLETCRNPRFRQTWKEDIARLEKRQKIELKALVAAIREHRDLAERLDLIESVDGIGLPTAVAILVRMPEIGRITREQAAALAGVAPYDDDSGEQVGIRHIEGGRERLRRALYTAALPASFRWNPQLTVLYRRLIAAGKEHKRALIACARKLLIFANTVVARGTPWDHQRPPIASVTAVAQAG

SEQ ID NO: 442811 - protein, 347 aa, unidentified
MRFYTKQHKFYCGIDLHAKKMYLCILDEAGQIRLHRNITTARDVFLGAIEPFREDMVVAVECMFTWYWIADLCTAEGIAFVLGHALYMKAIHGGKAKNDKIDSHKIAVLLKGGMIPMAYTYPATMRATRDLLRRRNHLMRKRAELYAHIQNTRSQYNLPDALGCIAKPQNRNGIVERFEDPSVQKMINADLAVIEAYDPIIAKMERDIISMANHHDPVAYALLKSIPGIGKILGLVILYEIETIKRFPSVQDFVSYSRLVKCSKESNGKKSGTSGKKIGNAHLKWAFSEAAVLFLKGNDPGKRYLDRLTSKHGKGKALSILAHKLGRAVYFMLKNKKPFDQDTFLGL

SEQ ID NO: 442812 - protein, 407 aa, unidentified
MEIVYERCCGMDIHKELIVACVMKGGKNETEIKSFGTMTGDLLQMCAWLKEQQVQMVAMESTGSYWKPIFNILEIEEIPAILVNAHDVKNLPGRKTDVKDSEWIADLLKHGLLKPSFVPKRDMRELRELVRYRKSIIEERAREYNRIDKVLQGANIKLSSVASKVETKSGMDMVNAIIKGIMNPDILASMAKGTMKSKTDELKRAMNGYIQPHQQMILKAMVSHIENLTESVETLDKEIEKRMADEAEMIEMLDGITGVGQRTAQVILAEIGTDMSQFPDAEKLASWACICPGKNQSAGRKKKEKTRKNKNILKSSLIQAGRSAASSKDTYLHSQYVRIAARRGANRAAVAVGHSILVICYHMIKNKTAFKDLGGDFFMKQNKEALLKRHIKRIEELGYKIELVEAA

SEQ ID NO: 442813 - protein, 370 aa, unidentified
MNDGSKYIGLDVHKETIAVAIAEASGGEVRYFGEIRNTPDAIRKLCEKIKPATGGLFFCYESGPCGFGIHRQLLDLGWDCLVAATSLIPRKAGDRVKTDRRDSLMLARLLRSGELTGSWVPDDEQEALRDLTRARVDLRNLEKKTKQLVLAFLLRHGRRYPGKSPWTKAHFGWLAEQKFDSPSQQIVFQEYLNAMESMSHRIDSVDRQLTEMSKHPIFKDVVTSLMALRGVQQVTALSIIAELGDIKRFDSAPQLMAYLGLVPSEYSSGGSRNRGGITKTGNSHLRRLLIESAWSYRFPARKTRALEQRSAGASEAIQEIAWKAQVRLCGRYHSFQQRGKNKLQACTAIARELSGFIWAIGQSCPSYLAS

SEQ ID NO: 442814 - protein, 365 aa, unidentified
MTDFSTKQVGVTIGIDLGDRHSHLCILDGEGQIIEEGRVVTSRAAFERRFACEASARVAFETGAHSPWVLALLTELGHEVIVANPRKLRMIFKSDSKNDRMDAQQLARVARLDPQLLSPIQHRSQKVRADLQLLRSRDLLVATRTKMVNHIRGCMKGFGLRVPSATTGTFPRVAAPIIPRNLRPSLVPMLRMIAELTTRIRDSERRIERLCAERYPQTEVLRQVNGVGPVTALTFMLTLEDPSRFAKSRDVGAYLRIRPKQRQSGRSHPELRISKAGDRELRRLLVQCAQYMLGPFGKDSDLRRFGQRLAARGGASAKRRAIIAVARKLAVLLHRLWVTGEVYEPLRQASLRAPGMESTREVARV

SEQ ID NO: 442815 - protein, 317 aa, unidentified
MNSKNNQNEINVGVDTGKTQLDIYIRPLDIYFVVTNDESGIKEAITKIKKHKVTRVVIEATGRLEQPFILACAKAKIPFVIANPVNIKRFAGAINQKAKTDKLDAQLIAHYAEVIKPKLSQLKPEQIRLMSDLLSRRRQLMEMQTMEKNRLQIMPKEITSSIKPMLTALKNQLEKVDNKLHKLIESCDEYKIKNDIIQSVPGVGKVVAFNLISEMPELGYINNKEAASLVGVAPFNRESGSYKGKRMIRGGRSQIRTAMYMAMMSAIQCNPTFKTLYQRLVAAGKPKKVAIIACIRKLVITLNSMVRDGVYWDPKMN

SEQ ID NO: 442816 - protein, 351 aa, unidentified
MKEVSIIGLDLAKRVFQVHGIDGQERVTVEKRLTRSEMLPWFTKLKPCLIGMEACATAHYWAQEFSKLGHQVRLIPPAYVKPYVRRQKNDRADAAAICEAVSRPHMRFATIKTIDQQGVQMLHRSRQLLVRQRIQLTNALRSHLAELGVIFPQGKAGITRMMAAAQEANDTELPAFIQQVLCLLVEQIKHLKKQTMALDKQLTEWHRAHADSQRLATIPGIGMVTATALIAAIGDGKQFSSGREFAAWVGLVPRQNSSGGKEQLGRISKKGNVYLRQLLVTGATTQLVPSYRAKAQDSSWFEQLLRRKPARLATVALANKMARIAWAVLTKGEGYKAPHIINAAGAVMVAA

SEQ ID NO: 442817 - protein, 434 aa, unidentified
MCLARRPVGQFGQGAVVEELHPRCAGIDIGKEYAKVCVRVPGLRPGGRTKADRVSEVVTTWGSMTNQILALRDYLVEQRVTCVVMEATSDYWKPFFHLLEDIEGCEVMLVNARHVKNVPGRKSDVNDATWLAQLGAHGLVRASFVPPPQIRVLRDLTRSRAAVVRERAREVTRLEKLLEGAGIKLSVVASDLTGVSCRAMLMALVRGERDPATLAGLANWRMHGKTRQLVEALTGRFADHHGFLVSLHFRLIDAHDAAINDITVQIEAAIEPFRAFRELISTIPGISDRVADVIIAETGGDMNQFPTAAHLASWAGVCPGNNESAGVIKSTKTRRGNCHLKGALGIAAFAATRTKNTYLAAKYRRLAARRGKLRAVVALEHDMLTTIWHMAQTGELYNDPGSDYFTRLRPDRVKTRAIGDLERLGYTVTLQQAS

SEQ ID NO: 442818 - protein, 373 aa, unidentified
MKEKVRFLSLDVHAETIAVAVAEPNGEVRSLGTIPNRAESIRKMIRKLGTAEKLRACYEAGPTGYVVYWQLAELGVQCEVVARTLVPVKAGDRVKTDRRDAEKLARCYRSGDLTAVWAPDEGSEALRDLVRAREAAKQDQMRARHRLSKFLLRSGQRPPTGVRPWTRLIWVAQLRLTQSAQESTRQDYLHEVEHMRARVTRLEQAIMEAVQLASPSLQQVINDLQALRGIADISAVTIAAELGQLSRFGSARQLMGYCGAVHSEDSSGKRIRRGSITKTGNAHLRRIVGEAAWSYRRPPCIWYGLRRRQESISEEAKEIAWKAQHRLHKRYMRLGAAGKPQGKIITAVARELLGFIWAIGTKAETTVSQRAAA

SEQ ID NO: 442819 - protein, 330 aa, unidentified
MNSICLSTDQLTAALPVLGLDVAKKSVQAELRTNGKRVRFGFENNPKGFAQLARMLKEQGAPKVWAGLEATGPYSHALALWLHGQGHRVSLLNPRRVKQYARSAGNRNKTDLLDAAIIADFVCAHLPAAWQPPTLEVAQLQALVRRREELSLMLQAEKNRLEGVASHVRCSLERIIDTLSAEKTRLEKLITQQIRSHQQLSRDHQLLCTIKGIGSLTAAILLAEMARPGQVERARQAAAHAGLAPRREQSGTSVRRNRGLGKEGNRYLRKALYMPALVAIKYNAPLRHFASRLRTAGKPKMSIVCAVMRKLIHIAFGVLKHQKPFNPSLA

SEQ ID NO: 442820 - protein, 309 aa, unidentified
MKEQLVYLGVDIAKSYLDAAVGNEKRRFSNDAIGHRELIKWVKQLKAPVQVICESSAGYERALVQGLARARVKISLVQANRIRQFARAAGILAKTDRIDAELLCEFGKVMRPQTVTAAKLEQEHLRELESQRRHLTHLLVMELNRGARVSDASVQRLNRSLINQIKKQIEQLDLLIKGHIDQSHQLSAKAAKLTSISGVGARTTALLLAQLPELGQLNRREIAALVGVAPFNRDSGRMRGKRAIYGGRKPVRHGLYMAALVAAHHNPILRNFYLRLRAAGKPAKLALTATMRKLLIVLNSALKTDPRYA

SEQ ID NO: 442821 - protein, 343 aa, unidentified
MKLSRVGIDLAKNVFQLHGVDCFGETVLKRRLKRHQWLQVLLDKTETDCVIGMEACGGAHHWARELQARGYTVRLIPPQFVKPYVKSNKNDANDAEAICEAMSRPNMRFVAVKSVKQQDIQATHRVRAECMAHRTAKGNQIRGLVSEYGLVAPQQSAALRAAIPCWLEDAENGLTSRFRALLHGLWEDLLRLDERVAVLDADIALIAKTDPVAKRLQQLRGVGPLIATALIASVGSGEQYARGRQMAAALGLTPRQHSSGGKDRLLGISKRGDGYLRGLLIHGARSTLWHARHKQDRLSRWMNDLSARRHPNIAAVALANKTVRMAWAMMRNESDYDPEFATV

SEQ ID NO: 442822 - protein, 403 aa, unidentified
MVFVGVDWAEAHHDVCVVDEAGKVLGKRRVQDGVEGVRQIHQLLASYAQHPQEVVVGIETDRGLLVGALLATGYQVYAVNPLSASRYRERHVTSRAKSDPGDAKVLADLVRTDRHNHRQVAGDSELAQAVKVLARGHQDLVWSRQRFVNRLRNTLREFYPAALEAFKELDSGEALALLERAPTPWQGRQLSQAKIVSTLRRAGRQRILEERATQIQAALRSEQLEAPASVGRAYGLVVKSTVDVLRSMDQELALIEAELAQSFEGHPDAEIYRSLPGLGVVLSARVLAEFGDDPNRFDHPKSRKAYAGTAPITKASGTRQVVLARVARNRRLADACYLWAFTSLTKSAGARRYYDVLRSRGQTHHQALRGLSNRWVGILHGCLRHHCFYAEEIAWPPSLQVAA

SEQ ID NO: 442823 - protein, 370 aa, unidentified
MKKKILYIGLDVHKKSINVAITDERTNGKVRSYGKIDGTLEALDKLVGKLKSPGADLHFVYEAGPCGYPIYRHLTSKGHSCSVVAPSLIPRRSGDRIKTDRRDALNLVRLYRAGELTSIYVPTSEDEAIRDLLRCRVDIRRIERKTRQQLLAFLLRHGHYYPGKKNWTKGHMNWLAELKPAHRAQQIVLQEYIDAANECTRRIQRITEQIQELVAQWSRAPFVRAYQALRGVSLIVATTVVSEIGDMNRFKNPKQLMAYLGLVPSEHSSGNRIRRGSITKTGNSHVRRVLIEAAWTYNLRARKTKLILKRQQGLDDRICEISWKAQLRLCNKYRRLFARGKSKPAITTAIARELSAFIWAIDQQVQQLTA

SEQ ID NO: 442824 - protein, 376 aa, unidentified
MTVIRATGMSVSEPTLDVGFELSAKEWKLAMTSGFGVAPWIQTVPAGDRGAVTRLLTRARARLHLPATACVVSGYEAGRDGFWIPRALTVMGLTNRVVDSASIEVNRRARRAKTDRIDAQKLVMMLVRVCQGERDVWREVRVPRVAAERARQGSRERRQLKQEETRLVNQMRSWITTWGGRLPKRRVGDWWTTVADWSGEVLPAPVQARLPRAQARLTVITAQLRVLDQAQQTAVVAAPPASPLRRLVQLKGGAATGATGLLEEGLVWRAFQNRRDVGGYLGFRPMPFRSGQLARDQGIDRAGNRRLRGRALQLAWSWVRWQPMSALTQWFQTNFGGRGKRARRIGIVAVARKLLIALWRCATTGEVPTGAIVKVA

SEQ ID NO: 442825 - protein, 514 aa, unidentified
MSEGTAQPPFSRLCPRLLRKHSAWLIRHIPLTQKFHPQPLAPAKKADWVHAHCARVRSPYAAQDKPFASGFTNPYRNGGDIMLKINYMSTLFVGIDVSSKSNSVYAMDFEENKYLSTSFGNNQPGADELVNRIAACMQKHKNLDTLLIVLESTSVYSVHISNFLASSEVLMPYKPYVFCVNPKATANYRKSYIGMEKTDPTDAYLIADFARVGRTKKLEPWRGGQFIALKRLTRHRMHLSECITREKTYMVSNLYLKFSELQLLEGDDKPFGNLYGATSSAILTEFLSPQEIIDMPEEDLLAFLAQRSRNRICDLSKTSELLRKAARDSYRLDKCMYEPLNISLASSFNCIQAYQKEIRLIEQAIEKCIKGMNPNALIILQSIPGIGPVWASGILSEIGDISAFHSSDALAKYAGLYWPKGDSGDFISEDNQMSKAGNPYLRRYFGEAANSIRKHIPEYADFYARKYAEVSKHQHKRALALTSRKFVRLVFGLLAKNQLYTGEKLDTEYNIESN

SEQ ID NO: 442826 - protein, 397 aa, unidentified
MSNINNINSEVNNSSFKDIQNTSYPAYIGMDTHKQTIVSSIASPGRSKPKYLGEMVNDPKKIKKFVENLSKKYNGEVLLFCYEAGPCGYVLYHQITSLGHDCMVAAPSLIPVKSGDRIKTDKRDSQKLARYLRDGSLTSVWIPGTEQEAIRDLTRIRGDFKSNETKAKQQLNSYILRHGHSWPVGKKRWNKGFMSWLENLKFKHPWQQIVLQEYINAVTDASKKLNEIHKYLLQAKVNWSLSPIIDSLSALRGIDTLAAMIIISELGDLTRFTHPSQLMSYLGLVPSEHTSSTRRRLGGITKTGNNVARRMLVECAWSYRYPARQTAHIKRKSKNASNYAKEVSWKAQKRLCARYQTFTQAGKDTRTAIVAIARELVGYVWDIAVHEMNKLNNQNAK

SEQ ID NO: 442827 - protein, 340 aa, unidentified
MESFAGADLHKRVTQLAVLRDGQPPSQFRFSNDPNTVDGVLKKLPRGTKIAVEATGSWWWFVEKARELGHEVCLSHPKQTKAIAHARLKTDKVDAVMLARLLKADFLPTVWIPGEKERYVRELLAHRARLGRTRTAVINELHAVYAKRNIEVPGMIWHRIRPVAWRAEELSGYAPRIVSENAELLKLINQQIQNLDKELAKAGQEDPQANRLMTIPGVGVATAVAVSCWIGDIRRFPSAKKLVSYFGIAPKVRQSANRETHGHISKEGSGMVRWLILQAALVGIRMSKGPARGHYIGVSRRRGKKIARIAVARKLLGTIYHMMKEEIDYEEFLRRGSNAQ

SEQ ID NO: 442828 - protein, 342 aa, unidentified
MEIVYVGLDLGSSNFQQVAIKADGSVKVNRSFTTSEANLIKAFSDQRGESHVHLEAGEVSPWAASIIAPLVTRVVCSHPKNNAWIAKDADKCDRVDAFKLAELLRLNRFKEVHYPPDQPRRNFKQLVQHYDELTGQQARLKTKIKARLRMQGVIVTGERPFSSKGRKEVLARVASRDLRTAITQLYEVLDQSVAAQDQARLLMLRAAQAFPEIKLLRTVPGIGPIGACRFSAYIHTPSRFSSKRKLWKYCRLSVSHRSSNGKPLRRPRLDRSGCGRLKDVSRKAFDVAIRSRHDNGFKRTYQRALETTHDKTHARLTVQRKIISTLRAMWITRTPYCDELSR

SEQ ID NO: 442829 - protein, 393 aa, unidentified
MLHSSGVSLDTTDAVALASERSEEAKATAADGRSLTLECCNADTVRELDRRRPLVNSPNSRLSRDKLSSSHLQGRDTSKMSFQHFIGIDVSKAKLDLAFDEQATTTVVPNDPKGIDELVDLLPEAKSCLIVIEATGNYERPLAVRLVEAGHVVSVVNPRQVRDFAKAIGKLAKTDKIDARIIALFGKLTRPRAVAKTKQLQGELDQLVTRRRQLIGTRTAEKNRQGQAVSGAVRKSIQRVLDAINKDIKMIDREIQKLVQSDDDWKHRAELLGTMPGIGDVTSATIIAELPELGDLNRQEIASLVGLAPFNRDSGQMRGKRSIFGGRGSVRSALYMAALSARRYNPAIAAFSKRLAEQGKPPKVVITACMRKILITLNTMVKTNTAWENPQNA

SEQ ID NO: 442830 - protein, 369 aa, unidentified
MADYREAFVAFDVAKIKHAVAVADSGRAGEVRFLGEIENRPVTIERTIRKLAKRYDRLHVCFEAGPTGYGLYRQVGDLGHDCMVVAPALIPKRSGERIKTNRRDAVTLARLHRAGELSAVWVPDIVHEAVRDLVRARQAGAEDLRRKRQQLLSFLLRHGRIYDAGGHWTLAHRRWLARQAFEHQAAQIVFQETSDAIEDAAQRLHRLDEQLAAIVETWSMKPVVEAYQAMRGASFLVAVIFAAEIGDVRRFETPPQLMAFLGLVPGERSTGDTVRLSGLTLAGNRRARRALVEAAWTYRYPARVSEPLRARLEGLPKAVRDIAWKAQVRLCARYRRLAAAGKKPPVIAAAIAREMAAFLWAIGREVAPS

SEQ ID NO: 442831 - protein, 405 aa, unidentified
MEIIIEKGCGLDVHKGTVVACIMGTGIKKEVRTYTAMTNDLLRLKGWLQEAGITHVAMESTGVYWKPVFNILEDHFEVILVNARHVKNVPGRKTDVQDSEWLCRLLRSGLLKGSFIPPRGIRELRDLTRYKRKLIQAIVAEKQRVEKVLEDANIKLSSIASDTFGASGKRIIEELMKGKLEPEQMAELSKGRLRQKREDLKEALVGEVREHHKFMIKASLKHIRAMEKILSDIERKIQEKIDCHYKEEYALLQTIPGVKGEASTLIAEMGVDMERFPSEEHLSSWAGMSPGNNESAGKKKPGSTTYGNKCLKTMLTEFAWVASKTKDTYLRSKYHSLVGRRGKKKALVALGHKILIMCYHILKHRCAYKELGVDYLDKRRKDKIARSYRRRLHHLGYEVTLKEAA

SEQ ID NO: 442832 - protein, 320 aa, unidentified
MAMTVLQSIIGVDVAKAEVVACHFETDELKIVPNNKTELKAWLKSLPVDSAIAIEATNIYHLDTVNLAHGMGHKVYVIDGYRLNHYRKSTGGRAKTDASDARLLARYLKNEQADLRAWNPPPKIYTKLQSLLRRRAALVKMRVGLNQSWAGEPLLKASSKSVAACLARHEGLIEKRILDAVTEAGLLHQIKRCQAVEGIGFLTAVALTMAFQRGEFESADAYIAFLGMDLRVSDSGQMSGRRSLSKKGDSEIRRLLHNAASAGIKSNAWKPLYEGYLARGLKTTQALVIIARKLARIAFSLMKNLSEYQSKAVLGASPQP

SEQ ID NO: 442833 - protein, 367 aa, unidentified
MKKHTSIDQSLSSADLSACTTVAVDLAKHVFQLAGEDALGKVHYEQRIKSREAFYELLRQLPPHVVVLMETGPGAQAWARQLQDQGNLARILPAGLVAKHRSGPKNDRNDALAILRAGRDEKICAVPVKTVVALAMQALHRARQGYVRRRTAVSNQMRGLLLEHGIALAQGDVAISQRIPRILEDATQPVPAMLRELIDELLAEWRHLGERINVLTGRLEVAANADKTAKRLMTVRGIGPVTATALVAKETKPERFADARMFAAYFGMVPDQHSSGNTVQLGDMTKRGDSYLRSLMIQGAHAVLQQLRPDSQQPDDRRLLRWMSRLGRKDAAIRLANRNLRIVWVLLQNDQTYRRQPADGQQATMSH

SEQ ID NO: 442834 - protein, 387 aa, unidentified
MPQPNDLSRSLVPFRQDSTLVAVVEMSRSSWLVAGIVPGIGRHPLKKLDPSEEALLALLRQWRDEAAGAGCTIARLAVAFEAGRDGFWLARWLRTRGVEAHVIHPTSVAVSREHRRAKTDRLDTELLKRAFLGWLRGEPDHCSMAAIPTLEEEDAKRPSREREGLVGERTRIVNRLKGALARLGVRGFKPTLRAAPERLETLRTPEGAPLPPNTLAELRRDMARLRLVRNQIAEVEASRAERLQRPGGGGGDAMVRLLARVVGIGIETADMLVREVLSRDLRDRKALARYAGLTGSPDESGARRREKGLARVGNARVRRGMLQLAWRFLRFQADSQLACWYRARTADARGGTRKAMIVALARKLLIALWRLVTIGEAPEGVVLRPAP

SEQ ID NO: 442835 - protein, 375 aa, unidentified
MRDHSEAFVAFDTSKLRNAVAIAEAGRSGEVRFLGEIDNTPTATVKLVSKLAAKYGRLSFCYEAGPTGYGLYRQITGLGHACIVVAPSLIPKKAGDRVKTNRRDALGMVTQFRAGELTAVWVPDPRHEAMRDLTRTRGAAVEDLRRKRQHISSFLLRLGLHYAGKKTWTKTHMKWLASQKLDHAEQRIAFEEMLLAVRQAEERIARLEEAIRIAVPDWSLAEVVDALMAMRGIDMISATAFLAEIGDLSRFRTPRELMAYLGLVPSEHSTGDTVKRGPITKAGNRRARRILVECSWAYRHPPRVGRKKEDKVAAAPRAAREIAWKAQHRLYARYRALTRRGKLKTVVVTAIARELSGFIWAINREITAAGAVASQ

SEQ ID NO: 442836 - protein, 356 aa, unidentified
MQNNFQSPESVILGVDTHLDIHVGAVISQAGKLLGTRIIQTNQIGYQELFDWAKSFGVLERAGIEGTGTYGAALTRFLIKNGIYVVEVNRPDRSKRRLEGKSDPLDAENAARTVLSGSSKAIPKMQSGACEALRIISVARRSAVKARTQAINQLRSLLVSAPQDVRDKLWKSKPHECVAACINCEVSEYSPLRIALYSTLRSLAKRWGALTEELNELDESLDKLTRKYASNLRSQFGVGPQTAATLLAVAGDNPERLKNEAALASLCGVNPLPASSGKTVRHRLNRGGSREANNALWAIALVRMRSDPRTRIYVDRRAGEGLSTKEILRCLKRYIVRELYPLILSDLTYANRPLLT

SEQ ID NO: 442837 - protein, 334 aa, unidentified
MENIALIGIDLGKHSFHVHCQDKSGKALLRKKFTRTKLMQFLATCPSAVVVMEACAGAHFMARRISDIGHEAKLISPQFVRPFVKSNKNDFVDAEAICEAASRPSMRFVQPRTEGQQAMRALHRVRESFIRDKVKTINQMHGFLLEFGISLPIGDSVIKRLSLVLAEHEIPEYLSRLLMKLHAHYLYLVEQITELESELNQSIKVDDTAQRIMTIPGVGPITASLLSSQLGDGKQFSRSRDFAASTGLVPRQYSTGGKSTLLGISKRGDKNLRRLLVQCARSFMMRLEHQQGRLAEWVRGQLSNRHSNVVACALANKLARIAWAITTNHNEYQA

SEQ ID NO: 442838 - protein, 346 aa, unidentified
MKITTMGIDLAKAVFQIHGVGERGKIAVRKQLKRSEMASYFANLGPCLIGMEACGSAHHWARKLRGYGHTVKLMSPQFVKPYVKTNKNDMADAEAICEAVSRPNMRYVSVKTVEQQAILSVHRARAGFVKARTAQANQIRGLLSEFGVVIPKGIHSIMKRIPEILEDGENGLPGTMRNLLQRLTENLKEMDRQADELEKQIQLWHRENEASRRLAEIPGIGPITASAVAATVGNAREFKNGRQLAAWMGLVPRQNSSGGKQNLLGISKRGDTYLRTLLIHGARSVIQYAEKKAGETSWLRKLMARRNKNVATVALANKNARTIWALLAHDRTFRSDYIPAPVAAVV

SEQ ID NO: 442839 - protein, 387 aa, unidentified
METVADRAKPTAIRTDLRAIFVSLELSRSRWLITSLSPGNRDRMSKHSVQAGDIAGMLARFSELRHKTQARTGQSFPIVVIQEAGLDGFWIHRVLRKEEIESHVVDPASIATSRRRRRAKTDRIDGEALIRVLLAFKRGEPRVCMMVRAPTPAEEDRRRLCRERKVLTAERVQHVNRIKGLLFAQGVSEYEPLRRDRRDRLARLVTGDGRLLPNYLKAQIGRELDRLELLLEQIKAVEAERDSLLASTEANKSALPAMLLDLKGIGPEFAAILWSDGLCRHFDNRRQVAAYAGLAPTPWQSGSVDREQGISKAGNPRLRETMIQLAWLWRRHQPRSVLTLWFEERVRHNAGRLKKRTIVALARKLLVALWKYVSAGIVIEGAASKTA

SEQ ID NO: 442840 - protein, 343 aa, unidentified
MQGVTTVGLDIAKSVFQVHGVDARGNVVVRRQLRRRQVLPFFKKLPSCLVGVEACATSHHWSRQLRALGHTVRLMPPAYVKPYLKRQKNDAADAEAICEGVTRPNMRFVETKTPEQQSCLMLHRTRHLFIRQQTAVINAIRAHLAEFGIVAPVGRNGVEELLDVVADPNDDRVPEVARECLAGLGAQLRMLKAQILEFDRCIVAWHRSNETSKRLDEIPGVGPALATALVASVADPRAFRSGRDFSAWVGLVPRQNSSGGKEKLGSITKRGDRYLRSLFTAGALAVIRYAKIHGTKHRPWLTALLGRRPTKVAAIALANKIARMAWAMMAKGERYKEPAALAA

SEQ ID NO: 442841 - protein, 351 aa, unidentified
MMLIGVDYHPSFQTIAFLIEETGEYEERELNHSDGQAEKFYRDLKQRGICVRVGMEATGHSRWFERLLAELGFELWIGDPAEIKAKRVKKQKFDREDARLLLRLLRENNFPQIWVPDAENRDLRQLLWHRHRLVQMRTRIMNQLHALAMNEGYCWKKKLFSEKGRAQLEKLALAPWAGRRRQGLLELLDRMNPTIEELTAAVEREARKRPEAMRLMTHPGVGPLTALAYVLIIGTPTRFQRGKQIGTYVGMIPCEESSGGKQRLGHISKQGNSLLRFLLVEAAQAAARVNPHWRRRYMHLAMRRHKSIAKVAMGRRLAVRLYWMWRNGCEYSPSLEFGSYAGQLGLGNGVK

SEQ ID NO: 442842 - protein, 399 aa, unidentified
MISVGIDVSKEKSMVCILKPYGEVVLSPIEIVHTEEAVTKLADRILELGSEVRVVLEATGAYHLPLLSIFTEKKIFVSIINPLVMKKYASKSIRKGKTDKIDSVRIANYGLDNWFHLRKHEPTEDVYEELKFLGRQYSHYIRMKIESKLSLNGILDRTMPGIKKLLSGKRSDYPTKDKLSDFVEHYWHYDNITKLSEEAFIKSYQEWAKKKKYHASESKARKIYAMASSGIPTLSSSTPSTKMLVLESVRVLGEINKTLQNILTQLQATASTLKEYETVRAMSGVGDVLAPRLIAEIGDVKRFHSASALVAYAGLDSPPYESGNFVGTRRKISKRGSSLLRKTGYEVMKCLKTIQPEKDAAVYLYMMKKEAEGKAKKVAKIAALNKFLRIYYARVMELQ

SEQ ID NO: 442843 - protein, 338 aa, unidentified
MKLYAGIDLHSTNSYLAIIDSDGKRIFKEKLPNDLPTITDRLTLYSGTLQGAVVESTYNWYWLVDGLMAAGFAVHLANPVAIQKYSGLKHADDKHDAFWLAEMLRLNILPTGFIYPKEERPIRDLLRKRSHLVRLRTSLLTSLQNIICRNRGFKLKTDDIKCLSDNRVAPLLSSNEDLAMAGQVSKEAIDALTRQINAIESFIEKRLKLKEAYQHLLSIPGIGRVLGLTIMLETGPIERFGDVGNYASYCRAVSSKWTSNGKTKGKGNKKNGNKYLSWAFSEAAELARRFDDQARAFYNRKLNKTNFMIAHAALAHKLARAAYYIMRDQVPFRPEKFT

SEQ ID NO: 442844 - protein, 438 aa, unidentified
MKKISQLTVINPTAAGIDVSDTEMMVAYPTNSEQLEIRAFGCFTSDLHSIANCLKENGVTTIAMESTGVYWVPLFLLLQEYGFEVYLVNAKHVKNVTGRKDDESDAEWIQKLHSCGLLSASFQPDNLERTLRSIVRHRKNLVQTSSTYLNRMQKALELMNIKLHTVISDIDGKTGLLIIEAIMNGERNPEVLADLRDRRIKASREEIIKSLEGHWTTEHLFELRQCYHLYCTHRQMIEECESEIEKQLVEQIASKNEGLIPDLPKVKRKVSGKHKASFNLTAYLKELLCVDVTEVFGISELSALTILSEVGTDISKWKTQHHFTSWLNLAPNTKISGNKIISSRIRKKKHHAGQAFRIAANSLYNSKNPLGDYYRRIRAKAGAAKAVVATARKLAIIYYKMVSNKEAFNPKALEVYQKKYKEKKINQLKKKIALLEAA

SEQ ID NO: 442845 - protein, 346 aa, unidentified
MNSVGIDLHRKRSHIAALDEAGMQLLSRRIVNDPQTFLALLEGLGECRIALEATYGWEWLADVLQDAGYELHLAHPMRTKAIASARVKTDAVDARTLAHLLRADLLPEAYIAPRELRDLRDLLRHRVALTRMRSALKNRVSAILAKNGIQRPYSDLFGPAGTRFLAELELREGPRRRLDSTLALIADFTREIDATSREIDARVKDDPYVEVLCQIRGVGRYIAMLVIAEVGDITRFPNARRLCSWAGLTPTVRSSDGKARLGHISSQGSPALRWALVEAAQHAGSGGGPLHDTYERIAKRRGKQIAKVAIARQILTLCYYGLRDGEIRCLAPRATTRAIRPPAVSA

SEQ ID NO: 442846 - protein, 368 aa, unidentified
MKNITTYVGVDAHKKDLFIAMLIGDQKTPVTWQVANEPNAVRRLVRKLEREAPGPVQMCYEAGSGGYALQRQVTTPRVRCQVIAPALIPRKPGERVKTNRRDAHKLTELLRAGLLTEVRPPTPEEEAVRDLCRARDDAREDLQRARHRLGKLLLRRGLHYGGRNWTRAHREWIDSLPWSQPAERVVVEDYLLAIDHLEARLIELDAQLTKIAEADPYRAPVGWLRCFRGIDTLTAILILGELHDVRRFPSPRALMAYLGLVPGEDSSGEKHRRGRITRTGNTLVRRLLVETAWHYQHRPSVGVALTRRRKGQPSRVIAIADKAQQRLCRRFRRLADQHKPAPKIAVAIARELTGFLWAALQPAPTSVR

SEQ ID NO: 442847 - protein, 352 aa, unidentified
MNAMTVAVDLAKDVFEVAVANRAGRIVERKRLTRRQFAHFIDALPAGTTVVMEACGTAHYWGRRCLAHHLAVRLLPPQYVRPYVRRNKTDRSDVEGLLEANRCGGIHPVAVKTVEQQTLQALHRMRAQWQATRTARLNAMRGVLREYGVPLAAGARTALKRIPLVLADPTLGLPAEVSAIIAMLLEDVRSLEARVAAIDQQLARVAREHPIAQRLQQVPGVGLITATAFVGAVGHIHSFRRGREFASWLGLTPRESSTGNRRRLGRISKRGDVYLRCLLTHGSRAMLLGAQRAVRMTPDRATAFQHWAVALMTRRGHNKAAIAIANKLARVIWAVWHRDVDFDPQAPCRAVA

SEQ ID NO: 442848 - protein, 312 aa, unidentified
MNKVICGVDVSKDWLDAFIRPSGVFERFSNDAAGIGALAEFCREHGVELVVMEASGGYERAAFLLLWELGIACALANPRHVRRFAEAMGFLEKTDRIDAAMIAHYAEAKRLSALPPPKAAQLRLSALMTRLSQVTRDLIVQKQRRSAARDGSIVASLNEVIALLVRQSRTLEGEIASMIDDDPLWASLNRAFRSIKGGADRTVARLMAELPEIGRISNKAIAKLAGLAPIANDSGKRSGPRPVRGGRSGPRGILFLVATIAARHDPHMAAFQQRLQSAGKPKMVIRIALARKLLVILNAKARDARREFEYAT

SEQ ID NO: 442849 - protein, 398 aa, unidentified
MICVGIDIAKGKSTVCFLKPGGEVLKAPYEIEHTAEEVGKLIRDIRSYGEEVRVVLEATGHYHLPVVAQLLEADIFVCVVNALRMKKFCSQDIRKAKTDKIDAVKIAAFGLTYWQDLHRAKPTDEVYRELRLLSRQYFQLTSMLVKAKISLGNLLDNVMPGITDVLQDRDPHHKLTDFVLKYLHFDKITAMGEKKFVSGYCSWAKKQGYRMYERQAEEIFALVQNSIPALPMTPSTTIVVKEAIRVVREIETSRSSILSQMQAFAKSLPEYFLIREMACVGDTLTPLVIAEIGDVRNFHSKHALIAYAGIDAPPYQSGGFNGTERHISKRGNGYLRHVGFEIMQCKLRLKPEGDPVYEFIQKKRSEGKCGKGAMVAGINKFLRIYYGKVTELYRELEA

SEQ ID NO: 442850 - protein, 354 aa, unidentified
MSKERTDAALVFIKPERLQAPIASAHAQAGDAKTMSESLVVVGIDVAKAHVDCAVLGADFGARQFANDIDGHSVLAAALQPLAVALVVMEATGGYESALACALQAAGLAVAVVNPKRARDFAKGIGRLAKTDRIDAEALAELAATLARRRDLARFIRPLPDAQQQELAALVTRRRQLLTMLGAERLRLQLATAKIRPSITALIEAIRAQLEDIDAQMQAHVQEYFASLDELLRSARGIGPVASATLIATVPELGRLSRREISALVGVAPMANDSGTSHGRRRITGGRFQVRRVLYMATLTATIHNPTIKAHYQRLLAAGKLPKVALVACMRKLLTMLNAMVRTQRRWSDEFHRA

SEQ ID NO: 442851 - protein, 351 aa, unidentified
MLIIGCDYHPSFQQIAWLDTESGEIGERPLSHRDGDAEKFYRKLKDDGVKVRVGIEATGHARWFERLLTELEYELWLGDAAQISARRVRKQKNDRDDARLLRTLLVEDRFPRVWLPDVDNRDLRQLLWHRHRLVQMRTRVMNQLQAVALNEGVRRKKGLWSKAGRAQLESFPLLPWATVRREDLHKLLDDLTPRIAALTAEVDKQAEQRPEARRLMTHPGVGPLTALAFVLIIGSPTRFRCGKQIGSYVGLIPCEDSSASRQRLGHISKQGNSLLRFLLIEAAQAATRSNPTWRREFVHLTMRRGRQIAVVAPARKLAVRLYWMWRNGWDYEKSLQFGSHVGQPGTGDGVK

SEQ ID NO: 442852 - protein, 344 aa, unidentified
MEITTIGLDLAKSVFQVHGVDATGRVVVRKSLRRAQMLPFFAKLPSCLVGMEACGTSHYWARELIKLGHQVRLMPPAYVKPYVKRGKTDAADAEAVCEAVARPTMRFVPVKSPEQQAALSMHRTRDLLVKQRTQLVNMIRGLLAEFGIDIPKGLERALLMARRIVDGEAPNVPMEAAKIVGTLSQQALDIHVRLREIDRDLLVWQRNNDVARRLMTIPGIGPVGATALAASVTDPHQFRSGRQFAAWLGLTPLQKSSGGKERLGRITKMGDKYLRKLLIVGMTSLVRRARYNAKTVDPRLADLLARKPVRVATVAMANKTARTVWAIMARGEAYRAGHRPALTA

SEQ ID NO: 442853 - protein, 402 aa, unidentified
MAYDCVIGMDVGKYFHHACVLDPQGRQVLSKRINQHEGSLRKLFGTYLADNASVLVVVDQPNNIGRLTVAVAQAMGADVRYLPGLAMRQLSRIHVGNSKTDVRDAYVIAHAGLNLPDALRSVDRVEEVFLQLKVLNGIDEDLARAYTRLINQMRSALVGTYPAFEHVLHGQMIHRKWILHLLAKYGGPTKIRRVGKARLAAFARGHRARNPEPVIDAMLAAIEGQSVTIAGAEYAELGVAMSAKDALAKLEHRKEIEAQVLELIQDIPQTEILLSMPGIGPRSAAQILMTVGDMSDFPDAAHLASYAGLSPRTNQSGTSIMSNSPNRAGNKKLKNALWQSSFASIRFHERSRQFYERKRKEGKRHNAAVVALARRRLNVLFAMMRSGELYRDISTVQEAAAA

SEQ ID NO: 442854 - protein, 348 aa, unidentified
MTVYIGVDFHARQQTISYLTTEDGAMQHLVLLHDNPLAVRAFYAQFAGQRVVVGFESSGYAAWFEELLEELGCEIWIGHATYIRQFAKRRQKNDRRDADLILELLHTGDFPRIHRYSRSTREMLQQLRYRQRLVKMRTMAMNMLLFMASSRGVSMRTQLQSKRGQAKLKQLPLPATLGTQRDELLSLLQTLDEKISTIERWLAKETKEDEAVQRLQTHPGIGLLTSICVRYTLEDAGRFANTRKVSAFAGFDPMQDQSDERNRMGAISKQGSRWLRFYLVEAGQVAIRKDADLQRVYQRVSRRGGHAKAKVAVARRLLVRAFIMLRDEIDYAEFQRRGVAARSSRGSA

SEQ ID NO: 442855 - protein, 346 aa, unidentified
MMIIGCDFHPSWQQVSWLDSETGECGERKLVHANGDAKVFYQQLVAPVLIGMEATGNSQWFIELVQDMGHQIWIGDAAQIRASYVRKQKTDKRDAAHILKLVVEGRFPKLWTPDREQRDLRQLVLHRHKLVEIRSRVKNELQHLSMNKGMQKKRALWSQAGQKMLRELPLKPWAWCRREDLLGLLGMLNQQVGTLDAAVQKAAEENPQARLLMTQPGVGPNTALAYVLTVGDVTRFPRGKQVASYLGLIPREESSGGRQKLGAISKQGNRLLRSLLVEAAQIAVRFDPEMKKQYLHRCHQKPKGVAKVAAARKLAVRLYWMLRTNVSYPEIVRIESSPRVALVGAS

SEQ ID NO: 442856 - protein, 324 aa, unidentified
MAKRITICAGIDTGKRKLDVAIDGSSLQLQVENTAEGHEVLLVWLRRHKVKRIGIEASGGYELSVVAKLRRKRFVVVVFQPAQVRAYAKFHLQLAKNDKIDAALIAACTAAVKKIHAAPDPRLQPFAEHLTLIDQIGEDIQLHKNRLETCRDPRIQKLWEEEISRLAKRQRVELKALAAAIRQHPDLAQRLNLIYSVSGAGMSTAVAILVRMPEIGTLNREQVAALAGLAPYDDDSGERSGARHIDGGRKRLRRALYTAALPASFSWNPHLIALYKRLKAAGKGHKSALIACARKLLIFVNTVVARGTPWQEQQPARATNPAAA

SEQ ID NO: 442857 - protein, 352 aa, unidentified
MGNRSMFVGLDVHKETIDVSIAEGHRGGEVRHYGVIASDLEPLDKVVRALRAPDRQLHFVYEAGPCGFGIYRHLTKRGEHCVVVSPSMVPKRSGDRVKTDRRDSLALARLHRAGELRAIYVPDDADEAMRDLVRAREDAVVVGTQAKYRLKAFLLRQGRRYPGREGWTLPYRRWLADLSFPTAPQHITLQEYRDTIDETERRIARVTEQLRQLAPTWRWAPVVAALQALRGVSFLTAVALVAELGDLTRFGHPRELMAYLGLVPSEYSSGPSVRRGAITKAGNPHARRLLAEAAWAYQGIPRIGRQHAYRQEALPKVVCDIAWKAQLRLTTRFRRLVARGKAKPKVATAIAR

SEQ ID NO: 442858 - protein, 349 aa, unidentified
MNYVGIDFHKAYSFITEMDESGVICRQAKLANEAVTLKGYLNSLPSPTKIAIEATCNWYYFYELIENHDLEVVLAHPLKTKAIASARLMNDKVSSETLAHLLRANLLPTAYIPNQKTRDIREVLRLRAFLTTLRTRLKNRVHAILLKNGIPCPYSDIFGKRSLLWLNALALRPCYQNAIGICTRLTSYLNEELELLNGTIETLAYDHPYARILETHPGIAHYSGLLIATEIGDITRFPNAGKLCSYAGLVPTMHASGGKIRMGSITKQGSRWLRWILVEAASHAVNKSSHYEKLYHRVAFKHGKASARVAVARSICRAIYAMLKFNRPYQERQLRSAPWGHNHQKGSRV

SEQ ID NO: 442859 - protein, 430 aa, unidentified
MGLIVPSAMHAERDDQPVSYEWFVGIDWGSQQHQVCVLDRDRRRVGARAVDHDGASLAQLAAWLWTLSAGQPQRVSVAIEVPRGAIVEGLLERGFHVFAINPKQLDRFRDRHSVAGAKDDRRDAFVLADSVRTDRPSFRRLQLDAPHLLLLRELSRAEEMLLEEFRRGANRLREQLHRFYPQMLQLCSAADAPWLWDLLQLAPTPAYAALLSEEQVQRVLKAHRIRRVKAPAVLACLQAPALPIAPGAAEAAQAHCGFLLPCLRVLAEQLQACSQQADTLLRTLADEPGEGQSPSDVAIVQSLPGVGRKITAWLFAEAAQPLAERDYQVLRTHGGVAPITKQSGKRRQVVMRRGCNLRLRHALYHMARVAMQRDAHFSSVYAALRAKGQRHGQALRNIGDRLLRILMAMLRHRTCYEASRMRREPVGQMG

SEQ ID NO: 442860 - protein, 315 aa, unidentified
MEAQELWIGIDVSKDTLEVAVRPTGTSWSVANTTQGITSLIHRLQELQPTVIVLEATGGYQNLLVSMLALEELPVAVVNPSQVRHFAKATGQLAKTDRLDAQILAHFAQAVHPTPRQLPDEQRQLLADLLARRRQLVEMLTAEKNRLDTARQRVRPQIEAHITWLTENLRALEQDLDELIHHSPLWREQENLLRSFKGVGPVVSYTLLANLPELGTLDRKQIAALVGVAPFNCDSGHRRGQRSIWGGRAAVRSALYMAALSAIRCNRVIRTFYERLLQAGKHKKVALVACMHKILTILNAMMRNGQPWSESYTRP

SEQ ID NO: 442861 - protein, 405 aa, unidentified
MLNAVGIDVSKGRSTVAVLQPGGVVIRKPFDVYHNQNDLNDLVSYIKSLEDDTKVVLECTGRYHRPIVDALHKAGIFVSAVNPHLIKNFGNNTIRKVKTDPADAKKIARYTLDNWQELREYSDMDDTREQLKTMNTQFDFFMKQKTAAKSNLIALLDQTYPGVNKLFDSPVRADGSEKWVDFAYSFWHVDCIRKLSLNTFKERYRSFCKKHDYNFNEAKAEQIYSSAKEAIATLPKSPVYKDLIHCSIKQLNLESEHVEKLRSDMNAVAAQLPEYPVVMGMYGVGTTFGPQLMAEIGDVMRFTHREALTAFAGVDPGKDDSGQRVSKSVKASKCGSARLRKTLFQIMTCLLQNMPEDDPVYQFLDKKRFEGKDYYVYMTAGANKFLRIYYGKVKEHMRKLQADQS

SEQ ID NO: 442862 - protein, 462 aa, unidentified
MIAIGIDVSKGKSTVAAVGEGKKVIQKPFEVAHNKTELSGLIKFVKKFNGEVRVVMEHTGVYYQVVAETLYAAGIRVSVVNPVLIHQFGDNTLRKVKTDKKDSMKIARYTLENREELRDYTTADMIRDSLKSFVRQFNFENKTLCAHKNSLNALLERVFPGIDGFFNSPAKSNGHEKLIDFVIEFWHNDCVSLLSETKFIEKYRKFCKNNRYNFDALTAKEIHATSRENLTTMPKNDSTKLLVQGAAKRTLQISVSVEGLRSEMIKLAGQLPEFETVNALYGVGETLAAQLIGEIGDVRRFASKRALAAFAGVDPDKDDSGKKVSISGKISRSGDALLRKVVYQAVDCYLLNSPADEPVYQFLDKKRSEGKNFYVYMTAACNKFLRIYYARVKEFMSSLETETPCENDTNKTDSSERLTTSTEVASIISTLSVKDNTAFTCEQDSALPEGNMSGLQGFGLYG

SEQ ID NO: 442863 - protein, 456 aa, unidentified
MPRARRRLTRAATPPVVHPHAAGIDVGATELYVCVPVERDPRPIRRFGTFTEDLLALAAWLKEVGVTSVAMESTGVYWIPLFQILDTQGFEVCLVNARHVKNVPGRKTDVQDCQWLQYLHSVGLLRGSFRPPDAVCAVRTVLRHRARLVQLAAVHTQHMQKALTQMNLQLPHVLSDLTGVTGLAILDALLAGERDPAVLAQHRDPRLKASRETLAKALVGDYRPEHLFTLRQALASFRHYQRLVAECDTEIQTLLDAFPSTVDPAAAPLPPDPRPHRRRSAVQVELRTELYRILGVDLTRVEGFATLPLALFAELGPTLAAFPSSKHFASWLGVCPDNRISGGKLLAVQTRHVKHRVAQALRTAAQSLHHSQSALGAYFRRMRAKLGAPKAITATAHRLARILYHLLTTRQPYDETQVAAAEERYNRRSEARLRAHARALGYHLVPAAPSSAGGVS

SEQ ID NO: 442864 - protein, 349 aa, unidentified
MIVIGVDSHKRTHTAVAADEAGRRLAEKTVAATSAGHLELVRWAGRFPERRFALEDCRHLCRGLSRDLLRAGEPVVRVPPRLMAGARRSSREPGKSDPIDALAVARAALREPDLPVAALDGTERELRLLVDHREDLVAERTRAANRLRWHLHDLDPGNEPGLRTLDRAVVLVALEARLAEVPGTVARIARELVTRIRDLTRTIDALEREIARLVADVAPSLLALPGCGHLTAAKLVGEMAGVGRFRSAAAFARHNGTAPIPVWSGNDERHRLSRTGNRQLNVALHRIAITQMRIDERGKTYLEHRRAAGDTKTGAIRALRRRISDEVYRRMRHDERLRVTRRVPLVAAA

SEQ ID NO: 442865 - protein, 473 aa, unidentified
MEKADMKHNQQRKRTGRSERQASVSLFERIQPNAAGVDCGQKSHFVAVPPERDPEPVREFRTFTTDLQRLAEWLAQCGVKTVAMESTGVYWIPLYEILEQRGFEVVLVNARDVHNVRGRKSDVKDCEWLQQLHSVGLLRASFRPAAAMVPLRSYLRQRAILVEELTARIQRMQKALTEMNLMLHTVVSDITGVTGLKIIHAILAGARDPERLAVHRDGRCHASHQELVAALTGNYREEHLFGLRQNFTAYQFHLQQIAECDAEIEALLNLLAAQQPPPAAALPAPRAKTTKKHAPAFDIRTPLHVLTGGADLSQIHSIGPQAALQLVAEIGTDMSRWPTEHHFASWTTLAPNNKISGGRLLSSRTPPSANRAATILRRCAMSLGRTSTALGAFYRRLAARVGKAKAITATARKLAVLVYRVLSGDLIYNDPGATAYHQLNRARELKSLRKRAKLLGFELVDRSSGEVLLNPVS

SEQ ID NO: 442866 - protein, 482 aa, unidentified
MKKRNIYVHQSQELLGLFEQAGNSTKVMCVPIDYAKKDHIVMFCNGHGDILRKPFPIKNTPEGVNHLAEQVSRSCRYHRINPAHVYFGGEDGGSYAENFANTLRAKGWLVAGVNAHDAKKQRENLQASTDRLDLMGIARMLLNRRGNCCPAQSGVYRNLRNLVRHRRKLVVMTTEVRNRIHTVVDRLFPGFLSERNSGITPFSKSSLWLMGNRFSAPQIRRRKRQPLIESLRRNGMPKPDHAASKLQEYASRVLNTPDEYIDTLQLSLSQHVTHHRCLQENVEQVEKEIAVWLAQTQGAFLTSIRGIGIVLAAGVTAEIGNPNMQKPLNNLTSYAGIVPRITQTGGPEGSVYTGKVAKRSNRILKDYIVQSASHMGLHGPDELMTDYKRRLAAGQHADFGIARRYLRMGICLMKTSQVYIPGRLRKNDVKPEERAGYYLMHWPSLRDKWRKAGALNTAFEQASPLGQWRDMVQRVYDIKLTM

SEQ ID NO: 442867 - protein, 372 aa, unidentified
MQSTTKFVGLDVSKEKISVAIADVSGEAPRYYGTIPHTPAALRKLIKELGAAETLSFCYEAGPTGYETYRWITSMGAHCVVIAPSLIPKRPGDQVKTDRRDAEQLARLYRAGELTPVYVPEREDEALRELVRAREAAKEDAHRARQRILKFLLRHQIERPATIKRRWTKKYRVWLGQLTFPYESMHVAFSEMLHALDEIEQRMGRLEKALVEQAATGSKASLIQVLQSLRGIGLLTAITLAAEIGTFARFRSPAQLMAYLGLVPREYSTGLSTRRGSMTKAGNGRLRRTLVESAWSYRHRPAVKGDLAKRLDGMPADVQLLSWKAQERLHYKYRHLVFGKNKHKNVAVGAVARELIGFIWAVARTVEQPAAS

SEQ ID NO: 442868 - protein, 463 aa, unidentified
MRKKQSPRSQPQNNRVLEQLNHNAAGGDIGSDTIWIGVGEHVSEEPVRKFGTTTAQLRESAEWMISLGVDTVAIEATGVYWVPAYEIYEEYGLHPILINSRAIRTFNGMKKSDFIDCQWIQLLHTFGILQPSVRVESLMIELRGYMRHRKNLTEQCSEQIQRMQKALTLMNLRLDQAVSDITGMTGMNILRAIVKGERDAVTLAAMRNPGCAKSEAQIAEALTGHYREEQLFCLDQAIQMWDFFQKLMGQCDGKIEAVLHKLPAKQTETTVKPTRQKPRKNQVRFDGRTLLHERLGIDLTQIRGLEVLTLLTVISECGVDLSRFPTDKHYKSWLGLCPGTKKSGHRLLSSRSRRTTNRAATALRVAAQSLLKSDCELGAVGRALRGRIGAEKAITAVAGKLADRIYLSLKTGRVFEDRGAQYHDLKHRERTMASLQKRARRLGLQLVPIGETVKKTIAESTVS

SEQ ID NO: 442869 - protein, 350 aa, unidentified
MGALGAPGVGGLDIHRKQITFDYLDTVTGEVKRGQIAPAGRAHLRAWLARFAGRDDVAFAVEGCAGWRYVAGELAAAGIAVHLGEPADTAALRGRKRHAKTDKTDARHLRALLAEGRLPECWIPPEHILEYRALLETYHDLRRAHTAWVQRIHAVFFHQGAPALGEDALRTEQGLAGLRASAAAHLSPAGQLQVATALDMLAAVEARMGPLRKQLTQTARHLTGAKVLAERLYGVGPVTGLALTCWLAGQGRFSSSRKAVRFTGLDITVHSSDRKGPPGRLSRQGPPVLRWAVYEAGKTHARAAAPDHGYYTQVADRKNTKRAALSEARKIVRQACHILTELGDDALTAA

SEQ ID NO: 442870 - protein, 344 aa, unidentified
MSEVTTIGLDIAKSVFHAHGADEHGAMLFSRKLTRAKLLEFFAGQPRCIVALEACGGAHHWARQLQEMGFAVRLIPPAYVKPYVKRHKNDAIDAEAICEAAQRPGMRFVAVKSEKQQAAGLVFRTRDLAVRQRTQLINAIRGHLTEYGWVAPRGKASMTMLADLLGEEEMASSLPKAAVPMFRLMVDMLAELDERIATLDREIARRAKEDEAARRLMTIPGVGPIAATAIVALAPPLETFRKSRDFAAWLGLAPRQHSTGGKQRLGSISKMGELTIRRLLIIGGSSIVRQACRRGAPAGSWLEGMLARKPRMLVSVALANKMARMVWALLTKKEDYRAPAAITA

SEQ ID NO: 442871 - protein, 331 aa, unidentified
MNYSHFVGLDVGKKTFDASLMSAAEKELSHKSFDNTPEGIQSLLDWIAGYHLSLSKLLFCAENMGSYVTELSVSSVSMGFSLALVCPLTIKKSIGLQRGKNDRIDAKRIANYAVLHYRKLELYKLPDKDLVRLRGWIIIRDNLVKQKVSSIKLLETFSQMAKLADVTESISFLEEQLKSIKERILEVEEDMEQLIAASTSLYTNYLLLRSIKGIGIINAIVLLCVTDNFQRFDNPRKFACYCGVAPFEHTSGISIRGKTQTSSLANKEVKVYLTRAAITAISWDPQMKAYYKRKIAEGKHKASVINAVRAKIIARSFAVIRRQTPFVTLAV

SEQ ID NO: 442872 - protein, 348 aa, unidentified
MNSLHYIGFDVHKKAISFCVKTAAGEIVEEGSVLAQREVLRQWASARLQPWRGAMEATLFSAWIYDTLKPYGEQLEMAHPAKMKAISAGKKKSDTIDARTIADLVRCNLLPACYVAPPRIRELRRLLRYRSLLVSEAVRMKNKMAGLLMETGALYVKEKLHRKKYFASLLEELEEVPESVIDLLRLSRGAVEMFENTQKRLVRELLADPELAQRVERLMTIPAVGEITALTWALEVGDPQRFPSCSDAMSYCGLTAALKSSAGKQQRGPISKQRNHWLQTTLIEAAKLAPRWNPQLAALHARELERGHRNRATLAVARKLVTYLLAVDKSRQPFQLRVPLEEPTQKAA

SEQ ID NO: 442873 - protein, 426 aa, unidentified
MKPTGFSSSRATDPVVVSCDVGMQSIHMVCSALSTSSFARVYAIENYTDPIRGELTALRDAAKAAGHSEIRLVLEPTGVYDRLLVQVARELGFDVKFVNGEDVAKMRQVIFGDFGKTDERDPRAIGAVAAHGRTIIARDLPAVFRLMRGWGKIYQDAEDEIIEAKNRIHRALKLLFPDFAFSTDFLYSPSGEAIMRCYWFSPHRIVRDSASRLFERLHKHSRIMRRSVERLLAQARASATITPDGALGELAQQQLALAWEELQRHDERRARARAKLEELYLEARTTDARLPEPVKGVVSLIGLARLFAEIGPLDDFASWRQVLRYGGLNLCERKSGKYIGQTKISRKGRPQLRRILNELVLPLVRRGCLYGEYYHHKTGIEKMKGTKAMTAVSRKLVKMIWGWTHSKLEFDAARVFTCRSAYAKAA

SEQ ID NO: 442874 - protein, 399 aa, unidentified
MLFVGWDWASASHAVTILDPAGGVVDRCMFAHTEHDLNTILSRLASHGHPAELPVAIERSDGLVVDRLLAAGHPVVAIDPGAFHAARPRWGAAGAKTDPGDSYKLADYLRTDGHRLRRLEPVDAVTRQLQALVRLRDDHVAARTAASNQLGALLDAHWPGAKQLFFRLASKISLAFLTEFPTPQAAAQLDQTELAAFCRRHAYRGGRHPAELLKRLRSAPIPPVGLDPGVLAQVVDAQVQLLGTLLATIADLDDTISKRLGTHPKARLLARLPRVGQLSHAQLLAELGPILDRASSAEHAAAQAGAAPVTRASGKTSSVHFRLAANHRARQALHTFADNARHSSPWAAKLYSDARARGKRHPQAVRVLGRAWLRVIWACWHTNTAYDPAKHRAEQRLAA

SEQ ID NO: 442875 - protein, 310 aa, unidentified
MQDTIGIDISKDTFDIYRLSDRRHERFGSDKAGLAALRRWIGKAPVRIVNEATGRYHRDLEAVLGAAGHDLVKVNPTRARRFAQAVSQGAKTDRVDAAMLARMGAVLELDAKPVRSETMHEIRELHIARRALNKDRTACRNRLEAARNKVVLAQLRARLRQVDSQLEQIDTELARLIAEDPALARRQEILCSIPGIGAVTAVAMIVEMPELGMMEPKEAASLSGLAPITRESGKWKGRSKIGGGRRGVRNALYMPALVAIRHNLHLAETYRKLVDAGKPAKLAIAAIMRKLVILANALIRDDRTWTKTAP

SEQ ID NO: 442876 - protein, 379 aa, unidentified
MEIITRNEKILYIGIDVHKDTYSLCCFDFHKNELSDEMTIKATTKAVIKYLEAIKKKHREEILFACDYEAGPTGYGLCRGLQKAGYGCVVMAPTTMSNPDGKRRVKTDRIDARAIARILAYKSYSQVHLPSEEMEALKEYTRARDAKKRMFKKAKQELLSFLLRNGKSYPESGNYWTEKFFKWVKTVQFSEKWMQEAFSEYLAEVYSLKHKIELMDAKIKEIAGLEIIKDKVDKLVCFSGIDVTTAVETVVEIHDFTRFATAAQFVSYLGLCPGEDSSGKTKNMLPLTKAGNKRVRALFCESAKAIKRMNPYGQKSKRILERQKNASPEIVAYADKATKRIRTKMRHLEERGKNYNVSSAAGARELACFVWGMMNEKIA

SEQ ID NO: 442877 - protein, 341 aa, unidentified
MDYYAGIDVSLECSSVCVVEANGKIVREGKVSSEPGALISWLKSLGYELSRIGLEAGPLSQWLFAAMREAGLAVELLETRHVHKAFEAMPVKSDRNDARGIAQLMRLGWFRPVHCKSMGAQETRSLLTARKLVQSKLRDTENSLRGILRGFGLKVGKTTELGFAGRINELVAGHPHLEMVAKALLTVHAVLRNEFKAFEKQVRKLARSDTRARLLMSTPAVGPIVALTYASAIDDPGRFKSSKQVGAHFGLTPKRHQSGETDYTGRISKLGDGSVRTALYEAANIMLTKPLKGCSTLKSWAMRIAKRAGMSKAKVALARRLAVIMHRMLADGKVFNAAAAA

SEQ ID NO: 442878 - protein, 346 aa, unidentified
MEYVALDVHKNYTWARVENSQGARLYESRLAHGHGTIKNFVNRWSGRSPVAVETVGNWYWVVDEIEAGGGTPQLVNARLAKLMMGNVNKSDKLDCQGMNRLQRTGTLPTVWIPSSSVRDGRELARTRMVLSRQRTQLKNRIHATLGKYGYTVKGASDAFGKKGREIIEELLLKLPPHTQQALRLILDELDHVTDNLKAIEGHMIEIFSPCPQTQWLKSLPGVADILAVVIWTEIGTIERFNRAEQLASYCGLVSRESSSGGKIRLGPVRRDVNVYLKWAFVEAANSALLNAGRCGYAHISRLYERIKPRRGHGKAKVAVARHLAEASFWMLKKGEPYREPMPSTQR

SEQ ID NO: 442879 - protein, 343 aa, unidentified
MYYIGLDVHKRTISYCVKDAAGHVQREGKIGSSRRELDVWVRTLPQPRMIALEATIFTGWIYDHLLPHAEKVKVAHPLMLRAIAAAKKKNDRIDAGKIADCLRCDFLPECHMASTAIRDRRRVLRYRTLVMKQAVQMKNRVSGLLMETGVSYNKQRLHKVGYFRDLLCHNAEVSDGIRPLLKICREQIEHGQKLDYALVSRLERDPLLKERLERLRTVPGVGSITALTWALEVGDFTRFASIKEAISYCGLCGAEKSSADKMMRTPISKQRNKHLQSVLIEAAKLATRYSPELAMVYDKERLRGNPNRATLAVARKLVAYLLAVERRQQSFVAAEELRPSVAA

SEQ ID NO: 442880 - protein, 420 aa, unidentified
MSSNRTKKKCAWIAIDGAKRSHDALGELDSKSRRRMKVLNEKADFERLVKYARGMASEVIVGLEPSADYHRPLAYFLLKAGLDVRLVSSLAVARTREALNNSWDKNDPLDAQVILHLLKTTKTNPFHDPVLAGHNDLQELSNSHAQLSKRRTRLQHSIVNHYLALYFPEVERFMTHSRAHWFGKLVSAFPTPASVLTLSEDEIIERGGELVKGKQSKTALLRAYYQAAQNSIGVPLEEGTPALEMYRRIVEEHLTLSVKRRELEATADALLKSNRDYQILRSLPGIGPILVLTILAEAGVLRRFGHERQYLKFCGLDLATQQSGTFRGATKLSKRGNGRLRSAYWLASTVAIRMRENSFRQKYTRYVRRDPTDRDLCRKAYTAVTSKMARVSYHLVTKQLEYRPFHEVGVPAEELPRIGP

SEQ ID NO: 442881 - protein, 387 aa, unidentified
MPQPNDLSRSLVALDQDSTLVAVIEMGQASWLVAAIVPGINRHPLKKIATDQEQLVQVLQRWAKEAETAGRVIKRIAVAYEAGRDGFWLARWPRADGVEAYVIHPSSVPVPREHRRAKTDRLDTELLKRAFLGWLRGEPDHCSMAAIPTLAAEDAKRPGRERENLVGERTRIVNRIKGALARLGLRNFKPMLCNAPQRLETLRTPEGAALPPNTLAELRRDMARLSFVKQQIKEVETARLERLQRAPGEPGNAMVHLLTRVVGVGVETADMLVQEVFSRNLRDRKAVARYAGLTGAPDESGKKRRERGLAKSGNARVRRGMLQIAWGFLVHQKDSALAEWYRARTADARGATRKTMIVALARKLLIALWRLAATGEVPEGLALRAAA

SEQ ID NO: 442882 - protein, 355 aa, unidentified
MNATTVAVDLAKNVFELAVADASGKVIERARLTRSQFERWFDNRKVDRVVMEACGSAHHWGRWLEARGIGVKLLPAQYVRAYVKRNKTDSADAAALLEAARAADIRPVAVKSIEQQALQALHRMRSGWMATRTRRINTLRGFCREFGLEVRVGAVQGLAAIARLIADDRSPIPAILRTPMRLALEEIRLMEARIEQLERELAQLARQSPACEALSSVPGIGLLTSTAMVAAVRDPRSFDSGRRYASFFGLTPREYSSGQHRYLGRISKRGDRYIRMLLTHGARSVLRAATVARRQGRKLDRLRTWALQVQDRTNHNKATCALANKLARIAWAVWVKHERFQSAEAHPAMAAETTA

SEQ ID NO: 442883 - protein, 350 aa, unidentified
MLIIGCDFHSRFQQIAMLDGQTGEVIERRLEHATGEARAFYAALPGRARVGMEATGYAQWFEALLAGQGHELWVGDAAEIHAARVRKQKTDSRDACHLLDLLLQDRFPRIWVPSPQERDVRQLLRHRHKLVCSRTSVMNQLHALAMGQGVCRKQKLWTAAGRRELESLALGPWASRRRRELIEMLGRFDTSIQELDQAVVQEADRHPAAMRLMEHSGIGPVTALAWVLTIGPIERFEKSRQLVSYLGLNPRESSSGGKQRLGSISKQGNSMLRSLLVEAAQTASRFDPELRRHYVRLKFRRGRAVAKVAIARKLVVRLYWRLREQVSAAPPARTQGNPGNFLMELSPSTK

SEQ ID NO: 442884 - protein, 393 aa, unidentified
MQSTQDFNGKPVLAVSLELCNKSWKLAASDGRRERPALKTVDAPQPRERLEQTVQRIEQLKAQWALAPQCPIVVVYEAGQDAFWIERALRARGYEVLVVDPASIPVARQARRAKTDRLDAIMLLQALLGWLRGERSRMHPVRVPAAQAEARRQLARDRGQLQKEIGQHRDRMRKLLRTVGCWEPLEGHLHARLEAGEFRCWDGQPLPQELHQRLQRECERLQLVGQQLAALEGSLLQQLPGEMRERIAQLAALKGVGWVGAMRLVLELYWRNFRNRRQVGSCVGLVAQPYDSGDSRVDQGISKQGNRRVRALLIEMAWLWLRYQPASAIAQWFEARTAGNASNKRGKRIAIVAVARRLAISLWRYLSDGVVPQGAQFKKMRGKQLKGLSAAAA

SEQ ID NO: 442885 - protein, 406 aa, unidentified
MSIIERFCGIDVHRDLLVVTILNDKTKETKRFVNDQDDINNLKNWLKTHECKRAVMESTSIYWVPLYLALEESGFDAMLANAHQVKAIPGRKTDQSSSEWLAHLLRGGQIKPSYVPEKHVRDLRELTRLRVKVVENRSAYKNRIQKVLNRVNIRLGSRLSDVFGKAGKEILEGLMAGKTIDAILEHTQNKWLKNRSDEIRVVAKGALSENDIFVLKQLTETVEHLNEQISQVDDRIEMLVNQRDVAIVSSVPGVGKKSAAAIVAEVGDAERFADGKKIASWAGLAPSVYQSAGTFVTGSITKMGSKWLRRVLVEAAHAAVRVRDSRLRAFYLRVKAKKGEKTAIVAVARKMLTIIWHLLVKGENYVEEGFEKTVRNMKAVYRGHVPLEQMAEILRSAGFVVSGPDG

SEQ ID NO: 442886 - protein, 438 aa, unidentified
MSVPLRAQVMTIFSDLKRGHGLIISTWCYPQLLPYRKEGEKIMKYVGIDIGKLNHYASVIDEDNPATKPIKFNSVQEGYNLFLAYLANNNCLKEETIIGLEATGHYWLTLFEKLKNDGYTVYVLNPLQVDSYRNENIRGAKTDLIDCQLIAKVLRFGTGRSTDLPQEDLFALKELCRFRADLVKRTTQLKLKIIAVLDQVFPEYETIFRDIFCKTSKEILKEYTTADVIAEEELDKLTEVIRTISKKQFNEKHAQELHTKAQQTFGLKYGLDAFSLKLRCLIEELEHLDREIKLLEKEIEIAVAKQHTELTTIPGVSTVVAGTILGETVEYHKDNPDPRSLLAYAGLDPKIRASGKYAGKMKMTKRGSPYLRNAINVAAFYAAFHEPMFKKVYKKQRGRGKLKGVALTYVAKKMAYVVASILRTNKTFSPQGVMAEKR

SEQ ID NO: 442887 - protein, 337 aa, unidentified
MSDVHVLAIDLAKRSFQVCATDRGGAVLFNRTVSRSKLMQMLSARAPCIVAMEACATSHYWGRLAQSCGHDVRLIPPIYVKPFVKRQKNDAADAAAIAEAVLRPNIHYVGVKSAEHQARAVVFRTHQCFVRQRTQLINALRGHLAEFGIVVAQGPVHLREVVGLLDSGGPELPAAVKEIARLYLDQIDVLGGRIEALASTLRLASEEHVETRRLCTVPGVGPVTAGAIMAFAPDLRTFASGRNFAAWLGLVPRQRSTGGKTRHGGISKMGQTDIRKLLIVGAMSRIRWIIRKGVVPDSWLGRVVARKPRMVAAVALANKMARNIWAMMTREQNYRMA

SEQ ID NO: 442888 - protein, 448 aa, unidentified
MGKSKTKNENVKRISQLTVINATAAGIDVSDTEMMVAYPINSEQLEIRAFGCFTRDLHLIATCLKEKGITTIAMESTGVYWVALFLLLQEYGFEVYLVNAKHVKNVTGRKDDESDAEWIQKLHSCGLLNASFQPDSMARTLRSMVRHRKNLVITSSTYINRMQKALELMNIKLQTIISDIDGKTGSLIIQAILAGERNPEVLADLRDKRIKASREDIIKSLEGHWTTEHLFELKQCYQLYCTHQQMIKECDREIEKQLFEQIASANEGVIPDIPCEKRKAAGKHKVEFNLTAYLKKILDVDVTEVCGISELSALTILSEVGTDMTKWKNEHHFTSWLGLAPNTKISGGKVISSRIKKKKHYAGQTFRIAANSLYHSKSPLGDHYRRIRAKAGAAKAVVATARKLAIIYYKMVTNKEAFNPKALEDYQQKYKEMKINQLKKKIAQLEAA

SEQ ID NO: 442889 - protein, 418 aa, unidentified
MSTTFAWFLGIDWGTEEHHFCLVDATGQIRGTRPVAHTASAVHDAVRWVCEQTGVAPEAVAVGLERPQGVLVDTLIEHRFAVFALNPKQLDRFRDRFTAGGAKDDPRDAHAVADGLRTDRRAFRAVQPDDPPIIYLRELCRMVEELQEQEGRLANRLRDQLYRVNAAWLTLSPAADEPWLWTVLAATPHPDAWPHLPRRQLTSALRAHRIRRLTAAAIGTALREPRLTSAPGVADAVATRIASLVPQLILVHAQRLTADRQIDGALDTLADAQPADGELREHRDVEILRSLPGVGRMVTATMLTEATGPLADRDYATLRAYAGTAPVTKRSGKRAGFVHMRYACKSRLRQALYHWSRTSIQHDARARTYYDGLRERGHRHARALRSVADRWLRILVAMLTTRTLYDPSRFVEAAPATT

SEQ ID NO: 442890 - protein, 476 aa, unidentified
MKKHKKTKPNPEAAKPLHEPKPDAAGIDLGATEIWVAVAPDRCQMPVRRFGAFTQDLLAILQWLLECGIRTVAMEATGVYWIPLYQLVADAGIEVCLVNARHVKNVPGRKSDVRDCQWLQYLHSVGLLMASFRPAQIICQTRSIYRFRQNLLTQVGQHLQHMQAALDQMNIKLHHVINDLSGQTGMAIIEAILNGERDPLRLAQYRDRRIKATQETIAKSLEGDWRSEHLFVLRLAWENGKQVQEQIKKCDQELMQYTRQLEAKTMVAQPIVPVKIMSLNVEPGVPELTPAPAVRPAKPRKKTSKNEPDGPWRENLHRFFGVDLTLIPAISVLTGITLMTELGNDLSAFKSVHHFCSWLCLCPDNETSAGKVLHKSTRRSQNRVRQALRMAASSLHHDKSYLGDKYRRLRAKLGAPKAITAMAHQIARIIWYLITHQVAFDMSIFAELEKAHQKRHLNRLNSAAHQMGYQLTPIAA

SEQ ID NO: 442891 - protein, 347 aa, unidentified
MTIMVDTQRALTGGVDTHADVHVAAVIDPEGALLGVESFATDLAGYKLLSSWMGAFGEIGLVGVEGTGSYGAGLAPHLHRVGLVVVEVDRPNRQERSRQGKSDALDAIEAARAALSGRAFGVAKTRDGNVEAIRALMVARRSARESRTKAVNQIRQLVYTAPDELRERFVGVPSWRIAEGVAILRVHADADPVRMATKSALGTLGRRAVALGEEGKRLDVLIARLVDKVAPELVELVGLGPDTAALLLIAAGDNPSRLRSEATWAKLCGVAPLEASSGKVTRHRLNRGGDRQANHALWRIVLTRMACHAPTKVYVARRTAEGKSKREIMRILKRNVAREVYHYLPRD

SEQ ID NO: 442892 - protein, 324 aa, unidentified
MYPITLGVDIAKKKFDVALLINTKYKHKHFTNDKAGFEAFIQWLLTFNLLTQPLICMEATGSYSLPLADFLVANDYPVSVVNPAKIHAFAKSELSRTKTDKADAKLIARYALTMQPGLWTPPPPEMRRLQALTRRIEHLLEIQQMERNRLETADGSVTDSINALLKAVADEIKAIRQAIDDLITDHTDLDQRRKLLESIPGIGAATVAYLLMLFSPHQGFTNAKQAVAFAGLAPALRESGQWSGKTRIAKNGEPAFRKVLYMPALSAWKHNPVIRAFCERLKANGKNGKAIACAAMRKLIHIAFGVLQSGEPFDPLWVDSKNKA

SEQ ID NO: 442893 - protein, 401 aa, unidentified
MNQTAHHDGIDVFIGVDVGKGEHHAVAIDRTGKRLFDKALPNDEAKLKALIAELKKHGTPLLIVDQPATIGALPVTVARAEQVAVAYLPGLAMRRIADLHAGEAKTDARDAAVIAEAARSMPHALRALPRTDEALSELMLLCGFDDDLASQITQVSNRIRGLLTQIHPALERVLGPRLDHPAVLGLLQKYPSPHALSAVSEKRLVVILGKLAPRLAKMLAAEIHRALREQTVVVPGTQAVELVLPRLAEQLTTLRRQREELATEVERRVNAHPLAPVLMSMPGVGVRTAARLLTEVTSRPFASAAHLAAYAGLAPVTRRSGSSIRGEHPSRRGNKVLKRTLFLSAFAALRDPVSRAYYERKIRQGKRHNQALIALARRRCDVLFAMMRDGSFYHAAPMANA

SEQ ID NO: 442894 - protein, 465 aa, unidentified
MKSKTSKKAKAKKQVSVDAGWDVIHPHAAGIDIGAREHFVAVPAQSTPKNVRSFGTFTDDLNSLADWLTECGVTQVAMEATGVYWIPVFQILEERGFKVVLVNPRQTKNVAGRKSDVRDCQWIQRLHTYGLLEGSFRPADPYCVLRSYLRYRAELVGARSVQVQHMHKALQQMNVQLTQVLSDVTGVSGLAIIQAILDGQRDPVQLAALVDRRVRAASEKIQRALQGDYRPEHLFVLRQAFSLYATLGEKIDACDAEIVREGATLPDRVDPQRQPPPPRKEGRPACKDQMSGQDMREVLYRKFGTDLTAIEGIGVSTALVVLTEVGPNVDGFKTEKHFCSWLGLCPDNRISGGKVLSSHTRKVINRVSDALRLAAVGLERSQSALGGFFRRMKGRLGAAEAITATAHKLARLIYRLIKHGEAYVRQGLEAYEAKFRERKLQSLQKAARSLGFDLVAQQQVVTAVS

SEQ ID NO: 442895 - protein, 383 aa, unidentified
MLSAQGNDTTNGEAILAVALELSQKCWKIAFQDGRHDKPSIYDVRHEEAEQRLAEARVVIEAQKMKWKLPSDCRVVVMYEAGQDGFWLCRALKQQGYEALIVDPASIPVERQARRAKTDRLDAIKLVSCLLAYLRGERDRMHAIRIPEAAAEAQRHLARDRGEMQKEIQQHRDRMRKLLRTVGNWDGVGPDFETQLHAGQVRCHDGAALPPEMQERFSRECERLALVKKQLAALESELVTQLPLPVQARIGHLLRLKGVGLVGSERLVLEFFWRDFNNRREVGACTGLAPQPYDSGESRVDQGISKQGNRRVRALLIEMAWMWLRYQPESALSRWFAQRTGGTGANKRGKRIAIVAVARRLAIALWRYLEQGVIPEGALLKAA

SEQ ID NO: 442896 - protein, 343 aa, unidentified
MDNIGLDLHKRESQLCTLTAEGAILEQRIRTSRERFTEVLGGRPPACVLLEASTESEWVARHLESLGHAVIVADPSFAPMYATRRRRVKTDRRDARTLAEACRLGAFRRAHRLSEPQRHVRAELAVRDALVRTRTRYVGVIKALVRRDGLRVASGEPSHLLPKLAALPLPAPLASELAPLLTLFEPLNGEIGAADQRLARRAAADPVVARLATAPCIGPVTATAFVATLDDITRFAGAHQVEAYLGLTPGEHSSGDQQHRGRITKTGNTRARWLLVEAAWRLLRSTQPEAAALRAWGEQVARRRGRRIAAVALARRMAGILYAMWRDETAFRAPVRAAAPATA

SEQ ID NO: 442897 - protein, 392 aa, unidentified
MSKQNNQQKQPSLRLGIIYPGAAGLDVGSMNMVISYPGPDGIQTVKEYDAYTQDLHQMAKDLQQAGVTNVGMEATGVYWMSVYEVLEQYGFKVTLVNARHYKNVEGQKTDVKDCQWLQQLHAHGLLRASHIAPEQYRELRTYVHERGVLQNQKSDTLNRIHKVLTQMNIKFQHVISDIEGVTGMEVVRRIADGVSGVENLLAGIKTDRLKAAKEQLAKSLEGIFKPHYQRVLKNHLMAYDFYKKQMLAYEELIEEALKKMLPATASQQAQAAIKKKTTKARKNQYHFNLKNYLHQIAGVDLTEIDGLDENTILTIIAVVGLDMHKWPTGDHFTSWLNLAARPKKSGGKTLGYQKRFTNNPATQAFRMAAQTMWQNKGSLGNFIQTFITYQRK

SEQ ID NO: 442898 - protein, 341 aa, unidentified
MKQFIRIGVDLAKNYFQVHALAHEGGPAVTRKLKRSKMHEFFAQIEPCLIGMEACGSAHYWARELKTIGHEVLLMPPAYTKPYVKRGKNDAVDAEAICEAVSRPGMRFVPIKDAEQQATLMLHKTRELLIKQQTMSVNALRGHLSEFGIVVAKGIGRVDELLELAESDTTLPEAAKAAVAVLAQHLEGLDKSIDDLEKQIGRAHARSEMSRLLDKVPGVGKILASVIAASVPDPSVFKSGRDFAAWLGLVPRQNSSGGKQTLGGITKQGNRYIRKQLVLGATSLLNVVNKRKGALRDWIVALLAKKPARVVTVALANKLARILWAMMKTGEFFRAEMFAKA

SEQ ID NO: 442899 - protein, 360 aa, unidentified
MCRVGKPVNSLLSFLTLQINIMAIQSKKIVQELKSLFAGIDVGAEELILVIRKNGTPFHPQKFTNTPADRARLVKKLVKLPGILVCLEATGVYHFDLSIALHDAGVALMVVNPKSSHNFAKVLMKNSKTDAVDAETLAQYAERMDFVAWTRPSDEKIALRSFARRIDALTRQKAAAKNNCHALSASQETPKAVLRDVKLAISQLEKRINCLSKEALVLIGKHPELERALLLLTGIKGIAQTSAIALMGELLLLPPGLSHREWVKFAGLDPRAFDSGKSVHKQARLSKAGNRHIRSALYMPALSAKQHDPYVKAYFQHLVDNGKKPLQALCAVMRKLLHAIHGMLKHDKQFDNTRFYAIPA

SEQ ID NO: 442900 - protein, 453 aa, unidentified
MDKGSKKKAGVKRITQFEIIRPNVAGIDISDNHGMMVAYPINETDIVIEEFECYTRDLRRISSTLKSHSIKSVAMESTGVYWIPLFLLLQEDDFEVYLVNAKHVKNVTGRKDDEGDAEWIQKLHRCGLLSASFQPDNQTRSLRSTVRHRSSMVKTRATYLNRMQKALEQMNLKIHTVISDIDGKTGLAIINAILSGERDPEKLANLCDYRIKASREEIIKSLEGFWLDEHIFELSQCYKLYDFHNEMIKECDKKIEALLQEIIKSKNNGIMPQLGKLKRKCSYKNDINVDITNYLRELNKVDIVSTNGITGISEITALTIYSEIGDNLHRFKDEKHFTSWLGLAPNTKISGGKIISSRVPKKKHNAGQVFRMAALSLCNNKGPLGDYYRRIRSTAGKQKAVVALARKLAVIYFRMMTIKEGYNPQSIVDYQKKWKERKIRNLEKYLNKLKETA

SEQ ID NO: 442901 - protein, 361 aa, unidentified
MSGTMTWVGFDVHARSTHGAAIDTMTGELSRLRFGPGIEGPLAWLAELPGPVRACYEAGPTGFGLYRAATAAGIGMQVIAPGKTPRGPSDRVKTDRKDAELLARLLLAGSLTRVVVPPPEVEAARELTRSHDACRRDLMNARHRVSKMLLRHGRVYPKSTTWTAEHRRWLSAQQFPEPTSDLVFADLIASVDGLTSRKAAIALSLSEVATDERWWPTVSRLRAFRGIDTLTALSLHLELGGDWKRFERAPTLSAWLGLTPSLSQSGESSKQGAITKTGSTLARRLLVESAWHYSRQPRLGATLANRQAGQPDHILAISNRAQQRLFKVNRAMKARGKPHNVVVVACARELAGFLWAAVTAD

SEQ ID NO: 442902 - protein, 410 aa, unidentified
MNVVHPICCGLDVHKEKISACLIIGNVFGGQRAEVEEFGTFTDDLIRMRSWLCENDCAIVAMESTGIYWRPVHNVLEGYMEVILVNARHIKNVPGRKTDISDSKWLAGLLRHGLLKGSFIPPKEVRDWRDLTRLRRTYVESLGDYKRRVHKLFESANIKIDSVVSDLFGVTGRNLMKLLVESSSQIRPEEMESCLRGKLKAKREELFRSIQGFFTDHHRYLLSSLLRTIAGLEREIEAINGRLRKVMQTREPLLEKLMEVSGISEVSARAILSEIGPSMDPFRSSAALCSWAGLCPGNNESAGKRHSGKSPVRKHHLKTIMIEVAWAAVKVKGSYYREKYYRLKARRGARRAIVAIAHRLLKAIYHIIRDGVSFRDLGEEFFNQTNASASSVNRLKKQAHKLGYMLIAQV

SEQ ID NO: 442903 - protein, 394 aa, unidentified
MKLIGIDIGKNKHFFCVMDQQTGEIISQPVSFSNDKEGFDFLVQKIKSYPKDSILIGMEDTGHYHFALLKYLLDLQYTVALINPKTTDFNRKMQGGITKNDKLDTINICDVLDTPERKKQYRITKVNSFDLYEQKQLTRHHHNLKEEENVYKNRLQKCIDIVFPEFNKLFNSKYGIVYMNILKMFGSAENIANTDIRTIRKCFEIEGRGNRISLTPERLKECARSSIGISSSAEVIQIKHLTAQIELIEEQLTEIDKKIEEFSIQNNSPILSIPGISHFSVTSILAELGDISNYSKPSQIIKFAGVAPLHYESSQFNAQHTAITKKGSKYLRKTLYQIILPVIRHNPVFNKYYQLKISQGKGHRCAQGHCVRKLLRIIYHLLKTNQQFDPQLLR

SEQ ID NO: 442904 - protein, 338 aa, unidentified
MALYCGIDLHSRDCWLAILDKDLKVIREAKVGNDLNALLEVLEPYRDEMEGVAVESTYNWYWLVDGLADAGYRMHLTNTWAVKQWEGLKYSDDRHDARWLAHLLALKILPEGYIYPKHERPVRDLLRRRSFLVKKRTSFLLAMRGAFECRTGLPTTSSEVKQWTAEEVESYLDDPTEALGITCLLEPMNALNDQIRIIEKEVIGRARLRDEFAPLLSVWGIGKVLSLTVMYEVGEIARFKKVGNFASYCRLVNSARLSAGKKKGSGNVRNGNPYLSWAFSEAAHFAVRYHPEAKKYFQRKRAKTNGIIAIRALAHKLARASYYVMKDRVGFDPVKVFG

SEQ ID NO: 442905 - protein, 349 aa, unidentified
MDFIKYSLGLDVSKDDVQACLVSIDLMQNVKICASRKFKNTVAGLETMVKWIEKNHRQKSVPLTICLEVTGVYHELFLYGLESADYFVSLIVPTYARRFMQSLGMHSKNDKIDAEGLARLGAERQLKRWQPGSIFYSSLRNLTRARQNFSEDKNIATNRLHAHLKLQRQSELVIKQMKSVIEAFEVKIKELEKAIAKLVKSNSEVLEKVDRVCEIFGVGLITVATLIAETFGFEAFENTRQLISYSGFDVIENQSGYHRGKTRISKRGNARIRRALYMPSLQAKKKASFAAIYERTLSRHHIKMKSLVAVQRKMLVTIFALWKSGEVYDPNYQSNKEEEKSTPALAGVQ

SEQ ID NO: 442906 - protein, 329 aa, unidentified
MQIYGIDLASEKFDVSFINSDGQATHIVVKNTKPQIEKFLDKLPEDCRLVAEHTGVYGDLLLKLADMRNIHVSYVSGYEIRHSMGLIRGKSDPLDAARIREYGERYADKLNDTHFPSETIYELRELYATRRLLVRQRKQLQTMLKGDDCRPEKSDTAQKIKREMMEQLNIQISSLEQKMAQLIDDDDNLSKTSVIAQSIPGIGPVTATELIIKTDNFKRVSTAKKCATLAGISPFPNATGKSDKGNHVSHMGDKQLKSLLFMCARSAVVHFEKMRVYKMKKHEIEHKHIYVVLNNVANRLLKILYALVKKGELYDPTYLPRDPRLKIEY

SEQ ID NO: 442907 - protein, 473 aa, unidentified
MARKKGKDPAGIGGPGLTGEPAGVSDEPAEVIARAAAIDVAKGSGMVCTRVPHESGPRRRVQRVWQVSARYSEIAALMAELAKLGIQRLVLESTSDYWRIWYYLAEAAGLEVWLVNARDAKHLPGRPKTDKLDCVWLCKLNERGMLRRSFVPPEAVRDLRALTRLRSRLAQDQARHQSRIEKILEDALLKISSVISDLMGASGRRFLAALVAGERAPDKLAALGDRRLKASPAQLEEALAGRFRDIHALEIGMLLELIDDITAKMARLDAEITARLARIPGLAPACAGCGEIGGGHAPSCPRPGAPVLSVIERLDELTGIGIDAAQVIVAELGTDKTTFPTPGHAAAWAKLASRTIQSGSTSKDGRTGKGNPYLRAVLGRAAMTAAKTDTYLGERYRRIARRRGKQKAIVAVSRTICEIAWMIITDPSVRFSELGPGYYARLDAGRQTRNKIRELERLNPGMKVTLTPAATAA

SEQ ID NO: 442908 - protein, 349 aa, unidentified
MDRTTYGLDLAKNVMQLHWVDAQTGEIGRKKLARAKLAEHFGRLRPVHIVMEACGSAHHWARVLGGLGHQVELLPARQVKPFVRSNKDDAADARAIWLAAQQSDIRRVPIKTCEQQAVLALHRTRQHWVSVRTATVNALRGHLYEFGVVLRGGRKAGLKALGEQRADIDAQLPAVMRGLVDGQLQTLAQVQQRIDALEHEIAALQKQLDNAPALREVPGIGLLGSTALAATLGDGQAWRSGREFSASLGLVPAHSGTGGKTRMGKLSKRGDPYLRTLLIHGARSVIEHAKHKPEWLEQMLQRRPPNMVAVALANKMARTAWALVAHGREYQREWKSTPPKGCAAQAAAA

SEQ ID NO: 442909 - protein, 340 aa, unidentified
MRTRKVARSFDSGKPATLYDHYVALDWSLKSMALGHMSRRDDHPRIFERPTDLKELKEYLGSLKGRVIITLEESGSAHWLYLELMDCAEKVLICDPFHNRLLSDGPKTDKIDAGKLCQLLRAGLLKEVYHSDNALYELRTLVSAYQDVVTAGVRAQNQQKALALGHRNEVKSASFIEEILQANIDLYRRNKRQYELRLADVARRNKQVRFQREIDGIGTIGAVRIVASVVDARRFPNGGKYLCYCGLVKHEKLSGGHSYGRRKPRYSRVLKSVYKTAALAAIRGENPIREYYDHLLAQGVAEHNARHAVARYIARISYGMLKSGTRYEPYRWKGEVQKVI

SEQ ID NO: 442910 - protein, 393 aa, unidentified
MSTVVIGMDPHKRSATIEVMAGDEAVLGSGRYGTDAAGYAAMLAAVAGWPERTWAVEGCQGIGRHLARRLIADGERVVDVPPKLSARMRVFATGQGRKTDATDAHAVALAATRMGGLRPVADDEQLAVLRILADRRRALGEDHTRMICQLHQLLLELIPGGAKKALTAAQAKALLATVRPQDAAGKARRRVAAELISDLERLYQRKKAADKELRDLLNATGTTLTSLNGIGPSAAARLLVEAGDITRFPSKAHFASWNGTAPIDASSGDQVRHRLSRGGNRQVNRALHIMAVVQLRHRGSEGRAYYDRKVAAGKTPMEAMRCLKRRLSDIVYHQMILDHRAAQAGPGGHVGASLISSAAGSYPGAGSSDKSLPGPATSNATPSHRAPETVSLT

SEQ ID NO: 442911 - protein, 393 aa, unidentified
MPRKRILVKSIDTSISYQVIGIDLAKHLVSACLITGAGEIFGIDRLTYDDLLKSAERMSPTLFCMEPCPEVHYLAEKLQGYGHHTKVIDGAAVKEYIKTHFGGQKTDLNDAQAIAFLSLDTNLPEITPKNTSNSVLSSIQAVREQFRKEYIQSFVSLKGICQRWGLPISKGVMNKNKVEELVSESKKIPQEVKDWLLELLQSCRELQKRLNKISKYLKEYADNDEICPKIMSVPGIGPITATRLKATIGDIQRFEKPKSIVAYYGLVPKSKATGHNEKKGGITRRGDRVARSLLIEGAGVVLNLAAKGFLRSKPLNKWIEKKRKLKMPWGKLCCALAAKMLRIVRAILIQGTSFNAKIAGVARCSLPKESRNNVMGNNKLSEIPSPNGSVYIH

SEQ ID NO: 442912 - protein, 328 aa, unidentified
MNLSVVNSALGIDIAKLKFDVCLIKPSGRSKHKVFANTRHGFEQLLCWLASHQASDLHACLEATGTYGEPLALFLFEAGFVVSLVNPAAVRAFANAGLSRTKTDKVDAELIARFCLAQRPKAWQPPAPELRELQALVRRLESLVEMRVAEENRLSTGVSAEAVRHSLEEHITYLLEEIKQTETLIRQHINNHPDLKEQSDLLDSIPGIGETTAALLLAEIVNIKQYTSARQVAAYAGLVPRERRSGSSVRGRACLSKIGNARLRKALYFPAITALRCSDFFKAWANPLRERGKSKMTVIGAAMRKLIHLAYGVLKTGKPFDPNWVKTA

SEQ ID NO: 442913 - protein, 416 aa, unidentified
MSDENKVASIDVHKKVLMVVVGSREGDALGPKGELERRRFGTTTIDLHGLSLWLQERGVKEAVMESTAEYWKPVWAELEPYMRLHLAQAFSNRAPKGRKHDFRDAERLLRRHVAGELILSFVPEPEQRAWRTLTRMKTRLARQRVRLHSQVECLLEEMRIKLSCVLSDLFGASGLRILRALAEGETDPKKLAALGDDRLKCTKEQLLDALTGNVQAMHLELLTLYLQQLRLVDEQMEKLHRLIAQALKPHQEAVARLAEVPGFGPDSAQQVIAEVGVQASTFPSAGHLASWVGTCPGQEESAEENYSSRSAKGNKYMRRVLTEAAQAAVKAKGSHFQVVFRRLLPRLGYKQALWAIAHRLCRMVWKILHEAVHYVEQGAYRDPRARKQRARALAQALRRLGYDVQITPKEPATVQA

SEQ ID NO: 442914 - protein, 441 aa, unidentified
MTEFFLGIDVSKGYADFVLIDSQKNIIEKNFQLDDTFQGHNLLFSFLQSFFLNNPQSNIIAAVESTGGYENNWVSFIAKLKADFPICVTRLNPFGVSHSSKAELKRVITDKISALTIAEYVINHRAKISFVGEDYFAPLRKQWIYIKLLVKQKVQLYNQLEALLYTANPELITYCKHGMPNWVLMLLKQYPSSKSLAKASPSVLSRIPYVTVQKAETIISNAKISVASQTDPVTGALLKSVVEQIIFLDKTIKAQEKKLTDSCAFPEVKLLSSFIGIGAYSAVGLLLEIRTIERFSSSKKLAAFFGLHPVYKASGDGMGSMRMSKKGRREPRLILFNIARTAINCNPLIKEVYKNNLKKGKSGLSAIGVVMHKILRIVYGMLKTNTPFNPDIDRRNAEHAAIKKPKVVVLKSRRFQEFDSLAPVSKKQNKKREEQKASQKE

SEQ ID NO: 442915 - protein, 344 aa, unidentified
MSKFNLFCSIDISKADFDAVYGSASSCRHVKLSNDVKGINQLLKLLLPLEPDRSKILICCENTGSYMDKLACIFKGEGIFLWAVHPLLLSYYSIELNRFKTDKADAHKIFTYSVTNQAKAINFNLPSQPARELRELFTCRKAIIETQAAYTCRIKDNQQKASCHTLVMEIEKQLIAILGGYIKMIEKAIKTIINADRKIKRMYQILQSIPCIGPVTAWHLLFVTDCFDKFDNWRALACFIGSAPFPKRSGTSVKHRDKTSKKSYKPLKADLNQGIVSVCTRPGQLFYDYYQAMIKNNKPHLYIMNMIKNVLLKIVFKLIQSDTLFNQEIFIKNKISWQKYLVMS

SEQ ID NO: 442916 - protein, 338 aa, unidentified
MHTTTLGIDLAKSVFQLHGVDARGRAVLSRRVKRQQLLDTVANLPACVIGMEACGSAHYWGRAFEQLGHRVKLMSPRYVRPYVKTNKNDRRDAEAICEAVGRPTMRFVSIKTVEQTDLQAVHRTRSLFVKHRTAVINQIRGLLAEYGLVMAPSPEKVRPALVRFLDDAESGLTAFARDTFSELYEQLTELDSRIERVTHRIERVYRTHPVCRKLAAVPGIGPLTATALLATVGRPQAFQNGRHLAAWLGLVPRQYSSGGKERLGGISKRGSRYVRTLLIHGARAVVQRAARRTDTQGQWLCTLMRRKGTNVAAVALANKNARVIWAMLAHEEAYRQPA

SEQ ID NO: 442917 - protein, 404 aa, unidentified
MSKDVFVGLDWAVHAHELCVIDAGGKPLDRKGFAHSREGLAELLRWLARFGKRLRIAIERPSGLIVDALIEAGHLVFPIHPNAVKASRPRYRSHGGKSDVSDARLLADLLRTDGHRWQALSPQSDSIRALRALVRSRDDLVHARVVLGNQLTSALEAFWPGAATVFADVTSPIALAFLARYPSPASAARLDEARLQRFCSSQHYSGRRSAAELLIRLRAAADGLAGPMTVDALAQVVSSMVAVLQPLVEQIGTLTRRIERFVESLPDGQIIMSFPRAGRVCAAQILAELGDVRERFPSVDRLAAEAGAVPVTYESGKSRSVTFRWACNHRLRQAVMCFADNSRHASAWAHNIYTAARARGCDHPHAIRILARAWLRVIWRAWVDRKPYSPELHLGAVKLENHGG

SEQ ID NO: 442918 - protein, 412 aa, unidentified
MNVRVEKACGIDVHKSFLVATILTCTGAKETKEFNTGLEDLINLREWIMERHCQRVAVESTGIYWTPLYTCLEGKVETIVANPRFIKNIPGRKTDYLDSEWIAELCLNGQIKPSFIPSKEIRELRDLTRTRTKMIQTRTAFKNRVHKVLQRANIRISVVLSDIFGIAGLQILNGILNGKSIDDVLKDVKRINKKKAAIKEAVCGELSQADVFVIRECLETIAFLQGKIDQLDSMINQRFEKVQKKNQMEILMSIPGISFTSASAILAEIGDINVFPFPKSLVGWSGLAPSLDESAGKSSNGHITKKGSKYLRRMLVQCANAIADGKPNKLRFFFQRILMKKGRKIAIVALARKLLSITHHLLKNNEKYNEEDLKPKQVRVPKFKVISELSIDEMIKIISNSGYTVDKRSSNC

SEQ ID NO: 442919 - protein, 457 aa, unidentified
MNKKGYLGIDVSKGYADFLLLNNESQVMEEGFQLQDNKEGRQMLKGLIVKWQKQGIEELYCGVESTGGYENNWYGYLKSVPKEDKVFVCRINPKGVKAVSDASLKRTITDAVSAENIASYLFKFPEKVEYGNNVVSGNEAFKEGRQHSTYIKMLIKQKVQLNNQFEKLLYQHFSEMMVYCRHGVPVWLLTMLTKYPTAKMVLKAGVAKLSAIRNISVEKAMAIINKAKTSEQNISTQISHVITATAKEILHKAALIHEEKEYLTNIYKDTPEVILISSIPVVGIDSAVAIALEIENVDRFETAKKMASFFGIHPTYKQSGDGMWGNHMSKKGRSDIRGVLYMAALASIRYNPLLKQVYARFRAKGMKHYQAMGVVMHKLLRIIYGILINKNIFSAETDEKNKERSAEKQKENDQKLKEDHKINKQKKHRFQKTTTEAPISRIAEQKLKKQVASQTSV

SEQ ID NO: 442920 - protein, 379 aa, unidentified
MDAISAAAALQPRRPEDGLIVGVDLAKNVFQLVVADAQWRTCASHRLTRVQFERWFANRSVALVVMEACGGAHHWARWLTGLGIAVRLLPPRYVRAYVRRNKTDAADAAALLEAARCAELHPVRVKSVEQQALQALHRTRSLWQADRTRRINTLRGYCREFGIAIAQGARLGLEQIARVLAEPHAALPELLRPTMRLLVEEVRLLEARIAGLERELAALARCSPACATLLTIPGIGLLTATAMVAATSGDVTHFGDARHFASWFGLTPKESSSGERRRLGRLSKQGDRYLRMLLTHGARSVLRAASAAAQRGKPPQGLRAWALDVQRRSNHNKACCALANKLARIAYACLRDKVPFGLSPRMNEKLQRQAFSLPAGTHA

SEQ ID NO: 442921 - protein, 353 aa, unidentified
MSTMPETQLLVTLGVDTHADVHVAAALDHLGRELGTLSIATTVSGFRELIAWASEFGVIDRIGVEGTGSWGAGLARWLRDEGMVVVEVDRPNRRTRRRHGKSDTVDAIAAARAVQSGEATGTPKAANGDVEAIRVLRVAYRSAVKARTQAANQLHALLVTAPLELREQLRGLPMRGLVERCARLRPGDVPDSPTAITKYTLRRLARRFQQLDEEAGELKAQMHRLIQRLAPTLLAEQGVSTITASALLVAAGDNPERLRSESSFAHLCGVAPLDASSGKQQRHRLNRGGDRQANSALHTVAIVRMSHDATTKSYVARRISEGKTKRETIRCLKRYLVRDIYRILVPIITPEGT

SEQ ID NO: 442922 - protein, 475 aa, unidentified
MEHNQFSKKQEEVIKLLNKQKIRDVKDLGAYKLSECHPSSAGIDLGSKELYVALNPIIAAEFGMDIVHCFSTFTKDLHACRDLLVHVGVKTVAMESTSVYWTAISFILEEAGIEVCLVNPKKFRMVPGRKTDIADCQWLQTLHLYGLLRGSFHPPQQISMLRSYMRERDSIIKERCTFVQRMQKALTKMNLLLHNVIDDITGKTGIEIITAIINGERDPKRLAAFRDPNCKKSEAEIAEALTGYYKEDQLYLLKINYQSFCFFDKQITDLDKQITNLLKKFPRKKEKKEKRPDNGKSKPKGKNDIRSTTNLEDALFHILGTDLTALPGIRANAILQIISEVGTDMSKFPTAHHFASYLGFVPHNKITGGHVISSRTDRIKSSAAQAFRKLIPSISRTKTALGAFYRRLAQRIGKAQAIIAACRKLAILFYNTLTHGSAYLEQGEAMYKQKQEEWERKKLMSLAKKLNYSIKQNVA

SEQ ID NO: 442923 - protein, 346 aa, unidentified
MRVITIGIDPHKSSHTAVAVDTTGHKISQLRFVVNAGTFRQLMRWCEQWPERRFAVEGARGLGRTLAQQLAAAGEDVVDVPSTLSARARLLATGGDRKTDPADVLHVAQVALFRQDLRPVEPEDQTTILRLLTERHDDLVHERTRVLNRLHAVLRDLVPGGAPTGLSADKAAAIMKSLRPETATDACRRDIARDLLADLRRLDRQVKDNEAEMRDALAATRTTLTVLPGLGTVLAAKVIGHVGDVSRFPTEHHFASYTGSAPLDASSGNNVRHRLNTGGNRALNSVLHVIAICQIRDGGRGQDYYLRKIAEGKTPAEARRALKRRLPNVVYRIMKRDQRTRLAQAA

SEQ ID NO: 442924 - protein, 340 aa, unidentified
MPNPAVIGLDIAKNVFQVHGADAEGRCVLRRRLRRAEVITFFARLPKALVGIEACPSGHHWARELRSLGHDVRLIPPQYVRPFVKTNKNDAADAEGICEAVVRPNMRFVPIKSVAQQAAMMLHRTRALLLRQRTQLINAVRGHLAEFGLVARRGARNIRELAELVRDTGSDKLPDAARAMLVLLLEQIREVQLRVQKTEHALEAWAKQSDACRRLMTIPGVGIMSATAIVLAMDDPKRFRSGRHFAAWLGLVPRQSSSGERQVLGGISKRGDGYVRTLLIHGARSLTRWRRESWRWLAGLLMRRPTNIAAVAIANKTARTAWAILAYGHQFQPTRRAEAA

SEQ ID NO: 442925 - protein, 355 aa, unidentified
MASITLLGIDLAKDVFQLHGLDELGRPQLKRTLRRRALVQFVAKLPACTIAMEACSSSHHFSRKFQQNGHEVKIISPQFVKPFVQGNKNDAADAEAICEAASRRNMRFVATKSVVQQDIQCLHRVRKRLVHNRTALTNEIRSIVGEFGIVFAKKRSALVEGIKGLLNGSCPREELSSEGLTLLQDLYSELLELDQRTENCELKLKKISSQPQCQRLFKVGGLGLLSVTALAVALADPGQFKNGRNFAAWLGLVPRHQGTGGKNRILGISKRGDMDLRTLLIHGARAKLRGINAKCRAERKLDPLEDWAYRLCQRQGYNKATVALANKNARIAWSISAHKTEFESHQAVASLKKGA

SEQ ID NO: 442926 - protein, 333 aa, unidentified
MNKFKHFLGIDVSKEFFDAVLILEGKKEHPVHNQFINNYKGIRALVKWLRDMGATGENTLVCLEHTGMYGKLIIKYLIGFNFSLWVEMSLRIIKSIGIQRGKNDKIDAERIAFYALKNVESAVIYRAPRQVVDKIRTLLSLRDKLTTNKLRLLQYDNEMVDFDKESTKISTKFNKNTLAGIKKDLLSIEKQLDKFIKEDENLNKIFNQATSVTGVGKITALYLICFTNEFTMYSNPRQLACYAGVVPFEHTSGKSIKGRAKVHYMANKTLKKHLHLCAMAATNYDPEIKQYYQRKVEEGKSKMLVMNNVRNKLIHRICSCIKNEKLFEVKKIE

SEQ ID NO: 442927 - protein, 319 aa, unidentified
MEPEQTCYAGIDVSKGRLDAVLRPSGEYLGADNDERGIGSLVARLSEARPALIVLEATGGLEQPVVVALALVGLPVAVVNPRQVRDFAKAVGRLAKTDKIDAAVLAHFAEAVRPEPRPLADERARELSALVLRRRQILDMITAEGNRARTAPKAVRRRIEAHLRWLRKELERANGDLERAVRESPVWREKDDLLRSVPGVGPTLSATLLAELPELERLDRRKLAALVGVAPLNRDSGTLRGIRTVWGGRSSVRKTLYMATLSATRYNPAIREFYGRLVAAGKPKKVALTACMRKLLAIVGAVLRNRSPWDEGQFVLRAM

SEQ ID NO: 442928 - protein, 322 aa, unidentified
MSTSVLGIDIAKQRFEAALLVTGKIKNKSFRNTSEGFEALALWLDKQGSQKVHACLEATGNYGEDLAIYLHEAGHTVSIVNPARIKGFAQSELIRTKTDKIDAGIIARFCLAMQPDPWIPPSAEIRVLRALVRRADSLIDMRSQEKNRLSTAHESVIPLIKEHIDYLGREIEKVRSQIAGLIDRDPTLRQKKELLVSIPGIGKVTIATILAELDDLEKFHHVRELVAFIGLAPKETLSGSSIKGKPRLCKIGHVRLRKALYMPALVSIQCNPVMIAFYNRLKEKGKNGKVIVCAIMRKLVHIIFGILKSGKKYDPNYKPAFA

SEQ ID NO: 442929 - protein, 317 aa, unidentified
MNHYSAVCAGIDTGKHKLDVAIDGSDERLQVDNSPEGGRLLLAWLQKRGVERVGIEASGGYEQAAVSILRADGFVVVVFQPAQVRSYAGFVLQHAKNDKIDAALIARCTAAATDIREPPDARLAPLAQHLTMIEQLTEDVAQIKTRREASRDQRIHDFWTDEISRLKRLIKQELQLLVAAIRTHRDLSDRLDLIASVDGVGLRTAVAILVRMPEIGRVSREKAAAIAGLAPYDDDSGLRRGERHIKGGRQRLRKSLYAAALPAVFYWNPRLKAFYRRLIDGRKPHKLALVACARKLLIFVNTVVARGAPWASVKATN

SEQ ID NO: 442930 - protein, 340 aa, unidentified
MPLYGGIDLHANNSVVVLLNEQDEVIYRKRLPNELATILEQLAPYRPEVKGLVVESTYNWYWLVDGLREADYRVHLANPAAIQQYSGLKYTDDHSDARWLAHLLRLAVLPEGYIYPKAERAVRDLLRKRAHLVRQHTSNVLSVQNILARNTGSRFSIKRIQELTKQELKSLLAEETQVLAVTCSLTVLDCLRQQINMLEKTVHKRLYHTPSYEQLLTVRGIGTILAQTIALETGAISRFPTVGNYASYCRCVDSTKISNGKRKGTGNVKNGHPYLAWAYMEAAQFALRFQPEAQRFYQRKLAKSRNNTILARKAVAHKLSRACYYIMRDLVPFETTKAFG

SEQ ID NO: 442931 - protein, 461 aa, unidentified
MAKQSGKRKKGGAKVDATEGLPPLNLHAAGIDVGSAEHYVAVPLDRDVEPVRRFGSFTADLHRMAHWLKDCRITTVVMQSTGVYWMALHDVLESHGFEVNVANARHTKTLPGRKTDVQECQWLQKLHTFGLLNNSFRPPEEIRVLRGYLRQRENLVAAAATCIQHMQKALTEMNIQLANVISDISGTTGLAILYDIVRGERDPYKLAMHKHSRIRASRQEIARSLQGTWRQELLFVLEQSLDLYQTYQQKIQTCDERIDGQLRSMEPRIDPVSEPIPEPRRGKDARGHQSGFDLRGQLYRITGVDLTRIDGIEVQNAQTIISEVGVDMSRWKTEKHFASWLGLCPDNRISGGKVLKRGTRHVVNRASTALRLAASALLRSQSALGAKFRRLRSKLGAPKAITAMAHMLARLVYRMLKFGHDYVDRGIEFYEAKYQHQQLQRITKQAALLHMQLIPLTRVVS

SEQ ID NO: 442932 - protein, 345 aa, unidentified
MEYGAIDLHKKQSQVMITDETGCRVVDDRIVTSREAFSRVWAGRARMRILLESSTESEWVAQHLETLGHEVVVANPNYLPMYGDRARRVKTDRRDAVALVASCRTGTYRATHRVGAATRTLRQQLRIRRLLVAQRSAQISLLRSRLRQEGLRLAGGTAATVLPRLGRVALSPTLAATVRPLCLALRRVNALIAAADAAVHAVAVDDPVTQRLMSAPGVGPVVALTFRATLDDPARFGGDARRVSAFLGLVPSESSSAERRLKGHITHAGPNELRALLVQASWVIWRGKSAAGAPLRQWAHGVAARRGRRIAVVALARRLGRILYALWRDAAEFTAGRTHRGEVAA

SEQ ID NO: 442933 - protein, 424 aa, unidentified
MQIVYRRCGGMDVHKKSVVACLLLIDESTGEERKERRTFGTTTRALLELAAWLKLWGVEVVAMESTGVYWKPVWNVLEEELGADCKLMLVNARHFKQVPGRKTDQKDAEWLAELQQHGLVRASFVPPPETRQLRDLTRSRASLMEDHTAVANRLQKLLEEANIKLSSVASNVLGVSGRRMLKELAKGNRNAAELAELAVQRLRAKIPQLREALEGRMSAQQQQMLSDYLKQLEFLEQQVEQLDRRTEAHLKATEQLAPVELLDTIPGVNFVVAGVMVAELGTDMQQYPTSDHVSSWAGMCPGNHISAGKRYSGRTNKGNAWLRRALCQAAWAASKSKNTYLAEQYRRWRVRRGKKRAIVALGHQMLVIAYTMLKTGTPYRELKPEEWKSQASRPRNPEAVVRRNVEQLKALGYQVTLTSATPAS

SEQ ID NO: 442934 - protein, 348 aa, unidentified
MNQQNVNAFVAIDYHKSFSYGTIVDPHGQLLRRGRLDNNPEALRQFLGEHAGAGCHAVLEATRNWTLMHDWLEAQVGQVTLAHPQKVRAIAEARVKTDRIDAATLAHLLRCDLIPPAHVSSKDARMLKNLLRHRMFLVTVRTMTKNRIGVLLDRHPQLMVDRPAGESYGKIHRAWLKRLPLPPRDERRVLHGELALLVQLNKRIDQANAWIKAAAKSDDRVRRLSTMPGIGTFLAMLVVAEIDDVHRFATPQKLHAYAGLVPATYSSGGKSWHGAITRAGNRYLRWAMVEAVWPARRSDASIGQYFQKHEAKIGTNKAKVATARRLLTIAYRLLKEKRDYRRTTEPDE

SEQ ID NO: 442935 - protein, 339 aa, unidentified
MAASVFSYDLNGYLGFGPVGQDKVRKRQMIDTIGIDISKDKLDAYWLSNREHRQFRNDHKGVKALSLWARTIGITRVIFESTGVYHRLLETGLAEHGISFARVNPRQARRFCEGAGQLAKTDRVDAAMLAKMGSLLELEADQPKRETLHDLKQLATARLALIKDRTAAKARLAATTHKLLTQQIKRRLKQIERDLCQVADQIDAIVAADEDLAARAEILKSIPGIAKVTACAILTDMPELGNLTGKQAASLAGLAPISRQSGKWQGKERIQGGRASVRRAVYLPAVVATRFNPDMKAKYEQLVSTGKCKKLAITAIMRKLIVMANALLRDQRKWTQNPA

SEQ ID NO: 442936 - protein, 402 aa, unidentified
MNAVGIDVSKGKSMVAIMRPFGEIVSAPFEIKHTASDINSLVELINSVEGESRIVMEHTGRYYEVLAHQLSEANLFVSAINPKLIKDFDNDSLRKVKSDKADAAKIARYALDKWQNLKQYSVMDELRNQLKTMNRQFGFYMKHKTAMKNNLIGILDQTYPGVNTYFDSPARSDGSQKWVDFASTYWHVDCVRKMSINAFIDHYENWCKRKKYNFSKSKAEEIYGKAKELVPVLPKDDITKLIIKQAVDQLNSASITVESLRTLMNETASKLPEYPVVMAMKGVGTSLGPQLMAEIGDVSRFTHKGAITAFAGVDPGVNESGSYEQKSVPTSKRGSSDLRKTLFQVMDVLIKTHPQDDPVYQFLDKKRAQKKPYYVYMTAGANKFLRIYYGRVKEYLASLPES

SEQ ID NO: 442937 - protein, 359 aa, unidentified
MTNKVKRNKINFKGKMVSIGVDMHKRSWHITALADGEIVLTVSLSRPNYDAFEKLLSQFKGNYVRIVYEAGPGGFDLYDRLTADGIECIVTPPSLIPTQSGSRVKTDKKDSLKLATLLESNILKKVWVLSPEERAHRQLVRTRRQIVNHRSDVMRQIKSLLLFHSIEVPFSSRQQWTSPFIRWLHDVDLGNEYLNGSLKALVDLFDYLSAEKKRLTHEVVELSREEKYVQRVKLLKTIPGIGCLSAMEILVELQDITRFQTADELAAYLGLTPSQYSSGEHIRMGHITHAGNDRVRTTLVESSWLLTGKDPHMKCKYEDIKQRRGGKKAIVAVARNLSIRIRRMLLDRVPYEIDFQKAA

SEQ ID NO: 442938 - protein, 349 aa, unidentified
MVADELDYVIGVDTHLDEHVLAIIAAPSGAVVARRSIQASARGYAAALRFAAAEANGARVWAIEGTGSYGAGLARFLAGRKETVLEISRTPRAERRLRGKDDSLDATRTARAALASETLALPRSGERREALRLLLVARRGAVDVRREALGQLRGVIVTAPDKLRDELRGLPGQRLLKRCSRLRRSGSASADELATRLVLRSLARRIEAATLEAAELERELLGHVSALAPPLLDEPGVGPIVAAQLIVAWSHPGRLRSEAAFARLAGVAPVPASSGKTTRHRLSRGGDRQLNRALHTVILHRRQHDPATRDYIARRIAEGKSRREATRLLKRYLARHLYRLLQDQEPLMA

SEQ ID NO: 442939 - protein, 615 aa, unidentified
MNVNVQVNEVPVPVRRLAGIDLGVASEHTVRVLDGTGQKIAAARCVPSRESLLAVEARALAGTPAGTRLEVVLEPTGPAWFPVARFFATRGHKVFRVSSAKAADLRKFYRRHTKSNGIDADTLARLPLADPDGLTELTLAEGDAATLDRRVRACDRLTQQAARHKTRIKALMRQLLPMTPLTGDLGKADLAILERYADPRALLDLGPAGLAALISQASHGKQGQARAQAWISAAQQAIDLYGPADPAMPYAEVATEVRLLNAIETELKAHAAAREDAYRQADPGQLARTLPGLAEIGGPAMTAVMGKPGRFASGHHFKSFLGLAPRASETGETDRKGEPMSKAGPSLGRATMIRAADTARKLDPQLARIYYIQMTERGASHLKALCVVAGHLALRLHATMLRGTPYQLRDTDGSAVTADQARQIIAANWTVPDDVRKRRRSRKNKGKTPQQASKPVQRGGPPRPGSRPGHPPVKPAPDHPAPGPRGAAPRGHSSLPAKRRPPCPPKRSPLPKTRPRTCGNSSATPRSSKTGCCTRPVTSSTNWPASPTTTTSTPAVPPGGSSKTSDTSAADSASPYPAISTSNISQRLPPASRPSQRPKQNRRPLLAMALTQQPP

SEQ ID NO: 442940 - protein, 330 aa, unidentified
MKVTDIMGMDVSKKTLDCHLFVEQKSLAPVGNDLKGFRAIKKWLTKELKGKTEGLLVVMEYTGIYTYGIERFFEQEQIKYVKRPALDIKRSLGMVRGKSDKTDARFISKYGWMRKDELMPMTPLSDAQLELQQLMNHRDKLVADKSSYQCKLKELCSQMGSKVNEVMAASMEYVMDVLTQEIKEAEKEIKMLLQSGESLQTNYDLMCSITGIGFATAVHFLIATENFTRFKEVRKLICYCGVAPFEHSSGTSIRGKVRVSQLANKKLKSLLTTAAFSAIQHDPELKAKYEQKVKEGKAKMCVLNIIRAKLLERIFAVIKRQSPYELRLAA

SEQ ID NO: 442941 - protein, 331 aa, unidentified
MFQVHGLNEHGKAVLKKQLKRAQVAEFFANMPACLIGMEACGSAHYWARKLQEFGHTVRLMAPQFVKPYVKTNKNDAADAEAICEAVSRPNMRFVGIKNVEQQAVLAQRRARQGFIKARTAQANQIRGLLAEYGLVIPQGIAQIAKRVPELIEDASNQLPGSFRLLIDRLLEHLKELDRQVDEIEAQIVAWHRSNEASHKLEKVPGIGPITASAIVASVGDVNIFDSGRQMAAWMGLVPRQNSSGGKNVLLGISKRGDTYLRTLLIHGARSVIYRAQQRVEESGWLQALLGRRNANVAAVALANKNARIVWALLAKDREFRPNYTVACATA

SEQ ID NO: 442942 - protein, 400 aa, unidentified
MRSIGMDVHRAFAQIAVVEDGLCRDEGRIGVRPEDLRAWAATLEPDDEVALEATTNSDAIATMLRPVVARVVVSNPRKTRAIAEAKVKTDKVDARILAQLLAADFLPETWVPDDRTRMLRRLVMRRTHLVRQRTRLKNQVHGILARNLVPTCPHADLFSGVGRRWLAAQDLPADEWRSAEALVRQLDFHGDELAGVERDIACQAIDDPIATRLMTVPGIDVTVAIAVVAAVGDFSRFDSPERLVSYLGLNPRVRQSGNSPAVHGRITKAGPAQARGMLVEAAFAASRTPGPLRAFYRRVKDRRGLQVATVAVARKMTVLCWHLITKSEDYAFARPSLTAHKRRKLELAAGAHPHPGPVAGASRDYHIKRLRDQEKAIVEHAERAYQVTVAHWQPRRPATR

SEQ ID NO: 442943 - protein, 335 aa, unidentified
MKEITTIGVDLAKSVFTVHGMDAAGHTVLRKTVRREKLMELVAELPPCLIGMEACGGAHEWARRFQAHGHRVGIMMARFVAPYRKSSKNDGNDAEAICEAVARPNMRFVPVKSAEQQAILSLHRVRQGFIEQRTATINRIRGLLAEFGVVLPQRAEQVRRAAVVVAEELPVLAREAIIDLRAHLSYLDERISRYERQLVELARQREAAVRIQRLPGVGPLTASAITASISDGHEFANGRQFAAWLGLVPRQYSTGGKPRLGRITKRGDAYLRTLLMLGARAVLQSAAQKSDRLSRWVMALRARRGYHRAIIAVAAKNARIIWALLANNREFVPPA

SEQ ID NO: 442944 - protein, 349 aa, unidentified
MNKNLFVGIDFSKETFDAAILKVSEESSIDLKIIGNEQFKNDVPGCKRFVKWLNKTCALAGDYSSVLVGGEDTGNYSTTLPKQLYVLGIDCSLQNAYSIKCGSGKIVRDKTDKMDAEKIAYYFYRFRDQIRLYKPLSKDMESLERLYSYRYGQVRERARLKCQIKEYKHILKSEPNDETLKFMIQRLEKQERFLKREIKAIEAKMVEIIKANEELNEIHKCLLSVPGIGKITSLLLIVVTRGFTRFDNPKQLACFLGVSPHPNQSGTSVQNGNHRSWFADPYFASLLHMAALSASRFNSKFIDYKKKLKSKGKPHLLIMNNIKNKLLTVAFTIATRRTKFYSDYDAKRA

SEQ ID NO: 442945 - protein, 446 aa, unidentified
MANRGKTACGETILPEAGMDETLKKRIIGVDSGEEEHSMVVLEGDGTAGAWQSVGNSCVEVRKALESLRREMSRGTVLQLVVDSRRSLNAVVVRVAIELGLEVWQVNPVAVERFREVEGQPRKDDDQDAFLNARMRYMGAQGCRLLADPRPQEIQLCRLTRLHTRLTEQRTTALNRIRSCLVELSPEVLRRDWEGPMWKSPGMRAVLQRWPAFDGLDRARPSSIEQVLRKAGSRRPVDVQARVLKEVAKRIHLTEGEREIMSLELKVLVDEVQWLNESLTDIDHRIRKQVLEHPIARKLLDMPGVGPFVAAVLIGELLPLARNLTEAEAATYAGLTPLSRKSGKGGKRPRLARKVNKRLTHALYLSAVSARKGSVLDATYYTKQVQNHAGHPVPHIVANIALARQRFKVMYKLLTSDAVYDEEILIASYLDRRGRASAAHHQSHAA

SEQ ID NO: 442946 - protein, 320 aa, unidentified
MNQPSSTTSKNTNEIQYIGIDVCKARLDIHGIEGLDHVANSPEGHKKILQKLKPKLHQIALEATGGYEDRFIFQLHSKAIKVSRIEASRVRDYAKSIGRLAKNDIIDARSITEYAQHVKPAALVPPSAEQSQLKALCSVRQQLVDHCSNLTKQLQQTYHAVAVKHLEKTIKDLAKQIGKIEKEIKDLLEKDEFKTKAQRLMQIRGVGLVGASGALGYMPEMGTISATKATALVGVAPMQNQSGTKEKQRRIKGGRAKLRRIIYMNAICCIRHNSQFKALYKRLRQAGKPVKVAVVAVMRKLVILMNRLLSDTNFNLAEEK

SEQ ID NO: 442947 - protein, 421 aa, unidentified
MRGLRAKRVRTVKEGTLIATVDIGVANNTGYCTTLDGRSTKSFRFDNTKGGFEKFWCMTIASKNRFGCDEVLVGYESTGPYAEPLVHYLANKQVNIVQVNPMHTKKMKEVNDNSPLKTDDKDPRVIADIIRLGRALTIVVPEGDAAYLRRLNNARERHVGEQTALLNQLQQLVFLIFPEFKTVLKNMKGKTAQHILKRYTTPERIGTLSKEALGEEMRKRSMGKFGIKDAESLIGLARETVGIKEGLAGIFMDIRHILMQLEAEVQFISEIEAEMGVTLERIPCSVKLLSIKGLGTVSVAGLIGEVGDFSKFSTQSEIMKLAGLNLYEISSGKRKGQRRISKRGRSLLRKILFYAAIQMIRKNGIMYDYYARLTGRGMERMRALIAVSRKLLRIIHAIVRDNRDYVGQYQAPERMVIKKAA

SEQ ID NO: 442948 - protein, 356 aa, unidentified
MTSNIKYVGMDVHKQSISIAIRNAAGKIVMECVIETKASTILQFFDGLRGDVQVTFEEGTSAAWLYDLLKPHVSKLVVCDPRKNKSMREGNQNDKIDARRLAELLRLDHLTPVYHGEHGLRTLKELVRSYLTVTKDLTRVMTRVKAIYRSWAIPCTGKQVYARCHRAEWLGKITEPGVRRRAEFYYQQLDGLRVLRQEVRRDLLAESKKYKAWKRLCEISAIGPIRAAVLLGILQTPHRFRTKRQLWNYGGLAIEMHSSADHRCVDGQLERSRKNVLVRGLNRNCNHDLKNLFKGAAVMASSKPGPFADFYAALVAKGMRPEMARLTLARKIATIVLIVWKKGASFDTQYLKPQTA

SEQ ID NO: 442949 - protein, 425 aa, unidentified
MGTFPKAQQKTVWVAIDVAKARHEALVELPNGSRRRTSISNTLPGFKRFADELRRSGKNCEIALEPTGDYHRPIANFLLRQGHKVHFVSSIATCRTREALYNSWDKNDPKDAQVILHLLKTGTTQIFSDPLERGYHDLRELLGAYRQIVSQKTKIYHSLMTHYLPLYFPEAECFIASSRSEWFLDVFRFAPCPTAVLKYTKATFIKKTVKNAGHPTVRRKLVGEYYETAKQSAGLPIEADSLTIQMFQAVLDEYIRLAQRRRLLEKQLHEHLEPHADYQRLRTIPGIGPIVALTVMAEAGDVRRFSHYRKFLNYCGLSLSTSQSGSYRGASQLSKRGNARLRSAFWMAGRAAIAQRRNGFRKKYDDYMRENPLDGDLKRKAYTAVAAKMARVAYGLIKTETDYRHFLQAAIPAGESLRSVPLRQA

SEQ ID NO: 442950 - protein, 316 aa, unidentified
MKTNQTESAPVYAGIDISKDGLDVAVAGQSPSHYANTAKGIAELIPALAQLPAPVQVICEPSGGYERDLLEALWAKKIAVSLVNAARVRAFARARGLLAKTDAIDAVVLREYGELLRPAALAAPAPQRQRLAELVRRREQLVNLLAMEEQQLAQSRAAEIKKLGTQLIKALQKQIEQIDTLIAAQIDEDATLKEQSARLQQVKGVGPVTAATLLAELPELGQLEDKQIGALAGVVPYNQDSGQHRGRRLIRGGRVQVRRVLSMSALVATRFNPILKAFYQHLLKAGKPKKLALTAVMRKLIILLNRLLKNPQFKLA

SEQ ID NO: 442951 - protein, 391 aa, unidentified
MSTYFVGIDISKYKHDCCIINAADQSIVAKFTIRNDKEGFNELLTSLQSLSTPDDIKIGFESTAHYALNLELFLEKAHHSFMEVNPVLISEYKKSTSLRRTKTDSVDCESIARWLMTVEYKPHSKGFYHAYSLKSLTRLRDRLIRQRSFYLVKITNVLDHTFPEFKPFFQERFSKTALYLLENYGSAEKMARMNSASYDNLRRISRGKFTPQKFLELKALAANTVGVNNSIFDTELTCLLTLYKEAAKQVSVLEAQITELIEEVHPHYMSIPGIGPISAAVIYAEYGDISNFSSPAQMLAFAGLEPGISESGTESHRGRMVKRGSSQLRYTLMNCALPLIRFDMTFAAYYAKKRSEGKPHRVAISHVTKKLVRVIFALERQNTDFVATALR

SEQ ID NO: 442952 - protein, 435 aa, unidentified
MEEVTDEPLYRDRVCGIDIGKAGMAATIRVPSDENPARRASETREFATTKRGVLALADWLRAWQVPAVVMEATSEYWKPVFYRLEAEGFECVLADAKQVKNLPGRPKRDPSDSRWLAACFERGAIRSCFVPDPEFRIIRLHTRYRRDLTDERTREKNRTEKLLESAAVKLSSVVTDLHGVTGRDIMDHLIAGERNPKVLAQLARARARRKITELEHALDGAEFFTPAHAALLRAMLERIDRVNEEIARLSEVIEQLLAPYEEQLQQAESMPGWGRRSAQDAVAETGVDMTKFPTGGHLSSWAGKTPLDHQSGKRAGRARHKKGNKYLAAVTGETAVAAGKTATREGARYRKLARSRGKGKAQVAVGNTQLRVYHKLLSNPGMRYQDLGPDYHERQAALRRKIAYHVREIEALGLEVTLARIPEPDPGGPASTQAA

SEQ ID NO: 442953 - protein, 306 aa, unidentified
MSYGVGIDVSKSWLDVHVHGLGHSARFGNTPVGYARLLAWLSPHALRLVVLEATGGYEQAALDALHAAGLPMVRLNPRQARDFAKATGQLAKTDTLDARVLAQMAAVLELMRYQPAEPWRRQLAQYRQRRAHLVMLLQQERQRLSQLSDAWLQQQARTAVRHWQKMLGEVDARIAGQIAAQSDLAVLRQVTGVGPVLLATLAAQLPELGRVDGKAIAKLVGVAPLARDSGSMRGARSIWGGRASVRQALYMGALVAVRFHPDLRTFYQRLRAQGKVAKVALVAAMRKLLVILNAKMRDQMAATAAT

SEQ ID NO: 442954 - protein, 343 aa, unidentified
MQTITTIGLDIAKSVFQVHGVDAAGQVVIRRQLKRRYVLAFFQKLPPCLIGIEACASSHYWSRELQALGHTVRLMPPAYVKPYVKRQKNDATDAEAICEAVARANMRFVPTKTPEQQSCLMLHRTRHLFIRQQTAVINSIRAHLAEFGIVAPVGRKGVTELLHIVADPSDKRVPEVARACLAALGNQLLSLKEQIVEFDRMIMVWHRSNETSKRLHYIPGVGPMLATALVASVADPRTFRSGRNFSAWIGLVPTQHSSGGKDRLGSISKQGDRYLRSLFVAGALAVIRYAKIHGTKHRPWLTALLTRRPTKVAAIALANKLARMAWAMMARGERYRQPVALAA

SEQ ID NO: 442955 - protein, 376 aa, unidentified
MERGSLMLNTTTFVGLDVHARSIKAVALDAMTGEVRSATFGYDAAEVAGWVSSVDPSAKCVYESGVTGFDLQKRLSSMGIDCVVGAVSKMIKPSADRRRKNDRNDAEFLARMLSVGNVVEVCVPDDECEAARDLTRALDDAREDLKRCKQRLSKFLLRHGLVFSETNAKGQRKKNWTAAHWAWIRSISFPDKADDEVLAYYIDAARQAMEDKARLERLVEAEASKPRWKKRVDSVRCLKGIDVTSAADLVFEAGEFSRFKNARSFAAWIGLTPSEHSSGESVRQGGITKAGNKHLRRVLVESAWHYLGCSPHSKDLAKGQAPDPGARRHAAKGVRRLVGRRAAMLERGVHKNKANVATARELACWCWAIGRMVENG

SEQ ID NO: 442956 - protein, 354 aa, unidentified
MSNQSNSTVATMGIDIGKNSFHVVGLDQRGAIVLRQKWSRGQVEARLANMPPCLIGMEACVGAHHLSRKLQSLGHDARLMPAKYVRPYAKGQKNDFRDGETIAEAVQRPTMKFVATKTAEQLDLQALHRVRERLVSQRTGIINQIRAFLLERGVAVRQGPRFLRTELPNILANRSDVLSPRMMRIIEELAGDWHRLDERIEGLSTDIKALADQDPACERLMSVPGIGPIISSAMVAAIGNGAAFSKGRDFGAWLGLVPRQMSTGDRTILGKISKRGNRYLRVLFVQAAWVVLVRPNIWERYGLKSWIEAAKKRMHHNVLAIALANKLARIAWAVLNKERNFECTKTSAIEPRPA

SEQ ID NO: 442957 - protein, 348 aa, unidentified
MQISVLGIDLGKNSCSVVGLDEAGRIVLRRRLSRARVIELSSQLPACVMAMEACCGAHHLGRILAAHGHRVRLMSPEYVQPYVKAQKNDERDAEAIAEAATRPTMRFVDLKSEEQLDMQSLHRARSRLVGERTALINQLRAVLLERGIIVAQGRRRLAQYLSQALDGDEAAPLQLSSRIRLLIEDMHAQWRELDRRVAEFDGEFVAVARSEAAARRLSTIPGIGAINATALVAAVGDARSFARARDLAAWLGLVPRQATTGGRPRLLGITKRGNKYLRTLLIHGARAALPSLLTVESPLGNWLRGLSARAHRNTVIVALASKLARIAWAVLRSSTSYNAAIGRSLIAA

SEQ ID NO: 442958 - protein, 356 aa, unidentified
MDKVIREGAARVGVDLAKRVIQVHAVDATGRVLTSRALARARFIEWCARLPSGCIVAMEASSSAHYWARKLIALGLDSRIISAQLVEPYRMEGTSGKNDANDAAAICEAASRPKMRFIPVKSIEQQSMLCVHRLREGVKEDRTACINRIRGLLAEFGLVFPQSPRELQLVLSDVLEDAGNELGTLARLTLQRAQGQWRELDDHLAWCDERIEAHRRSSPEVQHAATLIGVGPVTASAAVATVGDFKQFKSGAQFGAWIGLTPRQRSSGGKNTLGGITKRGDTYLRTLLIQGAKSAVMTAHRRQDKISSWAVALRERSGWQKAVVALANKNARILWAVMTRGDVFDPNHLSVKPTAS

SEQ ID NO: 442959 - protein, 423 aa, unidentified
MTEKPEQLNDQPGLFIGIDWADQKHDCYVIDRDGKGFHREITHSPEDINIWIGEMLKLAGGKPIAIMLEQSRGPLVYSLMFRENVLLYPVNPKQLVRYRESYPGGGKDDPTDAKYLARMLRERIATLTCWQPDDENTRLLANLSQQRRKLVDGQTKLRQQLSAQLKSYFPVVLELFGKDSQLPLVLSVLGRWTDPRKLRRADRRLIRRVLSDHSIRNQEQQDKIIDRIRSAQLLCSDEALITPSAMAVKLLASQIQQSRKTIQEFDTKIAEVMKKHPDAHLFTSLRGAGPALAPRLLCAFGSQKDRWEDADSLAAFSGIAPVTRKSGKQCKVQRRYACPKYLRQTFHEFADSARKYCPWTKARYRLLRDKGMKHNAALRKVARSWIRILFRVWQTGVPFDCERYIVQLQKRCPEITPYLEQEK

SEQ ID NO: 442960 - protein, 424 aa, unidentified
MNLTQNDRLKQVTSDTLIVGVDVGSQTHFCRAFDWRGFELSRRVFKFSNTGMGFLTFLRWTEEIMNKTEMKKVIVGCEPTGCYWLTFQKFLQDHDVQLVTVNPFTVNRSMELDDNSPEKSDLKDPKTIALLVKDGRFSTSYLPSGVYAEIREASVCRDQIMKQHVRLSNQIQGWLQKFFPEYFECYADWDSTSGLMLLREAPLPQDILKIGAGGINQIWRDAKVRAAGIKRAQTLVEAAQNSVGLEAGEAARLEIWVLVNDYILKAEQLKRLDEYLEEKVKEVPNVEKLLAIKGVGMSTVIGFIAEVGDIGRFTDSKQIQKLAGLEIVKKSSGKKKGQPRISKRGRRKLRRTMYESAKALMLWNPAFQDVFLYYRNRTKNPLGGMQAKIAVACKAIRVFYVVLQTGCDFDEEKFRKDIIRPEAA

SEQ ID NO: 442961 - protein, 318 aa, unidentified
MNSNNKAESTEPVSYVSLDVSKARLDYAIAGQKCRKVPNTAAGIATLITTIQPLPGVRVVCEATGGYERRLLDMMHQARVPVCRLQPGRVRHFAKAEGTLAKTDRIDVGVIYRYACSMHPRVEKPPLPEVTALRELLDYRRQLVDQVTQTTNRLETAGPTLQVLLETQRAQLAAALAKADKLVTEHLKAHPGLQAKAERMQQLQGVGPVLATTLLAYLPELGEEDDKRIAALVGVAPHPEDSGESSRPRHVRGGRIEVRNVLYMAAVSASQHNPVLSMFYQRLRAAGKPANVCLLAVMRKMIVLLNRMLKNPNFTLVG

SEQ ID NO: 442962 - protein, 373 aa, unidentified
MKNSITDVAMDTHKKQHRVALVYPNDEQIIEFSVKNTPAEIRKMVRRIKRNAPGEVKFCYEAGVCGFTLQRRIEALGCKCSVIAPSLVPRKLGERKKTNRRDAKKLLGLFMADMLTEVYPPDEQQEAARELTRCREAAQENLKRIRHQLQKMLVRHGYVFIDGQHWTQKHLRWLEAVEFDRPLLQEVFDCYFTEMRHCLQRVKTLDRELEKLAQSEAYREVVGILRCFYGIETLTAISIIAEVFDFGRFASARAFMSYLGLTPSESSSGEKEHKGPITKTGNKRARRLLTEAAWHHRHAYTVSKAFSKRREGQPQWAIDIADRAGVRLRKRYHRLVNRGKLPCKATTAVARELAGFIWSALIEYEARKKRKVA

SEQ ID NO: 442963 - protein, 397 aa, unidentified
MNVDSTDEPRFAAYVAIDWGDSKHVWSLQPADSDRRERGEIEHSPEAVAAWAAMLSARFGGQPVALAVEQSRGPLVFMLGKYEQLHVYPIHPRAAAQFRAALFPSGAKDDPSDAELLLDLLVHHRARLRRLKPDTEQTRLVQHLVEGRRKLVNERTRQANRLTAQLKLYFPQLLDWFDAVDSPLVGALLKRWPTLETLQKARPDTVRSFFTAHNCRSQELIERRLDQIRQAVPAVRDKALIEAAQTMTKVLVELIATLREGIASFDRQIAQAVAAHPDFAIFDSFPGAGPALAPRLLAAFGSQRERYQSAADLQTFSGIAPVTERSGKSQWVHVRWACPRFLRQTFHEWAAHSIGFCDWARAYYQQQRGRGNDHHAAVRWALWSGAYSRKPCDQQLP

SEQ ID NO: 442964 - protein, 337 aa, unidentified
MSPKGYTCGYEKQWVGIDVCQKNLDVYIRPLEKLFQVTNDEVGISKLVQTLKNIQPDLIVLEATGGMEIDAAEKLTQAGLAVAVINPRQARDFAKATGKLAKTDAIDARVLAHFAEAIRPEVRQISDESSRNLEDLVARRRQLSDMITAEKNRRRGKTNSVQASIDEHIEWLKQQLKEIESQIKSAIAINEDWQQKMKVREGEVASPSLITLLKLLTSVPGIGEVVAVTLISSLPELGQISHKSISYLVGVAPLNKDSGKFRGKRKIWGGRAKIRCVLYMATLVAVRFNPLIKAFYERLISKGKLKKVALTACMHKLLFVLNAMMKNNRAWKPQITD

SEQ ID NO: 442965 - protein, 417 aa, unidentified
MKDPPISIPWERYLAVDLHKHYLVIGGVNAHQEIVLGPRRMDLAAWPTWAQAHLLPTDSLVVEATTNAWDFYDHTQPLVGRLQVANAGKIALIAKTRVKTDALDVLKLARLSAANLIPEVWVPPQGVRELRNLIAHRWRLTRMHTMTANRLQSLLHRYHFVPPAGELYWDSHRAWWDGLVVSPTERLRLRQDLATLDHLRPQLAEVDQELARLSTEPPWATAVPLLRQLPGFGLLTVMTVLGARGTITRFDSAKQLVGYAGLGAGVHDSGQTHRGGRITKQGRKDLRHVLVEAAWTAVQRHPYWKREFEQLTARMAKGKAIVTIARKLLVRVWYVLTKQEADRQADPHMVGLKFFAWSWKLTAEQHGGLTRRQFVRYHLMQLGLGNDLTHIQRGGTKRPLASVEEVRQLRPDLRYAA

SEQ ID NO: 442966 - protein, 371 aa, unidentified
MEHTRFVGLDIHKERISIAVAESGRSGAVEYLGEVANDPGAISKLCDRLGRPGRPLAFCYEAGPCGYGVYRQLTSLGHRCDVVAPSLIPMKPGDRVKTDRRDATMLARLHRAGELTPVWVPDADHEAMRDLIRLRSVVRQIVTRTRQHLQGFLLRHGRKHGQGTAWRMAYRRWLSTLAFQHPAQQIAFQDYVDAVMDAERRLQRVEEQVSCLLPEWNLCPVVDALQAMRGIALINAVVLVAEVGDFTRFSNPRQLMAYFGLVPGEHSSGETIRHTGITKTGNSHARRALVEGAWAYRMKPRIGRHKVDRIEALPKIIRDIGWKAQVRLCARYRRLSARGKNANVVNIAIAREMVGFIWSIACTIQSAPRTA

SEQ ID NO: 442967 - protein, 372 aa, unidentified
MPQRSRVFVGLDTSKLKISVALAEEGRQGEVRFLGEIDNTPEAVRRLVGKLASRYSEVLFCYEAGPTGYGLQRQIAALGHECDVIAPSLIPKRPGERVKTNRRDALTLARLHRAGELTAIWVPDPGHEAVRELVRARDAAMADLRAKRQHLQSFLLRHGRLFPGRKPWTRAHARWLSELAFEHPALYLVLREYRQGLEDAQARLERLTQQIAEVLTTWSMAPVVEAYQALRGVALLTAVTFVAEIGDVRRFESPRQLMAYLGLVPCESSTGERVRRGSITKAGNTRVRRVLIEGAWTYRFPARMSRLLQERQANLPQIVRTIAWKAQVRLCARYRRLMAAGKRQTVVTTAIAREMAAFLWAIGHAIEPRSAA

SEQ ID NO: 442968 - protein, 360 aa, unidentified
MAKVSTMASRAATTDFIGLDLSDKTGTYVVLAADGQIVRDGKLGLTRAGLNKVFATRPPASIAIEVGAHSPWVSRELAWLGYVVTVANPRQVKLISKGPKKNDWQDAENLARLLRFDREMLRPICHRGETAQAELAQLRSRDVLVGGRTRLINSVRSMVKAAGGRLPRCSAESFHHKVQDHLPQMLKPALQPMLEVIAGLSEQIKASTRQLEKLADERYPETHILRQVKGVGPITSLGYVLTLEEAQRFGKSRSVGAFVGLTARQYDSGESHPQLRITKAGDPFLRRLLVSSAQYILGPFGEDCDLRRWGFKLMRGSDNQILKKKAVVAVARKLAVLLHHLWLTGEVYEPLRQAALEEVA

SEQ ID NO: 442969 - protein, 420 aa, unidentified
MVYLERGYNLKELPWSKIVSNSFLFKEACMILVGVDVAKDKHDCYIMTSEGEVLFKSFTIANNMEGFNQLYEKILSVIDNFDNVKIGLEATGHYSYNILGYLLDKGLTPYVINPLHSNLYRKSLSLRKTKTDKVDSRIIASMLMSDVSLKPYSNTLYHNEELKSLTRYRFTKVQERAKLKISISRLVTILFPELEKLVPTLQMNSIYALLYEFPSAHAISKAHLTRLTNLLNTTSKGHYTKDKAVLIREAVKNSIGSNMPAKSLELKHTIKLIKELTSEINEIEEEIKIIMNKINSPILTIPGICLSTGAQILAEIGDFKNFSSPDKLLAFAGLSPSTYQSGNMYSSNAKMEKRGSKYLRFALFNAAIYVSYWEPTFSQYLKKKRVEGKHYYVAISHVVKKLVRLIFHLEKTNERYSTVI

SEQ ID NO: 442970 - protein, 359 aa, unidentified
MNRISRVGVDLAKNLIQVHGVNSVGATVSNRALSRDNFLIWCAKLPKECFIAIEASSSSHYWARKLVALGFDARIIAAQLVTPYRLQGKSGKNDTNDAAAICEAAGRPQMWFIPIKTTDQQSMLCVHRLREGFKIERTACINRIRGLLAEFGLVYARGTRVLSQALSEIIEDASNELSGLTRRVIGQAKNQWVELDAHILWCNSQILAHLKQDEQVRKAAQLMGVGPITASAIVATVGDFARFKNGAQFGAWLGLTPRQNSSGGKTTLGGITKHGDMYVRMLLIQGARPAVVTAHRRDDPVSKWAHRLREKSGWQKAVVAMANKNARILWAIFTSGKPFDAHHISTHPASPPVSAMSIA

SEQ ID NO: 442971 - protein, 411 aa, unidentified
MEVVNKRCCGLDVHKRVVVCCIMIREEGKVTKEIRSFGTMTSDLLVLHDWLKAHGVTHVAMESTGIYWKPVYNLLEDDFEVLLVNAAHVRNVPGRKTDVKDCEWIAELLSHGLLKGSFIPPRPIRDLRDLTRYRKSLTDERIREVNRLQKFLESANIKLSSVATDIMGASGRAMLQALLHGSTDPNILADLAKGRLRKKLPLLRQALEGRFRPHHRFLLEQILSHLDFLDESIERMSEEVTRRTGPFVEEIELLKTIPGVEQRVAETIVAEVGVDMERFPTHRHISAWTGICPGNNESAGKRKSGKVRKGNKWLKRTLVESAWAASQTKETYLSAQYHRLVRRRGKKRAAVAVGHTILVIAYCLLRYKTAYQELGSDYFDRINIVHTTKHFVRRLEGLGYKVNLEPASIAA

SEQ ID NO: 442972 - protein, 340 aa, unidentified
MGVFVGIDVSLENCAVCAVDEHGKLVKETKVASDPGALGACIRGIPGVVEAIGIEAGPLSQWLHKSLTDLGLPVVLMETRQVKAALKAAPVKTDRRDAAGLARLLQMGWFRPVHCKSLSAQELRVLLGARRSVQDAAINIEMSIRGMLRNFGLRLGRIGKVSFEDRVRELTEGNKLIQLSIEPMLRARAALRSELVRLERMARDITREDPVCRLMMTMPGIGPVVALTVRSTIDDPGRFRRSKDVGPSIGLTPRRYQSGETDIIGGVTKAGDLDMRTALYQAATVVIHRSKKQTWLRAWAERVVRRRGAKRAAVALARRMGVILHRMWVDNTEFQAARQV

SEQ ID NO: 442973 - protein, 312 aa, unidentified
MAELSFGGIDVSKDRLDVLLLPEGLCFSVCNDAPGWAELIKKLRPFAPAAIGLEPSGGYQRGIIRALLAAGLSVRCINPNKLRQFARAHGVLAKNDRLDAQLIAEYVAIMPTRVVRRDDAVERLAEIVTMRRQLCDEHVAAMNQAAHLEDAILRRLSKRRLVRIEADILLLDKRLAELVAANSRLTHRYRLLISMPGVGPTLAYTLLATLPELGQLDRKQIAALVGLAPYDFDSGKLRGHRSIYGGRMPVRNVLYMAALSASRYNPALKAFSKRLAAARKKSKVIIVAVMRKMIVTLNAMLRDNTEWRPTFV

SEQ ID NO: 442974 - protein, 388 aa, unidentified
MIYLGIDIAKLNHFAAAISSEGGILIEPFKFSNDYDGFYLLLSKLAPLDQDSIIIGLESTAHYGDNLVRFLISKDFKVCVLNPLSTSAMRKNNVRKTKTDKVDTFVIAKTLMLQDPLRFISLKDLDYIELKELGRFRQKTVKQRTRLKIQLTSYMDQVFPELQHFFKSGVHQNSVYTLLKEAPTPNDIASMHMTHLTHLLQTASHGHFGKDTARGLRILAQKSVGIHDSSLSIQITQTIEQIELLDSQLFHTELEMANLVTCLHSVIMTIPGIGTTNGGMILGEIGDIHRFPTPGKLLAFAGLDPSVYQSGNFQAKKTRMPKRGSRVLRYALVNAAHNVVKNNATFKAYYDAKRAEGRTHYNALGHCAGKLVRVIWKMLTDEVEFNLE

SEQ ID NO: 442975 - protein, 415 aa, unidentified
MKVHRNCCGLDVHKQTIAACLIREDGNGHTWKEKRLFGTMTQDLRELAQWLREAEVGAVAMEATGVYWVPAWNVLERAGLHLLLINPEHYKAVRGKKTDLKDGERIAELLQDGRLEGSYVPPSELRVLRDLTRYRVKLVEHQSSVACRIQKLLEQCNIKLGSVASNVLGVSGTAMLQALASGETNAEHLANLAKKQLRRKLPALRLALDGCLMPHHRFLLREMLDELSHIETQLARLEAEIEVQMRPFQKALQAWMSIPGIKHRVAWTLVAEIGPDVQPFPSPAHIASWVGVCPGNNESAGKRKSGKTRKGNRWARRALCEAAWVAAKAKKSYLAAQFRRFAATRGSKRAIIAVAHTILTIGYHMLQRGTVYQDLGANYFDQRHILRTTKRLVKRLEALGHRVILESPVLGPQTA

SEQ ID NO: 442976 - protein, 413 aa, unidentified
MPDWNTITHYAGLDWAKNHHDIVIVDRTGKIVADFQIEHSGPGWQSWREQIAAYPALAVAIETNQGAAIEQLLLSDCALYPVQPKSAQRYRERKVPSGNKTDRLDAWSLADALRVDGHGWKPLAPLDPMIAELRLLCRDEVALIEERTALINQLQAALYEYYPTALEAFSDWTCPAAWAFVETFASPELLLQAGQRRWEKFLHTHKLFRPESAATRLESFARAGQFGSSAAVTRAKSRLALARARMLRLLQNQLNDYRAQIEKLFAEHPDHDLFGSLPGAGAKLAPRLLSELGSDRSLFSDPQALQCFAGTAPVSFQSGQAHRVHLRRHCNKHLRASVHLWSDLSRRFCPWASVYYQALRKRGKSHAGALRCLGQRWLKILWKMWQTHQPYVADLHTRNQIQHGSWVLKINPA

SEQ ID NO: 442977 - protein, 342 aa, unidentified
MEHYAGIDVSLECSSVCVVDANGKILREVKVASEPAALIAWFRSSDFDLERIGLEAGPLSQWLFAAMKAKGLAVELLETRHVRKAFEAMPVKSDRNDARGIAQLMRLGWFRPVHCKSMSAQETRSLLTARKLVQSKLHDIENSLRGILRSFGLKVGKTTELRFAGRIEELVAGHPHLQAIATALLAVRAVLRKEFAAFEKQAHKLARSDARTRLLMSTPAVGPIVALTYVSAIDDPARFKSSKQAGAHYGLTPKKHQSGETDYTGRISKIGDGSVRTALYEAAHIILTKPLKGCSKLKSWAMRIARRSGMSKAKVALARRLAVIMHRMLADATPFNAAVAAA

SEQ ID NO: 442978 - protein, 352 aa, unidentified
MSKYSAVGIDVSDKEMKVVALDAAGNVVLREVVACRECAVKAVFGKMDPCVVALETGGHTTWLGRLLAELKHEVVVANARKVRAISANERKSDWRDAEMLARLVRSDRTLLCPVRLRGKESQADMILLKARDAAVRARALMVNTARALVKGTGERVRACSTEAFPRRCRETLGEETVLALTGLLAGIEAQTEVVRGYDRKIKETADEHRRASDVNRVAQVTGVGTHTALAFVVTLEEAQRFGNARQIGAFLGLTPRRDQSGATDKALGITHAGNPMLRRLMVNSAQYIMGPFGPDCDLRRFGTKLIARGGKAAKKRAIIAVARKLSVLLLRLWQTGETYEPVHVPRRKPKAA

SEQ ID NO: 442979 - protein, 410 aa, unidentified
MQTIFERVGALDVHKAQVTACVRVPAPDGRQPHLAEFATTVQGLMALRDWLAAHQVTQVAMEATGVYWQPVWHVLEDAFELTLCNARHVKQVPGRKTDISDAQWLAQLMEAGLLRASFVPPKPLRQLRALTRYRKTQIAERQREANRLHKALEDTNVKLDCVASDILGRSGRAMLDALVAGTTDPTVLADLALGKLRKKLPELREALEGRFEPHHAVVIGAILAHLDFLDEQIDRLSQAIAEHLDTQMAAGVKLAGTITGVAQRTAEIMVAEIGTDMTVFPSSRHLASWAGACPGNDQSAGKRRSGRTRKGPKWLGIALHEAALAATRSNGSYLHGLYKRLRPRIGHSRALGAVKHSMLTAYWHMFTTGETYVDLGGDYHERRDPERLTKRLIGRLEALGNTVTITPNLG

SEQ ID NO: 442980 - protein, 338 aa, unidentified
MKLYAGIDLHSNNNYLAIIDEHSQKVFGKKLKNSLPLILTVLESYKKELLGIVVESTYNWYWLVDGLQEHGYKVHLANPSAIKQYEGLKYTDDKWDSLWLAHLLKLGILAEGYIYPKETRPMRDMLRRRMLFVRHRTADILSFQSMVARTTSNQISGNDIKKLKESDADRIFIDPDLIFTAKRYINIIASLSVQIKMIEKQVKDRLKLSENFKCLLTIPGIGYILGMVIMLEAGDISRFEKVGNYSSYCRCVKSERLSNGKKKGSGNSKNGNRYLSWAYVEAATFATRYWEPARKFYQRKLAKSNEAIAKKALSAKLARASYYMMRDQVPFNSDMLFA

SEQ ID NO: 442981 - protein, 371 aa, unidentified
MKKFNMFIGMDVHKNSIEIAIAQDGRSGEVRSWGKIDGSLQALDKVVRKLVSKGGQLHFIYEAGPCGYQIHRHLTANGFDCKVVAPSRIPRQSGQRIKNDRRDACMLARLHRAGELTAVYVPLAEDEAIRDLTRAREDAKGDEKKSKQRLLAFLLRSGFRYSGTSAWSQAHMRWLSDIKMPHPSQQIVLQEYIDTLTECRLRVQRLTEHLRQLLPQWRMHPVVKAYQALRGVSLIVSATAVAELGDLNRFEHPTELMSFLGLVPSEHSSGEKTRRGSITKTGNGHVRRVLVEAAWAYRLPARVSRLLLKRQEGLPKEVCDISWKAQLRLCSRYRRLWAKGKPKQVVVTAIARELCAFMWAIAKQIDVPATT

SEQ ID NO: 442982 - protein, 345 aa, unidentified
MEHHAGIDVSLEWSSVCVVDASGKIVREIKVASEPEVLVEFFKGLSLPVTRIGLEAGPLSQWLHAGLTRAGFETVLLETRHVKAALSAMSIKTDRNDARGIAQLMRMGWFRPVHAKSVGSREVRALLVARKQLLSKLMDLEASMRGILRGFGLKMGVVTRKGFEARVRELSAGQAMLERVTSAMLEARAALWREFEQLHREMLRIVRDDEICRRLMSTPGVGPLVAITFKSAIDDPGRIAKSKTIGALFGLVPKKYQSGERDVSGGITRTGDESVRTALYEAANVMLTRTTRFSSLKRWALEVAKRRGLKRARVALARKLGVVLHRIWIDGTTFRWTKPNPAIAG

SEQ ID NO: 442983 - protein, 353 aa, unidentified
MDNRKYIGMDVHQASISIAVGDAAGKVLMECILETKAATVLEFIQGLRGSLWITFEEGTSAAWLYDLLKPHVAKVVVCDPRKNALLKAGNKNDRVDARKLSDLLRAGLLTPVYHGESGVRTLRELSRSYLAASKDLTRVMNRLKAIYRSWAIPCAGQQVYSPRHRAAWLEKLREAGVRRRAQQTYQQLDFLMGIRKETRKELLAESRKNPARQFLQQVPRLGPIRVALLIALIQTPHRFRTKRQLWNYCGLGLRTRSSGEYRYTGGQLQHARKPPALRGLNVNHNHDLKHLFKSAATQAGNDPLGAFYQNLLAGGMEPPMARLTLARKIAAIALKIWKKGERFDPAKLKQQAA

SEQ ID NO: 442984 - protein, 427 aa, unidentified
MRFIGLDVHRDFCEVAISEGGKARRAGRVAARPAELELFAQSLAADDRVVLEATGNALAIARILAPHVGEVVLAHSRKVRAIAEAKVKTDAVDACTLAELLAADLVPRVWIGDEQTRLLRRLVSRRRQLVKQSTRTKNEISAVLLRNLKGRPPVSDVFGKAGRAWLATLELGIDERETVDSGLRQLDFLQSELTHVDRAIAEQALASPEIRRLMTVPGVDVTTAAALMAAIGDVARFPTPRHLVGYLGLDPKLRQSGLSNPRHGRISKEGSAAARHALVEAAWSAAKTSGPLHAFAERTAARRGRQIAAVAVARKLAVLAWHLLSRGEDYAYQRPSVVRRKLRRLELKTGAPRAKRQAGAAPLWGSRGQDDLEHELARQAELAYQRLVSDWKRTRPKQGAGATPGHASRGPSSGQAARQDTAPRPAL

SEQ ID NO: 442985 - protein, 321 aa, unidentified
MNRVLVGVDVCRDFLDAHARPSGLPKRFDNTPAGIEQLVAWLRSLAPERIIFESTGPYQKAAVGALLAADLPAVVVNARQVRDFAKGTGQLAKTDAIDASVLAHFGEVVATVVRPLPSQEILEFRELCDRRGQLVRMLASEKNHRHAAQGASPKVIKNIDKHIAFLQRQIDDLEERMDRIVADSETFKAKDEILQSIVGIGRQVSRVLLVHLPELGKGTRRSIAALVGLAPFADDSGASSRIRHIRGGRAKVRMALYQAAVAAVRYCPTMKSFYASLKARGKATSVALIAVARKLLVLANALLRTGIPYQRPTNSVCLKNA

SEQ ID NO: 442986 - protein, 335 aa, unidentified
MQSMYYIGLDVHKKTISYCVKDGSGRIHAEGAIPATRLDLDIWMKRLPQPWTVAMEATIFTAWIYDHLQPHAAAVKVAHPLMLRAIAAAKKNDCLRCDFLPECYMASTEIRERRRTLRYRNLLVRQAVQMKNKIAVLLMEAGVSYNKQKLHKVRYFRELLATNQDIDDGLRALLRLCRETVVRLGKTESALVRSLQRDSLLIERVERLMTIPAVGPITALTWALEVGDVQRFSSIKKAISYCGLCGAENSSANIIKRTPLSKQRNKHLQTMLIEAAKMAPRNSPDLAMLYDREKQKGNANRATLAVARKLVAYLVAVDRRQKDFLIVERENRTAA

SEQ ID NO: 442987 - protein, 326 aa, unidentified
MEHELHYIGIDTAKEKLDVDVLRPDGRHRTKKFANTTKGHDELVSWLKGHKIDHAHICIEATGTYMEPVAECLYDAGYIVSVINPALGKAFAQSEGLRNKTDTVDARMLAEFCRQKRPAAWEAPHPLERALRALVVRHQALTDMHTQELNRTETAREVQRPSIDAHLLWLEAELKRLEKQIKDLTDDDPDMKHRRKLLESIPGIGEKTSAVLLAYIGLKDRSAHARQFAAFAGLTPRRYESGSSVRGASRMSKAGHVSLRRALYMPAMVATSKTEWGRAFRDRLAANGKKGKVILGAMMRKLAQVAYGVLKSGVPFDASRHNPVAA

SEQ ID NO: 442988 - protein, 368 aa, unidentified
MTSILYIGMDVHTSNYTLCSYSMAHQQSFGRVQIEPDYKRILQYLEELKKVWGEDTEFVCGYEAGCPGYSLYHSLTDQGVNCIILAPSTMATAPNERKTDYRDAEKIAKCLAYGTYSPVHVPTAGDEAVKEYIRMRDAHRMNLKRIKQQIVSLCQRFGKQYPGCSNWTQTHLAWLREQRFGDPVLQETFEEYMIQYHQAEEKLERFDKRIKELSGKEEYADKVNKLLCFNGIKEHTALSTIVEIGDFSRFPTAEHFAAYLGLVPGEHSSGEKTQRTGITKRGNSHLRRLLTESAQSYSRGQIGRKSKGLKVRQEGNEAEVIAYADKANERLKRKFKKLAFCRPHNVAATAVARELACFIWGMMTGNIA

SEQ ID NO: 442989 - protein, 404 aa, unidentified
MFYLGIDIALNTHRLVMLDDNGERVSNGISFQNNTADFEKVLSKLKELSINPNNSICGLEATGNNWENLYCFLTSNNFKTILLNPHQTNKFREALRKKAKTDDIDAFVIAGLLRSNEFASSYVPEDKIQTLRELTKLRYEFIKDHKNYQRQVLALLTIIFPEYKQTALKNPFAIASIAIFKAFPTAKHLSITKPKHIEKIVRSIKGNNFNVKEIENLISIAKTSVYSGRCQESRALTLNILLTQVESFSNSIQQLDEQINQIFSPSSNDNTFPGSNLLTIPGVGPKTLAAILSCVGESGQAFSTGVKLIGHIGFFPQIYESGETKRANRMSNKGPAYLRHALYMASVACIKHNLQLRRLYHTKVSQGKKPKQALICVAKKLAHLCLSMLHSGQDYNPARVFSYV

SEQ ID NO: 442990 - protein, 400 aa, unidentified
MRYIGLDIGRDFAHVAVVEGTGPARRLPRLAMGDEFRLFAAGLGPDDAIALEASTNTWALVDLLAGHAGQVTVSNPLRTRAIASAKRKTDDIDAATLAELLAADYLPPVWQPDVLTRRLRRLAAHRAGLVRDRTAVRNRVSAILARRLVRPPVSDLFGVRGRAWLVALELPPEERLALDAAIRLDAVLTEQVDLAERAIASAIVDDPRIRRLLTIPGIGLVTAAGILAVVGDISRFDRPAKLVSYLGLDPRVRQSGDRPALRGHISRAGQAHARGLLCEAAHAAVRSPGPLAGFHARLKDRRGGGIAITATARKLAVLVWHLLTKDEDYRFAPAARTALRHRRLELLAGRSGTRSSHRGATGLSHDQGRARLRGGHDPDDPALRHAIDRVRSDDTPPPGA

SEQ ID NO: 442991 - protein, 343 aa, unidentified
MGDVITIGVDLAKSVFQVHGVDAGGTVVVRRQLRRRQVQPFFEKLRPCLVGMEACATAHHWGREIERLGHRVRLMPPRYVKAYVKIQKNDAADAEAICEAVTRPTMRFVELKTCEQQSILMLHRTRQLFVRQRTTLINAIRAHLAEFGIVAPIGRSGVEKLLQTIGDAEDDRVPEVARTCLGALAMQLHLVNRQILDADRRVLAWHRSNEASRRLDRIPGVGPLIATALVASVPNPQAFKSGRDLAAWIGLVPKQNSSGGKERLGGISKHGNRYLRMLLTIGALSVIRYAETHGTAHRPWLARLLERRPAKVAAVALANKIARVAWAVMARGEAYREPRLQTA

SEQ ID NO: 442992 - protein, 370 aa, unidentified
MLDTTTFVGLDVHARSIKAVSLDVMTGEVRAATFGYDAGAVAEWVRSVDPRARCVYESGVTGFDLQKRLSGLGVDCVVGAVSKMIKPSADRRRKNDRNDAEFLARMLSVGNVVEVWVPDDECEAARDLTRALEDARDDLSRSKQRLSKFLLRHGLAFDERTPTGRRKGNWTRAHWSWIESIRFAEGADNDVLAYYVDAVRRAAEERARLEGLVEAEARKPRWRRRVDSLRCLKGVDTATAADLVFEAGEFSRFGNARSFAAWVGLTPSEHSSGESDRRGAITKAGNKHLRKALVEAAWHYLTCSGRPKGLARGQAPDRGARRHAAKGVRRLAERREALLARGVHGNKANVATARELACWVWAVGLMAEEA

SEQ ID NO: 442993 - protein, 436 aa, unidentified
MQALPVLDPKAAGIDVGSETLHVSIAGDTPQVFGTTTGQLHALRDWIKEQGVHSVAMEATGVYWLCAYEVLEGAGIEVLVVNGKHVKNLPGRKTDLKDCQWIATLHAHGLLRSGFVPPEHIRRLQDYLRLRADHVTMAASHVQHLQKALERMNVKLHDAISSVVGVSGLKVIRAILAGQRDPLTLLSLCDAQIQKKKAAAVKEALRGTWKAEHLFALRQALELWEFYQQKIAECDQRIEGVLRELAGPEPQAGRPKPGKPGGPNTPQIENLHQMLVRLCGDKDATVLPGLGDHTLLALVGEVGTDLARWKSEKHFTAWCGLPPGSKQSGKRRGNTARQRNRAGRLFCVMARSVGRSVDKALGGFYRRLKGRRGGLVANQALARKLAALFWRLMVHGKDYVEEGLKKYETKVAETEARWLRKLAKKHGMTLLPSPAR

SEQ ID NO: 442994 - protein, 354 aa, unidentified
MREFSTEVTGRTVGLDIGDRYSHFCIVDTDGSLVEEGRVRTTESAMQRHFRNVGPMRVVLEVGTHSPWVSRLLESCGHQVLVANARKLRLIYAGDRKNDRVDARCLARVGRLDPQLLAPIRHRSGSAQADLAVLRARDALVRARAQLVNHVRGTVKAWGGRLPSCSTPAFPQRVHSSVPDALLPAVDPVLATIAELSQRVRAYDRHIEHLSATRYPETAVLRQVNGVGPLTALCYVLTLEEPNRFRKSRSVGSYLGLCPKQYASGELQRQLRITKSGDVMLRRLLVTAANYILGPFGPDCDLRRWGDHLIERGGKYARQRAVVAVARRLACLLHSMWVNDTVYEPLRHSVPIAA

SEQ ID NO: 442995 - protein, 422 aa, unidentified
MKLLTEQPFTVLVGVDWSDKKHDFCLQGAGSQQRELGVVAHRPEAIEHWARALYRRFGGPIAVCLEIAKGPLVHALQRYEFIVLFPVNPAMLAKYREAFVPSRAKDDPTDAEIALELLVRHREKLQALKPQSAAMRTLTTLVELRRNLVGDKTRITNRLCSTLKEYFPQALDWFEHRDTVLFCDFLQRWPSLKHVKRARQATLRSFFCAHNMRRTELLEERIRGIRSASALTNDGAVIGPHQLLVQALVSQLRVTLQAIDGFDAEITQVAQRLPDYALFAALPGAGAILAPRLLVAFGEQRERYGSAAELQQYAGVAPVLERSGNKCWVHWRMACPTFLRQTFVEWAGSTIPRSFWASAYYQRQRDKGSAHQAALRALAYKWIRIVYRCWQTRTPYDESVYLNALKRRGSPLIANLATAQNS

SEQ ID NO: 442996 - protein, 352 aa, unidentified
MEIIAMDVHKRYSQVCVQNKNGKILYEKRLENRKGKIAQFLCQWTTGTPVAVETIGNWYWIVNEIEKAGMKPQLVHAHKAKLMLGSINKTDKLDARGLNRLQRTGTLPTVWISPGEVRDKRELPRTRVVFARERTRLKNRIHSVLDKYGLHTDFDNITDIFGRRGREQMKLSIKKLPSETYYTMGCLLRDLDMVERQIERIEKRMKKVFSKTDEVQLLMSLPGIGFILAVVIANEIGDISRFSSPQRLAGYAGVVPRVHSSGGKSRYGKLRSDVNHYLKWAYSEAGNSTAVNHKRFPGRHVSRLYKRIRSRKGHAKAVGAVGRHLAEASFWVLSKHQVYKEPELKSFSSTAV

SEQ ID NO: 442997 - protein, 357 aa, unidentified
MDTIGLDLHKRETQLCVLAPDGTAKEQRIVTSRERFTAVLGPLAPATVLLEASTESEWVARHLEALGHTVIVADPNYARMYATRARRVKTDRRDARTLAEACRLGAYRRAHRLSDARRHVRAELAVRDALVRTRTRYIALAKALVRRDGLRVAGSESERVAERIAALELSATLAGQLTPLFAILAPLNAEIAAADRRIAELSAADPIVPLLTTAPGIGPITASALVATIDDITRFRSAHEFEAYLGVVPGERSSGEKRRVGRITKAGNARARWLLVEAAWRIVRSRSEETATLRAWASGIAARRGKRVAVVALARRLAGVLYAMWRDGARYTGGKGPSAAPAGSRGRLMWCDQHGSR

SEQ ID NO: 442998 - protein, 321 aa, unidentified
MNSFYLGIDVAKAKLDCALQLANGKFKNKVIDNNLPGFKLLSEWLVKQQVATLHVCMEATGVYWEAVAEYLADQGILVSVVNPAQIKAFGKSHGVRSKTDQIDAQLIALFCAEHRPKAWHAPTPGERALRAMVLRLEALQVMRTQESNRLLVARDAVRPGITSHIEWLDKEIKALAKKISEHLDNDPGLKDKQALLDSIPGLGERTIATYLAFYANPAHFGNARRAAAFAGLEPRHHESGSSVKHPPRMSKIGHAHLRKAFYMPAMVTLYKTAWGKRFRERLAAAGKPPKLIIGAMMRKLIHVAFGVLKSGKMFDPALHGC

SEQ ID NO: 442999 - protein, 342 aa, unidentified
MTTIKYSVGVDIASSTFTVSVGEIPWKVVLKPQTFENVEDGYQTLLEWLAEHHLSASETVVCMEATGVYSEGLAYFLYAKGYRVAVQSPLEVKRTFKPYGPKSDAVDSLQIAEYACRHTDKLSFWRPRNEILEQVKALLAVREQFVSQSIAHKNALKAIQRKVVRTPFAEQAYLQLIEQVKKQIKAIDLEIRRLIESDPTFKEMLLLLLSVPGVGLLLAAHFILLAQFSLEYKVLASFLGICPNEHSSGTSVFKHATSRHFGPPAIRKLLYLAACSVCTHRPQFGSYLARKAKEGKPARLVLNNVENKLVRIMCAVLQSKTAFIENYHSVQPLVFQNTLTMS

SEQ ID NO: 443000 - protein, 360 aa, unidentified
MTEYSEAFVAFDVAKKKHAVAIAEGGRTGEVRFVGEVENKPAAIARIIKKLGRRYDRLHVCFEAGPTGYGLYRQVSDFGHDCMVVAPALIPKRAGERVKTNRRDAVILARLHRAGELTGVWVPDVVHEAVRDLVRAREAGADDLRRKRQQLLSFLLRHGRIYEGGGHWTLAHRRWLARESFEHAAQQIVFQEKIDAIEDAARRLHRLDEQLRAIVPTWSMAPVVEAYQAMRGASFLVAVTFAAEIGDVRRFDTPPQLMAFLGLVPGERSTGDTVRRSGLTLAGNRRARRVLVEAAWTYRYPARVSETLRVWLEGLPKAVRDIAWKAQVRLCARYRRGWGHRWGTPVASYVAEPMRPTPAL

SEQ ID NO: 443001 - protein, 407 aa, unidentified
MLFVGDDWAEDHHDVYLMNDAGDRLASRRLPEGLAGMRVFHELVATHAEEPTQVMIGIETDRGLWVDAFTAAGYRVFAVNPLAAARYRDRHHVSGAKSDASDAKLLADLVRTDRHNHRLIAGDSGDAEAIKVLARAHQNLIWARTRHTNGLRSTLREYYPAALEAFEDLADRDALAILGRAPTPAGAGRLSLSKIRAALKAAGRQRNIDTKALQIQTALRAEQLTAPAAVTAAFGASTRAAVGVIAELNRQIADLEAELATHFEAHPDADIYRSLPGLGVILGARVLGEFGDDPNRYTTAKSRKNYAGTSPLTIASGKKRAVLARHVRNRRLYDAVDQWAFCALATSPGARTFYDAHRAAGDLHHQALRALSNRLVGILHGCLRHHTAYDEHKAWAHRQTNLDTQAA

SEQ ID NO: 443002 - protein, 556 aa, unidentified
MKRGPQEIPDADHEVVIERVCAIDVAKASGMVCVRVPDETRPGRRVSRVWEVAATTRAVTALADQLVADGVARVTVESTSDYWRIWFYLLEAAGLDVQLVNARDVKNLPGRPKTDKLDAVWLAKLTEKGLVRPSFVPPAPIRQLRDYTRLRVDLTRERTRHWQRLEKLLEDALIKVSAVASTIDSVSVREMVEALIAGQDDPRKLAELARGRMKSKRLALIEALTGRFDAHHGELARILLDQIDSLSAQIERLTTRAEQLLATMPQAQAPKRPDHHTDGRPPGTDSSPPSPSGTATTAEATQDTSTTQNTEVPRGLSAWERLDEITGIGPLSAQVIIAEVGLDMSRFATADHLVSWAKLSPRTAGVRGHPAGRGHRQGQPLPQGCARRSGRGGGQNGHLPRGTLPACRETTRQAQSPRRPRPLHPGRCLAPAVRPHRSVPRPRLRLPHHPHRPRPQSPQPHPPTHRPRLQRHPRTHGGLKTRAHSSPVPGCPPTPRSAGGSVRSYPTYFPVKMNVHLTVWNGSVITVPSGAVSPASCWTKSATSERLAPNTASESR

SEQ ID NO: 443003 - protein, 346 aa, unidentified
MVVLGIDAHKRTHTVVAVDEAGRQLGVRVTKATSTAAHLELVRWAGQFGRGRRWAVEDCRHLSRRLEADLLAAGEVMVRVPPKLMAGTRKSARTYGKSDPIDALAVARAALREPDLPAARLDGPERELRLLTGHREDLVAERTKMMNRLRWHLHELDPDWDPKPRSLTSRKNLDAVAARLAGGSGMVVRLAADLTARIAALTTDVNALEKEIAVLARQLAPALLAVPGVAELTAAKIVGETADVRRFKSKDAYARHNGTAPLPVWSANQTRHRLSRTGNRQLNCAIHRIAVTQMRCYPDAQAYLKTRIAAGNTKTEALRALKRRLSDIVYRALLADGTSAPLSQAA

SEQ ID NO: 443004 - protein, 313 aa, unidentified
MTKTTKTNPIDYIAIDVSKATLQIQDDQLAFAVDNDSEGHSKLLKHIKTRKNPLVVFEATGGYERGLCEFLRKEAIPLTMVNPARVRDFARSEGVRAKTDPIDTKMILAFAKSKALCAMETPSETCTKLAALLDRRGHLVEQLAREKNRLQNSEKLILRSIQRMIKILEKEISALDKAIDELVSSEPGLQSRSKLIQSIQGVGKITAWTLLAYLTEIEHLNRNRLVALAGIAPFNRDSGKFSGKRSIIGGRAKVRRCLYMATQSAANCNPIISAYVKRLRERGKPYKCAIVAAMRKLLIHIQSLIKNPKLSTC

SEQ ID NO: 443005 - protein, 401 aa, unidentified
MKRLSGGIDVGSESHHITILDEEDNFLYNQKVSHQLSEFTESIKLFKQIEKQEGGKISFALEGKNGYSAPLDKILLNQGFTLYNVDNFKLKRFREAFAGEWRDDERDALMLSKMLKLKEHINSPREKVFIKIEKPSLVTESLKLLSRHQQTLIDERVRLTNRLGKKLLEVCPQILKLGKLKNKKIIAILAKYPDFSKYKRITLCSLLKIRGIGKKGAFFLLKRLNNIEYMPGLTDIYQTIIFSYAKRISELQKEIEDLDKKLDEIGEESKEVKHLKTIPGVATKLASRLIGEIGDIERFPSEKQLAVYCGVACVDNNSGKVTKAQAVYKANKICKHTLITMAGGSIRFSFQCRDYYLKKRAEGKSHNHTLRCLARQLIRVIYKMLTEDRDYIVRKELRKVA

SEQ ID NO: 443006 - protein, 405 aa, unidentified
MEALHERSCGLDVHKKSITACLLTPKGKEIKTFGTMTDDLLEMADWLVAEGCTHVAMESTGVYWKPIYNLLEGLEMELLLVNAKHMKAVPGRKTDVKDAEWIAELLRHGLLSGSYVPNRESRELRELVRYRQKLVQERASESNRIQKVLEGANIKLASVAKDILGKSGREMLESIIKGTEDSVELAAMARGKMKSKREELEKALKGLVGEHQRKLLSIQMRHVKFLDEEVAALSEEIKERMRPFEKALAAIDEIPGIGLRTAEQIIAEIGVDMSRFPTADHLASWAGVCPGNNESAGKRKSGKTNNGNMHLKATLVECAQVIGHTKGTYLAAHYNRIAARRGSKRAKVAVAHTVLVIIYHMLKEGTSYQDLGGNYFDKRSETAIVHRMTKRLESMGFNVTIEKAA

SEQ ID NO: 443007 - protein, 378 aa, unidentified
MTCIPAQDCYIALELSRTKWLVGALLPGRTKVTTTLVPGGDTAALLDVLHHLAARGTREVGTPVALKVCYEAGFDGFWLARFLINRGVQAYVLDPASFLVSRRGRRAKTDRIDVEAMTLTLKAYLAGDRSVCRAVVIPSPEAEDAKRLSRERTQLAAEKTRHTNRIRGLLALHGIREIKGLWGGAWAQALSELRTGDGRALGPYLRAELAREFERLHLVLQHMKALDSDRQAALTDETSAFPERHKAESLTKLAGIGPISATALVAEVFHRRFQNRKQLASYLGLAPTPYASGDSERDQGISKAGNQPARSLLVELAWGWLRHQPGSGLASWYRQTFAERGKRGRKVGIVALARKLALALWRYLESGVVPQGAELSSR

SEQ ID NO: 443008 - protein, 428 aa, unidentified
MTHSEIKTTEFAAYIGIDWADQKHDICLREAGSNRIESLQIDHKPDSISNWVSGLRQRFQGRSIAIALEQKRGALLYSLMLYEFIILYPVNPHALASYREAFKTSGAKDDPVDADLLREMVYLHHDKLHPWTPDDPLTRELSLLVEYRRRLVDDKTRLTNRLQALLKQYFPQALDWAGELDTLRALEFLTRWPQLEAIQVATPEQVRDFYRQYYRLREKLPERLAEISAAQPLTRDKAVNNASITMVKGLLETLRGLIAAIEAFDQRIETCFEQHSDKDIFNSLPGAGAILAPRLLAAFGADRARYQSAKEIQCFSGIAPVTERSGKTKFVRRRLACPKFVRQSFHEFAKSSINWSVWARAYYDQQRRRGNKHNEAIRSLAYKWTRIIYRCWQDHKPYDESVYIAKLELRGSPLAKLIPTAAEQAEAS

SEQ ID NO: 443009 - protein, 343 aa, unidentified
MHTITTIGLDIAKSVFQVHGVDAGGQVIVRRQLKRRYVLTYFQKLSPCLVGIEACASAHHWSRELQALGHTVRLMPPAYVKPYVKRQKNDATDAEAICEAVTRANMRFVPTKTPEQQSGLVLHRTRHLFIRQQTAVINAIRAHLAEFGIVAPIGRQGVEELLNVVADPNDKRVPEIARACLLAFGAQLRSIKEQILEFDRLIRAWHRSSEMSMRLDEVPGVGPVLATALVAAVADPKSFRSGRNFSAWIGMVPKQHSSGGKNRLGNISKQGDRYLRGLFVAGALSVIRYAKIHGTKHRPWLTALLARRPTKVAAIALANKIARMVWAMMARGERYKEPVALAR

SEQ ID NO: 443010 - protein, 412 aa, unidentified
MQTLVERGCGLDVHQATVVACLLIVSANGNVRKQMRTFGTTTRELLSMRTWLLSEGCTQIAMESTGVDWKPVFAILEGELEIVVANAQHVKKVSGRKSDVKDAEWLAELLCHGLLRSSFVPPKPIRELRDLTRYRRKLVESQTAERNRLLKLLETANIKLSSVVCDVFGVSGQLMLKALLKGKASPPEMAQLAKGCLRKRIADLEPALRGKLEPHHRFLLRLQLDRLQAVEEDLTTLERHMQEKLQPYAAQLALLQEIPGVDWTLAAVIIAELGVDMSVFQSVSQLASWAGVCPGTNESAGKRKSSRVPKGNVYLKTGLVEAANAASRAQGTYLRDKFYRLKARRGYKRATMAVAHKILVAIYHMLSQQVSYNDLGDLYLDKLNKNHLTRNLVHRLERLGYVVTLTPQQQAA

SEQ ID NO: 443011 - protein, 410 aa, unidentified
MGYETLIRRAHVMTRKNTLKSLPTDTEFRVVGLDLAKSDVSVAAIPVDDNTPSLVDRMTYADLLDWAGKISPTLFAMEPCNGYSLLCLQLENLGHEIKVISGWTVSMWINTHLSGQKTDLNDAIALARLAVSDAELTPIRHKSITEIRIQTVQAVRQQLMSQRSKSIVSFKALAQQWGIPCAAGHRNLKKLRESIEAKVDLITRPVANAMLFLLDAVKSLDRQIGQLNQTLQELVMSDERGRLLQSVLGVGTRISARVITVVGNVERFNSPRSLVAYVGVAPRNFITGHKNLTKKKHGNCPDLSHKGQGKISRRGDKLLRSLFIQGAACLYMQFCKDQLPECQLKRWILKQLAMQKPYGKLIVSLAAKLIRIVWAVLTYGEKFNIQKAGMTRSMWSEMALETPLNKEVPA

SEQ ID NO: 443012 - protein, 343 aa, unidentified
MTYYAGIDVSLESASVCVIDAAGKIIREGKVASEPQALTDWLRATGLSLERVGLEAGPLSQWLYAGLRQAGIAAELLETRHVRRAFEIMPVKTDRKDAHGIADLMRLGWFRPVHCKSINAQETRAMLTARKLVQKQVMEVESSLRGILRGFGLKVGKTTPVKFEGRVKELVAGNPSLERITDALLATRAVLRREFNGFERQVRAMARNDTRARLLMSTPGVGTIVALTYAAAIDDPSRFKSSKMVGAHFGMTPKRYQSGELDLAGRISKCGEAFGRGCLYEAAGVLLTKVQRWSPLKAWGTRLMKRVGAKKAKVALARKLAIVLFRIWKDGTEFRWEKEAAMA

SEQ ID NO: 443013 - protein, 428 aa, unidentified
MNCNTQNAKIASITEKTLIVGIDVGSETHFARAFDWRNYEYTKKPLEFSNTEAGFMMFKAWVEDIAEKQGKTAVIPGMEPTGHYWFALGKFLQDSGMKPVHVNPHHVKKSKELDDNNPNKNDRKDPKTIAALVNEGRFSYPYIPTGIYAEIRSLSNLRFQTQEELTRIKNRIARWFAIYFPEYKDVYGDLMAVSGRMILKEAPLPEDIRILGVNGVNQIWRNAKLRGAGMKRAKTLVSAAEHSVGSKEAPEAARIELKNLLNDMDVYVSRMEELLQTIEEKLKTIPYVDKLMEIKGIGLITVSGFIAEVGDIGRFDNPKQLQKLAGYAIVANDSGKHNGESRISYRGRKRLRYVLYEAAISLVGKNAEFKEIHEYYRTRKENPLKKMQSVVAVACKIIRVFYTILTKGVDYDPMKLMSDIRRPQLQAA

SEQ ID NO: 443014 - protein, 347 aa, unidentified
MVIIGCDFHPGFQQIAMMDMDTGEVRQLRLAHREEAQGFYAGLRGRELLVGMEACGYTQWFEQMLEEMGHRYQIGDAAAIRASYVRKQKTDRRDAGHILRLLLEGRFPALWVPRAAERDARQLIVHRHKRVQMCTRVKNQLHALALNQGLRLRWKLWSREGLEQLRALPLLPHAAARRADLLKQLEEMNAEIERLDRAVRQEAAARLAAVRLMSHPGVGPVTALAFVLTIGDTRRFEKSRQVASYLGLIPSEHSSGGKQRLGHISKQGNSLMRFLLVEAGQSAVRKDVELRRFYLRVQHRHSTGVAKVAVARKLALRLYWMLRHTMEQAQLQAGPYAGKPVSFCGRS

SEQ ID NO: 443015 - protein, 477 aa, unidentified
MSKKTRQQEVRGSGGPIPAKSKRNKQPNRPGQPDRPVFEPNAAGIDIGAREIYVAVPADRDEHPVRKCETFTGDLHRMAEWLVCCGVTTAAMESTGVYWIPVYDALEQHGIKPCLVNPRNMKNVPGKRTDFHECQWIQHLHSLGLLHAAFRPDAEVCAVRSLMRHRNDLVRMASEHIQHMQKALTQMNVQFQHVINDIAGLTGLAILDAVLAGERDPAVLAKLRDPRIQADEETIRKSLEGNWRAEHILALKQRLSLYRSHRDLIDECDREIEKLVAAFEPRVDPDKKPMPEDRKQKQRKRKKKSGHPDFNMRAEAYKLFGVDLTQIPGLMTLVLMLFSEVGRDMSRWPTAAHFVSWLGLCPDNDISGGKVLWRGARRTKNRAGTLFRLAAHSLHHDQTLMGDYLRRMKAKLGPAAATTATAHKIAILFYTMVSKQVEYDASLWAKRDEMREKRLEGRLKKQAAQRGYKLVPLEPAA

SEQ ID NO: 443016 - protein, 313 aa, unidentified
MSQNTMTTIYTGLDVAKLNLQLHLAGRIHDLPNTAAGHRRLLKLLAAQPGTHVVCEATGGYERDVVAALHAAQVPVSVLNPARVRHFARATGQRAKTDDIDAAVLSAYGNALQPKPTVPRTEQEQQLAELIRRRVQIVEILVGQRQQAERLTVPALRRQAQSLVRRLERDVAHIEEQLKELRTQAATLDERVQKLEAITGVGTITALGVLAELPELGTLNRRQAAALAGLAPHPRESGQWHGRRSIGGGRAPVRRALYMAALVAAHSNRQLKEFYQRLRAAGKPAKVALTAVMRKLIVLMNHILKNPNFALQN

SEQ ID NO: 443017 - protein, 357 aa, unidentified
MSQRSNNCAIAVIGIDIGKNSFHVVGQDQRGAIVLRQKWSRGQVEARLANQPPCLIGMEACVGAHHLSRKLQLLGHNARLMPAKYVRPYSKGQKNDFRDAEAIAEAVQRPTMKFVATKTADQLDLQALHRVRERLVSQRTCIINQIRAFLLERGVAVRQGLRFLRVELPGVLATRTDVLSPRMSRVIEELAGDWRHLDVRIEGLSSEIETLAHQDQHCERLMTVPGIGPIISSAMVAAIGTGDVFPKGRDFGAWLGLVPKQISTGDRTILGSISRRGNRYLRALFVQAAWVALVKLGPKQWERYGLKSWIEAAKKRLHHNVLAIALANKLARIAWAVLNKGRTFTCVKTDAIASCPA

SEQ ID NO: 443018 - protein, 388 aa, unidentified
MNRILKIGMDVHSTNYTLCAMEPTIGSEDRIFGEVQVAPDYKEILLFIASLKEKLGLSNDYSIECGYEAGCLGYTLYHQLTDAGINCVILAPTTMLTQQGQRVKTDKRDARLIAQCLCYGGYHSVYIPTGEDDAVKEYVRMRDDHKLALKKLKQQINAFVLRHGHQYERTKWTQKHVAWLRKLELDPMYRETLNEYMASYEEQEAKIERYDKRIEEIAAEERYQENVKKLGCFLGIRTHTALSLIVETGDFKRFAKGNTYAAFLGLAPGEHSSSTSVNRLGISKAGNTHLRCLLIEAAKGICKGAIGHKSKELRSRQSGQSAEVIAYADKANNRLRSKYYKMIRHGKKKNVAVTAVARELACFIWGMMTDNISITSSTGTSVPAVSQG

SEQ ID NO: 443019 - protein, 314 aa, unidentified
MGNQERAYAGIDVSKESLDLAAHDERQQWHFTNDLAGIRQVITLLRKHKPATVCFEATGGYELPLWTALTEAGMNPAPSNPRLVRHFARSAGRLAKTDALDARVIADYAYAMKPRVTPFPETEILKEIISRRCQLVEMISAEKNRLKSARNASVKDDIQATIKYLEERLKNIDKELGAGIKASPEWRKKDKLLQSVPGVGKGLSACLIAQLPELGLLDRCKIAALVGVAPLNRDSGKSHGKRTIWGGRSRVRTALYMATLSATRHNPAIRPFYIRLLERGKAKKTAIVACMRKLLTILNAMMKNKTAWGCLTVK

SEQ ID NO: 443020 - protein, 418 aa, unidentified
MSRTLAEKLAHVKPGTLFVGVDLGLDRNVAVVITDRAELLARFSFPHDQDGYAYFRDRLGRLQQAQPTSGVLVGMEPTNHFWKLLATELEQHQISYRLVNAYTVKKHREGDQLDRSKDDVRDGFTIADLLRTGKYTETRLLQGQYAELRNYATQCERLRREISRHKNLLWAAVGQLFPELSRVFSDLGSMTALAMIRNHAAASVIRALPREVFIARVRADFVGQRLSVSKLRQAHALAGRSVGVQQGVDALQLTVRLQVEALALLQSQWHQVRAAMAGTFRAMPEASYMLSVPGLGVMSAATILAEIGDPSHYRRVGQWIKLAGTQPVPNTSGRKSYSQTPMSHKGRPGLRTALFFAVLHLVQKSDAFAREYARLQQRDKNPLTKMQALGVLMNKLLRILWALVRQKVIYHELAPSEA

SEQ ID NO: 443021 - protein, 352 aa, unidentified
MMIIGCDFHPRFQQIAFVDQETGEYGERRLCHPGEAEQFYRSLAGRQVRIGVEATGNFRWFRRLMDELGHEFLLGDAAAIRASCPRKQKTDKRDARHILRLLVEDRFPAVWQAAVENDELRQLLLHRCRMVRMRVRVKNQLDSMAKNEGLLSSRVWSPRRRQQIETLPLPGWYALRRKDLFVLLDELDKQIRPLDESVRKAAEDNQEAGLLMTHPGVGPIVSLAYVLTIGDWRRFPRGKQVGSYLGLIPAEESSSDKRRLGHISKQGNTLLRWLLVEAASTAQRYDPSWHRQYVRLSMNKHHGVAKVAIAHKLAVRLYWMLRSGQDYKQVMERGSHVGQSAMPSGRGCRPKN

SEQ ID NO: 443022 - protein, 390 aa, unidentified
MRAGASLAQHRGLLSRALFGSAYMCEEAPVFTERTSVGLDVHARSVVAAAIDGDTGEVFRKRLTSVSDDVIGWVRSLPGPVAVAYEAGPTGFGLSRAFTTAGIRCEVAAPSKLQRPAGDRVKTDARDAMHLAKLLRLDEIVSVTVPSVQREAARDLVRAREDVRGDLMRSRHRVSKLLLRQGIVYYGGQAWTGTHLRWLRQQHFDAPGLQLAFDAEHEAVLAAEARRDRLDAAIEAMAADSEYTPVVHRLGCLRGIATLTAFGLAVEVGDWDRLTGSSIGAYLGLVPTESSSGQSRSQGSITKTGNTHARRLLVEAGWQHLKPYRTPGATMRARWELAPAAARARGHAGNQRLHQRWLHFNERRKAPVIANVAIARELAGWCWSLAVMDD

SEQ ID NO: 443023 - protein, 376 aa, unidentified
MMTHQPALQVTAGVDTHADVHVAAVLDHLGRELGHRQFDTTAAGDVELHAWIAGHGPIDRIGVEGTGMYGAGLTRMLTARGVTVVEVDRPDRKARRLQGKSDPLDAYAAARAAQSGRAAGTPKTRTGNVEMIRMLHVARGGAVKSKTIAWNELKALIQTAPAPLREQLRGLDGAALLDRCIGLRAARGLAPHHGPHAKRQRPGMLADPTAACKRALAVLARRIRTLQDEIADLDDDLRPLVEQTAPTLLGLFGVGLDVAARLLAAVGDNPERLRSEAAFAHLCGVAPIPASSGKTNRHRLNRGGDRSANHALYTIVMSRLRYDQRTQAYKTKRAAQQKSNKDIIRCLKRYVAREVHHAILTDLGVTSTSEQPNLAA

SEQ ID NO: 443024 - protein, 370 aa, unidentified
MSEPTPLFVGLDVHKDSIAVAHAQGQSADPPVYLGAIGTRQADVDKLIRRLQAKTPTLVFAYEAGPCGYGLYRDLTGQGFACHVVAPSLIPKKPGDKVKTDRRDAVELARLLRSGDLTRVYVPTVEDEALRDLCRARDAARLMLKNAKLRLKSFLLRLGLHYGGRADWNAAHRRYLAKVVCPTPAQQIVFQETLGAVDEQVDRLGRIETELQEFGATWRLYPVVQALQALRGVQWLVAITVVAELGDLTRFDSPRQLAAFVGLIPSEYSSGPARRQGGITKAGNGRARRALIEAAWAYRHPAKVSQHIQTRIDVLPKPIQAIGWKAQVRLCKRFRRLTARGKHPNVAVTAIARELLAFMWAIAKEVTVTA

SEQ ID NO: 443025 - protein, 431 aa, unidentified
MLKINPLSTFYVGIDVSSKSNYVCALDFYKNKYINSSFANNQPGAEELALKILECLNQHPDLTMVVAALESTSVYSIHIANYLSSCEELMRFKPYVFVLNPKCTANYKKSYIGLGKSDPIDAFVIADYARAGNIESEPWRGSQFLALKRLTRHRLHLVECMTREKTYLISNLYLKFSELQMLEGDDQPFCDIYGATSSSVLMEYLSPEEILASSEENLIAFLAEKSCNRIKDISKTADLLKKAARDSYRLDKALYEPLNVSIASSFNCIETFKREIKVIDNAIEKEIKGLNPNAFIILQSIDGIGPVFAGGIIAEIGDITAFHSSDALAKYAGLTWKSNQSGDFYGEDTPMIKAGNRYLRYYLGEAANSMRKHNVEYGAYYRKKYNEVPKHQHKRALALTSRKFVRLVYGLLARNQLYSGVSLDTSIKDSN

SEQ ID NO: 443026 - protein, 403 aa, unidentified
MNNVAGVDVSKGKSMVSVLRPFGEVVAKPFSVGHTGSELKELADYLKSLDGETRVVMEHTGRYYEPVARFLHEEGIFVSAVNPKLIKDYGNNTLRKVKTDKADARKIARYGLDNWTELRQHTPMDTIRMQLKTLNRQQGLYSKTKTMMKNNLIALLDQTYPGVNSLFDSPVREDGSQKWVDFAMAFWHVDCVRNMSLVAFTERYQKWCKRHGYNFSQSRVVEIHARAQDLIAMLPKDALTKTVVRQAIDALNAVSASLERLKAEMRTLAAQLPEYPGGMAMRGVGDSLGPQLMAEIGDVTRFTHRNSITAFAGVDPGADQSGTHEAKSTRASKSGPPELRKALFLVMDCLLKTMPQDDPVYCFIDKKRAEGKPYLVYMTAGANKFLRIYYGRVKEYLATLEEN

SEQ ID NO: 443027 - protein, 392 aa, unidentified
MSLCVGIDVSKEKFDACCIGEGGEKIFFVSCPMDRHGFDKLVVQLPADKTSFLLGMESTACYHIALFSYLAAQGYQVVIINPLLIANFAKRSLRKTKTDKKAALTIAQFLMQEKKALCAETPSHLVGELRDLARRREKLTDQVTALKSDMKRILSVTFPELERLTGVFTKSTLRLLAEFPSAHALRQASYAAIAAIVIPRSRGRKSQASVDALMAAAAASVGVTSPAKELALKQEAALLLTVEEQIREATALLKSLCNERIKEDTEILCSMRGIGENTAVNFLVEMGGDIGIYESDKKLIAAAGLDPSTYQSGKYEGKSKISKRGNRHLRRVIWLMTTRVITNNDVFRAYFFKRRREGLPYKKAVLATAHKLIRVMYSMLVNQTYFEPERRK

SEQ ID NO: 443028 - protein, 374 aa, unidentified
MNYTTYVGLDVHKDSISVAIAKAGREEAENLGSIANEPEAIAKLVRRLREPVENLLFCYEAGPCGYGIYRQLKAMGVDCLVVAPSLIPQRPGERIKTDRRDAKKLARLLRSGELTPVWVPDEKEEALRDLTRAYEDAKEDILRKKNQIGKLLLRLGLRPPAGVKAWTVKYRQWLNSLRFNQPGQAIVLKEYLHALEEAEGMAERLEREIAALAEESDQAPVIKALQCLRGVALITAATVVAEVGDLTRFSSPKQLMSYAGLVPSEYSSSGKRRQGAITKSGNAHIRRVVVEAAWHYQRIPAVGYGLKKRQEGQSEKVKAISWQAQHRLNLKFRRLTGRGKMKQVAVVAVARELLGFMWAIAQEVKREESLAKIA

SEQ ID NO: 443029 - protein, 361 aa, unidentified
MIVIGTDTHKRTHALAAVDEGTGRIRGNREIKADETGHLAALKWARGLDDERVWAIEDCRSVSRRLEEALIAAGERVVRVAPHRMGASRRGEREPGKSDEIDSLAIARAVVKDGVECFPAAFLDEQAMEIRLIGDHRHDLVVERTRMQNRLRWHLVTLAPELEASLRRGALADTRQLDRIDRQLRRMAIGARVRVAREQITQIRNLTRQIDTLRDELAILIKAHRPALLSETGCGPLTAAILIGRTAGAERFATDASFAQQTGTAPLKCSSGQRQQHRLNRGGDRQLNHALHIIAITRARYDPATRAYLARKQAEGKTTKGALRCLKRHLARRFHHLLAQPPTPEMGSTDHDQKNNQEKCY

SEQ ID NO: 443030 - protein, 317 aa, unidentified
MMKITMTVAGIDTAKDKLDIALYGQARHWCVENNLQGWKRLRSELAKAGIDRVGIEATGGYERGVVRHLREAGFTVLVLQPIQVRAFAKAHLRRAKNDVLDAALIAACAAVMEKPPIEPDQRLTDLADLLTFVEQIEEDIARLKTRLEHVAEPRLRRMVLGDIVRLKARRRDQIRFIAKQIRNHHDLAARLDLVLSVPGIGERTALALIIRMPELGRISREEAAALAGLAPFDDDSGKHKGQRHIAGGRARLRRSLYAAALPAAFRWNNALISLYARLIARGKAHSAALVACARKLLVYANTVVARGTPWVDSPAST

SEQ ID NO: 443031 - protein, 335 aa, unidentified
MQIYGIDLAKEKFDVSFFDLTSKKVSNQPSHKVVTNNLKGIGKFFKGLPSDAVLVAEHTGVYGDTLLKCCMDCNVKIAFVGGYVIHRYRATPDRAKTDVLDCALLREFGERYPDKLKYKTFPEEALYELRQLARHREMLVEQRKQLITADKSEDCRPVRSLVVKRSMDRIKEMLDTEIAETEKEMLKVINGHDSIHHNYELVKSVDGVGLITAVELLVKTENFTKITTARQYSAYAGTAPYEKSSGKMDKGAHISKIGNRRSKTLLYICAESARLHNKEIKLYYERRTLIDKKPRHYVLNAIANKLLRIIFTLVEKGEYYDANFIRQDPRVVKYN

SEQ ID NO: 443032 - protein, 358 aa, unidentified
MRKNTRKTTRIAMGLDLGDRLSHVAAVTCEDEVRGEWSVKTTQAEMREFFSDVPKETRVVLEAGTHSPWVSALLEELGLDVIVANPNQAGRAVAANGGKNDKLDALLLASFGLNSPRLLRPIKHRSRQAQDHLSVIRARDGVVAMRTKAINMVRGLVKSSGHRLPGCSASVFHHRVLEHIPENLKLAVLPTLEIIKQLTKSIRDYDKRIDELSEAYPETKRLQAIGGVGPLIAMAYVLTLEDPSRFKRSRSVGAFVGLVSRQHESGDSSPQLRITKAGNSYLRRLLIIAAQYILSVNGPDCELQRFGLRLAARGGKRGKKQAVVAVARKLAVLMHRLWSSGEIYDPLYSKSKSVQLSA

SEQ ID NO: 443033 - protein, 416 aa, unidentified
MEQVTWYVGIDWGSERHAVCVVDAAGHRREERGVDHTADAVQACLDWIMTFTGATPAQIAVAIETPRGALVDACLARRLLVFAVNPKQLDRFRDRHTVAGAKDDRRDAWVLADSLRTDPAAFQHVHSEDPIVVQLRELSRAEEDLDAECRRLANQLRSQVHRLVPEMLALCPGADEPWFWALLQIAPTPAAQRRLTRARVDHLLRAHRIRRWRGTDVVARLQAPLFPHAPGVVEATEAQIHLILPRLEVVHTQQLACGRQLEQLLQQLRDRPREADQRGEHRDIAILESLPGVGRKVAVTMLAEAAEPLAQRDYDRLRAHMGTAPVTTASGKRRLVSMRRACNRRLRWAAYHWGRASVQHDAPSAAYSRDLRARGHRHGRALRSVVDRWLRILIAMLRQNTLYDASRFAVAVDNGA

SEQ ID NO: 443034 - protein, 387 aa, unidentified
MSKSNGLSKCLTAFDQDSTLVAVVEMSQSNWLVAGIVPGIERQPLKKIEADEQTLLELLDRWRDEALKAGHKVTRITLAYEAGLDGFWLARWLRARGVETHVIHSSSVAVSREHRRAKTDRLDTGLLKRSFLGWLRGEVNHCSMAAIPTLLEEDAKRPSREHQTLVKERTRLISRLKGAMTRLGIRGFRPTLRKAAERLDSLRTPNGEPVPANTQAELKRDMARLRLVKDQIKEIEHVRDQKLAAAPEQGTHPMIRLLARVMGIGIETADMLVHEVLSRDLRDRRAVARFAGLTGSPDESGKRRREKGLAKAGHARVRRGMIQLAWRWLMFQRDSALAQWYRARTVDGRRDTRKVMIVALARKLLIALWRMVTTGEMPEGVVMRPAS

SEQ ID NO: 443035 - protein, 341 aa, unidentified
MNIVTVGIDLAKNVFALHGVDQSGKAIFIKPKVARGQLLETVANLPPCLIGMEACSGAHHWAREFSRFGHTVKLMAPKFVAPYRMSGKRGKNDAADAAAICEAVTRPNMRFVPVKDVDQQAILCLHRTRQGFIEERTALYNRLRGLISEFGIVLPQKVERLRREIGAHLEELPGWANRCVGDLLVHADRLNERIDEYDKAIAQAAKQDQRSRRLMQLPGIGPTTASALVASLGGGHDFKNGRQLAAWAGLVPGQYSSGGKARLGRITKAGDAYLRSLLVMGARAVLAGLGEKQDRFSRWARSLVERRGYWKAAVAIAAKNLRLSWAVMKYGDDFRLTAAIA

SEQ ID NO: 443036 - protein, 364 aa, unidentified
MNTTTVGVDLAKYLFAVCLVDSHGRVQLRREFRRDGFAAWLAQLPEGTMVAMEACSGAHHWARRCRELGLQPRLIAAQFVTPFRKSQRSKNDRNDAEAIATAARQGNMRFVAIKTVDQQTRLSWHRVREGYKDENLKVMNRIRGLLAEFGFVIAKSPIALRRALAEILERQDLPREFVELLQDLREHWQQIQTRQRHCDRRIETHAQADVRCVRIRAQMGVGALTSDAVVASVGDGRNFRHGRQMAAWVGLVPRQHSSGGHQRLGPISCSGDAYLRTLLIQGARSSVQAANRVPIEKATPEQIWIRQLATRLPLGKLLVAIANKHARQIWAMLARGEAYDPNAWLRHPMVQRKASRKNTVAAAA

SEQ ID NO: 443037 - protein, 415 aa, unidentified
MLKIVYPICCGLDVHRDFVYACIATTENGITTYKSHRFSTFTKGLRELLSWLLQNNCCDVCMESTGKYWIPIYNILESDCKIVLAHPKYVKAIRGKKTDKKDAKWIADIFKHDLVSGSFIPPADIRQLRDLVRYNVKLTNYTTGEKNRAQNCLTVSNLKLDSVFSDVFGKASSNIIGRILANPSEKISDVSVFRTKGMKATDEEVLAAVDGEMCAEQAEKLRIIRSHMDGLELCKANLMSLILSTSEKYIPEVDLVSTVPGLTAYSAIAVIGELGVDMSVFPTSKHLCSWAGLAPQNDQSAGKKKTTRISRAGVYIKPLLVQCALAAIKSKNKHPEIVNRYNALRKRRGHKKAVIAIARILLTAIYNILKKREPYNPELYRNSDTTPEHRNVTIEEAVFILQRQGYIISSPTSVG

SEQ ID NO: 443038 - protein, 385 aa, unidentified
MANQNDLSRSLVAFEQDNTIIAVIEMSLNSWLVAGIVPGIERHPLKKLSCDEQMLLQLLYRWRDEAVKAGRMITRMVVAFEAGRDGFWLARWLRARGIEAYVIHPTSVAVSREHRRAKTDRLDTELLKRAFLGWLRGEPDHCSMAAIPNLQEEDAKRPTRERENLVGERTRIVNRMKACLVRFGIRNFNPTLRRATERLNALCTPEGVSLPPNTLAELRRDMARLRFVMNQINEIEAARLQRLEQAPAEEPHAKVRLLARVIGVGLETADMLVHEILSRKLRDRRAVARYAGLTGAPDESGSKRREKGLAKAGNARVRRGMIQLAWRFLLFQKNSALSQWYRTRAESAGKKRKTMIVALARKLLIALWRLVTTGEVPAGVVLRAG

SEQ ID NO: 443039 - protein, 387 aa, unidentified
MLWVGIDVAKRSHQACVLDDSGCIVGQSFKFPSSRSGVDTLVALLQELDSPATIALEASGHYWQGLYHHLTSQGFPVVVVNPLQTEAYRKTGVRKVKNDRKDAFVIADFLRIGRAQPNYVPGEMTVKLRELTRYRMDLEDQIGDAKRRILTMLDRVFPEYPGLFSDAFINSSRALLNEAVSATDFATFDLQELTSILRQASRGRFGERKARELQEKAKGSLGMAFLGPVAKVKVRTLLEQIDLLNRQVQEVESAITELMEQHPQYLTTIKGIGPVLAATLLAEIGDIQRFPSLESLVAYAGIDPSIFESGEFSGRRQHMSKRGSPYLRRALWLAAHSTRQWNSDFNDYFQRKLAEGKPYKVAIGALCRKVLARVYVVLKENRPYELR

SEQ ID NO: 443040 - protein, 340 aa, unidentified
MNTTKHFIGLDVHKATTTYAVRDKLGTIIAEGQTATLYNELHPQLKPYLAQAQIGLEASTSYYTLYQHFLTEGYNIKVANTIQLRQLIAKNDRLDARRLAEMLRLGTFPCSYIPDKNIQHLRSLVQARHALTEERVRCNARIQASLDRNGITMPPTKAFGKHWRDELTRYIASGHTSPEVRFEYDHFLYLEKTAKQIEDEMKHLTSQHWNDDYQLLQSITGIGPLLACYLIAHIHPITRFATNRKLRRYAGVIPVSKESGQTATRGRIPKGSSRKQLRWALVQAANSAAKTDTPLGRYYRKKKHQKKISGIAKIAVASSMIDIIYKVLTTRKPYMPAANN

SEQ ID NO: 443041 - protein, 320 aa, unidentified
MMAQNDLVVVGIDVAKDKVDACIRRFKLQQTFPNNPQGHRKLIAWLRKYQVGKAVMEASGGYEREWRNVLHNAGIEVRIVDPRRVRNFALSAGRLAKNDPIDAEMISWFAETFSQAPGQIPDAAREELAGLAKARKALVDVKVRLLAQNEHAAPEPARKAHARVVKSLAAEIAKLEAAISAKVKATPGFAELAEIIESVPGLAQATSAILIAGMPELGQVSDEVAAALVGLAPYDDDSGKRRGERHIKGGRRWVRNALYMPCLGAATQNNPMLKAFYQRLIAKGKEPKVALVACMRKLIIILNTMLARRQKWNPGRHAVA

SEQ ID NO: 443042 - protein, 339 aa, unidentified
MTVNTVGLDLAKDVFQVHGISANGRVIFNKTVKRAKLLQFFEALPPCVVGMEACGSAHHWGRELGKLGHDVRLMPAGYVKPYVKRGKTDAVDAEAICEAVRRPTMRFVELKTEDQQAILAIHRTRDLVVRQQTQIVNMIRSILREFGHILPTGVGAILTFAKRHLGGDHPDMPELANGILGTLCHQLVGLNTRVVGYTRMIEQHAMMTADARRLMRIPGIGPITASAIIATIGDAKQFRTGRDLAAWLGLPPLNKSSGGKERLGKITKKGDRYIRKLLIVGMTSRALMARKHPERADLWTAKMLAQKPFRLATVAMANKAARIVWAMLTKQQDYRQPGT

SEQ ID NO: 443043 - protein, 341 aa, unidentified
MAKQKLSEGSSVSAIGIDVAKATLSVCFRSSTEPESALTLRNTETDIRKKLLPRLAGFSGRIVLESTNHYHWQVSLLLTEAGFQVFVVNPILAKQYTSSNIRKVKTDPADASGLARMAELADNLPRRFQLSRETLNLRKKLSIIACVGSQLQALKSTQRQLAESHEILKTQMSKGENALDSTIKQLKKTQDILEVEFVKEATELETDSEAAKILDTIPGVTPFCAHLALHWLAVLPGVSAKSWIGYVGLDVSSRESGTWHGRCHLTKRGNSFLRRRLYSAAWGATMSDDNFKTYYDSMRTEGRSHVEALIIIARKIVRIMFKTIETKQPYDHAKFSFGTQV

SEQ ID NO: 443044 - protein, 310 aa, unidentified
MQVARSIVGIDVAKAELVIHFQGRTLTIENTPQAIKRWLKGLPCSCEIAIEATGTYHMAVIELAHAKGHHIYVIDASRLSSYRKGTGGRAKTDASDAQLLARHLQREKEDLRRWSPPPKAYRTLQTLLRRRAALIKARTMIQQSLSGEKVLKANLTRLISQINSLDTLIQKHLRNTVREAGLCDQVKRCKGLEGVGDLTAYALVMAFLRGDFRNSDAFVAFLGMDVHVKDSGTRTGKRKLTKKGDSETRRLLYCAAMAACKSARWMGVYQGYLDRGLAKTQALVILARKLVRIAFALMKNRTDYVSMPAS

SEQ ID NO: 443045 - protein, 321 aa, unidentified
MEPWVGIDVSMETLDFGWITSTGKKYFKIANSPDGFREALSKTPPDAKFVMEATGTYHLNLAFFLHERGHFVSVVNPLCTKSHMRTELRRAKSDKTDALALSRFGQEKKPEAWVATRPEVLQMRQLLVVCDSLKETMCAFGNKIHAMEQCVYSSSYAIGVLEAARDQLEVQLKEAEATLDELANKTMGRTIEIIDSLPGIGRETAVRMAILVGDFQRFSNCRKLVSFCGLTPTIAQSGTSVHSKGTISRMGGHKIRSMLYVCTWSTLRHNEHAKAVWKRMKENGKPGKVIIMALMNKMLRQMHSMVIHDTMYNPNFVAQAA

SEQ ID NO: 443046 - protein, 351 aa, unidentified
MLIMGVDYHPSFQQVAFLNQDTGECGELRLNHSDGEAERFYRDLQSRGTAVRVGIEATGYARWFERLLAELGVELWIGDAAEIKTKRVRRQKTDRQDARLLLKLLLENNFPRVWVPSPENRDLRQLLWHRHRLVQMRTRIMNQLQALAMNEGKKWKKRLWSEPGRAQLEKFPLAPWASRRRQDLSELLDRMNPTIQELTAAVEQEAKKRPEVLRLMTHPGVGPLTALAFVLIIGTPERFHCGKQVGSYIGLIPCEDSSAGRQRLGHISKQGNKLLRYLLVEAAHAAVRFDPDWRRRYLHLAMRRERRIAKVAMARRLAIRLYWMWRNGAEYSQSVEFGSHAGKLGIGHGVN

SEQ ID NO: 443047 - protein, 414 aa, unidentified
MEVVNERCAGLDVHKKVIVVCALTPDVVGRDGQPQPVLERFGTMTEDLVALGRWLAERGVVQVAMESTGVYWQPIWNILEEVGRFELLLVNAHHIKAVPGRKTDVKDAQWLAELLRHGLVRASFVPDRAQRELRELTRYRTALIEERAAHVNRLQKTLESANVKLSAVASDLTGVSARAMLARLVGGDDDVVAVADLAKGRLRAKLPELERALVGRFGAHHRYLVPRILAAIDFLDAEIADLDERIAELVRPFADAVERLDGIPGVGQRVAETIVAEVGGSVARFPSAQHLASWAGVCPGNHESAGKRLGGKTRKGNAPLRRALVQAAHATSRARQTYPGAQYRRLAARRGKKRAAVAVAHTILVIAYHLLARNTTYTDLGPDHFDRRDADAIERQLVKRLERLGNKVTLEKVA

SEQ ID NO: 443048 - protein, 342 aa, unidentified
MAVIGIDTHKRTLAACAVDGLGAVVAERTFGCDPDGLVELIRWAQPLAADGRVGVEGSASYGAPAARMLVAAGLVVREVPPHLSRHERGRIRRPGKSDPGDALAIARVTLREPMLPPVRLDDRTEEIGLLVDAREELVHAQTQIRNRLHAHLVVLVPGYGRTAAQLVSARQLDAIETLLSLLPGTRAELARTLLEDLRVLGSRAKVLHGRIARLVAGHPLLQLPGVGVLTAAWLIAEVGDVDRFSSPAAFAMFAGVAPIPASSGETHRMRLNRGGNRRLNRALYTIALVQVWHHPPATAYLARKRSEGMSWAEGLRCLKHRIARPVFRLLQAGQHDWLALAA

SEQ ID NO: 443049 - protein, 337 aa, unidentified
MQITRIALDLAKNVIQVHAVDRAGKPVLRKSLKRSQILPFFRDLSPCRVGMEACASAHDWGRRLQAIGHQVELLPPQYVKAFVLGQKNDANDAAAICAAMARPDIPRVPVKTVAQQDQQALHRVRQLRMKHRTALINQMRGLMAEYGITIAQGPGALRKAIPELLEDADNGLSFGFRGLLSELYEELKQLQTSIDALSERIERQVRQDADGRRLLEVPGVGPLTASALIAAVGDARQFRNGRQMAAFLGLVPKQHSSGGKARLFGIHKRGDSYLRSLLTHGARSVLRNAANKPDDRSRWLMSLATRRHRNIATVAQANKTARIAWAILTTEQRYRPA

SEQ ID NO: 443050 - protein, 429 aa, unidentified
MNSTQNKKLEQVKETTLVIGIDVGSETHYARAFDWRGYEYSKKALRFSNTEQGFASLMTWMQEIRDALGKEEILPGMEPTGHYWFSLGVFLRDNGIKPVLVNPHHVKKSKELDDNSQSKNDRKDPKVIAGLITAGRFTYPYIPEGVYAELRTATNLRFRIEAELTSVKNRLARWFSMYFPEYRKVYGKADAVSGMMILKVAPLPEDIVELGAEGINQIWRDAKLRAVGMKRATSLVEAAKRSIGLRDGKDAAKLEFQILIDDYETKHKRLDEVMTLIEKLMEKIPEAKKLLGIKGIGMKTVSGFLAEVGDVRRFTDPKQLQKFAGLAIVDNESGKHKGKTTISRRGRKRLRYLLFEASLSLAATNPEFREIHRYYTTRTNNPLKKIQSLTAIGCKLIRIFYALLTKEVTYDAEKMLTDIRRLPEYQTAA

SEQ ID NO: 443051 - protein, 345 aa, unidentified
MSEVTTIGLDLAKQVFHLVGFDSKGKEVKRKRLTRGKLAEYVANLPPCLIAMEACGGAHHWARRFRDLGHEVRLIAPQYVKAYVRGNKNDYNDARAIGEAARVADMRFVEVKSVEQQDVQAMHRLREARVGERTGLCNQLRGVLAEYGIVLAQGVGTVRKRVPELLEDAENGLSDFLRSLLADAYRQLRELDGHIAFYTDALKAHARENEAVERLQTVPGFGLIVVSAFHAFVGNGHAFGKGFDRSAAFGYVSRQHGSGGKTVLLGISKRGDRYLRSLLVHGARAVVRMADKKDDPLSRWICRLKVTRGANKAAVALANKLARIGWAILQRGGTYRAQPAPGGAV

SEQ ID NO: 443052 - protein, 415 aa, unidentified
MKNIKRKIKRIDSKALIVTADCSKGNHHGYFRSPDGDDITPFKFNNSRSGFELYWQKAEKFRGAHGLERIIFGFESTGSYSYCLAVFMLKQGSTVYQVNPKHSKRLKELEGNSPNKTDKKDPKVIADILMLNHGLSFLMPQGAIAELRKMILNRERINEDINRVKNRMEAQIVLFFPEFLSVMKGLRGKSSLYLLQHHPMPCEILKLGRERLTAILSKVSRKRLGKLQAEALYTAAQATVGITEGLLAIRETMRMLMEGLNLLEDQLKRTEGHIRQLAEGMPAHRILTSMKGIGLISASTIMAEVVDFNFYHSASEIVKLAGLDLYEISSGKHRGRLRISKRGRSLLRKVLYFASLNMVKKEGVFHELYQKYRSKGKPGPKALIAISKKLLRTIFSMVKNNVVYNPDFKKLQMAA

SEQ ID NO: 443053 - protein, 341 aa, unidentified
MEQVSTIGLDIAKHAFQVHGADAAGHVLFRKRITRVKLLRFLAAQTRCVVAMEACAGAHYWAREIAKLGHHVRLIAPAYVKPFIKRQKNDAADAEAICEAAQRPSMRFVPVKTEEQQANGIVFRARDLLVRQRTQCVNALRGHLMEYGYVFPKGITHVETLVALVEDLQSSLPDSVRVILKLLVDTFTALEAQITALDAEINQRSKSDPTARRLMTIPGVGPIASTAITALVPAAEGFPAGRDFAAWLGLTPLQKSTGGKQKLGAVSKRGERTIRRLLIIGASAVVQQASRRRAPKGSWLAQMLARKPKMLVTVALANKMARVIWALLVKGGIYRTPVAAA

SEQ ID NO: 443054 - protein, 346 aa, unidentified
MKKIFIGIDFSKEKFDVVIIMAENLEEKAPRVHEQFANDKAGYRKFLKWVKVNSHGVDMSLWLFCGENTGDYSRGLANFLYGKGCDMWLENAKCIKDSCGIRRLKSDRADAAMIAEYAMRNHDRMTLYEPLSGPLAQLRELFLFRQMNVRKRSGYIVRKGEKGRTLDSSPAKSFMARKCKHMIAELDKTIKECDKMIEALIASDRDLQETYEIVTSVPGIGAQNAVCMMVYTDNFKRFDCNPRKIACYYGIAPFGQDSGTSVHCDPHVHYMANKTIKGILTQAALCAINHCPPVAHYYARLIERGKKTMVALNNVKNKLVRIVTALVRTKQKFIPEYEFAKRYAMD

SEQ ID NO: 443055 - protein, 325 aa, unidentified
MRSFQPPADTRFYAGIDLHARNLFLVILDREEQTHLARNLPAAPEPFLRAVAPFREGLLVACECMHCWYWLADCCRDENIAFVLGHAWAMKAVHGAKTKCDRKDADAIARLLKGGNFPPAYAYPKERRGLRDLLRSRLRLVRQRAELYGHVHTARRQANLPPVSSDVNYKCKRSGCTADIVDPFVRRRVETHLTLLELAVLQSTPGVGPVLSLTILLEIDTIARFAARQQFCSYARLCGAVQTSDNKRCGGGNAKAGNAWLKWAFSEAAVLSAQKDQRLGAYLARLASRLGKAKAYSALAHKLGRAFYHMLHTKEVFAVNRFVRH

SEQ ID NO: 443056 - protein, 422 aa, unidentified
MSYCPVAGIDVSKRFSDMCILSPDNKIFAQEKIYHDETSINRANALLQKAERLFFRKPVIVMESTSHYHLILFQFFSEHGYDVIVVNPLQSNSMKDFSIRKRKTDRVDAFKLAMMYRTKTLRPSQIPQTVTRALRQLCRHRAELLNDVSSYKNRLTALLDQTFPGYDKVFSDVGGVTSCAVLVRFPTPTILLVEEESELVEVIASASKAGYSFAKKKAGLLISAAQKAQAWGIHSCADETLIVCTIQMLRTLSESVLQIETAIDNLLAQIKEMRNNVSLLQSIPGIGSHSAALLLGEIGDISLFKKPKQLAAYFGLDPTERQSGSFRGTKNKLSKRGSPYARAALHMGVVNSICKRGKDSAANPVLLSYYEKKCKNKPAKVAQAASMHKLVFIVFAVLRDQKPFELKTPEQHAVEQGFVKAA

SEQ ID NO: 443057 - protein, 338 aa, unidentified
MGCYVGIDLHATNSVVVVSDDADRVLYQKRLRNDLSVILGALAPYRATVQGVVVESTYNWYWLVDGLMEAGYRVHLAHAPALPQYSGLKHVDDQHDAQWLAHLLRLGLLPTGYIYPKAEGAVRDLLRKRSQLVRHKTMVVLSLQSLLTRLTSHRLSLPRLRQLTADGVQALVPFPEHVQAVMSSLAVLECLEREIRMIEGTVREAGRTQPGYALLQTVPGIGPILAGTILLEAGDLRRFATVGHFASYCRCVGSEYVSNGKRKGTGNTKNGNKYLSWAFIEAAHFAIRYETVIRTYYQRKQARTHPLVALKAVAHKLARACYHMLRNQVPFDLARAFG

SEQ ID NO: 443058 - protein, 352 aa, unidentified
MTSIIYVGMDVHTTNYTLCCYSMEDDRFFVEVQVEPDAKNILKYLARIEKQQSRDCRIVCGYEAGCLGYSLYHQLHAHGIGCVILAPTTMMTKPGKRIKTDRRDARLISKCLAFHTYSPVYIPTEVDDAVKEYIRMRDDANSALARVKQQIIAFCIRHGKIHDGKSYWTNKHLEWLSSLDLGNKILSEVLQEYLIRYYQLREQVDMYDMRINELAQAEPYRQKVEKLGCFRGIAAHTVLPFCVEVGDFRRFATAQQFASYLGLVPGECSSGDKQQYTGITKAGNSHLRKLLVETAQVFGRSATKSGKSVALKERQAKCDSLTVAYADKANARLKKKYFKVTPHKYKIYFSRQ

SEQ ID NO: 443059 - protein, 372 aa, unidentified
MLIHYIDIAKRNFVIAVSSLSKTKTETNNPKGIAHTIEYLKKHKVALVVTESTVGLEIPAAKAIRRAGIAVIIANPRQTHQFAQSQSLTKTDAKDAKMPAFFTQMMTQKEDWQTMPYQPPTEAEEVLEALVNRRNQSADMRTAEKNRLHQVHETQVESVKQLIARFDRLIDESDKQIDDHTRTHFDGKAQVAEQIKGIGSITTATLMAMLPELGRLSHKRIASLVGIAPHPRKSGEAKFKSRCFGGRSAVLKALYMATVAATRFEPLIRDFHQRPLSEGKPYKVAVTACMRKLLETFAKFLSLTTTEIPTQVFGCFRPKYRLILPKHPLNPPRTPDNQASGLPFRRQRAHLACWRLSTGSNTSPSDGFAHSL

SEQ ID NO: 443060 - protein, 300 aa, unidentified
MQDDFSILPSPGQADCGRPSQKTNNMNTSHPYDLVIGLDRSDKKADLHLITTATGQRRAQTIDTAPEALWEWLLEPRQQHPQARVALCLEQPAVHLIAFLEAYDWITLYPINPITLQKFREAFVTSRAKDDALDAQYLALIRHYDTQITTLEVQLKKLTKERAGRDYPLLPPTPGIGEYLGLTILHELGDIARFPTVKDFLSYCRLVKGTVASAGQIKGLRGAKLGSPYLRWAFGEAAVIAKRDPAVLGPLAQRLEARMNGNKFKANTVLAIKLARAVYFMLRNHTVFDPDRLVAALSKN

SEQ ID NO: 443061 - protein, 351 aa, unidentified
MSKQTNAIAASTIGIDTGKNTLHLIGLDKQGTIVLREKLARGRIGTRLANVPPCLIGIEAGMATHYVARELLALGHDVRQVPPAYAKPFRQGHKNDFRDAYAIAEAVQRPSTRCVPVKTDDQLDLQALHRVRSRLVGQRTAVINQIRSFLLERGIAIRQGLRFLRQQLPELLAKRIDVLSPRMIRIIEDLSGDWRRLDERIEHVTKEIEVLAHGSESCRQLMTVPGIGPLIASAMVAAIANGAAFAKGRDFAAWLGLVPKQTSTGDRTILGRISKRGNRYLRTLFMQGARVILLRPASWAKHSFGPWLTAAAKRLHHNVLAAALANKLARIAWTVLAQRRNYEARAIIEAA

SEQ ID NO: 443062 - protein, 331 aa, unidentified
MSLELLAIDLGKRSFHCHGIDSDGVILSRKVSRAKLLETIKELAPKAVAMEACASAHFWGRRLLADGRRVLLINPWFVKPFVKGSKNDAADAEGIYEAAFRPTMRFVPVKSTEQQDLQSLHRARERVVCARTALINHMRGLLGEYGVILPQGAWRFLKQAQDAIAAAELSELTRDLFGDLLVELRALDLQLDKLDQQLVRICRTNEACRRLSKLRGVGLVIATALVAAVDDGRHFRSGRELAAWIGLVPRQYTTGGKPRLGGIGRRANHYLRRQMIHGARAVMFRLTKHEDRRSQWLKGSRRGEALIGRLSRSPIRRQGSPGPCSPVRRTI

SEQ ID NO: 443063 - protein, 369 aa, unidentified
MSNCITVGCDLHEKSMLLKIAEGRGRAQTRVFQNDSAGRKAMIAYLRKRSAASGAKIVFAYEASCQGFGLYDEVTDVGFECYVLAPTRIARSANHRRNKTDEKDADRILEILRGHVLAGNELPAVWVPDMQTREDREIVRARLDLSDKRISLKAQIKMLLKRSGLRKPPGIGKKWTNGYRAWLKCLTGSETVSYGARVGLKTLLRQLEFVESEIEILQREVENLSQTERYFEYVKAMCKEKGVGVLTAMVFLTEVGDLNRFSNRRQMGAYLGLIPSSDESGESADRKGHITHQGPHRVRKALCQAVWSRVRTDEEEKRVYQRIVKKNPKHKKIAVVASMRRLAIRLWHIGVRIKKEGAWLPENGVNAVA

SEQ ID NO: 443064 - protein, 386 aa, unidentified
MSQTTHQPSGPFYIGIDFHKHYSVFCVIDDRNTILERGRIDHKIPIGFELLIKRYPGCRVVFETTMNWHWLYEILEAHMNHKDIVLANAYKMRIIAEAQVKTDKVDAYMLAKFLKAELISTVHIPSKSTRQRKEVLRQRCFFVRQRTMLRNRIQRLLSAQHNLQLPQCSDLFGKKGISALGKLELPDPAGLLLRQQLEMLENLKARIAEDEAVLKKMLEASPELEFVKSIPGMGPILAAVVVSEVDDISRFASAQRFCGYAGLCPTTYSSGGKTHNGRLMRACNKWLRWAFVEAAWVSVGCSAYFGDYYKRKRALGKKANTAIIATARLMARICWQLLTEKRAYASFPPAQKLQGRPEEKPRASSGSVKEKKDFAMPNETFPSRSE

SEQ ID NO: 443065 - protein, 345 aa, unidentified
MLYVGLDFHKYFSFVTVMDGQGGILKRAKLHNHPDTLLCFFGQFSEEVIVAVEATWNWYWLQELFEDHGIPMKLVHPQRAKAIASARIKTDKIDSEILAHLLRTDLLPEAYISTKETRLLRERLRYRASLVRLRTQVRHKLHAIVAKNGLRLPNRNILSKKNLSYLREVSLADAFREAIDGYLRLAELLREEIERVSLTIASQAQQDPRALRLSGLYGIGSYLALLIVAEIGDITRFPRAKSLCAYAGIVPSLHSSGQSHYTGSITKQGSKWLRWALVEVAQHIHKKPPFDRFYQRVKSRRGPKIAKVAVARKLCKTIYHMLLEEENATIVRQTRGSHGLLRPQI

SEQ ID NO: 443066 - protein, 389 aa, unidentified
MLLEHPSDGLAAIRTHIGAIFVSLELSRKNWLVTSLSPGKGEKMSRHSVTAGDVAGLLALFAELGRKAEARTGQSYPIITIQEAGLDGFWLHRVLQQNGIESHVVDPASIAVPRRRKRAKTDKIDGETLLRTLLAYKRGEPRVCAMVVAPSPEEEDRRRLCRERQALIAERIRHVNRIKGLLFAQGISDYKPLRRDRRARLEALRTGDGRELPSHLKAQIGRELDLIELLLKQITSVEAERDAQLAAARKPASEAAAPNPVTMLLALKGMGANFAAVLWSEAFYRQFANRRQVAAYAGLAATPWQSGGIRHEQGVSKAGNPRLRTTMVQVAWLWIGHQPNSALTRWFKERSPQGRKRAIVALARKLLVALWKYVTQGVVIEGAVMKTAA

SEQ ID NO: 443067 - protein, 378 aa, unidentified
MSKIRFVGLDVHADTIAVAVAEQGGEVRPLGVIPNRLEVIRKLVARLGPAKNLKVCYEAGPTGYVLYWQLTALGVACEVIAPSLVPVKAGDRVKTDRRDAVKLARSYRAGDLTPVWVPDATHEALRDLVRAREDARQDQMRARHRLNKFLLRHGQRPPADVKKSWTQKYMTWIKEQVHFEQPALEATLLDYVHEVEHMAERIQRLEKAITEAIEKLPPAMRAVVEALQALRGVAQITAVTVVAELGTLSRFPSPRQLMGYSGLTSSEYSSGNRIQRGSISKTGNAHLRRVIIESAWSYQHRPWVGGFLRKRQQGLEQEVKDIAWKAQWRLHTRYKKLAAANKKKPQIVAAVGRELLGFIWAIAVKTERKFPPCTARAA

SEQ ID NO: 443068 - protein, 401 aa, unidentified
MIFAGIDIGKNEHGFAVVKDRDNNFIKPRIIRNDINGFSHVLEVLQACSPDKAEVIIGMESTGHFWRPAAHFFESHGYRVDVFNPIISAKREQQSVRGSKSDKSSAVAIAKVVRDDDYSVCNNRDANSEKLKSLIRQREKLAEYRTDLKNRIIAYWDVMFPELQSHLDTSKLTTLTGLKLLENYACADDIARAHLTKLKNILGRIADDEKIKAIRETAKQSVGLKSKESHQAALSNVRLFRCLHTEIKTIEKQIGNLEDDQTALLRTIPGFGLLASACFQSEIGNLELFRKKSAKPLNRRILAFAGAEPRIRTSGKFTGRIKMSKRGSKHFREALFMAAESARKGSPYFKSIYEKQKNKGKHHRVAISHVIRKMVDIATAMLKNNEKFSIEKLSNFGVETL

SEQ ID NO: 443069 - protein, 454 aa, unidentified
MAKSKRSSSMPSIHPNAAGIDIGSRFHVAAVPVDRTEEPVRTFKSFTGDLHELARWLKSYRIETIAMESTSVYWIPAFEILESYGFEVFLVNAREAKNVPGRKTDINDAQWLQKLHQFGLLRASFQPSENIAELRAYLRQRERLNDYKASHIQHMQKAMMQMNIQLHHVVSTITGRTGIEIVRAIVAGQHNPDELVKFRDIRCHNSVEVMKAALTGNYKAEHLFALTQALELFDIYTEKIENCDRIIALVLQRLQQLTPDPQQTMPKAKHQESNKNAPSFDVRAALFNFMGKDLTQIHGLGPYLALKLVAECGTDMSRWPTSKHFTSWLCLAPGNKISGGKVLSSRTRRTASRATALLRLAATAIGKSDTALGAFYRRLASRTGKAKAVTATARKIATLFYNTLKYGMDYVDKGADYYETQYRDRVLINLRRRADAFGFTLQEKVLPGIAVEVS

SEQ ID NO: 443070 - protein, 392 aa, unidentified
MRKANDMSRCLAAFNQDSTLVAVIELGLKSWLVAGIVPGIERHPLKKLKPNEGALLALLYRWCDEARTAGHPIKRVCVAFEAGRDGFWLARWLRSRKIEAYVIHPTSVPVSREHRRAKTDRLDTGRLMRAFIGWLRGETDHCSMCAIPTFEEEDDKRPNREHQHLVGERTRIINRLKSCMARLGIRDFNPASRKAPERIAKLRTPEGVPIPPNTLDELEHDMAHLRFIDDQIDEVEKARLARLRKEPNKKSHAMVLLLARVRGLGIETADMLTHEVFLRTLRDRRAVPRYAGLTGAPDESGERRQEKGLARTGNARARRGMIELAWRFLVYQKESALAKWYWTKTADRRKDIRKIMIVALARKLLIALWQMVTTGEIPEGVELHPQDYRLRA

SEQ ID NO: 443071 - protein, 343 aa, unidentified
MEQYVGLDVSLKETSICVVDGDGAIVCESTVLSEPEAIAEFVKAKAPRAKRIGLETGPTSTWLWHELKALDLPVICIDARHAKAVLSMQINKSDRNDAVGLARIMQCGWYKEVLVKRLSCHEVRAALNSRALLVKIKRDLENQIRGLLKNLGLRIGKAGGNVFSRRAEELIADQSLLREAVRPLLAVRERVRREIADLHRKLLAMAREDKDSRRSMTVPGIGPITALTFHAVIDEPARFRRSRSVGAYVGLTSRRFASGEIDWSGRISKCGDRMLRSYLFEAAGVLLTRAPRWCKLKAWGHKLWKRIGFKKAKIAVARKLAVILHRMWCDKTDFIWSSKEVAV

SEQ ID NO: 443072 - protein, 450 aa, unidentified
MSKGSGVSRGDKRRNARLAELRRLVPRENAIAGIDLAEDNQAVVVTDHDSKVLARRSPRCKAWQLGEVLDWAVAKAQARGFASVTVACEPTGSRWMHVQQACAERGLNFVCVQTLVTHNAREAEDCTRDKSGQKDAVLIARLTAELRCYRPEVIEEDWAVLRYLGQRRDALVTEAIRCRQQITDRLALAWPAALGTAAAPLDSVTFLACLQVVAGRCDGDPGKLRGYGLAEFTQLVRGVLPRWGGQRACHRIVAAFHAALGDSHGAVPARRRGALKLAGHALADLRRARELQARVGAEMIAQLHVLGIADVLATIDGLSLEVAACILAETGDPARFGSSRALVKHAGVAPCDNSSGNSAGQARISRRGRPVLRKAAWRAAWAMIHGANPVLAAKYAHLTSRDTGKLAKGQAHIACMATLLRWIYSVITSRTAWDRRIAAGTISHTAAMAA

SEQ ID NO: 443073 - protein, 419 aa, unidentified
MPQIWAGIDAGKGHHHCVVIDADGVKLYSARVANDEAALLELIAAVTDLAAGAECLWAIDLSSGGAALILGLLAAHNLPVVYIPGHAVHHAAKAYRGDGKTDAKDAAIIADQARMRRDLQLLSVADETRIELRALTAHRKDLVCDRTRAINRLRGHLLEYFPALERAFNYSASRASLLLLTGYATPDAIRKMGESRLARWLRAQGCRTAVATATSAVAAAKSQQSVLPGQAIAAELARRLALDVIALESRIAEIDQLIAARVDTSRAAELLRSMPGFGPLLAAEFLASTGADLSIYVSADRLAGVAGLAPAPRDSGKISSNHHRPRRYDRRLLRACYLAAMVSVQQKTESRVFYDRKRAEGKSHKQAILALARRRIDVIWAMFRDDRPYSPPAPPGKKVSLTMSSTVPLHASSGAALAG

SEQ ID NO: 443074 - protein, 327 aa, unidentified
MKEHSTIGSTDSQSDGLLWGVDVASDKLDLACYGVAEVLSFENSAEGIEQLLVEVRRQPTALIVLEATGGYEIPLLATLAEAGLPVVRINPRQLRAFATAVGELAKTDTIDARMIARFAHDVRPAVRPLPTEDQRFFADLAARRRQLVALRTAELNRRRQTHQPALLASIDAILMVLEEQIVLLDKQLAELIATDEHWQQRDQILQSVPGVAAVTSHVLLADLPELGQLEHKQIAKLVGLAPLNRDSGKLRGRRAILAGRRTVRTALYMAALSASRFNPPIRRFYQRLRQAGKPFKVAIAACMRKLLTVLNAMIRDNTTWRKPAMNT

SEQ ID NO: 443075 - protein, 483 aa, unidentified
MKPQQLKKNKKASCRPTPSNWHAMNRKQRREMTRKIQSEDLSLEVVHPDAAGIDIGNESHYVAVPPTRDSQPVRRFGCTTWELKEMAVWLKQCAIRTIALQSTGVYWIAVYDILEQAGFEVYLVNANQTKNLPGRKSDVQESQWLMKLHTYGLLRNSFRPSQEIRTMRTYWRQRNDLVRAAGRHIQRMQKALTQMNIQLANVLSDVSGMTGQAIVKAILAGERDPYQLAVLRNWRVKASEEEIARSLEGNWQEDLLFVLQQEQDGYEFCQKQMAECDQRLQQYLQQQDDRSHGASLPEEKRKERLRKKKKGNAPQFDLRAELFRMTGTDLTQIDGIDVTTTMTILSEAGWDMSKWKTEHHFVSWLRLCPDNRISGDKIIGKGRLPTNNRVTNALRMAASTLRLSNTYLGAQFRRLRTKLGAPVAIKAMAAKLARLVYRMLRYGMQFVDRGADFYDAQHRKLQINYLKRKAANLGFQIIEAPAA

SEQ ID NO: 443076 - protein, 463 aa, unidentified
MANEDRQETSEGREAIDEGFPVLREDVAGIDVGSAEHWVCAPARTGRGRDVAVFAATTPGVEQLAAWLKDRGVTSVALESTGVYWVAPHEILEAHGFTVVLANTRQLGRVPGRTKTDRRDCEWIQRLHSCGLLRGAFRPVEQICMLRTLVRDKATLVAERADWVRRMQKALDQMNVRVHRAVAEVDGATGMAILRAIVAGERDPHQLARLRDYRCRKSEAQIADQLTGHWRDDHLFSLQQALKMYDTLSDMIAAYEREILQRLETMTSVDQRDAQAPPPASATKARAIKSRGEDPLRHALYRMSGVDLTTIDAVGVETVNVVLSEYGPNLSQFSTEKQFVSHVGLAPHTPKSGGKVVKKRTKKPGSASARVGAALRMAATSLRHSQTALGAYYRQVARRLGADVAVFATARKLAQHIYRLLRWGQPYMDEGAVAYDQRYQLARANRLAATAKALGYKLIPVEA

SEQ ID NO: 443077 - protein, 335 aa, unidentified
MKKYLFHVGIDISKLKLDVVVLNVENPLKAEHFIVENSKKGIKEIFKHLIKRKYSLNTVLFCCENTGVYTYPLTISLSENNLDYWVVPAIEIKRSKGIVRGKNDKSDAKDIALYSLRNIDKLNLCTVPEKEIQILKLLYTEREKLMKALRLFESSSEAVAFIDKDVYKAISSTNLKTIAAIKKALKEIERKLNEVILGNQDLKEKFNLVKSVPGIGKQSAIYLLIATKGFTSFKSWRKFACYSGVAPFEYSSGSSIKGRTKVNHFADKKMKSLLQMCALTAIKYDPQLKEYYNKKKEEGKNTMLVLNNIRCKLISRVFSVINRKTPFINTYKFAG

SEQ ID NO: 443078 - protein, 391 aa, unidentified
MPRYIGLDLHARYIHGCEWKPEAAAGHREQHFRFPNTPDGWAQVLPQLDRTCWVALEVTGSAFEVHDMLSSHVDRVLLANPVDLKRLGSGRHTDRVDAARLAKMLAVGTLPTVWVPPQPMREVRRLLYYRARLASNRRRAINQAKVVLRRAGHLLSRGSDVRRWLTPERLATLPASDRVILLSTCRQITALEAEIEGIEGEIARRVADVPAIHVLLTITGVGLISAAATWAILGEPHRFPRAKQVARYAGFDPSIVQSGEQHRQGRISKAGSPLLRTLLVEAAHSLARWDSGPLGQFYARKAQEVGPRKAIIALARKLLIVAWRMLQTGEVYRAARTTTVTRKQREVQTKIRIQMGSMLLEQDLTCATRQLRARAKRLEGLMNRRRTLVSA

SEQ ID NO: 443079 - protein, 455 aa, unidentified
MSKKHVSLEVVNPHAAGIDIGSRSHWVAVGQDAEDVKEFGVYTEDHLSMCKWLKKHKVTTIAMESTGTYWQNLFSYLTANDFDVILVNGRQTKNIKGKKTDIKDCQWIQKLHTLGLLSSSFLPDSMTDIIRTYSRHRQNVIRQVGATVQKMQKYLRLMNLRLDVVVNDIVGLTGQKIISAFINGEKSGTELAKYRHYNCRKPESEIAKALQYNGREDYFFALKQEWNTYLHLQKQIDETDCEINKLLSKIIENDENKNSHEAKKKDYKRKNKNSIRNTDMNAIGIKYFEGVDLMAIEGVNDATIMALISEIGLLGIKKFKTAKEFTAWLRLAPNNKISGGKVLSHHLPKGSNRVKIALRNSANVIGNLKEGHLNNFFRRINYKKGRATAVSATARKLAVIIWNMLYHNQQYQPPTDYLFLDQKRKLKLVSRIRKNITKFDLKPEDVGFLQHADYQ

SEQ ID NO: 443080 - protein, 340 aa, unidentified
MYPFYLGIDLHLKRTYVVLMDTEGEVIDERRLLNAEMAGYLEQHVPQETYAVLEATRNWPFMYDMLSEHVERVELSHPKEVKAIANAAVKTDQIDAGVLAHLARLNYLPTAYAAPKEVRDLRLYTRHRSWLIRHRTQAKNRLQAVLASYNLASPVSDLFGVKGREFLEEVLEELRPAARRVITDNLTLIDRLDEQVKELEQEIPLTKEQAHTIQILMSMPGVGKVTAMTILAEIGHISRFNSSKALCNWAGLTPRVRKSDAIVRHGKISKQGSAHLRSAMGQTAMVASRFSSRWYQVYERLAKRCGKRGARVAIAHRLLTVIYYMLKREQPYEKDYHRGA

SEQ ID NO: 443081 - protein, 449 aa, unidentified
MPQAILAVGVDPAKRLHRAVAVLFPDEVVLDVELPNAFDAVANLDHRLCELANQHGADLVYGLEDHRRYGRLFCQVLTERGRDVRVVNPLWTNRQRAFYGQDKDDAIDGRSIAAVVLRRHHQLPLASDFGEVAQAIREAERSLQDLSEARTQLGNRLHLQLNDTYTAAYEEYFGKLRSPLALRFFRRFPLPQDLVGHNVEMLASLLLDLAGGKVGPHKGGNRLIAMRSKAQAILETSGAMRALPRTLALELKAELIRQLCDELLANHDRIIRLERMLREQLLPATKQTITTITGISTILAATIIGETGSITRFRSPAAFAVYNGTAPARNSTGGRDRHKARRDCNHRLKRAFYLAARAAVLHDPLAKAYHQSCKSRGLSYVEALKRVARRMSDLVYALLKSGKAYDRSIIEHAIERRREQAAHATRSHAKQSLVHSRPRNLTRRSRSSK

SEQ ID NO: 443082 - protein, 368 aa, unidentified
MQDSMFIGLDVHKATISVAVADGKRGGEVRSWGVIPNRADEVKKVVEKLAGRARELHFCYEAGPCGYGLHRQLVEHGHDCVVAPSLIPVKTGDRVKTDRRDALMLARLHRAGELTAVWVPDEAHEAMRDLIRARATAVRVVGKARQHLQGFLLRHGRIYSGKRGWTQAYRRWLTTLRFQHPAQQIVFQDYVHAIADAEARIERLTKQIKDLAPSWSLWPVVEAVQAMRGVAFIVAVTVVAEVGDFQRFDNSRKLMAYLGLTPSEHSSGSSVRKGGITKAGSGLARRALIEGAWTYRMQARVSRKLHDRIENVPQAVRDIAWKGQLRMCQRYRQLTAAGKAKVVVTTAIAREMAGFIWAIARATAGTPA

SEQ ID NO: 443083 - protein, 343 aa, unidentified
MIIVTLGIDLGKNSCTVVGLDESGAVVPRRRMRRQTILGFAAKLPTCVIAMEACCGAHYLGRLLASQGHMVRLMSPEYVRPYVKAQKNDDRDAEAIAEAASRPTMRFVELKSEAQLDVQTLHRVRSRLVATRKTLLNQLRALLLERGHIFPQGRRKLEQALEILIDDPAFAVSPRMRQLVIDMRAEWQDLDQRIATLNAEFVALVRSDAAARRLITIPGIGVLNATALVAAVGDASPFLQGRDLSAWLGLVPKQHTTGGKPKLLGISKRGNKYLRMLFIHGARAAMPTLAKSASPLGAWLRGLLARTHRNIAIVALANKLARIAWAMLTREGDFALNHGAVAG

SEQ ID NO: 443084 - protein, 330 aa, unidentified
MVTNRTLKREKFLAWCAELPAGCLVAMEACSGAHHWCRQLRARGLDARMIAGQFVAPYRIQGKNGKNDANDAAAVCEAASRPHMNFVLPKTLTQQGMLCVHRLREALKQERSGCINRIRGLLAEFGIVLPQTPAVLRRHLSEIVEDASNDIASMARLVLQRAQEHWQELEAHIQWCDERVAAHRKDDEQVQRAAELKGVGALTASAVVATVGDFKQFKNGAQFGAWLGLTPKQNSSGGKNNLGNITKRGSNYLRTLLIQGAKAAVFVGKRNDDPISQWVQRLRERGGWQKAVVALANKNARILWAVMTGNKRYDAHHVSAPPVGAMPAAT

SEQ ID NO: 443085 - protein, 366 aa, unidentified
MKKTSTVRVNGNMIFKGHKLTIGVDLGDRWSNYCVLDEAGEILLEQKLATTPEGMKQTFERIPRSLIAMETGTHSPWVSRLLKELGHEVLVAHAQRVELISKSTRKDDRHDARTLARLARIDPELLGPVQHRSAKAQIHLTVIRARAALVSARTALVNAARGLVKSYGQRLPKCGTQQVSRELGAKLNAELREVLEPLLKEIESLNERIKEYDERMEKIAKESYPHVELLKQVKGVGTQIALTYVLTLDDPHRFPKSREVGCFLGLRPGRRDSGQSQPQMHISKEGDPYLRTMLVQGAHYILGPFGEDSDLRRWGLRLAERGGKSAKKRTVVAVARKLAVLLHRLWVSAEVYEPLRNSQKAMRAVA

SEQ ID NO: 443086 - protein, 380 aa, unidentified
MSEITRVLAAVALIVRVGVDLAKRVIQVHAVNAAGHKVVAKAMKREQFIEWCVQLPAGCLVAMEACSGAHYWGRKLSGMGLDARLIAASFVTPYRMEGKRGKNDATDAAAICEAASRPSMRFVPIKSCEQQGVMSLHCTREGYKKARTACINQIRGVLAEFGLVFNKSPKALRAELADVIEDASNEIDGRTRLVLQEAFEHWRELDEHLRWSDKEVGRHVRSCPKAKRAAKINGIGELSASAMTAAVGDFKQFKAGHQLGAWLGIVPSQNSSGGKASLGRITKRGDDYLRTLMIQGAKSVVMSAGKRDDPTSQWLVQLTARVGWQKACVAMANKNCRILWAVMTREEGYDPRHVSEKPPAKKTIKERMDGVVPPRAASSA

SEQ ID NO: 443087 - protein, 410 aa, unidentified
MTETNIAQNAPILVAIDIAKARHEVLIAIPDKKRRRRLTVLNQLDDFNRLVASLASYGRPVRVAFEATGNYHRALAYHLAAAGFEMKLVSSVSLARTREALHNSWDKNDPKDAQVILHMMEIGNTQFYHDPLACGTNDIQELSKTHDIVSRSKTELWHRIMTHYLPLYFPEADRFHRSSRGDWFFAFLERYPSPHLISAMDRDAFIAEAWNVVGRKVAKERLLTDIYETAKTSVGLPVGRESDAVGMFRLVLGEGRGLIAQRSQIEARAVELLKDLPDYQLLTSIPGIGPINALTILAEAGDLRRFNHHRQFLKFCGMDLATIQSGTFRGQTKLSKYGNARLRRTLWMAGQVAILQKTNSFRDKFERYIAKDRHNSHLRRKAYTAIAAKMARTVHGIIKHGEPYRPFFEG

SEQ ID NO: 443088 - protein, 416 aa, unidentified
MNAVGIDVSSRKSTVAVLRPLGEVVCLPFDVTHDIAGLASLAEKLKALDGETRVMMEHTGRYYEAVEKALHEAGLFVCAVNPLLIKEYGANSLRRVKTDKADAVKIARYALDNWADLRDFTPMDAIRYDLKTLNRQFQLASKQRTASANNLIALLEQSFPGIRKCFDSPVRSDGTQKWVDFAHSFWHVDCVRKQPFAAFCERYRKWCKRHAYLFKQSNAEEVYALAKRAVVLTPKSKVVKVLVQEAANQLISISRSVEVYRAEMDRLAAMLPEYPVVMAMYGVGKSYGPQLMAEIGDVRRFERKQALVAFAGIDPMPNQSGDKNVRSNKSSKRGSPYLRKTLFNVIRTYLQCAPQDEPVFQFLNRKQAEGKPFYVYMLAAANKFLRRYYAKLRDYFASLDTLQPVDPIPTILKATL

SEQ ID NO: 443089 - protein, 423 aa, unidentified
MDGLLRREVPATSLVVAVDPGKALNRVWLTTGERGLVGEPVSLPVLRDGVDELERLIAESGVDGMPVIGLEATGALHRAWAAEIERRWPGSLRLFAPSETTAARAQLGSRRLKTDDRDCAAMVWLLRQGAGRPAQPDAVEALLGTVRHRRQLVDARKRLQQRLHDQLNALCPGLSAPGSQGRALRIESPTGQAVLACAAAFAGRAPSARSLLARSPGRMTPATAAFWAQRWKRLLAPPPDAELRATRLGRDLRRWQDLQADITSCEQQLSVLLAQTPGQVLTSLPGVAVVRAAAFSAFTLPIERWPTAEHLYSATGLAPAAYQSSTINRRGKIARTGLAEHRDALMGIAWGLSQRAPAFAARDAQLQARGMRPMQARVALARHACRLCWRLLNSQQPYDDRRYARARRAGGDGDSAMPLDGAT

SEQ ID NO: 443090 - protein, 419 aa, unidentified
MSFKILKNNCCGLDVHKTWIFACIGITDSNKRTVYKQARFSSFTKGLQELCHWLAKYDCTDVCMESTGKYWIPVFNILEKNNIWVTLSHPKYTKPQKGNKTDRKDAKWICDLYMCGMVKPSFIPPADIRELRDLVRYRFKLTCMITGEKNRAHNCLTVSNLKLDDVFSDIFGRSSRSITEQILQHPGETFDVAPFVHGRCKTPIEEIQAAVDGAVSKEQAVKLRQCLNHIDELEMHKSEIEREIFRLSDKYEDILTLIRTVPGFDKNPMTAIQVLSEIGGDMSVFPTAKNLVSWAGCCPHNDQSNHKIKSTRISRAGSYFKPVLVQVANALIKSKKHPEFSTRYRRIKARRGHKKAIIAICRMILTAIWHILTDLKPYTPEGFLDSRPVNKEKVLTTSQALNLLKQRGYFIKDDPLSVS

SEQ ID NO: 443091 - protein, 342 aa, unidentified
MTMTITTIGLDLAKSVFQAHGVDETGGTVLVKKLHRKQMLPFFSKLPPCLIGVEACGTAHYWARTLAAMGHEVRLIPPSYVKAYVKRGKSDALDAEAICEAVQRPTMRFVPTKTVEQQGILMAHRARSLLVRQRTMAANALRAHLAEFGLIANPGLGHLATLAEQALSDRDALPPYARTALETLIRQIVALTGEIATLDQQIASWHAENEASRRLATIPGLGIITATAIAATVTDPDQFNSGRQFAAWLGLTPQQHSTGGKTQLGGISKQGDRYLRRLLVIGATAVMRHTKDKTTPMANWIRKLMEKKPFRVVSVALANKLARIAWVVLTRKEAYRPYAPVA

SEQ ID NO: 443092 - protein, 401 aa, unidentified
MQENQQHDSVDVFVGVDVGKGHHHAVALDRTGKRLYNKALPNDEAKLRALITELKAHGQLLFVVDQPATIGALPVAVARDEGVLVAYLPGLAMRRIADLHAGEAKTDARDAAILAEAARSMPHTLRSLRLTDEPLAELTMLCGFDDDLAAQITQTSNRIRGLLTQIHPALERVLGPRLDHPAVLDLLERYPSPAELAATSEKTLANRLTKLAPRMGKGLAAEIVQALGEQAVVVPGTQAATIVMPRLAQQLAALRKQRDEVASEVERLVHAHPLWPVLTSMPGVGVRTAARLLTEVAHKAFASAAHLAAYAGLAPVTRRSGSSIRGEHPSRRGNKVLKRALFLSAFAALRDPVSRGYYARKVQQGKRHNQALIALARRRCDVLFAMLRDGTLYQPKSAPNA

SEQ ID NO: 443093 - protein, 320 aa, unidentified
MKIQYYIGVDMAKQTFYACFDEQSKPALFSNTHSGIAHFFKQCHTYFNDSIPQHIAIGVESTGIYHLLLCMQAKVAGYVIKLINPIITHKYTQLQLRSPKTDPLDARLIRLCLVNGEGYYFQDTPAILLLKQLIREREFLAQLKRTIAIRHSVVIFKEQAIGSSLYSAQTALLPIIISELKQLQKKLTQYQPHEQRLLQTIPGVGPLTAATFISEIQDITRFTYSAQLIAFIGIDPKVHQSGISIDKYRHISKRGNALLRTRLYNATSVAVLKPNQFQCFFQKKISAGKAYRVALVATMHKLARVIYAVWKHNSAYQEPT

SEQ ID NO: 443094 - protein, 344 aa, unidentified
MTQYAALDVSQEMTAVCLVDEAGQVIGEAKLPTCPDAIATWLGKRAPNLVRVGLETGPMAVWLWNELHAQGVPIVCLDARHAHGALKVRPNKTDRNDASGLAQIVRTGWFKQVQIKTRSNYEVRALLTARDVLVRIRVKMENEIRGLLRTFGVLFGKATGGFSRRADDIVAGELDVSPTMKRLVEAIVQARAAVLDQIKGLDRQLIATAKVNPIARLFMTAPGVGVITALSVASAFDNAERFKRSSSAGAYLGLTPRRYESGEVSRNGRISKHESTLTRKHLYEAATTLLTRTVRFSTLKAWGLRLAKVSGFKKARVAVARKLAVVLHAMWKSNTEFRWSEAAT

SEQ ID NO: 443095 - protein, 342 aa, unidentified
MNITKTVVGVDTAKRVFQLHWVDMETGEIVSKQIKRAGFLEHFANRAPCLIGMEACGGAQHWARRLIEMGHQVKLMPGKAVKAFVSGNKNDVADARAIWLAAQQPGVKAVAVKTKAQQAVLALHRMRQQLVKFRTMQSNGLRGLLSEYGEVMAVGRAALDRAMSDVLARLSDRLPAVLIDTLREQWDMLGKLDKQIAEIEQRLSAWMKQDKACKTIAEIPGVGLLTATAAVATMGDPKAFKSGREFAAWLGVVPGQMGTGGRVRLLGISKRGDTYLRTLLIHGARAVLMHAKEPSAWVQELSKRRPPNVVTVALANKMARTIWTLLAHDRPYEKGYVSIKPA

SEQ ID NO: 443096 - protein, 390 aa, unidentified
MIYVGIDVAKDKHDCCILGPDTEELFQVFTIRNNSDGYGELFHKIESVSKDKSQIKIGLEATGHYSYNILGSLLDHGYHTFVINPLHTNLYRKGQSLRKTKTDKVDARSIAEMLVTDKTLKPYTGTSYHSEELKSLTRYRFELVKERAKMKTSVSRLVNILFPELESLVPTLHMNSVYRLLQELPGAYFIASSNLTHLKALLADASKGRYGREKAIVIRETAKSSIGSLMPAKSMELRQTIRRIDTLTSDIKEVEQSIQKIMDECGSPITTIPGIKYRMGAMILAEIGDFTRFSNADQVLAYAGLSPSTYQSGQLISSYARMEKRGSKYLRYALFNAAIYASVWDERFRLYLSKKRAEGKHYYVAISHVVKKLVRTIFRMEITHTSYQPL

SEQ ID NO: 443097 - protein, 397 aa, unidentified
MYIVGIDIAKRKHEAAVIDGEGAVIIKPFSFTNNCSGYNRLLAMLAKAKLPLDEVSFAMEATGHYWLALFTRLQKEGFRVQVINPVQTNSIRSFYIRQAKTDPRDALLIAEVIRFGHFSESTLHPENIYELRELCRGRHAIVSMQADVKRKVVALLDQVFPEYETAFTNMFSDTSMAILQTCPTPKELSEMPLEEFCHLIEVPSRKRFRTEKAQELQALARNSFGFAMAGGVFSTMIRLYAKHLDFLKQQVREMDRKIAEIMDTLDTPITTITGIGPTLGAYILSEIGDISRFSSAAKLAAYAGIDPTMRQSGEYNGVRNRMSKRGSPYLRHAIWLAASSAVLHDPALKLYFQKKRDEGKPYMASVGHACRKMVSIIYAVMRDNKAYTPCIPNEISA

SEQ ID NO: 443098 - protein, 400 aa, unidentified
MLSIGIDVSKGKSTVCGMKPGGEIVYAPFEVQHTREGMSELVSLLHNSCEEVRAVLESTGSYHCPVVAALLENGIFVSVVNSLRMKRFCSQSIRKVKTDRIDAMQIALYGLAYWQELQPTRLPEDTYRELQLLARQYYQMTSMLIKAKVDFNAICDQVLPGMQELMSDHAGRHKLSDFVLRYCHTTHILEMGETRFRKDYCKWAEKKGYRNCERMAALIFATAQNGIPVLPNAPSTQIVITEAIRVLHTVEASRDAILTQMQALAKTLPEYSLVREMPCIGDTLAPRLIAEIGDVRRFHSKRALIAYAGIDAPPYQSGKFCANNRHISKRGNRYLRKTGYEVMQSYVMHKPANDPIFTFIEKKRGEGKSGKLAMVAGLNKFLRVYYGKVTELYRSLPAIE

SEQ ID NO: 443099 - protein, 417 aa, unidentified
MTDVVEWFVGIDWASQSHQVCLVDAQGKGREQRAVAHDGAGIGELCDWLIARTGAQAEAIAVAIETPHGPVVEALLERGFQVYAINPKQLDRFRDRFTVAGAKDDRRDAQVLADSLRTDRHAFRRLSVDEPVIVELREWSRMTDDLQRERSRLANRVREQLWRYYPQMLELADDLAADWFLDLWHQAPTPAKAARLRETTVERVLKAHRIRRWQAPEVLRILRQKPLSVAPGVAAAATAHIAAVAARLKLANQQLKAAHRKLDQLCDQLIAPAENAPGQYGEQRDVVILRSMPGLGRITLAALLAEAWQPLCRRDYHALRPLSGVAPVTRRSGKSCIVVRRYACNKRLENALYHWARVATQHDETSRRRYAELRGRGHSHGRALRTVADRLLSVACTLLERQTLFDPDYQPRETAAA

SEQ ID NO: 443100 - protein, 408 aa, unidentified
MKRYYIGVDWGDRLHQVYVGDREGKKVRELKVTETVEGLAEIGRWLDEQRAESIELWAAIEKPAGRIVDFLLDHGVEVYTVNPKAVDRVRDRYRMSGSKSDAFDAYVLAEFLRTDHAHLKALRPSSDKAQELKMLCRDQRRVVRHKSRLLNQLTTTLKEYYARPLEVFDDMETEVALDFLTRYPTPAHLGALKRKEFSRFATKQHHLSKQRCEQLWEKLQQPQLGVPEHVVRAKAQLVEVLIDQLRASIKAVKTYQHKVESFFASSPAAALAKTLPGGKSGTLVAAIWAELGDATGRWESSGHLQAEAGAVPVTKASGKSHVVHFRFACNKHLRYSMYWFSFVSLNNSEWAKLYYRSQRDKGHNHPQALRALGAKWLKIIFVMWRDHKPYDEKFHLANIALQKMRQAA

SEQ ID NO: 443101 - protein, 355 aa, unidentified
MTAVCSPGSSPLTPASKYVHVAVAIDDLGTLLGHRSFAADSGGYIELIDWALGFGGKVTFGIEGTGSYGAGLASAVRRRDIGAIEVVRTDRRDRRLRGKSDTIDAENAARAVLAGQATAIPKSADGAVEMIRQVKVAKDIAVKARTAAMISLKQVIVNSPPELREELQPLSKMALINRCAGLRPGQVTTVLASSKYTLRAIARRWQQLNAEIAGHEKVLTQLTAQAAPELSAAFAVGPDTAAEMLIVAGDNPDRVRSEPAFAKLCGVAPIPASSGMTTRHRLNRGGHRQANAALYRVVIVRMQHHEPTKAYVARRTAEGKTKAEIIRCLKRLLAREIWAAMRPLRQPLSPLTKAA

SEQ ID NO: 443102 - protein, 391 aa, unidentified
MSHIIYCGVDFHARQQTCCLTTEDGELAIHELKHHDKAAVRAFYSQFPQPLIVGLEASGYSPWFEQLLEELGHQVWLGDATEIRRRARCRQKNDCRDAELLWELLVRNEFPRIHRPAAASREILRMLRYRHKLVKIRTIAKNSLQALAIQSGLARRSSLFSRAGLAQLQQTAMSVAMQAQREQWLQLLEVLNARITVAEQWLATATAADPRVRRLRTHPGIGLLTAVGLVHTLEPVSRFANQRKVVAYVGLEPREYSSGEKKRYLGISKAGSRVLRFLLVEAAQTASRGDAELKRFYQRLQHRCKRPKAKVAVARKLLIRSYILLRDGIDYAEFRRRAVAARPAREDAGPTGPHSLIERPASAAAETPSLPQSSNRGSEDFGIRAPRNHEA

SEQ ID NO: 443103 - protein, 424 aa, unidentified
MPTARMEEVIMEVLYPNCAALDVHKDSVVACSRGMVGSKVEREVRTFATTTSGLLALSEWLSSRGATHIAMEATGVYWRPVWNILSDGEFQLILANAKHVRNVPGRKTDVNDATWLADLLAHGLIRASFVPDMATQEQRGLLRTRKQLSRERTSHVQRLQRTLEEANIKLDSAISDVIGTSGRAMIEAMIAGETDPAKLASLAHPRMKVAPAKLAEALRGRVTKHHRFLLRLHLKQIDALDNAIAEIDKEVEVNLDPFRPFIPILTSMPGIAELSARVILAEIGTDMGRFATARHLISWSGLCPKNDESAGKRRSTRMRKGAPWLKTTLIQCAWAATRKKGSYLQAQFHRLRARRGAKKAIGAVAASILPAAYHMLKTGTLYQDLGADHFQRRSKPDQVQRLLQKLSNFGYEVTVKPLAHTVSG

SEQ ID NO: 443104 - protein, 341 aa, unidentified
MIITTLGIDLGKTVCSIAGLDAAGTVVFRRRVRRWRLLKVLSEIPACTVAMEACCGAHHIARACEKMGHQARLMPAHYVKPYVKVRKNDDRDAEAIAEASTRPTMSFVAVKSEAQLDLQAIHRQRERLIGQRTQLINQLRAFLMDRGVLVAKGRRAFEKALSSFLAERRDVVSPSMLALLTDSTEELRLLNERIGRIDQSLAEVAKTDEVVLRLTEIPGIGPLTASALVAAIGDGRAFARGRDLSAWLGLVPRQISTGGKAKLIGISKRGNTYLRKLFIHGARAVLHLVRDRSAPMLEWVDALKKRRHVNVTAVALANKLARIAWAVVANNTRYDRRMAAG

SEQ ID NO: 443105 - protein, 368 aa, unidentified
MSEAITSFVGLDVHHDSIAVGSAPEGREEPRFLGTVVPQWAALSKTLSRLGPPKALKIVYEAGPCGYTLARQLRAHGYACEVIAPAKIARAPGDRIKTDRRDALLLARAARAGELVSVTIPDERDEALRDLSRSREDAVRARLKARQQLKALLLRHGHRYSGKSSWTQAHERYLAQVSFSQPAQDIAFAEYRSAVRDAHERVERLTDSLRSQLEAWRMRPVVEALMSLRGIELIAAMTLVAEVGDYTRFARPRELMGFLGLIPSEHTSGTHRRQGRITKTGNSHARRVLVEAAWNYRFPARISPALEARQQGQPKVVREIAWRAQLRLAQRYRKLAARQLPFNKICIAIARELSGFVWDIACQVKPST

SEQ ID NO: 443106 - protein, 410 aa, unidentified
MELLHRRCCGLDVHKETVVACLRLVSDGKVTTEVRTFQTTTAHLLRLSEWLAANECTHVAMEASGVYWKPVWHILDDGEFELVLANAAHVKNVPGRKTDVNDAMWLAELLAHGLIRASFVPDTQTQEMRNLLRTRKQLVREQSSHVQRVQKTLEDANIKLDSVLSDLMGKSGRAMIEAMIAGETNPAKLASLAHPRAKASHEEFREALRGRVTKHHRFLLRLHLNQIDALNAAMATLDTQVEANLGPFRTAVELIMSIPGIKNLGANVIASEIGIDMSRFPSDAHLISWAGICPRNDESAGKRRSNRLRKGAPWLKTTLVQCAWAAVKKKNSYLQAQFYRIKARRGPKKAIMAVAASILTAIYHMLKDGTMYKDLGSNHFDRRSTDKQKNRLIKRLADLGYAVQIKPLSA

SEQ ID NO: 443107 - protein, 363 aa, unidentified
MTLYIGVDFHPHQQTAAWCETLTGETETVDLPHEVERVRQFYTSLPGPAIVGIEASVRAEWFENMLKEIGHKLLVGNPVLIRKRATSRHKNDRRDAELILELLMRGEFPALWRRPRESNEVLEIVRLRSNMVRQRTQVYNRLQCLAHNAGLRKGRMKTDAYQLVIKQLDLGEADSLARTHLFCLLESLTRQIGELEIWLKKRAVADASVQLLLTQKGVGYLTALTTVHTLGDVSRFARLSKEVASFAGLDPLEKSSAGKVRFGRVSKAGSPLLRFQLGQAAQLAARSDVKLKSFYRRLSKKKPKAVAKTAAARRLLVKLSIMLRDGITADEFDRRGRTVDDARRSPRSANDRRVIGPVNLLEH

SEQ ID NO: 443108 - protein, 343 aa, unidentified
MHTITTIGLDIAKSVFQVHGTDAGGQVVIRRQLKRRAVLTFFQKLPPCLVGIEACASSHHWSRELQALGHAVRLMPPAYVKPYIKRQKNDMVDAEAICEAVTRANMRFVPTKTPEQQSCLMLHRTRHLFIRQQTAVINSIRSHLGELGSVAPVGRKGVMELLQVVADPSDKRVPEIARACLAALGNQLLSLKEQILEFDRMIMAWHRSNEPSKRLRYISGVGPMLATALVASVADPKTFRSGRNFSAWIGLVPKQHSSGGKDRLGSISKQGDRYLRSLFVAGALSVIRYAKIHGTKHRPWLTALLARKPTKVAAIALANKLARMAWAMMARGERYRNPVALAA

SEQ ID NO: 443109 - protein, 366 aa, unidentified
MKKHNSNKQITTKGDQKETFAFYIGIDLGDKMSDVCVLDQVGEVSEQFRLRTKGTDFQTYFTAIPRSRVAVEAGAQSRWVAELVERCGHQVYVSNTRKVPYIHESDDKDDPGDAYKLAELVHLKPRLLHPIQHRSQEAQADLSWIRAREALVESRTQIINTIRGMSKAFGERLRKCSVESFTAQRAEQIPATIRAAMVPLLEMIDQLNEQIGYYDQMIHHVARTRYPKYWLLDQVGGVGVHTALAFMLTIGNPERFAKSRAVGCFLGMRPRKKDSGERKPQLGITKAGDGYLRKTLVNCAHYILGPHGPDSDLRRFGLRVCERGARNAKKRAIVAVARKLAVLLHHLWVTGEVYEPLRNSRKATAA

SEQ ID NO: 443110 - protein, 408 aa, unidentified
MTTAEYDLYVGIDWATQEHRVVVLDAARRPLHDRVVRQDGAALEAFATWLVALVAGRSDAIAVALEVPRGALIDSLLARGGHVCAINPKQLDRFRDRYTVAGAKDDRRDAHVLAAALATDRPAFRPLAPEDARIIELRELSRLDEDLGQEVRRLTNRLREQLSRFYPQILQRSPAAAEPWIWALLQRAPTPTAAGSVPRAGLQRLLTRYRIRRVSADDVRATLRAPALPVAAGTGPAAQLQVGMLVARLQLVQDQRATCGARLEALLEALAESQEHRDVPILRSLPGVGSRVSATMLAEASRLLAGRDYHALRAHSGLAPVTKQSGKRALVMMRYACNRRLRDAAHYWGQSAVRHDPHSAAHYQRLRARGHSHGRALRGVVDRLLRVLMAMLKTQTLYDATRRPALSA

SEQ ID NO: 443111 - protein, 340 aa, unidentified
MDVVIGIDPHKATHTAVALGEGELELARLEVRSGCSQLERLLDWATPFPQRRWAIEGAEGLGFLLAQQLVAADELVVDVPATLAAGTRLLGNGRTNKNDPNDALSVAVTALRHRELRTVTTAGYSELLRLLAKRHIDLSNQRTRLVARLHALATELSPGGIGKKLNSTDAAKFLAAITPTDAVAQLRWDLIAELADDIARIEAQTKQSARRLRDAVAVSGSTVTDIYGIGPIIAAMLIGNTGDISRFANRDRYAAYNGTAPVEFSSGGRVVHRVSERGNRTLNHALHLAAMCQLRQPRSDGRTYFDRRVAEGKTNKEAIRALKRQISNIVYRHLVADAAH

SEQ ID NO: 443112 - protein, 400 aa, unidentified
MHLTANISVPQKNFIAIDLHSDNAVICVRRNALNKAGKLVGKNIWCGRVSIRDGLDNFIKALLPYCQDFDHVAVVESTYNWYCLADVFEERGWLLRIADPSTVSQANLKASDDRTDAQYLAERLRVGSLKHYLPLNYSSRALRDLCRYRMAMVQDCASLKIKLINLYRNQLSINLRVADLLDRCRNHMQSNYRFDPDILEEFKDPNIRFRVAFEVSRIDMLEEMIEECNAEIQKQCKDQELVKLCKTIPGCGPVLSAVICTEIGTMQRFKSAGDFVSYCRLCSTSKLSNGKSKGLGNAKNGNAYLSWAFTEVAQYASRNPVIREILQRLLRKYGGLRVKAIRTLAAKIARVTFYVLKNKQPFNAAKCFGIELTKSIKKKLTHKTLREDAAVVLPTVAGQA

SEQ ID NO: 443113 - protein, 356 aa, unidentified
MRSQPREPSVEKLIRIGVDTSKSVFQLHGVNESENVVLRRKLQRRQMLSFFAQLEPTKVGMEACGGSHYWACELRALGHEVVLLAPQYAKMYVKRGKNDAADAEAICEAMSRPTMRFVGVKTADQQAALMLAGLREHLVRRRTQLTNTIRGHAAEFGLVTAKGLCRIEPLLARIAADGSVPLLAKDVFGTFAQELRELEVRLAKVEAELMAWHRQNEPSQRLAKIPGVGPIIASMLVMKAPDPGAFRSARHFAAWIGLTPKDHSTAGKTRLGVITRAGDETLRSLLVVGATAVVKQVTRGKGSPSPWLLELVRRKPAKLAAVALANKMARIAWKLMVSGESYQPRRAASSVLNKVA

SEQ ID NO: 443114 - protein, 344 aa, unidentified
MITIGIDPHKRSVTAVALDAHSQPLGSLRVAMTSRAVVQLLAWVGPWSARRWAVEGATGLGHTVAQQLVGAGEVVVDVPAKLAARARLLGAGSARKTDRTDAASVAAVALAHRRLRQVAVEDHTMALRLLTDRRDDLVAERTRTLSRLHVLLRDLHPGGAERNLTAQRAAALLGRLRPVARVDRERKRIARELLADVRRLDQRITAATKAIGEAVTSSGTTLTEVFGLGPVLAAKILGHAGDLTRFPDRDHFASYTGTAPIEASSGDVRRHRLNRGGNRQLNTALHLIAVCQIRDPSPGQVYYQRKLRQAKTPEEARRALKRKLSNVVYRHLVADHRHRHAPPS

SEQ ID NO: 443115 - protein, 355 aa, unidentified
MSERQSISLRYHQEGTMYFSGIDQHKRDCVITTYDASGQRVKQQRVPNEPSRLRAYFASLPGPHRAVVESTGFWYWLADLLDDLGVDLVLAHAPRLKAIAAAKVKTDHLDADLLAQLLRADFIPAAHRIGRDARGPRDLMRLRLRLVERRSQVRNSIERIREKFAVTRRDQLDPWYHQQVILHDEQITLLTQQIQDLEATLHPVLLPTADVQRLLWIPGIGKVNAFTIWTEIDGIARFPSEKQFLSYGRLVPGAANSGGKTRARPGAKQGNRYLKIAFSHASVRAIQYYPVIKAFYQRQRRRKPVVVARAIVAAELGRIVYQVLTKQEDFNGTFRGVPLERTKTRQWPRSTSPAA

SEQ ID NO: 443116 - protein, 348 aa, unidentified
MALTIVEDTRAVTGGVDTHADMHVAAALDPIGGLLGVEEFPATTAGYARLLGWLGGFGTVGLVGIEGTGSYGAGLARHVTASGIRVVEVDRSDRQDRRRQGKSDPLDAVSAARAAQSGRARGAPKGRDGAVEAIRALMVAKRSARSERVQTNGQARSLIVTGPDDLRTRFARHTAAALVSELAALRPRPGATVGYATRIALRELGRRAEFLDGQLGRLDELIVPMVTARAPALLALHGVGPDTAALLLIAAGDHPHRLRSEAAWAHLCAAAPIPASSGKRTRHRLNPGGNREANHALWRIVITRMSTHAPTRAYVERRTTEGLPEKEIIRCLKRYVAREVYRHLRPAG

SEQ ID NO: 443117 - protein, 335 aa, unidentified
MQVYGIDLSKEKFDVNFIDLKGKMKNLEVKNGVVSISKFLSSVAEDVILCAEYTGVYGDLLLYMCNRMEIPIALVPGYSVKHSLGLVKGKSDPLDSKRIREYGERFADKLVLSKYDEEHIAELKQLYVLRAQLVRTRKSLLTSEKGHKYLPMQNLSAHYHLKNVLTSLDIEIQSVENEIETVIKANQELNENYELVTNITGIGPIIATDLIIKTGNFNDIDTYRKAASYAGVCPFPNASGKMLGKSKTSPFADKKLKSLLYMGARSAVKHNKEYRLYYQKKELEGKPHYLIMNNVSNKLLRTIYSIVKNKTIYSQDYVCLDPRERNINRSAKKVA

SEQ ID NO: 443118 - protein, 339 aa, unidentified
MRLYAAIDLHSNNNVLVILDERDQIVYERRLRNELPLVLVELAPYRESVQAIAVESTFNWYWLVDGLMEAGYTVKLVNTAAVKTYDGLKYTGDEHDARHLAHLLRLGVLPTGYIYPKEERAVRDLLRKRAQMVRCRTAQILSIQNLVSRNSGKGISTTEIRHLDGEAVGRVCGGNSARALALQSNLAVMRCLDEQIRGLERVVLKEARLKPEFKKLLSVDGIGDILSMTIMYETGTLERFAKVGEFASYARCVSSSRWSNGKKKGTGNRKNGNKYLAWAFIEAAVYAVRYNERIRRFHQRKKARTNGIVALKAVAHKLARACYHVMKGQEPFEEARAFA

SEQ ID NO: 443119 - protein, 354 aa, unidentified
MRYLGMDVHAKETVWCLLEAQGEVVREGHTPTTAAALAALMQELSQEGEVLAGQEVGTLTYLVHDAVTAAGTTLLSFNAQHLRMIAASRKKTDRRDAYWIAKALQSGMYPHPVYVPTGEIRELRALLSQRRVLHADYNRWRHRARTYLRAGGYPVAAGVAALRAALAPGNAGTCGAPPSLTEALALCQRQEAALRAELAQVDAVVRARTQTVDAIQRLMTVPGVGPLTATMIYAWVGDVRRFPHAKQLAAYAGLVPTVRQSGTTVQLGHITKQGAPALRTTLVQAAHVLLSRCRGAEALPLQAIGLRIRGTRGRRKIAVVAVARHLLRIAYYLLRDGTTYDAQRLGTTMPHPAS

SEQ ID NO: 443120 - protein, 391 aa, unidentified
MVCVGIDVAKDKHDCCILDSDGTIRADCITIPNNMDGFKQLLQTIRDCTKKSDKIKVGLEATGHYSYNILGFLLDNGLPTYVINPLHTNLYRKSLSLRKTKTDRVDARTIATMLLSDVDLKSYTDIAYHNEELKSLTRYRFDKVQECAKLKQSVSRLATILFPELEGLVSSIHGTSIYALLSEYPGAKQISEVHLTKLTNLLTTASKGRYGKEKAIQIREAARASIGSVMPAKSLELKHTIKLIQELASEIDEIEDSIQKIIDELNPPILSIPGMGVNSAAVILAEIGDFSNFSSPDKILAYAGCSPSTYQSGKLTNCYAHMEKRGSRYLRHALYNATKYVCYWNPVFAEYLAKKRAEGKHYNVALSHAMKKLVRLIYALQKSGKTYLTAA

SEQ ID NO: 443121 - protein, 397 aa, unidentified
MPAVWAGIDSGKRTHHCVVIDQSGLVLLSRRVTNDEAELLELIGAVVDLADGDQVCWATDLNAGGAALLITLLVGHGQRLLYIPGRVVHHAAATYRGDGKTDAKDARIIADQARMRTDLQPVRGADQISVDLRMLTSRRTDLICDRVRAINRLRGTLLEYFPALERAFDYSKSKAALTLLSEYQTPDRLRRVGVTRLAAWLRKRGCRNSAAVATAAVDAAHQQSTTLPAEPIGSALVARLASEITAIDGDLVELDAQLTDRFRQHEAAEILLSLPGFGPVLAATFLANIGGNLDGFDTVDRLAAVAGLAPVPYDSGRISGNLHRPRRFNRRLLRTCYLAALSSLKNSPSSRAFYDRKREEGKTHKQALIALARRRINVTWAMLRDHTPYQEPVLAVA

SEQ ID NO: 443122 - protein, 400 aa, unidentified
MLSIGIDVSKGKSTVCGMKPGGEIVYAPFEVQHTREGMSELVSLLHNSGEEVRAVLESTGSYHCPVVAALLENGIFVSVVNSLRMKRFCSQSIRKVKTDRIDAMQIALYGLAYWQELQPTRLPEDTYRELQLLARQYYQMTSILIKAKVDFNAICDQVLPGMQELMSDHAGRHKLSDFVLRYRHTTHILEMGETRFRKDYCKWAEKKGYRNHERMAALIFATAQNGIPVLPNAPSTQIVITEAIRVLHTVEASRDAILTQMQALAKTLPEYSLVREMPCIGDTLAPRLIAEIGDVRRFHSKRALIAYAGIDAPPYQSGKFCANNRHISKRGNRYLRKTGYEVMQSYVMHKPANDPIFTFIEKKRGEGKSGKLAMVAGLNKFLRVYYGKVTELYRSLPAIE

SEQ ID NO: 443123 - protein, 357 aa, unidentified
MKSKIKQLDFTGETIFTALDVHKKNWCVTIGSKEFELEHYTQNPNAKELARHLKKNYPGAKYIVAYEAGFCGFGIQRSLKEEGIDCIVVNAADIPTSNKEKRRKQDKIDSRKIYKRLAAGDLEGIYVPQTEMEHARSLVRERSRIVSDQTRCKNRIWSLLMFSSLSVDTDKPKQYWSRKFVESLKQLDCGSKPLRGALDLAIEEYILIRQLLATATKKVRELSNDKLFAEIQQFLRSIPGIGLINAMVIHTEIQFICRFKTLDHLCSYAGIVPDSDSSGDKERITGITHRSNNYLREAIIESSWVIVRKDPAMLMLYKRYCARMDENKAIIKIARHLLNRIRYVWEKQTEYEIGIAA

SEQ ID NO: 443124 - protein, 397 aa, unidentified
MYIVGIDIAKRKHEAAVIDGEGTVIIKPFSFTNNCSGYNRLLAMLAKAKLPLDEVSFAMEATGHYWLALFTRLQKEGFRVQVINPVQTNSIRSFYIRQAKTDPRDALLIAEVIRFGHFSESTLHPENIYELRELCRGRHAIVSMQADVKRKVVALLDQVFPEYETAFTNLFGDTSMAILQTCPTPKELSEMPLEELCHLIEVSSHKRFRMAKAQELQVLARNSFGFAMAGDVFSTMIRLYAKHLDFLKQQVREMDRKIAEIMETLDTPITTITGIGPTLGAYILSEIGDISRFSSAAKLAAYAGIDPTMRQSGEYNGVRNRMSKRGSPYLRHAIWLAASSAVLHDPALKLYFQKKRDEGKPYMASVGHACRKMVSIIYAVMRDNKAYTPYIPNEISA

SEQ ID NO: 443125 - protein, 354 aa, unidentified
MSQTPNTAITVIGIDIGKNSFHVVGHDARGAIVLRQKWSRGQVEARLANIPPCLIGMEACVGAHHLSRKLASLGHDARLMPAKYVRPYSKGQKNDFNDAEAIAEAVQRPTMKFVATKTAEQLDLQALHRVRERLVSQRTGIINQIRAFMLERGIAVRQGIGFLRTELPTILATRTDALSPRMLRVIEELAGDWRRLDQRIDGLSGEIEALARQNATCSRLMTVPGIGPIISSAMVAAIGTGDVFSKGRDFGAWLGLVPKQISTGDRTILGKISRRGNRYLRVLFVQAAWVVLVRIKNWERYGLKSWIEAAKRRLHHNVLAIALANKLARIAWAVLAKGRAFELTRTDDTGVRPA

SEQ ID NO: 443126 - protein, 339 aa, unidentified
MAIVGGFDLHRRQITFDCMDTGTGELKRGRIMPVDRLTLRGWLERFKGLEGDFALEAGTGWRFVVEELTRAGLRAHLADPGETAALRGSKRRAKTDRADARHETQLLLEGRLPEAWIPPAGVLEIRTLGRLYMDLCEERRAWCQRIKAQLFHQGCPAVPGSIGPRTRGVFVDLELTPAGRRSVDTALRMVDALDVEIRQLRRDLARFARRHPGCRGLLSLYGIGPLTAALIWAEMGDTRRFSSSRQAVRHTGIDVTVYSTDGKRVSGYLSRQGPPVLRWALYEAAKCGAKTGSPDHDYYIAVRDRLGSKRATLSLARKIARRAHHVLRALGDGAWVEAA

SEQ ID NO: 443127 - protein, 349 aa, unidentified
MCSGPHEDNPGRRRQEVREYATRVPALLELADWLRSQSVQLVAMEATSSYWKPLFYLLEAEGFACWLLNAKHVKNVPGRPKTDRLDAVWLAKVVERGMCRPSLVHPKPIRHLRDLTRYRRSLIRERTREKQRLEQLLEDAQIKLSSVISDIFGVSGRQMLQALIAGQRNPKALAQLARASMRSKIATLEEALTGHFDDHHGFLCQLMLERIDATTAKIDQVTAQIDQVIAPYAHQVAQLDAICGVGVVAAQELIAEIGVQMGRFATAAHLVSWAKFAPIDHQSAGTKKRGATGRGNPWLAGTLGEIGLFASSCGWVRSQVGQQSGRSWRSGSSCCGSRGRGACWPAPAS

SEQ ID NO: 443128 - protein, 385 aa, unidentified
MAKPDDLSKPAVALDHDSTLVCVIEMSGTSWLVAATVPGVDRRPLQKLPVNPARLLEQVERWRKEAARAGRPITRTVVAYESGRDGFWLARLLHGHGIEVYVIHASSVAVSREQRRAKTDRLDTEMLMRALLGWLRGEPGHCRMVAIPTVAQEDARRPGRERDALVTERTRLTNTIKAELALWGIQGFKPGLKKAAEHLEALRTVEGEPLPPNTLARLHRLLERRRLVGEQIKAIERDVAQAVERDPSGPNALVLLLAQIKGIGLETAQMLVHEVLSRNLRDRRAVARYAGLTGTPDESGSKRRDKGISKAGNPRVRCGMIQLAWRFLMFQPDSALARWYKERTAGARGSVRKTLIVALARKLLVALWSYAADGVVPEGVVLKTA

SEQ ID NO: 443129 - protein, 371 aa, unidentified
MGKHRLAFVAFDSAKNKHAVAIADSGRGAEVRYLGEIDNSPDAVRKLVAKLTRQYERLHFCYEAGPTGYGLHRQLTELGHVCDVVAPTMIPKRSGDRVKTNRRDSVALVKLLRAGELRAIWVPDSVHEAVRDLTRARATAMVDLKTKRQQLLSFLLRHGRGFPDGRNWTKTYERWLAKQTFAHPAQQIVFQDQLEAITTAQARLAALEQQLREIVPTWTMAPVVAAYQALRGVSFLVAITFVAEVGDVRRFATPQQLMAFLGLVPSERTTGDTIRRGSITKTGNHRARRVLIEGAWTYRFSARVSETLRTRLKDLPSSVRAIAWKAQVRLCARYRRLIARGKKTPVVTTAIARELSAFLWAIGQQVAPQTR

SEQ ID NO: 443130 - protein, 408 aa, unidentified
MKTLHKRCAGLDVHKAEVVACLRVVTNRKVGREVRRFPTTTQGLLALAEWLENAGCTHVAMEATGVYWKPVWHILEGHFVLILANAAHVKNVPGRKSDVNDATWLGDLLAHGLIRSSFVPPPEIQELRDLTRTRRQLTREIVQHVQRIQAVLEEANIKLCSVITDIMGASGRRMLKAMIAGETDAEKLAALGHERLGCTRAELVEVLTGCVREHHRFLLGQHLRTIEQLEDSVAAFDARIEAALSPFHDIVERLKEVPGLGATATETVIAEIGTDMSPFPTAGHLLSWAGFVPRLDESAGKRRSTRIRKGAPWLKPVLVQAAWGAARKKNSYFQAQFLRLKARHGAKKAAIAVAASILTTVYHMLRDGTCYQDLGPEYFTRRNPAKAAARLANRIRNLGYHVEIRAAA

SEQ ID NO: 443131 - protein, 361 aa, unidentified
MPTIADAGPPVTGGVDTHAEVHVAGVADQTGRVLGAKEFPATAQGYAAALAWMRGHGDLVKVGVEGTGSYGAGLARYLAAQGIEVAEVMRPNRQARRRRGKSDAADAIAAALAALNGEASGQPKSGDGAVESIRALQVARRGAVKARTQAGNQLRDLIITAPQLLREKLAALPSPERVKLTARFRPGALTCPAEAAKAAMATVARRHQALTAEIAQLDTALEALLEHAAPPGFLARTGVGARVAAALLVTTGDNPGRLRTEASFAALCGASPVDASSGKQRRHRLNRGGDRQANSALWRIVFTRIACDPRTQAYVARRTAEGKTTREIIRCLKRYVAREVYKVLTARPATQPAPATPRQIQ

SEQ ID NO: 443132 - protein, 356 aa, unidentified
MIAMKYYTSTTEFNCGIDLHARQMYVCVMDRTGKKLVHTNIRNNDFAYFLKLVAPYRHDLTVCAECMFGWYWLADACQAANIHFVLAHALYLKAIHGGKNKNDRIDSEKICHLLRTNLIPPGYVYPAAKRPLRALLRQRLLYVWNRSELLSRIQSHQLAHNRPTTRQTPYNREPWEKHLLAQEPDPVRQLALQNDLALIGHYDNQLASLEKELLQLTKQTAGRDFTLLKTTPGIGDYLGLTILHEIGDIARFPSVKDFLSYCRLVKGTVASAGKIKGLRGAKLGNPYLRWAFGEAAIIAKRDALLGPLAQRLETRLNNKFKANTVLAIKLARAVYFMLKTKTVFDPERLVAALSNN

SEQ ID NO: 443133 - protein, 346 aa, unidentified
MKINRIGVDLAKNVFQLHGVDQKGKAVWKRKLSRDKWLKVLFEAAEPGTVIGMEACAGAHHWSRVLIEKGYKVKIIPPQFVKPFVKSNKNDANDARAICEAMVRPDMHPVKVKTIEQQDIQAVHRIRNEIKSHRTAKANQIRGLVTEYGLVAPKELSSLRKAIPEWLEDADNDLTMFFRQLLHGLWEDLFSLDKRMSELDKQVAVIAQENPVANRLQKLRGVGPLIATALVATMGDAKQYRKGRDMAAAIGLTPRQHSSGGKDRLLGISKRGDAYLRCLLVHGARSAMRTAKDKDDRLSRWITNLQDRRHANIAACAMANKMARMAWVIMSKGVDYDPDFNLAMAN

SEQ ID NO: 443134 - protein, 443 aa, unidentified
MVPPDVGLHMEKDVQQFLLLISSAVTALTKEKMMEVIVSRGCGLDVHQSVIAACLMIGKPGQRARKQIRSFSAMKSDLEALRDWLKAERCTHVAMESTGVYWKPVYNILEGHFEITVANARHIKAVPGRKTDVKDAEWVADLLRHGLLRPSYVPSREFRQLRDLTRYRCKLVGARSAERNRLIKLLESANIKLSSVASDVFGVSGRRMIKALQRGQSSPEEMAELAIGQLRKKLPQLVQALDGRLEAHHRQLLSMQMDRIERMERDLAQLDARLELKLNPYAHQIELLDSIAGIDWVVAATIIAELGIKMSQWPTVGHLASWAGLCPGQNESAGKRRNSRIRPGNPHLRAALVEAALAATRQKDCYFREKFYRLKAKRGHKRAVIAIARKLLVAVYYVLSKDTPYQELGAGYLDKLEPERLKLNLVRRLERLGYQVKLDPKRS

SEQ ID NO: 443135 - protein, 343 aa, unidentified
MERYVGLDVSQEQTSVCVVDSSGKTVWQGKCASTPEAIAATIRAQAPEVTRVGLESGPMSAWHWHELRKAGLPVVCLDARHAKAALALQLNKSDRNDARGLAQIVRTGWYREVAVKGMDSHLVRSLLTTRAQLVRMRVDLANQIRGVLKPFGLIAGKGGGQPFAERVRALVADGPLQDATEALLAAWQSVSEQVAVLSRRLVAIARQDGAVRRLMTAPGVGVLVALTYVSVVDTPERFAKSSSVGAYVGLTPRRYQSGEEDHTGHISRCGDKLLRTYLYEAAGIILHRVSRWSALKAWGTQLAKRTGTRKATVAVARKLSVILHRMLRDGSEFRWSTKEAQMA

SEQ ID NO: 443136 - protein, 340 aa, unidentified
MEKRYLGIDLHRNQFTCCLRLDSGRSYWKQWRLEELPQFVRKLRSSDEVAVEITGNTRLFYEAVRPHVERVVVVDTNQFHVISRSVKKTDDRDAALLALYLSKGLLPEVRMKDKQHAQVASLVQTRDSLVKLRTSLKNKINNMLSARGMNLRKEALSSEKKLEEIVNLPFDEVMQIELRIIVDQIRSLNHSIQKLDKTIADEGSKLEGHTSLMSIKGIGKTTSAILLSVIGDVRDFPDESRLASYFGIVPRVSNSNETEHSGKIHKRGSKLGRTALVQSALIAAKYNSYLKSFYLRVKARRGAGKAIIALARKFLGVIYHTLKNRWVFEDFPNFVLAETA

SEQ ID NO: 443137 - protein, 338 aa, unidentified
MPISYLGIDIAKGDFEIAFGNVDVALLTQDGKPKPKRFANAPEGFDQLQLWLKQNLVTELHACLEATGTYGDALARFLVAAGHRVSVVNPSAIRAFARTQLSRTKTDKADAVRIARFCQMHQPTAWTPPAEEVATLQALVRRLEALRQMYQMEKQRQEGAPPPVHAVHASVTAVLSVLEEQIAQVEEQIRDHVDRHPNLREQSDLLQSIPGIGAATAATLLCELGDWSRFASARSAAAYVGLVPRIHESGTSVRGRSALCKIGNGRLRKALYFPAMNAVRFNPVLQAMAARLAASGKSKMAILGAAMRRLVHLAFGVLKSGKPFDANIALPKANLTTT

SEQ ID NO: 443138 - protein, 386 aa, unidentified
MAIPEKIRIEQDTLPQPTLFLAFELGQDTWKLGFTIGMAQPPRERTIPAGALETLQQEITRAKQRFGLPEDARVVSCYEAGRDGFWLHRALVAHGVQNHVIDAASIEVNRRQRRAKTDRLDVRKLLTMLLRHSAGEQKVWSVVRVPSVEEEDRRQLHREMQTAKQDRTRVINRIKGLLAGHGVQLTLQGDVDAQLDQVQQWDGAPLPSALRTRLKRAWQQVGFLTAHIQTLEAERRALLRRREDPVIAQVRQLFTLRGIGVNSAWLYVMEFFAWRDFQTPKQVGALAGLTPTPYQSGQSRRELGIAKAGNRPIRAMAIEIAWAWRRFQPDSALSQWYERRFGAGSARLRKLGMVALARKLLIALWRFVKTGVLPEGAVLKTVAPRR

SEQ ID NO: 443139 - protein, 366 aa, unidentified
MLFKFYVGIDVSKLVLDIYIRENRAHKQFKNDLNGFGLLLQWLEKQVQQPLDSVLICFEHTGIYSLPLAIFLEKRQVSYSMIPALEIKRSMGITRGKNDLIDAKRIAEFAYRFKDKISVTKLPAEDIRKIHSLLTLRDRLVTSMQGYVVTQNEMLRAIQKEDFAELFSTYENMILTLKEEIKKLENAMKAIIQNNQQLRTSFELITTIKGIGFIVATHLIVYTYNFTRFDSWRKFACYSGIAPFDYQSGTSVRGKTQVSSIANQQVKRMLHLAATCAIHTDTELKEYYCRRQAEGKSKMAVINIVRNKLVARVFAVVKRGSPFVDIKNMLPNTLDKTSKLFFFSNPLLQKSRGCLKRKITSCKIDN

SEQ ID NO: 443140 - protein, 421 aa, unidentified
MPNIEIGVDFMVKENFIYVGIDLHKETHTAVMIDCYNQKLGEITFPNRPADFPKLVTKVKKCNTDAKEVVYGLENAYGYGRPLAVWLIDKGYFVKDVNTAISHRQAKHRGAMYRKSDSDDAEAIALATLNMLDKLPDAYPNDAYWSLGQLVHRRDNIMKQRTRLVNQLHEQLCIAYPSYKSFFNDISRPTALYFWEHYPSRKYLRGKSVEDLRKELVPVSHNRCSTKNCEKIMDAVASDKVKNNAYQDARDMVTLSIVSDLQHYDSQLAEVDKMLEQMYKMLGCTLTTIPGVNVITAVKILAEIGDIKRFSNANKLAQFAGIAPLHLSSSGKGKDVATKQGNRRLQATIYFLAIQMVQVSSKGTPRNPVVRAYYEKRKAEGKTSQQALICISRRLISIIYGMLKNGTEYRMPVVENAGENR

SEQ ID NO: 443141 - protein, 344 aa, unidentified
MQNSNVIGIDLAKNVIQVCTIDKHGELISNKGISPSKLKELLANSVPSIVAMEGCGSCHYWARLARKHGHDVRIISPRRVKAFLQGHKTDANDALAVAIASTQFGMVFSQIKEEEQQSLQTLETSRKFLDKELTALNNHIRAYLYEYGITMNKGQKSMRETIPIVLDALDTRLPSCLKNTLTLLWERYQLTVVQLKETEKYRAMLVKQLEPCKRLMALEGIGEVCASMLYASMGDGREFKNGRQASVYIGLTPKQHSSGGKTYMTGIDKKGGDKALRAALYQGALSVISRLPSEPRTVKEAWLLKLIERVGVKRACIALANKTVRTAWALLATGKSYEPVLLSR

SEQ ID NO: 443142 - protein, 406 aa, unidentified
MNMNAVGIDVSKRKSTVAILRPGGKVVVKPFDVPHLSADFQSLKRLIRELDGQTRIVMECTGRYHEPVARQLSQAGFFVSTVNPQIIHNFQGQDNPLRKVKTDKADSIKIARYTLDSWANLKQYSPMDELRSQLKTMNRQFDFYMKHKTAMKNNLIGLIDQTYPGANTYFDSPAREDGRQKWVDFIDTYWHVDCVRKMSLSAFTDHYQKWCSRRKYNFSNSKAEEIYGKAKELIPVLPKDTFTKRIIKQAIDQLNATSQTIEQLRALMNETASKLPEYPVVMAMKGVGPSLGPQLMAEIGDVTRFTHKGAITAFAGVDPGVNASGDYSQKSVRTSKRGSPVLRKALFQIMDVLIKTKPDDAVYWFMDKKRSEGKPYYVYMTAGANKFLRIYYGRVKEYLSSLPESE

SEQ ID NO: 443143 - protein, 359 aa, unidentified
MATMTWVGLDVHARSIEAAAVDVRSGELARRRFAGESGPVVAWLGGLAAPVSACYEAGPTGYGLYRAAREAGIAVEVVAPSKTPRGPGDRVKTDRKDAELLVRLLAAGALAPISVPSPAFEAARDLSRAREQVRGDLLRARHRLSKLLLRYGRLWDDGRSTWTVAHRRWLDGQRFAAEPTALAYHEGLAAIDELAARKAALDEQLARLAEDPGFWPVVARLRCFRGLDTLSAFVLHLEVHDWSRFRRPAELGAWLGLVPSLEQSGQSAHSGSITKTGSAYGRRILVEAAKHAGKPPRISTELARRQAGQPAAVKAIAGKAQGRLYRLSSHLRARGKPANVIAVAAARELSGFLWAAATQ

SEQ ID NO: 443144 - protein, 365 aa, unidentified
MTKIAYVGIDYHLNSLSIAVLIEGEKEPDQMVHLKNDDRFIRKFMSKISQNFQIKACYEASTNGYCFQRKMASWGYHCDVIAPSLIPKKPGDHRKNDFRDARALVQTYAHGMLSIVHLPSEEEESVRSLIRCRYAFKEISKRVKQQINSFLLGQDQHWKHSKWTHQHRTWLGKLKMSNSHLQQVLEEHLAHLDYLETRLRHLNEQIEEIAALPRYAPAIKKLCALKGIQTLTAMLLIAEITDFRRFPTPRALMAFLGLVPSEESSGEKRKGGAITKAGNQRCRTALIEAVQNYAKSSHISTRMKSALSQVDALTASIAMKCLKRLHKRFWALTLKGKLRPVAITAIARELVGFIWAMMQTEPSLA

SEQ ID NO: 443145 - protein, 346 aa, unidentified
MKILALDLGNFKSVACAYDTQSTKHEFETIVSSKEALRDLLLEQRPDRVVIEVCPLAGWVCDVVRELGIAMQVASTNERSWRWRNVKRKSDRRDGLKLAHKSALGDLKLVHIPERELRQWRALINYRQQLVRRQTKIKNHIRSLLVRENLAWVRGKKGWTVEALRTLEKWARPLSKVSKDELWRGELAVELEALVGMARLLRQVEKKLDRLGKANEQVQLLQSAAGVGPRLSEALVALIDDAGRFRNGKEVGPYLGLVPKQWQSGETDRLGRITHQGNRVVRALLVEASWAGLRYNRWMREIYERVRRGSKARRKIAIVAVARRLLIRCWAMLRDGTRWREIPCAA

SEQ ID NO: 443146 - protein, 420 aa, unidentified
MSPAEFAAYIGIDWADHKHYWQMAVPGLAQSEHGHLDHTPKAIDLWAAQLRARFSGSSLAICLEQSRGPLVYQLVKYDHLVLFPAHPATVASYRQAFFPSGSKGDPGDAALLLEILLRHPEHLRRLEPDTIETRLLQMLTEQRRRLVDERTRESNRLTAELKSYFPQPLDWLDNIDAPMSCAFLERWPTLEQLQRARPETVARFFREHHSRSEQRIQERLEAIREAVPAVHDPALLQAGVAATRGLVALLQTLNEQVQALDREIALLASQHPEAYLFAKLPGAGPALLPRLIVAFGTRRDRFASASELAAYSGIAPVTRQSGSSLSVHFRYACPQFLRQTFHEFAAHSKTNSIWARTFYDGQRNKGKRHHAAVRALAFKWIRVLFRCWKDRTPYDEARYLHALSGRHSTSVAPDHAEQLR

SEQ ID NO: 443147 - protein, 372 aa, unidentified
MNETTTVYVGLDVDAKFIFVAMQKPDGSKPIEWRIAHETRAIKKLAKRLLKASDGCGLHVCYEAGPTGYALQRMLQEAGVLCDVIAPSLIPKKPGERVKTDRRDAIKLVEYLKTGHLTVVHPPTEADESVRDLVRAREAGVEDRTRCRHRVGKFLLRQGVRWTIGRRAWTQVHRTWLHGLSFEQPESQLVFDSYMPALAQTEDRVEDLEAALESVAATDPYREPVGWLCCFRGIKTVTAMTIITELHGFERFHSPTQLMSYLGLTPSESTTGGRQHQGSITKAGNAHVRRVLVESAWHYRHKPITGRALRKRREGQPGWAVAIADKAQRRLCKRFAHLAGRGKELNKVTVAVGRELVGFIWVMLSHSKAETA

SEQ ID NO: 443148 - protein, 365 aa, unidentified
MKKISTVARKQVRNFSEQKLTIGLDLGDRSSWYCVLDEHGEVVLEEKLGTTPNAMKAGFGGMPRSRIALETGMHSPWVSRLLSELGHEVIVAHARNVRLIGESRKKDDRLDAQTLARLARIDPQLLCPVKHRSARAQADLTVIRARAGLVRARTALVNTARGLAKSYGERLRGCNVRNMNPEKAEVLSPELQKALEPLLAGIESLSEGIREYNEGIEQLAEQSYPQVARLKQVKGVGTLIALTFLLTLEDAHRFRKSRDVGCYLGLQPGRRNSGQSEPQMHISKEGDPYLRTLLVQGAHHILGPFGVDSDLRRWGLKLAERGGKSGKKRAIIAVARKLAVLLHRLWVSGEVYEPLRNQRAMPAAA

SEQ ID NO: 443149 - protein, 370 aa, unidentified
MKEFSKYVGLDVHKETIAVSVADAHGGELRYVGEIANTAEALDKLVQQLKKGGAELSFCYEAGPCGYGIHRQLTGKGLDCLVVAPSLIPRKAGDRVKTDRRDSLSLARLHRAGELTAVWVPDAAQEALRDLTRAREDMKHLQLLAKQRLLAFLLRHGKKHTGSASNWTQAHFRWMETVKFDEPVQQIVFQEYIDTVKAMTKRVGVFDEHVERTAAESVFWPVIEGLMALRGVSLLAATIIVAEIGDLRRFAGAPQLMAYLGVIPSEHSSGGTKKRGGITKTGNGHVRRVLVEAAWTYRFPARKTAHLQRRAERTSEEIQGIAWKAQTRLCSRYRTLQARGKLKVQTCTALARELAGFIWAIGQQLPQVQA

SEQ ID NO: 443150 - protein, 374 aa, unidentified
MATTRTAPRSQLTTKPVDLYMSFELGDKRWHISIGDDRRSVSRYSVEAGQTEEVADCIAKAAARSNGKARVHSCYEAGRDGWWLHRWLTSVGVDNIVVDPASIEVNRRARRAKTDRLDADKLLAMLIRHHGGERVWSVLREPSPSDEDARRVHRELQRLMHERIAHTNRISSLLVLHNLRPRIVIGGRDWPAWWSEHREQVPAALRAELEREAVRLKVVKEQVRAIEAERARELAEGEQPQVAQLARLRAIGAKGAWVLVKEVFGWRHFANRRELAGSLGLVPTPYASGGSQIEQGISKAGNRRVRALLVELAWSWLRLQPESALTQWFNRRFASAGKRMRRVGIVALARRLAIALWRYLRDGQIPTGAQLKAA

SEQ ID NO: 443151 - protein, 468 aa, unidentified
MSEVRLGIDVACRADHRASLADERGEFIWSSWKFRTTTTDLERLWAKIPAGASVTVILEATRNAWVPLSAWLQARGATVILVPPEQSADLRDYYNKHTKTDRLDSRVLARLPLLHPEGLRGIDNLGPAQSLRRAVRHRSSLVKRRSAASLRLDALVELLGPGWADSLGSATASKTALVILEKYADPRALKRLGRARLAALLIRSSAGLWRQDKADELLAMANETLALWSGGGIDFAELAHDIASEVRVLRRLDDEIAAADKRIAVLYDEADPEGIVASAPGLGPVLSAAILGNAGDFNRFANLAGVRSFTGFVPKIDQSGLVAGRKGITKAGDAGQRQALYMAADHARHIDPTLAQRYYRLVMVEGKHHNSALCSVSAVLITRIAACWRKGELYQLRDEDGEAITEAEGKAVCTDRFKIDPKVRAARRRNTPAKVLKNRVAGRGRKESAQKVAPATDPPKEEVSENVA

SEQ ID NO: 443152 - protein, 346 aa, unidentified
MNQIIRIGMDTSKHIFQLHGVDAAEQPVLRKRLRRKEMVTFFAGLAPTVIGIEACGASHYWARELEQLGHEVKLIAPQLVKPYVTRNKNDGRDAEALCEAMSRPRMRFVPVKTAEQQTALMLAGMRERLIARRTQLSNAIRGYAAEFGLAAARGLDKIEPLLARISQDESLPALARELFAIQGRDYAQLQVELKAIEVRLLAWHRADACCRRLAQIPGVGPIGATTLVMKTPDPRAFLSGRHFAAWIGLTPKDHSTGGKTRLGKITRAGDEVLRSLLVAGATAVIQQVRRGRGHPSRWLLALLKRKPPKLAAVALANKIARIAWKLMTTGEDYDGARMSGVSAFAA

SEQ ID NO: 443153 - protein, 450 aa, unidentified
MREPEEIQDEAYERVLDRVCAIDVGKASGKVCTRVPHPCRPGQRRTRVWDVEATTNAIVELGEYLAGEGIEKLTLESTSDYWRIWFYLLEAAGLDVQLVNAREVKNAPGRPKTDKLDSVWQAKMTERGMLRPSFVPPVEIRQLRDYTRMRVDLTRERTRYWQRLEKLLEDSLIKVSAVASTLDTKSVRDMLEALIAGERDPRVLAGLARGRMKAKHTALIEALTGRFDDHHGELTRMLLDQIDQLTVQIGRLTTRIEELIAAIPAAQGADADGTTGPSAGRGADAAVLPAIDRLDEITGIGREGAQAIIAEIGLDMGRFPTAGHLVSWAKLCPRTIQSGASSRSGRTGKGNPYLKAILGEAAAAAARTDTFLGERYRRIVKRRGKLKALVAVARSILVIIWQLLADPTARYHDLGPDYYARRTNTDRRARNHIRQLEALGFTVTLTQAAA

SEQ ID NO: 443154 - protein, 322 aa, unidentified
MSEPVLGVDIAKKKFDVALLINGKLRHKVFTNNQEGFEALLAWLHKQNVDPAHVCLEASSTYGDELATYMHDAGYPVSIVNPARIKGFAQSELLRTKNDKVDAGVIARFCHAMHPEPWTPLPPEIRTLQALVRRVDALLVMRTQELNRIETTHVTVTCSIREHIAYLDQEITKLKKQIAGHIKNDPHLRTKRDLLRSIPGIGEVTIAAILGELALFENCERVQKVVAYIGLAPKEFTSGSSIKGKARICKMGNARMRKALYMPSLVAMQYNPVIISFSQRLKERGKNGKVIVCAIMRKLVHLIFGILKSGKPFDPNYTQYYA

SEQ ID NO: 443155 - protein, 424 aa, unidentified
MKVTYQTCCGVDVHKSFLVATIVKTTGGIEPSYQKKRFSTFNNSILEFKQWLLDNHCHDVCMESTGKYWVPVFNLLEDKINVVIANPKWVKAVKGNKDDTKDSKWIGDLFRLGLVKGSYIPCKKVRILREYTRYRYKLVSCRSSEKNRYQNALTVCNVALDSVVSDIFGKSSMSIIDYLLEQSGASINHEEIASKLLRSLKSKEDAVIESVEGYQMTDAPKYRVRLVRAHMDYITAEINDVDKMIENMISSNPDFENAVQFLCTIPGVKRDSAITIISEIGTDMSQFSSSKRLCCWAGLTPGSNESAGKKKSVRITRAGVYLKPALVQCAHAAVKSDKSPYYKKKYESLVKRRGKKRAIIAIARMILTAIYQMLSTGEQWNPSDLYKIDMPVALVEKQKAKAIKQAKKLLQREGLLPPDEPLAS

SEQ ID NO: 443156 - protein, 386 aa, unidentified
MHKLDELSRCVTILNGDRTLIAVIEMSQLSWVVAGIVPGVERQPLKKLAVDEGALLKLLNRWRQEAERAGCRIERIAVAFEAGRDGFWLARWLRAHDIEAHVIHASSIAVSREHRRAKTDRLDTELLKRAFLGWLRGERNHCKMVAIPTMADEDAKRPHRERENLVGEQSRIINRMKATLVRLGIRGFNPKLKRAAERLEDLRMPEGESIPPNTLAELRRDMARRRLVSDQIRQIENARQQHLAQAADDEPHAMVRLLARVIGVGVETADMLVQEVLSRNIRDRRALARYGGLTGSPDESGTKRREKGLARSGNARVRRGMVQLAWRFLMFQKDSALARWFRARTENARGTRKLMIVALARKLLIALWRLVRDGVVPDGVILRPAQ

SEQ ID NO: 443157 - protein, 357 aa, unidentified
MKKNSKVTPAGQFTIGIDVSDRTSYYCILNQAGEVSGEGKLGSTPEAYRQQFGGMTRAVIALEAGTHSRWMSALLKECGHEVIVANPHRLRLLTTSDKKNDPQDARTLAEMAWAKPALLQPVRHRSAEAQRDLNLVRAWDLLVEARTKLINGVRCLVKGFGARIPKCASLQFSQQAHTHLPEEARPATAPLLEMIDELSERIYEYDAVLEHIAETRYPQAALLTQISGVGTLSAITFVLTIEDPHRFARSRDVGSFLGLRPKQQDSGDRSPQLRITKAGDQYLRKMLVSCAHYVIGPFGPDTDLRRWGLKLCERGGKNAKKRAVVAVARKLAVLLHRLWVTGEVYEPLRHQAKRIAA

SEQ ID NO: 443158 - protein, 401 aa, unidentified
MQESPNLQRWIGLDIHKAYFVAVGVNAEKHIVLGPHKIPNEQLETWIAKHLQPTDAVVMEMTTNTYLFYDTLVPHVGSVIAVHPPNVLLVTGVKVKTDKKAAQTLAQLHAVGLLTGVWIPPVEVRELRAVIAQRTKMVRLQTQAKNRLNSLLHRTHRERPAQPFKPEQKAWWEALPLSTIEKYIVQSDLETLTFAEKQIKAIEEVLCQEAAKDKRIPLLTQLPGIAMLTALTILAAIGPIERFEDAEHLVGYAGLGASVHDSGQTHATGHITKAGRRDLRGAMVDAANAAVRHHPYWKKEFERLEFRLGRSKAIVAIARRLLVAVWHILKNEAVDCHADATSVAASMLKLAYEIKVRNLPEGLSTRAFTRQQLDRLGIGQNLELLPWGSTNVKLPPSQLKT

SEQ ID NO: 443159 - protein, 350 aa, unidentified
MKYYAGLDVSVKETSVCIVDESGNVCREKKVISHPDDLVAVLSDPAFNFERVGLEAGPLSQWLFEGLAKAGFAVLCIETRHTKAFLKAQQPNKSDRNDARGIAHMMRVGLFKDVHVKTLTSQKRRALLTARKLLQEKAIAMENDMRGLLRNFGLKVGTIRAFKFDERIRELVEAASDLAEIIEPLLTARQKLREEFAKLDRKVRDEARLDPVCRQLMTVPGVGPIVALAYTSTIDIPSRFRHSRAVGAVLGLTPVLNQSGESSRIGHVSLCGDGMLRGLLYEAAQVLLIRVKKWSWLKAWAMNVAKRHGAKKAIVALARRLAVVLHRMWVDGSEFRWTRETRPTTTGATA

SEQ ID NO: 443160 - protein, 408 aa, unidentified
MELVHAVCCGLDVHKAIIIACLRIVMPDGMIKLEHKTFDTNMRGLTSLLEWLVENECRIAAMESTGVYWKPVYHVLSPVLTVWIANPAEVKQRRGKKTDKADAQWLAELLAHDLIQPSFVPPTEITALRDMVRTRTALVNNRTQAKNRVLGILEDTNIKLSSVASDTFGKSGRAMIDALIAGHRDPKALAQMAKGRLKLKIPQLELALEGSFTEHHAFLIQISLSVIDLLDKQIAELDKHVDSMVVPLRKELDVTNSVPGVSETASRAIIAEIGTDMKRFVTDTRLVAWACMCPGNNESAGKRKRGRTRKGNRYLRRMLVECAWAAGKTDTFLGRTFRRLQARIGGKKAAVAVGHKILVIIFHLLNEGTYYDDERYNRPSPKEEEKQKKHAVETLHRLGFDVTISLAG

SEQ ID NO: 443161 - protein, 371 aa, unidentified
MEHTRFVGLDIHKERISIAVAESGRSGAVEYLGEISNDPVAIGKLCARLERRGNALAFCYEAGPCGYGVHRQLTSLGHRCDVVAPSLIPHKSGDRVKTNRRDATMLARLHRAGELTPVWVPDADHEAMRDLIRLRSVVRQIVTRTRQHLQGFLLRHGRKHGRGTAWRMAYRRWLSTLAFGHPAQQIAFQDYTDAVMDAERRLKRVEEQISGLLPEWNLRPVVDALQAMRGIALINAVVLVAEVGDFTRFSNPRQLMAYFGLVPGERSSGETIRRGGITKTGNTHARRALVEGAWAYRMKARIGRHKVDRIEALPKIIRDIGWKAQVRLCTRYRRLRARGKTANVVNVAIAREMVGFIWSIACTVQSTPKTA

SEQ ID NO: 443162 - protein, 448 aa, unidentified
MSTRKPPRARKTKLPKHLQHINPHAAGIDVGSRSHFVAVPEGSCEQPVREFTSFTDDLHRMADWLIACGVTTVAMESTGIYWIPVFEVLESRGLEVRLVNARHVKNVPGRKSDVLDCQWLQRLHSYGLLEGAFRPAEQVCTLRAYVRQRMNLVRYASAHIQHMQKALAQMNLQLANVVSDISGVTGMRIIKAVLAGERDALVLARLRDPRCKNDESTIARSLQGNFRPEHLFSLKQAVDLYEFYQAQIAECDRQILDQLAGFDAADGSGSGPPASLEEALLRMSGVDLTRIDGIDTNSALKIIAEIGVDMSRWKSPKHFASWLGLCPGTKISGGKRLSAASKPVANRAAAALRMAAFTLLRSKSALGAYYRRQRSRLGAPKAITATAHKLARLVYSMLKHGTAYVDEGQKHYEERYRTHVVQNLKRKAKELGYALVETVEKQPQPETA

SEQ ID NO: 443163 - protein, 349 aa, unidentified
MRTKPLSEAYAYGIDIGKRVFHVVAVDRDGAVIQRAKFGRDTLHSFFDMAPKALIGMEACPGSQWLARKLIEMGHNARIIPARFVKPYVKSNKSDTIDAAAIAEAVTRPTMRFVQVRTPEQVDLQALHRIRDRLVAQRTGLMNQARAFCIEYGLAMRVGAGGFHADIRRHLANPVSDLTQNMQTLLNDLLDDLAYIENRVKILTVRIEAIANEDETIRRLLTIPGIGALGATALVAAAGDGRQFRKARDMAAWLGLVPAEHSTGGKQTLLGISKRGNGYVRRLIIHGARSCFLHLNRESHALGRWLNALEARTHRNKAVVALANKLTRIVWAILTRPGTVYLRSKGAAA

SEQ ID NO: 443164 - protein, 415 aa, unidentified
MQTLYQRVVGLDVHKDSIMACVRITDSRGQATEAIRTFGTMTEDLLALSDWLAENQVTHVAMESTGVLWKPVWNILEGGKWKMLLVNARELKQVPGRKSDVKDSQWIAQLLACGLLRSSFVPERGQRDLRDLTRHRAQLAGECTRCVNRIHKVLQDANIKLSSVATDVMGLSGRDMLDALVKGETDPAALAELARGKLRAKIPDLKRALCGKVTPHHQFMLEQLLDHLSHLEEQLGHFNQRIEEALRPFVDEATFERLDAIPGVNRETIENVVAEIGVNMEQFPTEGHLASWAGVCPGNEESAGKRKRSRTTKGDVWLRRALCQAAWAAARKKDSYFQAQYRRLAGRRGKKRAAMAVGHSILGVIYHLLKDPQLTYQELGGNHFDNIDPKRLCRHLVKRLESLGYDVSITKRTAA

SEQ ID NO: 443165 - protein, 339 aa, unidentified
MAYYAGLDVSLEQTSVCVVDEAGAVVLESRMATEPEAIVAGLAALPAAPARLLLETGGLTPWLWHELSGRGLVVHCIDARRAKAQLALRPAKTDRNDARGLAEIARMGWYANVRVKSLDHHALRAKLAARAHLVATGRDLGNQLRGLLRAFGLRVGKGKGQAFEQRVLALVADCPALQPVADGLLAARRAVRAEVERLDRVLVSAARRDATCQRLMTVPGVGAITALAYQSTIETPSRFRRARAVGAYVGLVPRRHQSGQLDRSGRISKQGDALLRGYLYEAATVLLTRLQRPCALRSWGRALAGRIGIKKARVAVARKLAVLLHQLWTRAEDFRWTAA

SEQ ID NO: 443166 - protein, 350 aa, unidentified
MLIIGCDYHPSFQQIAFVDTDTGELQERRLEHREEAEKFYRGLGVQGMRVRVGMEASGHARWFERLLGELNFELWIGDATEIARKRERKQKTDRQDAQHILRLLLKDDFPRIWIPSWENRDLRQLLWHRHRMVQARTRILNQLQAVAVNEGLRCKKRLWREHGREQLESFRLAPWASRRRQDLLALLDRLNPTIAELSQAIEHEAEKFPEARWLMTHPGVGPLTALAFVLIIGRADRFQCGKQIASYLGLVPLEDSSGNRRRLGHITKQGSSMLRFLMVEASQVTVRSLPEWRSKYFHLMMRRGRKIAKVAMARRLAIRLYWMWRKGWDYEQVKKFGSHAGQLGTGDGVQ

SEQ ID NO: 443167 - protein, 356 aa, unidentified
MGDGSWVGVDLHARSAVAGVLDGRSGGLRTERVPAASGPLLEWLLGLPRPVRVAYEAGPTGFGLARACARAGIVCLVAAPGKIPRAAAARVKTDRRDAERLARLLRLGELTAVRVPDELEEAARDLVRAREDARADLMRVRHRLSKLLLRHELLWQRSAWTREHDRWLAGLRFEGPLAVCFDESYGGVLAAKARRERLDRAIAELAVTAPYADVVARLCCLRGVSTLTALALTVELGDWHRFGPSSLGAFLGLVPSEQTSGQQRRQGPITKTGNGHARRLLVEAAWHQRRPLRPSLALTGRRAGQPAAVRAEAEAVARRLHRRWWDLERRGKRRTIIAVAVARELAGHCWKLATME

SEQ ID NO: 443168 - protein, 332 aa, unidentified
MMAQNEVVVVGIDVAKDKVDACIRSLSQRQTFPSTAEGRRALIRWLRKHKVGKAAMEASGGYEQDWAKALREARIEVRIVDPKRVRSFARSAGRLAKNDPIDAEMIVWFAETFTDAPGQAYDAARERLVKIVNARQGLLDLQTSLKNSGEHSVPDVVQKMQARLLKKIAGEVAKLETAIAAMVEATPHFAERAEIIESVPGLGKITSAGLIATMPELGQVNDNIAAALLGVAPYDDDSGQRRGNRHIKGGRRKARNLFYMPCMGAATQHNPVLKAFYDRLIAKGKEPKVALTACMRKLIVILNTMIARRQKWDANRYKVNDPARLPPSACPA

SEQ ID NO: 443169 - protein, 391 aa, unidentified
MPTTLTHCTTPTATLYMALELAAHEWLLTFAAGPGSARRHVTIPARAGARLLAEVQRAKVKLGLPADAPVLSCYEAGRDGFWVHHWLTRQGITNAVVDPASIEVNRRLRRAKTDRLDGAGLVRLLARWHGGERDAWKVCTVPPTLAEDLRQPIRERLELVEERTRLVNRIRGLLAGVGAVVDGPLTAATDLDALRQWDGQALPPLLRARLARDRQRLALLERQVTDLENAERRAVRDDATPQVEQARRLLGVKGVGPTSTWLLVRELFGWREHLTPKQTGALAGLCPTPYTSGDSAREQGISKAGSKRVRWALVELAWGWLHHQPHSALSRWSQRKYGAGGARHRKVGIVALARKLLVALLRLALTGAVPEGAEVRDWYTKVTGRPRATAT

SEQ ID NO: 443170 - protein, 342 aa, unidentified
MEHYAGIDVSLGRSSVCVVDATGRIVREAKVASEPEALVAFFGQLGLPLTRVGLEAGPLSQWLHAGLVEAGFEAVLLETRHVKAALSAMVVKTDRKDARGIAQLLRMGWYRPVHRKSPDAQEVRALLVGRKLLQAKLRDTELSIRGILRGFGLKVGEVSKGRFPARVNELIAGHEMLEEVIGAMLRAREGLRAEFTRLHRRMLAIVRGDAVCRRLMTAPGVGALVAVTFKTAVDDPGRFRTAKAVGAHFGLTPKRYQSGETDVTGGISKAGDAMVRTALYEAANVVLTRSSGVSALKRWALEVAKRRGVKRAKVALARKLAGVLQRMWANATDFRSGKEAVG

SEQ ID NO: 443171 - protein, 402 aa, unidentified
MHVTTHRPEDRTATRADLGAIFVSLELSRSVWLITSLSPGGGEKMSKHSVLGGDVAGLLMRLSQLREKARGRTGKSFPIIVIQEAGLDGFWIHRVLESEGIESHIVDAASIATSRRRRRAKTDRIDGEALVRALLAYKRGEPRVCAMVRVPTPEEEDRRRVSRERKILTAERVGHVNRIKGLLFSQGVEYEPLHRNRRQRLEELRTGDGRPLPDHLKRQIRRELDRLELLLEQVKAVEAERDAVLAAAKEAGAPTPATMLTDLKGIGAEFATVLWSEGLFRNFANRRQVAAYAGLAPTPWQSGTVDREQGIAKSGNPRLRTTMLQLAWLWLRHQPDSALSRWFHERVNRNGGRFRKTMIVALARKLLVALWKYVTAGVVIAGATMRTALTSAHNPIPQSTGM

SEQ ID NO: 443172 - protein, 355 aa, unidentified
MTASYDYHIGVDYHKSYSHLVVQDSSGKTLRSGRVKNERQSLGGFLERYRENSHAVVEATRNWMVMYDWLDEICDDVVLAHPLKVKAIADAKIKTDKIDATVLAHLLRADLVPEAWAPSDEARELRVALRERMFYVRLRTMTKNRIVTVFDRYPEQTAQLKKLGDLFGKAGRIQLAQVNVSEIDRVQIDRGLDFIGDIDVRIKQSDATIRTMTKANANVKVLKTIPGIGEFFARLIDAEIDDISRFRNPKKLAAYAGLVPSTYSSGGKTFHGKIIKQGNKWLRWAFVEAVSPAIATDAQLRTQYDHLKIKGTNKARVAIARKLLTIAFQILRDQRAYEPRGTSTTEGASTISRLS

SEQ ID NO: 443173 - protein, 340 aa, unidentified
MINNFLGIDISKDRFDVSLSFISNKGKRETRKRSFKNNDHGFQGLLSFLQKHNVEQVKACMEATGCYSEALAEFLHNTGHFVSVVNPACIRFYAKSKLIRQKNDQTDAEIIADYCQRQEPIRWAPPSPELKKLKHLYRCSAALKDELTLVNNHLEKKERLPKEVANAWEDLAMNIKQKIERIKNSLRELLNKHKELLENFQLLLTIPGIGEESAVAILAEVPNIKAFKDARQSAAYAGAIPRNITSGTSVHAKPRLSKSGSRTLCKAMYFLAIVAKNHNPTIMTFCKRLKEKGKHNMAIVGAAMRKLLHIVFGVLRSKKAFDPDHIKNYRARSLAESLVL

SEQ ID NO: 443174 - protein, 371 aa, unidentified
MLYAGLDLSRKRLDFHLLDSQGATVEVGAAPPDADGLLSLTRRLDRHREPIRAAIESMNGARFVHDRLELQGWQVEIADAQKVKGLAPLACKTDRIDAWVLAELTRRDLVPAIWLPDPMVRAERERARWRLHLLRHRSSLKQRVHAVLLTHGKPCPVSDLFGVRGRRLLARLALPEPWQATIEASLRLIDELEREISDCERELRRLGADHRYVPLLLTVPGIGWVLAYTIAAEIGDIGRFPSPRKLAGYTGLCPRVYQSGERPARPARQTRAQVSALGARRGRHPRLHRRHLPRPLPTDESPHRQTARRQGRPDRPRPPPLRSDLAHAHPPATLRSQRRHRPPGRLTVPKELRHRSELQSALSSHEEAIER

SEQ ID NO: 443175 - protein, 411 aa, unidentified
MPKLHVGIDVSLKAHHIQFMDEAGQNLASFQISNDPQGADTLIHKVLEITETKHMDRVVVGMEATANLGWHLAHYLKQQLEDHAPHLDAQIHVLNARRVARFKKAYDHLPKNDRIDAWVIADHLRFGRLPQAMTDTIRYEALQRLTRTRFHVMQTMSRDKTFFLNQLFLKFSGLRQDNPFSDTFGATSLAVIQELEPEQIAAMPLEDLVALLVDKSRNKFDDPKQIAQELQKVARRSFRLDKVMQDPVNLSLSVTLSVIQHMDAEVKKLDRAIARLMKAIPNTLESVKGIGPVYAAGIIAEVGDIRRFKNHNALAKYAGLVWNQYQSGEYEADETSRMRTGNKYLRYYLIQAADQVRRHDSEYAEFYRKKHDEALKHQHKRALVLTARKLVRLVFTLLSTNQLYTPPERRR

SEQ ID NO: 443176 - protein, 368 aa, unidentified
MYSQSHYKVGCDAHKYFSLFAVLDRHGKVVQRTRVDHERGAIQAFLSQLPPGTPVALETVGNWYWIVDEIEAARCVPHLAHAAKAKSMMGYVHKTDRLDADGLGILLHNGTLPSVWIPPGELRDERELPRTRMVFSNIRTKLKNRIHATLAKFALSLDTDSDIFTHKWRPQLLALVDRLPGETRRCVNQELELLDLVQAHIDRLEARILERVKTTSSMQLIESIPGPAKILSIVIDREVGSIDRFSSPKHFCGYAGTVPKVKASAGKTHYGRMIKQCNNYLKWAFIEAANVVVRQQNHPAWRHKYVVRLFDRTRQRKGHSVAVGAVARYLAEATYWVLKKGEPYREPLPRRPAGSKSVVPPRQGRARA

SEQ ID NO: 443177 - protein, 334 aa, unidentified
MKILRESIGIDVSKNDFKVCIGTIDETLATNFLFEKSYSNDKKGITNFLKEVKSRTSCNTKPSVVLEATGVYHELLAYTLHEKRFKVIILLPNKAKAFCKSINIRAKSDQVDAKSLSQMGLERNLTNWTPPSKQFQTLKTLTRERESLLAQRTRLKNQIHAQDTAFVKNNNTIIRIKKHIEFLDEQILEIEKELKNFVHEDEILCKKMKKITKVNGISFITAITIIAETSGFNLIHNIKQLVGYVGLDVRIEQSGSKAKKGKISKKGNSHIRKALFMPAMNAVRTNQTLRSFYEKLNERQTSKKQGIVAVQRKLLILTYTLWKSEQDYNPCKVA

SEQ ID NO: 443178 - protein, 409 aa, unidentified
MEEIYDKCCGLDVHRDSITACVMIGNGTQKRKTIKTFAAFTQDIEELAVWLKSLDIHHVAVESTGIYWKPIFNIFDGDFDVVLVNAQHVKNVPGRKTDVKDSEWLCKLLKCGLLTKSFIPPREIVRLREIVRYRHTLTRDLSSAKNRIIKMLENANIKLSSVFSDVFGVTAWGMICKLVEGETKVEVLMNYIHRTCRASKLEIEKALNGTLQEEDRTILRMMMMHIKSIEAIIDQIDLEIQKQLVPYQAQVKLLTTIPGVKDLAAASLIAELGVDMGQFRSASHLCAWAGLCPGNNQSAGKIKSSRIRKGNKHLKVTMTQVAWAISRTKSTYLGAKYRALALRRGKQRSIIAIGRKTLIVCFHMLKNNIPFHEIGVDFLDKLEPERKAKYHAKRLEELGYHVQVTKKIA

SEQ ID NO: 443179 - protein, 338 aa, unidentified
MGVYAGIDLHSSNSYIGVIDEKDKRLFGKRVPNSLSQILVSLDPFKENLEAVVVESTYNWYWLVDGLQEEGYKVHLANPSAIKQYEGLKHTDDKWDSFWLGHLKRLNILPEGYIYPKEERSVRDLLRRRLLFVRQRTSQILSLQSAIARNLSLKMSGRAIKKLKEKDVEDLFDSPSLILTAKSNIEVIQFLTQTIKTIEKALLSQIELRKDFRLLKTLPGIGNILSLTIMLEVGDIGRFPKVGNYSSYCRCVNSRKISNGKKKGENNRKNGNKYLSWAYVEAANFAVRFSKEAQRFYQRKMAKTNKIVAIKALSNKLARASYYVMRDQVAYDPGKLFG

SEQ ID NO: 443180 - protein, 339 aa, unidentified
MNFIGADLHKKTITVCVMNEKRTVLARKTLYCNQPDQIVEFFRQFRPFTVVVEATASYLWFVELLEPLAEKTVLANPKKLRVIAESTKKTDRLDAQTLAEFLVRDMIPQAFMPTPRQRQHRRLVRYRQYLRGRLTSVRCKIRHILGDYNADRKDLFSAQCGQAYLKTVALSDADRFVIKQLWSEFEDHQARLLAITKKLKAFIAKAPTREAEARQIVKTAPGVGAVTAEVVLSELGDVTRFRNAKAICAYAGLVPAVRQSGGKKSKDMQITKEGSGLLRWALVESAWRLVNTSPKWTAVFCRLRKRSGNKRAIVAVARKLLCVLYAMLRTSTPYRVIAT

SEQ ID NO: 443181 - protein, 332 aa, unidentified
MLNCIGIDVSKSTLNVHISKNSQDLQIDNTIQSVKRLYSKLKKIYKKEREEIIFIFEPTGSYSELLRKFCFEQKIRCFIINPKQFANYAKALGQEVKNDEIDARVLAQAIVLAKEHQITVPHYDATVEQIKELMSFYKFTTKQTSQLKNHLESLVSKNGDKFAIKELRKSIKLSKEKEKKIITEVQNIIDSNPTYKEDFKNITSITGVGQIGGIALLHLFIKYPEANQRQIISLVGLNPIYRKSGSSIQSLHRISKSGSILYRGSLFMGVMTAIRYDDNFKAFFERLKVKGKHTTQAQIAVMRKIMIVAHSLYKNKQQYVKKIVKSEVITMN

SEQ ID NO: 443182 - protein, 361 aa, unidentified
MKTYYIGADVHSNSTELAIEHNGKIISRHGVPTAIPAIKEILASLGGGKIHLTFEEGPMAGWLYRNLKDTVAEIIICDPRRNKLICSDGDADDKIDAAKLASLLRGGYLRAVYHSDDEQRAELKQWVSLYHDRVRHAVGMINKIRARCRMHGITIPRNVIRDRLQRPQWLADIHNQILAKQLELLWIGYDATAIQVRRARRQLAVLAKAHSIIKIWSELPGIGLIRAITAFAFLDTPWRFAHKNRLWKYCGVGLQRTASGTDKKGKPKPARLQLAWAVNRLLKNVVLGAVHTAINQNENIFRRDYERMIHESIIPSNARHAVARKMLTVMWGMWKTNSRFNEKLVYAAAVTAGSSFSVSGK

SEQ ID NO: 443183 - protein, 366 aa, unidentified
MHLVGKDSIVVGIDVHKYTHQAVALGCFGQELGKLQFSNGEIQNCIVWLNSLGKRENIIVGLEDVNGLGIHLTRELQIAGFLLRYSPAVYTERERKHSTQQDKNDYLDAKRVGKVILAKSEETLPAHHIVPQENIRTLDLLLQEREELVRGQTALKNQLHALLHQYYGNGYKQSFKEIFTQKAIEWYRADLRKGETHTMPDNRRFVSGSILRRFERLAVIMSQAKELFALIGETGGTLSSVQKLTKALNGCGVLTAVKIVVEIGNVRRFQTEAKLAKYAGIAPIQSQSGKKNRYHTNPFGNRKLNQAIHTIALSQIGKSGNGESKTYYQKKLAEGKSKLWALRCLRRFVIRRIYSTLKETVDKKAN

SEQ ID NO: 443184 - protein, 313 aa, unidentified
MSYPTEIFAGIDVSKSHLDLALLNVHRSWRFSNTPEGISELTNLLLKNQPTLVVLEATGGYEQAAFRQLSERQLSVAIVNPRRVRDFARANGRLAKTDRIDAHNLAHFAQVVLPHARPASTYAQQCLVGLIARRRQLHRMITAERNRLRNAHPAVQLQLQHHIDWLLKDLKGLDTEIEDLLQNDLELKAKSDLLRSAPSIGMVTAASLLADCPELGTLDRKKIAALVGVAPMNKDSGRKSGKRRIMGGRAPLRATLYMAALSASRHNPAIQPFYARLVGNGKEKKLALTACMRKLLTMMNAMMRDEKHWSPTS

SEQ ID NO: 443185 - protein, 436 aa, unidentified
MRGCRCSMIMGFTKPIEHFNLQRKKVITMNTLYVGIDVSSKSNVVYLMLPNGDKHSNFSVANSHEGSTQLVKRILSALTSHSLDTVLIGLEATSVYGDNLVYFLREDATLAPFNRKIHVLNPKQVKKFHDAYNDLPKNDYVDSFVIADCLRFGRINKEVYMGDYRYKALQNLTRARFFAVQNLVKEKQRFMNVLFKKYSTMTQEKVFSDTFSTTALAVYDEFESAEALANMDLHELTDFIIEKGKNRFPDPDAVAKAIQKAARSSYRLPKTVNDSVNQVLSISITSMKALESQIKEFDKAIKAQMELLPNVLISIPGIGPVYSAGIMAEIGDINRFNSQAALAKYAGLAWKQHQSGGFESEVTRLIPSGNRFLKYYLCEAAFSLVRCDKEYSDFYHLKYKEVNRCQHKRALALTARKFVRLVFRLLKDNRLYCPAK

SEQ ID NO: 443186 - protein, 345 aa, unidentified
MNITTIGIDLAKNVFQVHGVDERGKGGLKKQLKRAQVLPFFANHPPCLIGMEACGSAHYWARKLKELGHTVKLMAPQFVKPYVKTNKNDAADAEAICEAVSRPSMRFVPVKTGEQQAVLSLHRARQGFVKGRTAQANQIRGLLAEYGIVMPVGINNIAKRLPDILEDGENDLPGVFRQLLQRLGDHLKELDRQVDELSGQIQLWHKENELSRKLADIPGIGPITASALVASIGDAKSFENGRQLAAWLGLVPRQHSTGGKQTLLGISKRGDTYLRTLLIHGARAVIRVSEHKHEQANDWLNQLVLRRNKNIAAVALANKNARVVWALLAQKREFRSDYAPAKAAA

SEQ ID NO: 443187 - protein, 342 aa, unidentified
MEITTIGLDLAKSVFQVHAVDAEGKVIVRKALRRAQVLPFFKGAPPCLVGIEACGTSHYWARELRKLGHEVRLMPPAYVKPYVKRGKNDANDAEAICEAVTRPTMRFVSIRSEQQQAALALHRTRELLVKQRTQLVNMIRGLLAEFGIEMARGLHHALDLAARVAQGAAPDVPELAARVITSLAGQIGDLQVRLTALEKELLAWHRNSELSQRLSTIPGVGLISATALAASVTDPSRFRSGRQFAASLGLTPLQNSSGGKERMGRISRMGDRYLRRLLVVGMTSLVRRARAKPDSVDPRIAAMLAHKPARVVTVAAANRTARVAWSIMARGGVYRAPQGIAA

SEQ ID NO: 443188 - protein, 419 aa, unidentified
MPSKKKNTSVVSVVHDICCGLDVHKKMIVACLVSSDAGDGERSEVMEFETFTEDLIKLRNWLLEKQCPVVAMESTGPYWTPIHNILEGYFQVILVNPRHMKNVPGRKTDISDSRWLSGLLRYGLLKAAFIPPKYQRQWRDLTRMRKNYMETVGHFKRRVHKLFQEANIKIDSVLSDLFGSTGRNLMGLLVSKESSLTFFEVEDCLRGSLREKARELYRSVKGFFEEHHRILLTVLLNTIEKLEEQIEELELRIRKVLKTSEELIDRLKEIPGVGDVSAHSLLAELGTNLEAFPSAAALAAWCGICPGNNQSGGKRFSGRSRVRNHHLKTIMVEIAWPAVKKRGSYYKAKYYALKSRIGAKKAIIAVAHRILKAIYYIIKHGVGFKDLGEAYLLERSKASKIRYLSKQASLLGFELKPVI

SEQ ID NO: 443189 - protein, 335 aa, unidentified
MSLKLLAIDLGKRSFHCHGIDSDGVILSRKVSRSKLLETIKDLAPETVAMEACASAHFWGRRFLADGRQVLLINPRFVKPFVKGSKNDAADADGIYEAALRPTMRFVPVKSTEQQDLQSLHRARERVVCARTALINHMRGLLGEYGVILPQGAWRFLKEAQEAIAAADLSDLARGLFVDLFDELRALDLRLDKLDRQLLRLCRTNEACKRLSKLPGVGPVIATALVAAVDDGRHFRSGRELAAWIGLVPRQYTTGGKPRLGGIGRRANHYLRRQMIHGARAVMFRLTKHEDRRSQWLKELAARRGFNRAIVALANKTARIAWVVLTRKEDYSAAA

SEQ ID NO: 443190 - protein, 398 aa, unidentified
MFYCGIDIAKYKHEASVIDINGKSLIDSISFANDKQGCEKILAVFEKFEIVPDDVIIGMEATGHYWLSVYTFFLELGYTVKVINSIQSEAFRKMYIRQTKNDSKDSYIIAQIMRFGEYSATTLSDDNIIALRQLSRYRLALVDACGDCKRRVIALLDQVFPEYDKLFSDTFGKTSSELLLNCPTPEDMLAISTRKLTNILNKASHGRFGKEKAEELKAAAKDTFGVSFAKDAFAFQIKQLMQQIIFTEDQLSELEEQISVLLHETNQYITTITGIGDVLGAIIVSEIGDIDRFERPNQLVAFAGLDVTVKQSGEFSGTKNRISKRGSPYLRRAIWLAAQRAAFCDPILSEYYQSLRARGKHHLTAVGAVARKLCNIIFVILKENRPYLPTPPKKPSVN

SEQ ID NO: 443191 - protein, 417 aa, unidentified
MDPLLPVVLPCCCGIDVHKKSLTACLLTAGASGEVVQEVQTFTTLTAGLHALLAWLQQRGCRHVAVESTGVYWKPVFNVLQPAGLEVVLVNAAHVKNVPGRKTDVKDAEWLATLLRVGLLRGSFVPPPEQRDLRDLTRYRTQVIRQRAQECNRIQKLLEDANIKLASVASNILGASGRDMLRALSEGNDSPGLLANMARGRLRDKLPELRAALDGVLRPTQRWLLGEQLRKVTELDEAISRLDAQSAQLCLPFVQSLALLDQIPGINERLAQVIVAEIGLDMSRFAEPARLAAWAGVCPGNHETAGKRQSGKTRKGNRWLRAALVQASWAAARAKGTSLQATFGRLKGRRGVKRASLAVAHRLLRIVHRVLRTGQPYQEEGPEYYRAPDQERLKEKLLARLRRLGVRVSVTSEEGAA

SEQ ID NO: 443192 - protein, 414 aa, unidentified
MGGVPVFSLLLFQGGVALSALYIGIDVSKDFSTAQAIDWKGNKCFYLELAMTADGFSQLLKAITSHGKDIAQVTVAMESTGCYHINLFSFLTYKGIRCVIINPLLTANFARLSLRKTKTDKKDALTIAQFLLVHKDSLLKTDLSPDLQDLKDLAREHESLTNLIAGMKNDIRRMLQITFPELESICNIFSETILDLLRQFPSARLIKIAKPNTIAKALLHEDKRKKTSVSAEDIIKAAKASVASHGAAKEIILPEKISTLQHLIEKKGRMKKVLVEACEAMMVEDIEIITSIGGISNITASRLLAEIGDYRAFSTYKHLIAFAGLDPSVHQSGKFEGISRISKRGNRHLRYIIYLMTTCVVRGDNIFRTYYQKRRAEGQPFKKAIMATAHKLIRVLFAMLSKRTTYKSKEVNAI

SEQ ID NO: 443193 - protein, 348 aa, unidentified
MWIIGCDFHPSWQQVAWCNSETGETGEQRLEHSNGEAERWYRQLPVGSRIGLEATGNSQWFVELLQRLGHEVWIGDAAQIRASYVRKQKTDKRDAAHILRLLLENRFPRLWRPSPEQRDIRQLLIHRHKLVEIRTRVKNGLQHLAMNRGMQKKRQLWSEAGQRALRELAMPGWAGCRRQDLLETLAYLDRKIAPLDRAAEETAQRDKMALLLKTQPGVGPITALAFAVTIGEASRFPRGKQVASYLGLIPREHSSGGKQRLGGISKQGNRFLRQLLVEAAQSAVRYDESLRRPYLHRCHRKPKGVAKVAAARQLAVRLYWMLRTQTPYPEIVRIESSPRVALVVRHGG

SEQ ID NO: 443194 - protein, 356 aa, unidentified
MANPCDLNKEVVMVTTIGIDPHKATHTAVAINETETVLGELTIPADRSQTKTLLDWAQNLDGDGRVWAVEAAGGLGYLLSQQLVACGETVFDVPPVLASRVRLLGSGKSDKNDPNDARSVAIAALRQPGLAVVRREDHTQVLRMLAKRHLELTSLRTQAACRLHAVLTQLRPGGMRQRLSAKQASRMLQGLRIVDPVGEQRRSMARTHLGDIRRLDRELKANKVLIRKAVAASNTTVTDVYGVGPVVAAFLIGYTGDPTRFASADHYAAYNGTAPVEYSSGGKTKHRLSMRGNRMLNHAIHMAAITQIRHDTAGRVYYHRKQAEGKTGKEALRALKRRISDVVYRQLLKDQQTKKS

SEQ ID NO: 443195 - protein, 369 aa, unidentified
MADRITYIGLDVHKESIVVAVASGGLRGEVREYGRIANTATALDRLLRKLGDAGMVLRFCYEAGPCGYGIQRHVSARGHECVVVAPSLIPKRAGDRVKTDRRDAASLAKLHRAGELTAVWVPDPQHEAMRDLVRARLDAVHSLRRARQQLSGFLLRQGCHYGRPAWTKLHRRWLAGLIFEQAIHHIVLEDYIAAVEAAEARRDRLTAQIGTMLPDWTLAPVVAALQTMRGMAMVNAATLIAELGDLSRFADPRQLMAYLGLTPSEYSSGSSVRRGGITKAGNGAARRLLIEAAWSYRFPARLSRELLLRQESQPKPIRDIAWKGQVRLCARYRRLARTGKPANVVTTAIARELTGFVWAIARQVTVTPG

SEQ ID NO: 443196 - protein, 321 aa, unidentified
MNLFDLGLDVAKAKLDCALRFPDGKYKSKVVENTPSGFKALIEWLAKHGATSAHVCMEATGVYWEAVAGRLSAEGMTVSVVNPAQIKAFGQSQLVRTKTDQVDARLIASYCAERHPAAWQAPSANEQALRAMVLRLDSLQKMRTQESNRLDVSRDVVRPGITAHIGWLDEQIKALAKEIRGHMDGDDTLKDKHALLDSIPGLGERTIAILLAYYADLERFGNARQAAAFAGVEPRQYESGTSVKMKPRMSKIGHAFLRKSLYMPALVALYKTAWGIRFRERLAAAGKPPKLIIGAMMRKLIHVAFGVLKSKKLFDPKLHGC

SEQ ID NO: 443197 - protein, 351 aa, unidentified
MMIIGVDYHPSFQTIAFLMEETGECGEQELKHSDGQAEKFYRDLKQRGICVRVGMEATGYSRWFERLLAELGFELWIGDPAEIKAKRIKKQKTDRNDARLLRRLMLENNFPQIWVPSPENRDLRQLLWHRHRLVQMRTRIMNQLQALAMNEGYRWKKKLFREQGRAQLEKLTLAPWASRRRQELLELLDRMNPTIEELTAAVEREARKRPEVVRLMTHPGVGPLTALAYVLIIGTPTRFQRGKQIGNYVGMIPSEDSSAGKQRLGHISKQGNSLLRFLLVEAAQAAARVHPHWRRRYIHLAMRRHKSIAKVAMGRRLAIRLYWMWRNGCEYSRSLEFGSYAGQLETGHGVK

SEQ ID NO: 443198 - protein, 332 aa, unidentified
MNLVSTLGIDLAKNTFSVHGVDVAGAVVMRRTVSRSQVAELVAQLPACLIGMEACSGAHEWARRFGRFGHTVKLMAPKFVAPYRKSGKNDGNDAEAICEAVTRPNMRFVPVKSVQQQADLGIHRVRQGFIEERTSTLNRIRGLLAEFGYVLPNGPEHIRRSVPAIIDALPARVGRCVRDLLEHVERLADKVLEYEHEIRLAVRDNELARRAQTRQGIGPITASALVATVGNGRDFKNGRQFAAWLGLVPRQYSTGGKTRLGHITKRGDAYLRTLFVMGARSVLQRAARETDPLSRWAFAVQGRRGYHRACVAVAAKNARVAWALLNKETQAP

SEQ ID NO: 443199 - protein, 420 aa, unidentified
MLDKGHFITVDEKTLVIGVDVGSYDEYARAFTCRKQELSKKPLHFHNTAEGFKTFKYWAVNIMKTNGLEKIIVGMEPTSIYWEALATYCKDNGMILVHVNPAAVHKSKELDDNDPSKNDRKDPKVIADLVTDGRYSFPYMPEEEYAQLRELSNLKIRTQESLTQCKNRLARWYSRYFPEFKEAYKNVVSKTAMIIMDMYPLPEDIVTLGVEGILQIWRNKKVRAAGESRAKKLYEAAKNSIGRKEAAAVARLEFQSIKEDLDRYQGRLEAIDKEVDEILPKIKNADKLFEIKGVGKATVLTFLSEVGEISRFDNPKEIQKLAGYAIVTNESCKHQGEKRISYRGRKRLRWALYQTALSVIGKNEEFRQIHQYYTTRKKNPLKGIQSVVAVACKMIRIFYKILTDGVSYDGTKMTQDIVRV

SEQ ID NO: 443200 - protein, 412 aa, unidentified
MLFVGDDWAEDHHDIEVQDEGGRRLARARLPEGIAGLARLHELIAEHLTDDDVDPETGFVGQNVLIGTETDRGTWVSALAAAGYQVFALNPVQVARYRERHGASGAKSDRGDAHVLAEIVRLDRAHHRPIAGNSPAVEGLKLVARSHQVFIWDRTRHVQRLRSALREFFPAALEAFPDLLAAEALELLERAPDPARAARLSRSKITAALNRAHRRDPDAKAEAIQAALRAPALRQNPAIEAAYAVIVASAVRLIAQLTTQIGELQAVVAEGFGRHPDAEIVTSQPGLGPILGARVLAEFGDDPTRYADAKARKNYAGTSPITRASGTRRVVLARYARNKHLADAAHQWAFCALTASPGARAYYDAIRARGVSHHAALRQLGNRLVGILHGCLKTRTGYDEDTAWPSPTAAAA

SEQ ID NO: 443201 - protein, 320 aa, unidentified
MSNITLGIDVGKFELAIALRKDGKFTDKLVENNPKGFQKILKFLKNNAPEAEVYLESTGRYDEKVTDFLSEEGFDVKVINPTQIRDFARTKLARHKTDKVDARIIAEYGSIFGGRTYTKIEDNIRELRELYRMSLSLKDELVATKNHLENQDTFPKFVADLWKKRAKDLENDIKLVEKKMKEIILADPDLKLKFELLIKVPGIGECTAIAVLAEVTRLENFRTARELAAFIGLTPKHKTSGSSIRGRPRISKMGLKILRKALYLPALTAMKHHPSLKNFAEKLRERGKKFKQIICAIMRKLVHIIFGVLKYDVPKFRSEG

SEQ ID NO: 443202 - protein, 363 aa, unidentified
MADGICFAGLDVHARKTAAAAVQLGSGEVFRAQLEGSSAAAIAWLRSLPGEVRAVYEAGPTGFGLARAARAAGIEMMVCSPGAIPRQPGDHTKTDQRDALKLARLHAAGQLRAVVVPAPAYEALRDLVRCREDLRGDLMACRHRIGKLLLRRGLMWSGPGHTWSHAHLKWLSTIRFDEPIVEAVFVEHLAQHEALLARRDRLDGLLADQAAVGPWAMMVARLRCLRGVDTLTALGLIAEIGDIAAFAHPRQLTSYLGLVPSEHTTGSTRRQGSITKAGSSHARRLLIEAAWHYRRAPRISLTLRRRQLGQPPAAIQAAWRAQLRLHRRWAHLDAGRGKRRTTVAVAVARELACFVWEIAQQPD

SEQ ID NO: 443203 - protein, 453 aa, unidentified
MSRKRTRLQSVTESPRVRPDAAGIDISPEMIYVAVDPQKDAPAVRRYGTVTAELYRIANWLKACGVRTVAMESTGVYWIPLYQVLEERDFEVYLVNAQHYKNVPGRKTDVGDAAWLQYLHAVGLLAGSFRPAQEICAFRTVMRHRGELVQAASKEIQHMQKALDQMNVQIHRVLSDLTGVSGLAIVDAILGGERDGRKLAALRHGGVKASEESIVAALQGDYRAEHLFTLKQSLESYRHYQKLIAECDRQLRGMLNAIEGKSGEGEPPVSGKKFRKAGDEELRQKFYRVFGVDLTAVPSVNVGTVEVLLAEVGPDLRRFRSAGAFASWLALCPGNEITGGKVISSRTRKVRSRLAGALRMAAESLHRNESHLGRFYRRMKAKLGAPAAITAAAHKLARILYTLIRNQVEYDESQFAKIEQRHNEKQHQNLIKRARMMGYTLVPLPAAPAAVVS

SEQ ID NO: 443204 - protein, 388 aa, unidentified
MLLKNIEGVKDMADCFFFGADIHKNNHTFVVLDGFQQEKGRFFVTDEKKELKELKEWIEETKGNKRAVIGLEDTGGHGRVISEFLFRAGYPVYKVSPGLVAQRRRRTAHRDKSDEKDALLVAKTLISEISGLPRVAISEKIDKSKELKELANDYDSLVKDQTRTKNKLHQLLYREYGPRYSEIFKSPFSLKALKYWKENKEGDCLSLDPEYSELTAELPRLEYIRKMRIRQKAEELLFIKEHLKVLAKLMEGLLFSHKNLLTLPGCGIIVCSRIVGEIQDIERFENSSDLAKYAGIAPRDASSGKTTRRKNSRSGNRQLNKAFYRLALSQITKGRNNAAAIEYYQRKIAEGKSKKRALKSLMRRNADIVYAMMKNGSDYDIQRHMEKT

SEQ ID NO: 443205 - protein, 380 aa, unidentified
MRNNQKSSGFIPRNYDVFSGLDVDKESISATFSGHDGNMKAIRIPYDVRNLLNYVNNHYCGQKVAFAYEAGPTGFRLYDELTQYGYFCLVTAASNIPTAPGQRVKTNRLDSKKISENLRGGQLKGIHVPTQPYRHLRHLTQLRDTFVKEMKATKCRIKSLLLYEGIPFPEAPPSSQWSSEVIHQLQNLKCSEPVRFKLGRLLVSLKFFHSNIIETTRSIRAFCRSNAELKRNIEYLKSIPGIGWVTASQLLARIGDWRQLQRVDQLGSFLGLVPTENSTGDDVNRGSITRSGDNRLRNKLIQCAWTCIRKDSELSEFFYRIYKRHHDKYAARKAIVAVARKLTTRIFAVLSQQRNYEVKQTTKPVPLTRKKTILLQEETR

SEQ ID NO: 443206 - protein, 449 aa, unidentified
MSRPQVIDDEEHERIHDKVAAIDVAKDAGVVCTRTPHPSRPGARRSRIWTVKARMNTIRALGRQLHKDGIEIVTLESTSDYWRIWFFVLEAAGLAVQLVNAAQAKNLPGRPKTDKLDAQWLARLTEMGLLRASFVPPRAIRDLRDYTRARTRLVQERTRCWQRLEKLLEGAQVKLSSVASKLTTVSAQDMIRAMIAGQRDPRVLAALARTGMKAKHDELVQALDGMSGDHHGELAQLLLDQIAGLDGKITQLGTRIEQAVTALPDAWGINAGGTTGPQAGTGPDAAVIPAVTRLAEIPGISENLARAVIAETGLDMRRFPTAGHLVSWAGLCPTARQSGPRTRAGKKGQGNTWLRGHLGQAAAGAARTATFLGERYHRIARRRGKAKAQVAVARSILVIIWHLLADPSARYTDLGYGYYQDRTDKDRKLRNHMRQIEALGFTVTLNKTA

SEQ ID NO: 443207 - protein, 322 aa, unidentified
MSVSNQRCAGIDVSKGTLDIAISNIASQFTVPNGTDGFTQFLRELKRNETRLILMEATGGLESGVACYLQSEGFDVVVINPRQARDFARAMGYLAKTDRIDARVLLQMSEVINQHPEREKYIRPLPDAHRQILAAMVARRRQLTAMLTAERNRLHPSHPLSHASIRSIISALKGELARIEGEMAIHIKKHFSELSELLNAVKGVGTATVAVLLAEVPELGSLSRREISALIGVAPVNRDSGTMRGRRTVFGGRASVRTALYMSALVGTRHNPIIKEFYTRLVAAGKPKKVALTACIRKLLTILNAMLKKNEAWDPMYHQHAS

SEQ ID NO: 443208 - protein, 352 aa, unidentified
MIVLGADTHKRSHTVAAVAAATGELLGEQTVQVGRRGFEALLRWARGLDGERVWALEDCRHVSGSLERFLIGRGERVLRIPTHLSATARKSARQRGKSDPIDALNVARAALQEGLESFPVAHLDGPELDLRLLVDHRERLVRHRVGLNNTLQWHLHDLWPELELPGSSLFYGRWAPRVARRLARSEQTMRVRIARDELRRIRELSQTIKALEREIAQLVATIAPQLLSEPGFGPLTAAKLVGEIAGAQRFATPAKLARAAGVAPIPASSGNTQRQRLDQGGNRQINAALHRVIVTRARCHQPTRDYIARRRNEGKTTREAIRCLKRYLTRQIWRLLHPPHPAPGTTPHPSTS

SEQ ID NO: 443209 - protein, 376 aa, unidentified
MREKLRFLGLDVHAETIAVAVAEPDGEMRSLGTIANREDSIRKLIRKLGPPEQLRACYEAGPTGFVLYWQLTQLGVECAVVAPSLVPKKPGDRVKTDRRDALKLARSHRSGDLTAVWVPDEDSEALRDLVRQREAAKQDQLRARHRLTKFLLRTGQRPPLGLKAWTERYLRWLAQVRYTQPAQEATRLDCMNEVEHMSARVKRLEEAILEVVKLAPQPMQELIRGLQALRGVAHISAVTIASELGNISSRFESARKLMGYCGVFPSEDSSGKRIRRGGITKAGNAHLRRIVVESAWCYRHLPRVGEKLRKRHQGVPAEITEIAWKAHHRLHKRYMTLMARGKEQRKTMTAIARELLGFIWAIGIKAEAACKQQLAA

SEQ ID NO: 443210 - protein, 417 aa, unidentified
MKAEYQWFVGIDWGGESHQVCVLDRERRKVGGRSIKHDGEGIGELISWVGGMVAGEPATMAVALEVPHGPIVEALLACGVTVFAINPKQVDRFRDRYTVNGAKDDRRDAYVIADSLATDPQAFKKLTQESPFTLRVRELSRTLDDLDRERRRLSNQLRDLLVRYFPALLALCPAMDEPWVWSLLALAPLPAKTKRLTVARIASVLKAHRIRRLSATDVHSLLQRGCLHIAPHSEEAIAEHVGILIPLLRAFEAQYRRVSASLKSLMDEVSRNPETEEHRTVTLLRSLPGIGVDVSTTLLAEAGSVLANADGRAFRCYAGVAPITKQSGKSRRVVMRYGCNQRMREACYHWARTSVQRDANSRSHYDRLREAGHNHGRALRGVCDRLITILMAVLRSGQPYNPHVRRGSIAVSVALAT

SEQ ID NO: 443211 - protein, 385 aa, unidentified
MAPPARPEIVIGLDVGKSSHWACVVAREGELLASKPVLNRENAIDGLYAQYPGALVVVDQVRNIGSLALSRARLAGMPRAYLPGLAAHGASRLFAGDAKTDERDAMVIAKTALGIPDALLPVADRPPEIEAARSLAAQRDFLTCENTRSKNRLRSILLESCPEFEAHADLSDPATLKLMAAVGGPWSISEASPQAVGALTRGCGRAKVAALVESVGSSSRPHPAAVACEDRAVRLLARRISENAAEIESLTSEISALLSADETYRCLLTVPGIGPRTASELVISIDIADFPSHDRLASYCGLAPRNRRSGTSISSVSASRQGNKRLKNLLVFSCNCLARSRNRWGGYYARCRDRGMPHGKALKAVARKRLKVIYAIMRDKVPYSA

SEQ ID NO: 443212 - protein, 412 aa, unidentified
MIYCGIDWAERTHDVALVDDSGQLLAKRHITDDAAGYKILLDLLVEYGDTEENPIPVAIETSRGLLVAVLRTGKRQVFAINPMAAARYRDRHSVSRKKSDPGDALVLANILRTDMHAHRPLPGDSNLGRAIAVLARAQQDSLWNRQQLSNQLRSLLREYYPSALAAFEPWRNGLCRPEARELLKAAPTPTRAARLTRTQLEAALKRAGRKRGIAAEAERLRDVFRSEWAHQPPLVEDALGKQMLALLLQLEAACTAADDLAAAVEEAFPQHPDAEIILSFPGLGVQLGARVLAEIGDDRTRFADARGLKAYAGASPITRASGKKSSITRRWVKNDRLNHAGYLWAFASITASPGAKAHYRRRRDDHGDWHAAAQRNLFNRMIGQLYHCLQHGCRFDEAVAFPAPVSAVAQVA

SEQ ID NO: 443213 - protein, 338 aa, unidentified
MALYCGIDLHSRDCWLAILDDKLKVVQEAKVGNDLEVILQILEPYREDLEGVAVESTFNWYWLVDGLMDNGYRLHLANTSAVKQYEGRKHTDDRHDAKWLAEMLALQILPEGYIYPKNERPERDLLRRRSFLVKKRTSFLLAMRGAYECRSGLRTSSNEVKQWTREEIEENWDDPTVALGMTCLLEPMKALDDQIRTVEKEILRHAKLRSEFAPLLTVWGIGKILALTVMYEVGEISRFKKVGNFASYCRLVKTARLSAGKRKGSGNRKNGNPYLSWAYSEAAHYASRYHPEARKYVQRKTSKTNGIVAIRALAHKLARASYYVMKDHVEFDPEKVFG

SEQ ID NO: 443214 - protein, 371 aa, unidentified
MNRYNLEAAPTACAIELKIDKRPKAKRILLGIDAHLRGYQAGRKIDEGVIGAVDTFRSEVELLLHIEKQRQRAEEVVVVYEAGPLGYTLYRKLKALGVLCYVCAPDGAQQRKKRRKNNKIDARSLTSKLFNYLNGDKEALQLARVPTEAQEQLRLASRQHDQLVEERKRLGAKGNAMLLSQGFGSWSNWWRPKVWAQLSVLVPAWLLERLQIWVDVLKTLDEKIAQAKAALARSCRGPRPKGMGALSQMQLQSEVLDWHSYTNRRKIACLAGMVPSEWSTGDKERRGSITKVGVPAIRRIIVEMVWRMIFFQPQYKAVQKWQEVLRGSNPALKKKAVVAIGRQLIVDLWRLETGRVTAQELNLVMIEAEGV

SEQ ID NO: 443215 - protein, 404 aa, unidentified
MEVFVGHDWAEVHHDVFVVDSDGERLGYRRVGPGVDGVAAFHDLVGVFVDEPGEVTVATETDSGLFVAALVGAGYRVHAINPMSVKRYRERHVTSGAKSDAGDAKVLADLARTDAHNHRQIAGDSESAGAIKVLARSHQNLIWTRQRQSNQLRSALIDFYPAALEAFSDLQHSDAIEVLKIAPTPALGQRLSLSKIGSALRRGGRQRNIDKRASEIQQALRTEHLRTAPQVEQAMGANVAALIAVIGTLKTQIATVETELHSSFETHPDAKIIQSLPGLGMTLGARVLAEFGDDPERYDSAKSRKNYAGTSPITKASGRRHVVLARHVRNQRLADATYQWAFAAITPSPGARTFYDQRRAKGDTHSRALRSLANRLVGILHGCLKHQTLYDEHTAWAHRQQHAA

SEQ ID NO: 443216 - protein, 337 aa, unidentified
MSYLGVDLHTNSFTVCRRTKQGRNSIRTFQIARIADFRKTLRKRDLLAVEATGNTAWFVSQVRDRVKKVTVVNPFQFEVIRRSVKKTDKNDSKTLALFLSKDMLPEARMKTKENAQLHSLATTRDKLVKQRTALINKIHNVLNSYGIKFKKESLGSEKGLKSVWAYEWDVIVRVELEVLIEQIRCLNKSIKMLDKEMTDHGQKLKGHKSLTSIKGIASRSATVLLTVIGDVNDFADENKLASYFGIVPRVSDSNETVRHGRITKHGSKLGRTTLVQCTLVAKRYSPYLRQYYERIKSHRGSGKAIIATARKFLGIIYNTLKNDWVFEDFPNFVIANT

SEQ ID NO: 443217 - protein, 322 aa, unidentified
MSPYMQGREQKMENYVGIDISKRYFDLYCLPEGKQYRFENNQNGIRQCLKLLADIKPKLIVMESTGGYELALATELYVAGLPVAVVNPRQIRDFARAIGQIAKTDKIDAKVIAQFACMVEPAAKQVMDDKARQLKSLVARRDQLTDMHVAESNRMEHAVDRSIAHSIKAILKVIERQIADINKQISEHIKHDEQLRRKAEIVDSAPSIGSTTASMLVTLLPEIGTLNRRQIAALVGVAPMNRDSGVFRGKRMTGGGRGRVRAGLFMPTLVAIQHNPVIRQFYQRLLSMGKTKMTAVIAAMRKLLTILNTMVAKNEFWNPKIA

SEQ ID NO: 443218 - protein, 411 aa, unidentified
MSQMLVGVDVSLKSHHVHFMKEDGSSLADFSVSNDQNGAETLIKRILETAEKSQADQLKIGMEATDLYSWHLAHYLQDQLKGYEPRFQSFIYVLNARKVARFKKGYDSLVKNDRIDAWVIADHLRFGRLPAQMKDAIQYEALQRLTRTRFHFMKEIARNKTYFLNQLFLKFSGLRQDNPFSDTFGTTSLAVMEELEPETIAEMSIEDLVEFLQDKGKNRFEKPEEIAQYLQKLARSSYRLNKVMQDPVNISLSVTLSTIQHIESQVKRLDKEIAKLMKGITQTLTSVKGIGDVYAAGLIAEIGDVKRFKDHHALAKFSGLVWSQNQSGEYESEETSRMRTGNKYLRYYLIQAADKIRKYDSEYKAFYTKKYQEVPKHKHKRALVLTARKLVRLVYSLLRTNQLYTPPERRE

SEQ ID NO: 443219 - protein, 331 aa, unidentified
MTNASCAPASMTPPTVFVGVDMAQKSFVWAIHGHSETQCASNDDSGFEQLLKALAGQTVGLLVLEATGGLERALATRLLQHSLPVAVVNPRAAREFARSMGHLAKTDAIDALALAHYAQTLAARADQSGVRYAPVSEQVQQLQALVMRRAQLLNMRTAEKNRLGGSIRVLRQSILEVIRTLEQQIARIDKDIDAHVREHFQEQAKRLEAIKGVGSTTSATMLAFMPELGAIKAGSAAKLAGLAPLNQDSGKARGKRHVWGGRAIVRSTLHMAMLSAVRYNPVIRAFYERLIAAGKPKKVALVACSHKLLRILNAMARTGEPWNEGLHVKST

SEQ ID NO: 443220 - protein, 414 aa, unidentified
MNSPGNTRDIQRYIALDIHKEYVMLGAMKATQEWVIRPRRVEMSHFRAWAANNLCTGDAVVIETTTNVWDIYDIVAPLVTRTVVAHARAVRQIAEARVKTDTEDIKRLLRLLIADIVPEVWVPPAHVRELRGMIAYRNRMVKTGAMIRNRLHSLLHRHNLPLAEGGLTDQKWWEAQALNTLERLQVRQELALLEKVEQNKAELDLELQKMSVGETWGRQATRILQLPGLGVVVTMTILGAIGDIRRFEDAKHLVGYAGLGAGVHDSGKEHKDKGITKSGRKELRWALVEAAWRAIRMSELWKQRYEELKERKGPCKAIVAIARKLLVAIWHVLSKEETDCNASEEDLAWKMLLWSWSLGDEARLGLTPKQFAKYSLLRLGVQSDVTSFMRGKVLRRIAPTGEVLARAAELGIPT

SEQ ID NO: 443221 - protein, 398 aa, unidentified
MLSIGIDVSKGKSTVCGMKPGGEIVYTPFEIQHTREGMSELVSLLRGSGEEVRVVLESTGSYHCPVVAALLENGIFVSVVNSLRMKRFCSQSIRRVKTDQIDAMQIALYGLAYWQELQPTRLPENTYRELQLLARQYYQMTSLLIKAKVDFNALCDQVLPGMQELMSDHAGRHKLSDFVLRYHHTAHILKMGETRFRKDYCKWAEKKGYRNHERMAALIFATAQNGIPVLPDAPSTQIVITEAIRVLHTVEASRDAILTQMQALAKTLPEYSLVREMPCIGDTLAPRLIAEIGDVRRFHSKRALIAYAGIDAPPYQSGKFSANNRHISKRGNRYLRKTGYEVMQSYVMHKPANDPIFTFIEKKRSEGKSGKLAMVAGLNKFLRVYYGKVTELYRSLPQ

SEQ ID NO: 443222 - protein, 418 aa, unidentified
MQMELSQFAAIIGIDWADKKHDICIQVTDTGQRKTYQIQHKADKIDEWARSLHRQYGGPIAVALELSKGPLVSALQKYDSFVIFPIDPTTLANYRRTFTPSGAKDDPTDAEYALELLLTHTGHFTALRPQSVEMRTLMTLVEQRRRLMDDRVRITNRLRSALKQYYPQALEWFDRIDTQLFCDFIKRWPSLAQARRARKSTLEKFFHEHHMNRKALLERRMTAIKSALPLTEDEAIILPYRLQATTLVAQLEVALASIRIYDEEIASLAPQHPDYCLFDCLPGAGPSLAPRLLVAFGEQRERFSKAAELQKYAGIAPVTERSGQSTWIHWRWQCPTFLRQTFVEWAAQTINKSYWAGLYYYQQRAKGCSHQAAVRALAFKWIRILYRCWVTRTPYDEAKYLKALQERGSPLLKIAEAA

SEQ ID NO: 443223 - protein, 347 aa, unidentified
MNSMNYVGLDIHKKSISCCVRQADGTIIQEGTIPATRDALDNWTKQLPQPWTAGMEATLFTGWIYDHLVSAGAMVKVAHPAMLQAIAAGKKKNDRVDARKIADLLRCDYFPECHMAPREIRDRRRVLRYRNLLVRQAVQMKNKVSGLLMEAGVPYNQQKVHQKKYFAELLQKQKKEMPPSMPELLRLSRSTVEALTGMQRQLIRTLESDALLAARVERLASIPGVGRVVALTWALEMGDISRFASVKKAVSYCGLCGAEKSSGGKTERTPISKQRNKHLQTTLIEAAKLAPRWSAELAQVYEREKQRGNRNRATLAVARKLVAYLLAVDREERPFDTQRIRVAVNAA

SEQ ID NO: 443224 - protein, 422 aa, unidentified
MLSVGVDWAEDFHLVALGTPNEGVVDVLRVEHQPEAVARLLTRIASLEPDPAEVRVVIETRHGLLVEAFLDAGFTVLPVNPDLVARRRGPARKKDDAEDARIACLLGLDRYAKLKQLIPHGELASELRSIARDDERATQDQRRLLNRLRMDLLSTFPAALRIARDDLGAPTVLRLLERWPTQEHLAAATRDELVEFARAGRHGWPERFADQVATALAGSHFLARPALVRAKTDSIRLAARQLLLIADQRKSWERRMGELLLGAPRRGRQRQPRSDELGGKVPGGEVYLSFPGLGDRLAARVAGEIGDHLEQFETPNSLQCYAGRAPVTRRSGKSELVVAHRLACNRHLANAVQQWAFCSISQSSWAREFYDAQRARGKGHHAALRALGNRWLEVLWHCLRRGVRYDEAVHVANRNRALGKAA

SEQ ID NO: 443225 - protein, 334 aa, unidentified
MGSLDKAGSKKTGKAITERCVCAGIDVSKTSLAYAVVSMQGPRQCANTAEGRAQMIAVLQSWGVRRVGLESTGSYHFEAADDLRAAGFEVVVLQPAQVKAYARFKLQRAKSDPIDADLIAQCTAALGALREAPDMRLAPFAEHLTMIEQIEDDVARAKTRRDRYRDPRLKQVLEDEIKQKSALKRAELRLLLRAVRTHKDLAHRLALLTSIQGVGERTALALLVRMPELGSLSREQAASLLGVAPFIHESGRYKGLRRTGGGRARARTSLFAAAQAAARQWNPALIALYDRLTKAGKPHTLAIVACVRKMIVYAYAVLARNQPWEKQAPTMIAI

SEQ ID NO: 443226 - protein, 464 aa, unidentified
MLFKYKIMKKKGLEKVKEKEFVPMAVVHPHAAGIDVGDTIHAVAVPAGRDEQSVRTFGAMSCDLEEIVAWLEKCGVDTVAMESTGVYWKSLAILLIQHDFEVYLVNARHVRNVSGRKTDQGDAEWLQQLHSCGLLKSSYLPDDIQESLRTLVRFRRTLTQESSRFVLRMQKALELMNIKLHTEISDLTGKTGTAIVEAIIAGERNAANFLPFVDPRIKADREDLVKSLQGNWREEQLFALEENYTCYKFFLERIAKCDRAIEAKLQEFAAAENEGELPATRAEKSDKKTALKKKNKNAPKFDVRAYLKSILGVDVLAIYGLNDVSAMEILAETGTDMSKWETVEHFRAWLNLCPNNKITGGKLVSSKLMRRKANAASQAFRKAANACQRSDHWLGDYFRRMKAKGGNKYAIVATANKIATIYYKMVREKVEFNPPDLTAYQEKRKNAKIAYLERALRSLKKDSA

SEQ ID NO: 443227 - protein, 370 aa, unidentified
MTQSSMLYVGLDVHKESIAVAYVAQDHGAEVVSLGTIGTRQCDLDKLIRQLHSKAKHLVFVYEAGPCGYWLYRYLTKTGHDCWVVAPSLIPKKAGDRVKTDRRDARQLARLMRSGDLTPVYVPQVDDEAIRDLSRAREDSIRDLRAAKYRLKAFLLRQDIRYTGQANWSPAHLRWLAEVVCPTPAQQIVFQEYVRAVTEHTERLQRLEQELQERVKTWRLAPVVEALQALRGVQFTVAVTTVAELGDLTRFTSPKQLMSYLGLTPSEYSSGPRRSQGGITKTGNRHARRALVEGAWAYRYPAKVSRHLQLRLEQLPKPLQDISWKAQVRLCKRYRQLMARGKNANQVVVAIARELVAFMWAIAREITLPA

SEQ ID NO: 443228 - protein, 411 aa, unidentified
MKMAGIDVHKKVLMVVVIETTSPEEKPERRRFTTLPGDLSRLSSWLRAQDVREAVMESTAQYWRTVWLELEPHMLLHLAHAFSNRAPRGRKHDFKDAERLVRRLFADELILSFVPNGEQRIWRNLTRMKTQLTRDRIRLQSQMECLLEEMRIKLSSVVTDLLGASGLRILRALAAGETEAKRLAALGDNRLKCTEEQLLGALTGSSQPMHREMLALQLERLQLIDAQIAKLNHLIAQAMKPHQEAVMRLAEVPGLGVDSAQQIIAEVGAQAGTFSSAAELTSWVGTCPGKDESAEQNHSSRSAKGNKYLRRVLNQAAHAAVKKRDSYFQAVFRRLLPRLGYQSAIWAIAHRLCRVVWKILHEGARFIEKGREPDAQAKKKRARMLVQALRRLGYDVAITATHLATQNATQA

SEQ ID NO: 443229 - protein, 355 aa, unidentified
MTQFPVPNPVPAAPDYDRTLVLAIELSNTSWVLAAQVPGLPRVKAKRTIEPTAEALLAAIQGYRERAQAAGRQVERVVATYEAGWSGFWLARWLATHGIETHVVQPSSVPVDRRARRAKSDGIDAELLLRTLLAWLRGEPRVCSMVPVPDEADEDARRCIRERAELVAERVALVNRIGAVLATLGVGEYNPLLRNRRERLDALRTALGTSLPPHAHAKISRMLDRLDLVRAQIAALEQERDAVLENEAPDRAGEMIQQLATLRGIGVQSATVLVREAFVREFANGKALGSYAGLCATPYSSGGTEREQGISKAGNRRLRTVMVELAWLWQRYQPGSAQVSWFRERVGGTGARSAR

SEQ ID NO: 443230 - protein, 357 aa, unidentified
MKLYMAIDLHSTNNYLAAVSEDGKPIMSKKLRNDPRVILETLAPYKPEMAGIAVESTYNWYWLVDALMDEGYQVHLANPTAIKKYSGLKYADDKHDARWLAEMLRLGSLPEGYIYPKEHRALRDLMRKRQHLVRLRTSLLLSLQNIIIRNCGIKVGGNTLKRQAEPVEIHLSSSRELALAGTVSKELIDHLTRQILILESHIERQVKDLVSYRNLMTIPGVGKILALTIVMETGPIHRFAKVGSYASYCRKVISRWVSNEKTKGKGNEKNGNKYLAWAFSEAAEQARRYDPQSRAFYERKKQQKNLMVAHNALAHKLARAAYYISCGTTSRLMRQGSMHEKPGRNGEPEAKLGFPED

SEQ ID NO: 443231 - protein, 451 aa, unidentified
MSKIKNHFELTHPNAAGIDIGSSSHFVAVPPDRNEQPVREFLSFTEDLYALADWLTACGVDTVAMESTGVYWIPLFELLESRGFTVYLVNARHVKNVSGRKSDVLDCQWLQQLMSFGLLSGAFRPQGDFCALRAVARLRDMLLRNQAKHIQHIQKALLLMNLLLTEVISDVVGETGQKIIRAILAGECDGQVLAKYRNNHIKASEEEIAKALQGNWREEHLFALKQAVALYDAYAVQLMECDQQLEKMLKDLARNDLKVEKPKRRGGKSKNAPNFDARTLLMQMCGVDLTRIDGIDVTTAFKVLAEIGADLSRFKDAKHFASWLGLCPGTKISGGKKISAATSRTTNRAAQALKMAAVNLRASQSALGAYYRRLCGRMDKAKAVTACAHKLARLIYAMLTKGEDYVDQGQEHYEEKYRQRVIKNLTKHAEKFGFQLIPCARNRIRNANYIN

SEQ ID NO: 443232 - protein, 336 aa, unidentified
MDERGEIVSQEWVVTTPEAFFKRFHGETKMDIAMEVGAHSRWASDLLGRCGHKVVVADPRQLGLITQNDAKSDKRDARTLAQLLRADPRLLSPIEHRAEKLQTDLTVIRMRDNLIETRTRLVTSVRGVVKATGGRLPSGETSSFPQQVSDLIPEPLRPALAPVLEVIDRLNEATYEYDCLLEHWARTRYQESSRLTQVKGVGTLTALTYMLTVGDKARFSRTRDIGPYLGLRPRLGQSGDNEPQLRITKAGDGLLRKTLVECAQYMVGPFGQDSDLRRWGLKMIEAGNGSKRARQRAVVGVARRLAVLLMSLWKSGQSYDPLRHSRAQESSAEVAA

SEQ ID NO: 443233 - protein, 428 aa, unidentified
MSYRIAGIDVHKKMLAVVVSNVEIESEFQFERRMFGGNPEQLRLLAAWLLEQEAEEVVMESTAQYWKPVWGALERYWKPIREKREGAKRRSGTLHLAQAQSNRGRRGRKKDFVDAERLVKRLVARELTLSFVPDVEQRLWRAVTRKKYQLRRDLVRLNNQLESLLEETHIKLSSLVSDLLGVSARRMLKALADGETNPAALAALAHQRLRATPEQLCDALGACTELKPVYRRLLKMTLEHLQILEQQIGQLDQELATLLHPHQDAVQRLAEVPGLGVDSAQQIIAEVGPTAATFPSGEQLSSWVGACPGDEESAGVNYSHRSPKGNRHMRRLLNQAANAAVKVKGSIFEIIYRRCVPRLGHNQAIGLIAHRQCRLIWLILHKGTLYEERGPAVTQRSKYQRTWRMIRQLQQLGYRIESPNPQASQAQA

SEQ ID NO: 443234 - protein, 409 aa, unidentified
MERLIERVCGLDVHKQTVAACVRVPASKGAREQHVRTFGTTVAELLALRDWLEAHEVTHVAMESTGVYWKPIYYVLEERFTCLLVNAAHVKQVPGRKTDVQDCVWIAQLLEHGLLRGSFVPPAPIRELRDLTRYRKVLIQDRTREANRLHKLLEDAGIKLASVATDILGVSGRAMLEALVRGTTDPEVLAELARGKLRAKLPALRLALRGRFRPHHAFLVSQLLAHLDYVDETITTLSERIEEVIGPFADELARLDTIHGVARRTAEVLIAELGVDMSQFPSDRHLASWAGLCPGNNESAGKHKSGKTRRGNRWLRAALTEAALAAIRTSNSAFTARYRRIMRHRGHKKAVLAVAHAMLVTAYHVLARQTTYQELGADYFDRRHGERVTRRAVQLLERQGYRVTLERAA

SEQ ID NO: 443235 - protein, 336 aa, unidentified
MWIIGCDYHPSVQQISFVDQETGECGNVRLEHKNGEAEKFYRKLKEQKVRVGVEATGRMRWFERLLAELGFELWVGDPVKIKAAAAGRPHRDREDADLILRLLEENRFPRIWMPTVEERDARQLVLHRHRLVQTRTRAKNQLQAMASNEGLHRRVWSKAGQAELKELALSRWGEVRRQDWLDLLEDLNERIDPLDKALLKQGQERPEVKLLMTHCGVGPVVATAFVTTICDPKRFENSKQVAAYLGLVPHEHTSGKGRQRLGHITKQGNSVLRGLLVEAAHVVARHDPEWQRKYTRLAMKKNRSIAAVAMARCLAVRLWWMWKLGLSYEQWHAKQK

SEQ ID NO: 443236 - protein, 458 aa, unidentified
MAPQFKGNPPNQKSSHPKSLHVLHPRAAGIDVGAREIYVAVPPDSCADNVRNFPTFTEDLHAVRDWLKQCGVTTVAMESTGVYWIPLFQILDASGIKVCLVNARHCKNLPGRKTDVQDCQWLQYLHSVGLLRGSFRPTDQVCAVRTVLRHRDALVRGAGRCVSHLHKALTQMNVQLHHVISDLTGVTGQSILTAVLAGERDPQKLAALKDHRIKASRDVIAKSLRGDWRAEHLFTLKQTHGLWLQHQTLIAECDTQIETMLKTFDSKADVTATPLLPAKSSHKKAQRNEPQFNARTECYRVLGVDLTSVPGFAAPTVLVLLCELGPEFAEKFPTAKHFGSWLGLCPDNRITGGKIYSVKSRDVKSRVAEALRLAAQSLWQAKNYFGDLYRRWKARLGSPKAITAMAHKLARILWHMLKFKEAFNPEVFAKEEAKMKRKKLQRLQTMAASLNYQLIPQP

SEQ ID NO: 443237 - protein, 335 aa, unidentified
MTITTIGLDTSKSWFQVHCVDAGGRMVLRRKLARSKVLSFFANIPSCVVGLEACGGSHFWARQLTKLGHEARLMPARYVRAYVKTNKHDAADAEACCEAVQRPGMRFVPVKTEEQQGLLMIHRARDLLVRQRTAAVNALRGHLAEFGIIAAKGTAKAHELMRLAGDDERLPPMAREALRYIVAQIHDIEAKLRAFEQRIVELAKNDEVCRRLMTVQSIGPFIATALAATVGDPRNFASGRHFAAWLGLTPSQHSTGGKEKLGRISKRGDSYVRRLLIHGARATVARVRGGQVQSAWISGLLGRRHFNVATVALANKTARIAWAVMSTGQGYRAAA

SEQ ID NO: 443238 - protein, 394 aa, unidentified
MKLVGIDVGKNSHHFCVMDKETGEFNVAPSSFSNNKEGFDFLINSLKPYSKKSILIGMEDTGHYHVALLKFLLSNGYTVALINPKTTDLTRKMEGGITKNDKLDTITICDVLDTPERKKQYRITKVDRFDLYEQRQLTRHHHNLKEELNVYCNRLQKSIDLVFPEFNTLFSSKYSIVYMNLLKTFGSAEAIASTDIRTIRKCFEVKGRGGRISLTPEKLKECAKNSIGISSEVETIQIKHLVNQITLIKEQIAEIDKKIEEFSITNNSPILSIPGISHFSGTSILAELGDIGNYSKPSQIIKFAGVAPYHYESSQYNAQHTGITKKGSKYLRKTLYQIILTVINNNPVFKKYYLLKISQGKGHRCAQGHCIRKLLRIIYHLLETGQSFDPALLR

SEQ ID NO: 443239 - protein, 392 aa, unidentified
MYIIGIDIGKNHHEASIVSPEGKQIGHSLRFATTHKGADSLMSFIFNNIGNSSCIFGMEATGHYWYPIYSFLKARGYTIYVINPIQSDSLRKMYIRQTKNDSIDSFLIAEVIRFGQFTTTSMADENILAMRQLCRYRDSVISSRTEIKLRISTIMEQIFPEYEKQFSSLWLSTSMGILEKYLTPENIENAPIDELFEIIKDKSHNKLTMKKAISIREAAADTFGIKIAQDAFSFQLKQLIDRMNFLDKQIEALDCQILEYYEKFDCYLHTIPGIGMIAAATILAEIGDINRFKSSSALVAFAGIDPTVRQSGEFSSTHNHMSKRGSPYLRHAIFLAATTCSFHNSPLNAYYKKKREQGKHHLTATGAVARKLTTIIYAVLRDGKPYEPKSFC

SEQ ID NO: 443240 - protein, 414 aa, unidentified
MEVVHERCAGMDVSKRDVKVCVRSPGKRRGSYAKAVATFGSVTAEILRLREHLIKAGVTLVVMEATGDYWKPFYYLLEDGPFEVMLVNPAHARNLPGRKTDVSDAQWLAELAAHGLVRGSFVPPPPIRILRDLTRARVILTQDRVREINRLDKVLEDAGIKLSSVASDIMGVSGKAMLHALVDGERDPKVLAGLARMSLRNKTDQLAAALTGRFTDHHAFMVGLHLRLIEQLTVGIADLTNRIETLIDPYRPVLKLLTSIPGVSDKAAIVIVAETGADMTRFPSAAHLASWAGVCPGHHESAGKKKSAAPRPGNSYLKGALGNAAMGASHTNGCYFQARYRRLAARTSPLKALVAVEHSILTAVWNMITNNQSYNDLGGDYYSRRDPTAAMRRITRQANSLGLTVRFEPIEQRS

SEQ ID NO: 443241 - protein, 488 aa, unidentified
MPLTRHHQRMKMVVCPPYNTLAAGEARSLYLGALSPTFRQTPTTRCTTDCRSLTGSTRDRMTGDGRCTSLRNSCRKECFGMDVVYSHVCGLDVHKKNVVACIITPDHKEIRTFSTMTEDLLALIDWIKSHGCTHVAMESTGSYWKPIYNLLEMERIETLVVNARHIKNVPGRKTDVKDAEWIAGLLRHGLLKGSYIPSRPQRELRELIRYRRSLMDERAREIQRIQKVLEGANIKLSSVASDIMGKSGRLMIEAIIAGETDAAVLSELAQRRLKAKKADLQKALHGLIGPHQRLMLKTQLRHIDELDKLIEQIDAEVKKRMDPFEEDLERLDTIPGVGRRSAEHILAEIGADMDQFPSAAHLCSWAGLAPGNNESAGKRKSGKTTKGNQKLRTALIESARAAARCKDTYLSSLYHRIAARRGANRAAVAVAHRILTICYHLLKNKQIYIELGPHYYEERKRTHVVRQAIRKLKILGYKVVVEEMDQTA

SEQ ID NO: 443242 - protein, 360 aa, unidentified
MLVIGVDAHKATHTLVAADAVGRKLAEFTVRATTDGHLKALDWARRRFGSDLVWGIEDCRSVTSRLERDLLGAGQRVVRVPPHLMARTRASARTPGKSDPIDALSVARAVLREPDLPVASHDVISRELQLLVNRREDLVAFRTAVINRLLWRVHELDPSHAPPTGSMQRFKHQEALRDWLATQPGLVAELARDELDDVTALTQRINSLERRITAQVEAIHSSLLELRGCAGLTAAKIIGEVAVVSRFRNEAAFARHAGVAPVPHWSGAKVVHRGARRSGNRQLNAALYRIALLQIQHNGPSEAYYRKRRDGGDSHAQAMRRVERRLVRKVFGCLRDDHRNRAAAHNQSDTTVFLSPAAEP

SEQ ID NO: 443243 - protein, 347 aa, unidentified
MKRIAIDLAKSVYQVAESVQVGRVDRRKRLDAGTFARYVQQQTEPVEWVMEACGTAHHWGRLMQEKGHRVVLLHPRYVRPYRRRNKTDRNDCDAILEAARCQDIRPVPVKSVQQQQVQQLHKLREGWKKSRVQRINLLRGILRESGVEAPNGIKPFLRQACELIERPEVRALRGALQVVLAEINLYEQSMRECEEQLARWHADDEIVHKLDEVSGIGLLTASALKTAVGKPERFASGRHLSAWLGMTPSEYSSGERRRLGRISCKGNVYVRTLLIHCARAALLAAKRCKARTPERLTQLQIWALQTAERIGHNKAAVALANKLVRICWAVWCHERRFSGNWRSTKPA

SEQ ID NO: 443244 - protein, 412 aa, unidentified
MEDLLEKCCGLDIHKNTIVACMLSGPLGKKPHAEIKEFTTLNPDLHRFKDWIIEEQCHFVAMESTGIYWQPIYEILEACKDDTLSLLVVNARHMKNVPGKKTDTKDSHWIASLLRAGLLRGSFIPDKQIRDFRQYTRYRKTMIHEITSQKNRIEKFLQSTGFRLSSFVSDIFGASGMNIIHHLISFGSIDRESLDKCLKTQTRKNIDKILIAVNGHLSIHQRNFLQMLLNHLNSLKNHLNEVEEAIDQEIFSFSKQIDLLTSIPGVALVAASSIIAEIGTDMSAFKTAEHICSWAGLSPGNNESAGKRKSVAITKGNPHMKSMLCEVAWVIAGKRNTYLSTWYWKLKQRKGAKKAIIGLARKLLVIIYTMLKTETYYDESVFEKRRIATQQKKTGHYIHELEKQGYIVSKAE

SEQ ID NO: 443245 - protein, 400 aa, unidentified
MRVVFGIDVSKASSEVAILVNGEKVHGYTIPNDTIGFNRLLGDLKTVHEPEIVFEATGVYSRRLQAFFEDNSYAYTRLNPLESKKQLDSLRVRKTDRIDAEKLAASQFILNRKPSYVQEALYQELRDLSRFYQNLTEDIVCSKNRLHKVLQVTFPELENILSSPTGKQYWNLVMAFPCNSFVLELDDAALRAIIRQSTSKRISEKRVTYLVDKLTKLANHSYCAVKKTSPVMEEVKYYAGELLRLSEYRQSVLEEMITLAQPLPEYEILLSIPGIAETTATSIIGELGDIRRFHSANQINAFIGIDLKHYESGDFLAKEHITKRGNPYARKILFKCIHNIASASHTNPCHIADFYEKRKRQSQVTSTKPHTIASIHRLIRTMYYLITHNKLYDYTSTQNR

SEQ ID NO: 443246 - protein, 410 aa, unidentified
MEVLYPHCAGLDVHEDSVVVCVRHMAGSKVTTQVKTFQTTTQALMLLSEWLAGEGVMHIAMEATGVYWKPVWHILADGDCEPVLANAAHVKNVPGRKTDVNDAVWLADLLAHGLIRASFVPDEPTQQMRDLLRTRKQLVRERASHTQRIQKTLEDANIKLDSVVTDILGLSGRRILEASIAGETVPQALATLAHRKLRATADELEAALRGRITDHHRFLLKLHLNQIEALDAAIACIDEEVSANLEPFRAAIQRLSAIPGISRLSAQVLVSEIGMDMGRFPTAGHLVSWAGLCPRNDQSAGKRRSTRMRKGAPWLKTTLIQCAGAAARTNNSYLQTQYLRPRSRRGPKKAVGAVAASILTAAYHMLKNNTAYHDLGANYFDRQAKNTQASRLARRLKKLGFDVLLTPLAA

SEQ ID NO: 443247 - protein, 400 aa, unidentified
MTGLLYRLLYGRPLASQTPTEQPSDVMKERGLRSSCPFRAHMLGVLTLLRRRRPLVSEFYEGRQFVGMDLHRRRSMLVRMTEFGEHLETVRILNDRDSLAEVISRAGESPEVVLEATYGWYWAVDALAELGATVHLAHPLGVKAFSYRRVKNDQRDAFDLADLLRMGRLPHAWIAPPATRELRELVRHRAKLVAMRSQCKAHVHAVLAKGGIWVPMTDLFGVEANLLLDKVTMPAPYRERIASLRRFIEGFDAEIDLFTALAQRRLTHDAGYTAIQQIPGIGPVLAAVFVAEIGDVHRFAGPAQLTCWAGLTPSHHESDTTVHRGRITKQGSRLVRWAAIESVKILPETSRIGAIREQVAHRRGNRNIGAVAAARRQLELVFYGLRDHHVRALHRSPHAA

SEQ ID NO: 443248 - protein, 400 aa, unidentified
MNPVIGVDISKGESHAQAFLKRGLPYGKVFKFQHNLEGLASFLDYIRDVESAAGIRPSVVMEATGHYHSPVVQFLDEHQYITIVINPLISFEAKKTNLRRVKTDAADAFQLGMLFYKEEFEPIKKRGQHLMNLRYLTRQYDSLTGMYVQVKLQFQAILDQVFPEYRGVFGDLYSKVSLKLLAKYSTSKDVLEMTENEITAAIQSLTGRGRSALWCLERAQILMAAARRNPFKETVFPSHLVSIQLLIKLLLQYQEHLADLVKSVDALAEELLEYELIQSIPGIGTKIAATILAEIGEIDRFEHAKKLVAFAGVDPSVFSSGKFVSTQNRITKHGSRRLRSALFQAVRCGIRSNRNKKLRAFYDKKRAEGKLFRVAVIACVNKLIHWIFAILTKKESFRLD

SEQ ID NO: 443249 - protein, 426 aa, unidentified
MSRNDYNRQAARRQRIRKTTLIVGVDVGNAFNALGFMNKEGNVLGSCSKLYNNREGFEQFVNMIEGLKTKHHLRDVLIGMEPTGHYWRKLAYFGKEHGYEVRFVRTTALKHHRELDESSSAKSDQRDALTIANITREGKYIDTVIEDGVLRQLRTLSKARERLLRYSVSAKNSLHAALDEYFPELHEIFWSMGSRSLWAILEQCPFPQDVLSMEVATLQDLIARSSRKKKESLQKAKALSEAAQESIGLKQIGNADRYRVQMCLEEVKRTVLSLKNIDKQLKFLLKEAPSATYLMSIPGIGPLSAAVFLGELGDPAHFHNARQIVKYAGYDPQESDSGSRIGRKFISKKGRWLLRKYLFFMSMRVVVLSNYFQEYYQRKLETKNRVGQQPRRKEMLCAVAIKLIKVIFALLRDKREFEDLVPAAVA

SEQ ID NO: 443250 - protein, 373 aa, unidentified
MNTHITHVAMDTHKKRHKVAMLDQQTGEIREFTVNNLAKDIAKMVKKIKKQSSGQIHFCYEAGVCGFTLKRQIEKFGCRCSVIAPSLVPIRPGDRVKTDRRDAKKLLGQFVAGQLTEVYPPNEQQEAARDLTRCRESALQNLQRIRHQLLKFLTRNGYIYRNGSHWTEKHLQWLHSLEFDLMDQKEVFEIHYAELQHCVQRLKSLDRQVEQLAKRPEYSQIVDLLCCFRGIKTLTAITVLTEIFEFGRFDCPRALMSYLGLVPSEFSSAEKRHPGGITKTGNRRVRRLLTETAWHYRHRPKVSGVLKRRRQGQPDWAINIADRAMARLSIRYRRLWARGKMPCKIAVAVARELVGFIWALLREFEIRKKCQVT

SEQ ID NO: 443251 - protein, 343 aa, unidentified
MLRTNVIGIDLAKNVLQVCHISRQGELLSNKAVSRQKLKELLAKSKPSLVALEGCASCHYWGRYAESFGHEVRIINPKKVKAYVDGHKTDANDALAIANAALQIGIKYSKPKSMEQQTLMSLEANRQFLSKTIVSLGLHIRGIINEYGIVKAKGTKGLAALVTSTLYESDVLPVSLVTTLSMLWQQYLNLKEELSKLQKSMNSTTRQIESCKRLMALEGVGETTASMLYATLGNGTQFTNGRQASAFVGLTPKQYSSGGKVTMLGIDKFGGVKDLRSMLYLGAMAYIYRLPESPKNQKQAWLIKLVDRVGFKRACIALANKTVRTAWAMLHYETEYQPKPLSI

SEQ ID NO: 443252 - protein, 419 aa, unidentified
MSFKIFKFNCCGLDVHKTWIYACIGITDSNNRTEYKQARFSSFTKGLNELCDWLAKYNCKDVCMESTGKYWIPVFNILEQHSFWVTLSHPKYTKPMKGNKTDRKDAKWICDLYMCGMVKPSFIPPADIRELRDLVRYRFKLTCMITGEKNRAQNCLTVSNLKLDDVFSDVFGKSSRSITEHILQHPGEKFDIAPFVDSRCKTPITEIQAAVDGAISKEQVVKLRQCLDHIDELNKHISEVEQEILRLSDKYEAALNLIRTVPGFNKNPLTAIQVLSEIGGDMSVFPTAKHLVSWAGCCPRNDQSNQKIKSTRISRAGSYFKPVLVQVANALIKSKKHSEFTSRYKRIKARRGHKKAIIAICRMILTAIWHILSDLKPYTPEGFLESRPVKEEKILSTSQALNLLRQRGYVIKDEPLTVS

SEQ ID NO: 443253 - protein, 472 aa, unidentified
MKKSKAFYSLYVGIDISKGKADGAILQVFPDRSRKDKMLRKKVRIDFSRSSVDQFHQTVLKYADEQCSAVIYAMEDTGIYYRGFYSYLTSLLQKKESVLVLKPSYVSHWCELHERSKSDPLDAQSIAQIIAYERDFKTVNPSFSHEKREYSSLRTETRRYQQIRKMDSQESVRLISLADVHCPELAKVFGTGMTFLKVLSVFPSTYDIIRADKQELLALIQTSSKNRFGQNKLDELLALCEDSLSQQEPAESDRRAIRSLVSHVLSLREELSSIRRNLKELCEKIPGYRQLISMPGFGLITASIVLAEIMDISRFKSADALIAYAGTDPVNRHSGSSVHSEGRISRKGSRYLRHAIVMAAEFARRHNPVLAELFSRLKAGQKKRHYLALIAVANKLLRYVYSVLKSNKDFVINFKDLLKLKEETRLTFFQNITTKIPDHNLRSVYRYEDESGEIHPFVYTARYFSQAAMESF

SEQ ID NO: 443254 - protein, 338 aa, unidentified
MSNYCGIDLHSNNCVIVVIDSSDNIVLDRKTSTSIGDVLDSLSICRDPIKAIAVESTYNWYWLVDGLQEAGYHVELVNTSAVKQYEGLKYSDDKSDARHLAHLLRLGILPTGYIYPPEERAVRDLLRRRLQLVRQRTTHVQSMQNQLTRNTGKQFKANEIKKLSPATIKRMLPNPNIQEAILSNLTILSVLQATIKKLEKSIINQVKLKPEFKQLRTVPGIGVIMALTIMLETGDINRFAKVGNYVSYCRCVDSKRMSNKKQKGQGNRKSGNKYLAWAFIEVANFSLQFNEQAKRFYQKKLAKTKRVIALKALAHKMARACYYIMKNNEEFNNERLFA

SEQ ID NO: 443255 - protein, 455 aa, unidentified
MSNRSRRGLSRGDRRRNEKLARLREIITRETAVLAFDLAADKQVCALTDPDSRVLARRTARVRAWQLAQTLDWGLAAAAEAGFTSVVVACEPTGHRWRVLDQLAAERGVVLVCVQPLLVARAREAEDFTRNKNDDTDAMIIARLVTELRCYLPERADPAWARLRHLGARRARLVVEVGAARQQVRDLLECAWPAVLDAASKPLDSANWLTAVATGLDRIGATGELSELGQRGWEDFAAAVRAELAPTRWYSAIVRAVFDAATDPAAAAVGVVDQRAGALERVRFALADLAHLRARIAEVETRMTRVLDTLGVTELVTGIPGVSAVGAATILAEAGDPIRFSSARALVKHAGLCPRANESGKYTGTTSISGRGRPELRLAAWRAVFTALQHNPVLAARHAHLTGRAENPLTDTQARIAIAASLLRQLHAVIVTRTAWDPAIAAGLDRREDGAACAA

SEQ ID NO: 443256 - protein, 348 aa, unidentified
MVLIGSDFHPSWQQVSWLNRETGEAGDRELMHGPGEVEKFYRQFPAGTIIGMEATGNCQWFVDLVSGLGHEVWIGDAAKIRACDTRQQKHDKRDARLLLQLLAERRFPRIWTPSSEQRDLRQLLIHRHKLVRIRVQVQNGLQHLAMNQGLLKKHKLWSKTGQQALRELPLAPWASRRREDLLKLKSELDEKISLLDQAAEEAAAQNEQARLLMTQPGVGPITSLAFVLTLGDVSRFPRGKQVASYLGLIPREHSSGGQQRCRSISKQGNIFLRMLLVEAAQSVVRCDPEFRNEYLHLCHSKKKGIAKVAEARKLAIRLFWMLKTHTAYPEIVRIESSSRVPLVVRHGG

SEQ ID NO: 443257 - protein, 348 aa, unidentified
MAVVAQEFEYVIGVDTHAATHTLAVVAAATGAVLSKGQFPTSPAGLARAADWITRHAPGKRLVGIEGTGSYGATLTRLLIERGQDVCEVKPPARTARAGKGKTDDIDAVAAARSVLSVEADHLISPRADGIRAAVSVLLAARKSIDGRRTADRNVLTMLLRTYELGVDARRSLTQAQLEQIAAWRTRPSDDAAAATIRGEARRLAKAVQAADTELEDNHKALEEHVRQLVPGLLEIRGLGPVTGGIVLSAWSHHGRIRTEAAFASLAGAAPLPASSGNTTRHRLSRSGDRQLNRALDIIARVRMSNDPATRAYVERRTAEGRTRREIRRCLKRYIARQIFRQLHALTA

SEQ ID NO: 443258 - protein, 375 aa, unidentified
MLSKRINQNEQSLRALFSALSAYDHKVLVVVDQPNNIGRLTVAVAQDIGIDVRYLPGLAMRQLSRIHAGNAKTDIRDAYIIAHAAKNLPESLRSVDRVEEAFLQLKVLNGIDEDLARSYTRLINQIRSALVGCYPQFEQALRGQIIHRKWVLHLLARYGGPTKIKRLGKAKAAAFARRYKARNPEPVLDAIFAAISEQTVTIAGAHYAEMGVAMSAKDALLKLEHRQQIEKEVIELINDIPHTQFLLSMPGIGPKTAAQILMTAGDMSDFPSAGHLASYAGLSPRTNQSGTSIMSNSLNRAGNKKLKNALWQSSFASIRFHERSRQFYERKRREGKRHNAAVVALARRRLNVLYAMMRNHEHYHDPAPSQEDLAA

SEQ ID NO: 443259 - protein, 425 aa, unidentified
MTYRIAGIDVHKRMLAVVIADVAVEGEYQFERRKVGTSPSEMYRLAEWLVAEQVEEVVMESTAQYWRPVWATLEQQWRPKRLQDGGARSGQLHLAQAQSNRGAAGRKKDFPDAERLVKRLVAQELTLSFVPDGEQRLWRTIMRRKHQLTRNRVQFQNRLECLLEEAYIKLSSLVSDLLGKSARRMLQAVAEGATSPEAIAALADQRLRATAQQLCDALGACRNMHPVYRQLLKMALEELKLIEEQIDKLDQEVARLLSAHQDVVQRLAEVPGLGADSAQQIIAEVGPAAAAFPSAKHLASWVGVCPGEEESAGVNYSHRSPKGNRQMKGLLNQAANAAVRTKGSIFEFVYRRLVVRLGHAQAIGAIAHRLCRLIWIILHRAIRYEEHGPAVSRSKSERRATLMIRELRRLGYRVEPMTGQAGVSA

SEQ ID NO: 443260 - protein, 414 aa, unidentified
MEQKLIYLGIDWADDHHDIVITDDSAKTLNQFQIDHTPDGFAQLHANIANYQKSPADVLIAIETNRGLLVHERIRTGYTVYAINPKAVNRYKDRHVLSKAKSDILDAQALAHLLRTDRHRFKALVPLPEDYRLLDRFCGDLRKLIDEKSRIVNQIISCLKEFYPKALELFSLNSQIFIDFLKAFPDHDTLRACKKKTFLSFIKKHRYPYPGKIEELWETIQSSTLQADTVTARAGKLRLLMLLDQLENLKIHCTHYEQEIQKILDTLPESNSIQSLPGVGDRLAPELVAALGPNGKDTHHRFHCAEEIAKLSGCVPIIKQSGKWEKVSIRHACVRSLRRTFHDWAFTSLKSSTWARAYYDYHKARNQSHFTILRNLGKKWIKILFAVWSKGTTYDEALHIQNLKARNIPWAMAL

SEQ ID NO: 443261 - protein, 338 aa, unidentified
MDHVAIDLGGRESQVCIRASDGTVIEEKRVATLALKGLFGQMPRSRVIMETCSESLFVADAARELGHDVRVVPATLVRSLGVGSRRTKNDRRDAQILSEVSCRIELPSVHISSAKARHRKTLCNSRDALVSARTQLVNCVRGWMRQTGVRMRTGGVESFTKRFHDKVGDTTPEAIKRLLTAIDELCDQVADADRQLEDEVKSDPVCQRLMSVPGVGPVTAARFTAQIDECERFPDAHRVESYLGLVPGEDSSSDRKERLSITKAGASRVRATLVQAAWSARRWRPNDPMVRWCLEVEKRRGKRIAVVALARKLAGILFAVWRDGGVYNPMRGAKAPSS

SEQ ID NO: 443262 - protein, 350 aa, unidentified
MIIIGVDYHPEFQQIASVDTETGEFSEARLRNPEQAEQFYRELAGRDAQVRIGMEASGHARWLERLFGELQFELWIGNAAEISSKRVRKQKTDRQDAQLILQLLVEDRFPRIWVPSAENRDLRQLLWHRHRMVQTRTRVMNQLQAVALNEGLRCKKRLWRERGRQQLESFQLGQWASRRRHDLLQLLDQLNPTIAELTQAIEGEAEKCPEARRLKTHPGVGALTALAFVLILGDAERFRCGKQVASYLGLAPAENSSGGRRRLGHISKQGSSMARFLLVEAAQATVRSDPNWRSQYYHLMMRRGRKTAKIALARRLAVNLYWMWRHGWDYEQLHKFGSHAGEPGNRHGAR

SEQ ID NO: 443263 - protein, 330 aa, unidentified
MDLSVQSLGIDVSKATLNYCLLGSGGEIKEEGVVANDATGIHELSSMCGDDTGSIHVVIESTGDYHLLATLMLNEAGYCVHLINPLLTHMYQRANVRKCKTDKADARLLGRMGVEHREDLSVFHLTTDQVVLKKKAALIHQLTKTKQRLASSLRQTKETLDILGDGSSAIETGDKAVKAIEDTIENLEKEVTDAGKQDPMVAKLAEIPGVSEKSAALLMSAFLGKRFDSKEKMTAFAGLDVSVRQSGTSIRGKGRLSKRGNPGLRKTLFGIAWGLKQHNEAFKRLYDYYRGKHKHYTAVMNILARKFLHVLFGMMKNQTPFNPAFIKLPA

SEQ ID NO: 443264 - protein, 342 aa, unidentified
MEHYAGIDVSLECSSVCVVDANGKIVREAKVASEPQALIAWFGSLGFGLERIGLEAGPLSQWLFAAMREAGLAVELLETRHVRKAFEAMPVKSDRNDARGIAQLMRLGWFRPVHCKSMSAQETRSLLTARKLVQSKLHDVENSLRGILRGFGLKVGKTTGQKFAGRIEELVTGHPHLQMIAKALLAVRAVLRTEFAAFEKQTRRMVRSDMQARLLTSIPAVGPIVALTYASAIDDPTRFKSSKQAGAHFGLTPKKHQSGETDYTGRISKIGDASVRTALYEAANVMLTKPVKGCSQLKSWAMRIKRRAGMSKAKVALARRLAVIMHRMLADGTSFNAAAAAA

SEQ ID NO: 443265 - protein, 343 aa, unidentified
MQTITTIGLDIAKSVFQVHGVDAAGQVVIRRQLKRRAVLAFFQKLPPCLVGIEACASSHHWSRELQALGHTVRLMPPAYVKPYVKRQKNDMADAEAICEAVTRANMRFVPTKTPEQQSCLMLHRTRHLFIRQQTAVINSIRAHLAEFGIVAPVGRKGVTELLHIVADPNDKRVSEVARACLAALGGQLLSLKQQIVEFDRMILAWHRSNQTSKRLHYIPGVGPMLATALVASVADPSTFRSARNFSAWIGLVPKQHSSGGKDRLGSISKQGDRYLRSLFVIGALAVIRYAKIHGTKHRPWLTALLARKPAKVAAIALANKMARMVWAMMARGERYKEPVALAR

SEQ ID NO: 443266 - protein, 389 aa, unidentified
MEARTVNNLLPASHDDAVGCLVAIELSKKSWIVAVNTPLSDKISRHTLKAGDGKELLDLCERIRTRVARETKRRVEVVSCYEAGYDGFWLHRLLEVHGIRNYVIDPASLQVDRRARRAKTDHVDVERLLRSLMAYLRGEPKVWSVVCVPSVAEEDDRRLNRERGRLINERIQHVNRIKGLLAIHGIYDYQPLRRDRMLRLERLRTAADGQTLPPRLKAEILRELQRLELILAMIKTIEAERDAIASPKTETEHTNAKKIQDLAKIKSIGPEFATTLIGEVLYRSFDNRKQLASYVGLTPAHFQSGAMCRDQGISKAGNGKARTVMIELAWLWLRHQPDSPLSVWFRERVGKLKGRIRRITIVAVARKLLIALWRYLETGLVPKGAILKA

SEQ ID NO: 443267 - protein, 392 aa, unidentified
MSLCVGIDVSKEKFDACCIGEGGEKIFFVSCPMDRHGFDKLVVQLPADKTSFLLGMESTACYHIALFSYLAAQGYQVVIINPLLIANFAKRSLRKTKTDKKAALTIAQFLMQEKKALCAETPSHLVGELRDLARRREKLTDQVTALKSDMKRILSVTFPELERLTGVFTKSTLRLLAEFPSAHALRQASSAAIAAIVIPRSRGRKSQASVDALMAAAAASVGVTSPAKELALKQEAALLLTVEEQIREATALLKSLCNERIKEDTEILCSMRGIGENTAVNFLVEMGGDIGIYESDKKLIAAAGLDPSTYQSGKYEGKSKISKRGNRHLRRVIWLMTTRVITNNDVFRAYFFKRRREGLPYKKAVLATAHKLIRVMYSMLVNQTYFEPERRK

SEQ ID NO: 443268 - protein, 370 aa, unidentified
MEEGIKFFVGLDVHKESIAVAIAEAGRAPARLLGSITHDVGKLRKLLARYGDGGQVQVVYEAGPTGYGLQRELARRGYDCQVIAPSMIPKRSGDRVKTDRRDCLRLAELSRAGELRAVWIPDPADEAIRDLVRAREDAVETRTRARHQLKGFLLRHEIRYSGKSSWTKTFYRWLGTLNFGASGAQTAFTEYWQAVMAADERVARLTAALAPAIEGWRFESVVMALQALRGIDQISAIGLVAEIGDMGRFAHPRQLMGYLGLVPSEYSSGERSMRGSITKTGNAHARRLLTEAAWNYRFQPRIGYRAQQRAENLPQCLRDLAWKAQLRLSARFARLKGRGVQINKVCVAVARELAGFVWAIAYTQAQLPQR

SEQ ID NO: 443269 - protein, 437 aa, unidentified
MNKSITKINPNSAGIDIGTEYIFIGIENKDVVSFPTFTHSYIKAIEYLTENKITSVAMEATGVYWFALYDLIEEAGISVCLVNGREVRNVPGRKSDVEDCQWIQQLHSFGLLRPCFIPDNLTRQLRTYTRLRQDHLSLSTQHIQHIQKALDLMNVKLHNVISQITGVSGMRVLKAIIDGNHDPKKLANLCEDSILRKKKQLVISSLYGNFRDDYIFSLKQALEAYEFYQQKVFECDKKIQQLLELITKDIPAPPDIKPPKRIRHNIPQIDNLHEKLMKLTGGKDPSQITGLTDKTLMELIGEVGTDLSRWKTEKHFTSWLCLAPGKHQSGKKSKRKTNKGHTKAGQIFRNAAYSLTKSKYSAIGQFYHRIRASKGSVIAIKATARKIAVLFYNIMTKGIEFVEKGVLAYQQKVKEQQLKRLHNQAKRLGLKLLPMYS

SEQ ID NO: 443270 - protein, 346 aa, unidentified
MIPVASDVHKGRCWMAMIPPGEDLKMLEPIECTGEAWRERLAELPPDAEIALEVSTSGYFVMSVLEEAGWRERAHWVHTAGIDSLRKQKSDRLDTRRLVKKLAVQDVEPLPEAWFPPPPIRALRLLARQRCGMARLRAQTKNRVNSLLEMHGLRPQRCVFTAKGRAWIQQQALSSAAQLCFERMFRLYDFLSAERESSEAELLAAAAAFPQVALLQTIPGLGHMLAAVVWSEIGDLARFDSADALLNHTGLVPSSYDSGEVSIHGPITRQGPVWLRWALITAANALTRSKSPLGRRYWHLRRCHKHPNVAKAAVAGSVARCVYGVLKHGAPFQAERWGRRAGNLGQ

SEQ ID NO: 443271 - protein, 345 aa, unidentified
MKITTVGIDLAKALFQVHGVDERGKAVLRKQLKRKDVLSFFANFERCLIGMEACGSAHYWARKLSELGHTVRLMAPQFVKAYVKTNKNDRNDAEAICEAVARPNMRFVPVKTAEMQAVLSLHRARQGFVRSRTAQANQIRGLLAEFGMVIPKGLGHIARRLPEILEDGENGLPAMMRQLIARLGEQLKELDRQVGELERQIKRWHRENEHSRRLEEIAGFGPITASAFVASVGDARSFKNARQVPAWLGMVPRQDGSGGKVTLGRISKRGDVYLRTMLIHGARSVIAQIERKPDKADEWLKKLLARRNKNIAAVALAAKNARIAWALLAHERGYQRDYVATRPAA

SEQ ID NO: 443272 - protein, 344 aa, unidentified
MTYYAALDVSLRSVAICIIDDEGRVCLERSVPSEVSDIAACLGGFGHGIEVVGFEAGTLSQVLAHGLGAEGFEVICLEARQVNAALSAMRNKTDRNDARGIAQILRTGWYSRVHVKSRDSHYSRALLSSRKAVLRKCIDLENEIRGLLKIFGIKLPASLGHGPYDARVRPLIEEDVRLAEALLPLLDARLVLYRTYLGLHRRVKLAARNDAVCQQLMTVPGVGPITAMTFKAAVDDPSRFKRSRTVGAHFGLTPRRYQSGEHDNPGRISKAGDAEVRTVLYAAANALMSRTQRWSSLKAWGMRLQKTRGRRRALVAVARKLAVIMHRMWIDGSKFQWGKEAAAV

SEQ ID NO: 443273 - protein, 356 aa, unidentified
MTKTLMAGMDLHSNNLMIGIVDTAGKRVVHRKLGCDLKAVTEFLAPYQRRLKSVAVESTYNWYWLVDGLRALGYPVLLANPAKIAQYNGLKHADDKSDAYFLAELQRLEILPTGYIYDAELRPVRDLLRRRVSLVQQRTALLLSFKSLYARMTGETMSLSRLKGMAADAARELYEHPANQLIATVQQEHIAALNGSIGKIEKLVLARARTLPCHEKLETLPGVGRILGMTIALEVGEIGRFAGPGQFASYCRAVNARRTSNEKDKGRNNGKCGNKYLAWAFVEAANFAKRYDDRSRRWFDRKAAKTCGVLATKALACKLAKAAWHVMSARVDYDAERVFGRTAGNQMKGLVQARQD

SEQ ID NO: 443274 - protein, 343 aa, unidentified
MSIVILGVDLGKNACSVVGVDAAGAVVVRRSMRRQTLVDYVAKLPACVVAMEACCGAHNLGRLFAAHGHEIRLMSPEYVRPYVKAQKNDDRDAEGIAEAASRPTMRFVELKTQEQLDIQTLHRVRSRLVAERRSLINQLRAILLERGTIFPVGRRKLELGIDALLADEDTTLSPRLRQLVGELRAEWRELDTRVEALNGEFVELARNDAAARRLTSIPGVGVLNATALIAAVGDASSFAKARDLGAWLGLVPRQHTTGGKPRLLGISKRGNTYLRTLLIHGARAALPSLARSETPLGRWLTGMIERGVHRNAIVVALANKLARIAWAALRKDATFERSYPVAA

SEQ ID NO: 443275 - protein, 350 aa, unidentified
MIIGCDFHTRYQEIAWLDLETGETGERRLEHAGEQVREFYGALRGQVRVGIEATGYSQWFERMLHQMGHEVWIGDAAAIRASVVRKQKTDRRDAAQVLELLHTNRFPKIWVPTPEQRDLRQLVLHRVKLVQMRTKVQNQLQAMAMGQGICRKKKLWTVQGRAELERLPLDRWAQRRRQELLQLLDQMNESIRELTGEVERQARQHPDAALLMTHPGVGPNTSLGFVLTIGPVERFARGKKIASYLGLNPSEHSSGGRQRLGSISKQGNATMRWLLVEAGQMAVRGDADLQRVYQRLKFRKGSAVAKVAVARKLAVRLYWMLRDRCDYATLVRMPGSSSSAVVPEESESGR

SEQ ID NO: 443276 - protein, 418 aa, unidentified
MIPAVIERCAGIDVGKKFLMVCVLTGPAHEKAQGEVRRFGTVRGELERLREWLKSEGCTHVVMESTGCYWKSPLNVLEDDPEYRVQIVLANPQQVKAVTGHKTDPHDASWLAHLLRHGMIRPSFIPARPLRELRDLTRRRKQMIRAAADERNRVQQVLEDANVKIGDVLSDVFGLSGQRMLEALVAGESSACDIAQLARGHARKKIADLTAALQGHQMRDAHRFLITRAMRHMAFLAEEIEALDQEIERRIAGAELDHPYQLLQTIPGIRSQAAGTLLAEAGPDMKQFPTAGNFSSWSGAAPGNNESAGKRKRSPTLRGNPHMKTALVESAWSASRTNGSEFQDRYQRLQPRLGHKRAIVAVAHLLAIRIYEVLDSSLPYQNRHATQSPASIRRLIRHHSRRLKHLHRWLVDPAGKHA

SEQ ID NO: 443277 - protein, 410 aa, unidentified
MDTLIERCAGLDVHKDSVTACVRLPAAGGGREQVLATFATTTADLLALRDWLGALGVTVVGMEATGVYWKPVYYVLEERVQCWLLNARHLHNVPGKKTDTLDAVWICQLVEHGLVRPSFVPPPAIRELRNLTRYRKAQIEERTREAQRLDKVLQDAGVKLSSVASHLLGVSGRAMLQALVEGTRDPATLAELARGTLRKKLPALREALHGRFSRHHALLVGAILTKLDFLDEVISDLSAEIEQVIAPFAAEVALLDTIPGVDRRTAEAIVAEIGVDMSRFGSAARLASWSGFCPGNNEAAGRRGPGTTRKGSKWLRTHVVEAAKAASRTKQTYLAAQYARLRPRRGTGRATVAVGHSILVAAFYILDRHQPYRDLGPDYFRRRHSREHHARRLARQLQALGYRVTLEEAA

SEQ ID NO: 443278 - protein, 413 aa, unidentified
MAAVEFTQVVSRGCGMDIHKEVVVATVRGLGIQQETRSFGTFTSSLTELRDWLMSLGITHVAMESTGIYWKPIHNVFEGHIPNVWVVNARHMKNVPGRKTDKKDSEWICQLLMAGLLKPSFIPPRLQRELRDLTRYRRKLIQMVSANKNRIIRALEDGNVKLSSVLSDTSGTTATKLIEMLCDGKELTLQDIEDIRHFRCRHTAAEMLEACTGYMNDHKRYMLKRIRECNRKLSVEIDELNKRIKEITAPFSEPMERLCEMPGIDTRTCEEIIAEIGLDMSQFPTAGHLCKWAGMCPGNNESAGKKKSTKAPKGDKHIKATLVEAAWAASNTKGTFYSERHGRLIGRKGSKKALIAIGHSMLTSIHYILATGARYKELGDNYVPERMEKKRKEYLKSELKKLGYEVVLTKKKD

SEQ ID NO: 443279 - protein, 352 aa, unidentified
MLYVGLDIHDKRIAICVLGESGQISHRVQVRTIDEMMRFLEALPDRFEVCYEASCGYGHYHDLLRPIAARVTVAHPGRLRLIFRSKDKNDRKDAERLAKLLYLGEAPAVHVPEADVRAWRELITCRGRVIAKRTRAKNSLRTLLRCAGVVPPSRPALWTRKGLAWLRRLELPTASHRLRLDLLLEEVEALTRQAERIEVHLNQRAKHSPSVLILRSVPGVGVRTAEAVAAFIDDPDRFRQAKAIGRYFGLVPSQDQSGDRNRLGHITREGPAVVRQLVAEATWQALRRSPTVRAYFERVRRGDPQRKKIALVATAHYLVRVMLALLKTGTTWEEAVGPADEPQRAVPAAAAI

SEQ ID NO: 443280 - protein, 346 aa, unidentified
MLYAGLDLSRKRLDFHLLDADGGTVEVGAAPPDADGLRGLTERIDRHGAPIRAAIESMNGARFVHDRLELAGWQVEIADAQKVKGLAPLACKTDRIDAWVLAELARRELVPAIWLPDPTVRGERERARWRLHLVRHRSSLKQRVHAVLLAHGQPCPVSDLFGVRGRQLLARLDLPEPWQGTLEASLRLIDELDREIGDCARELRRLGADHRYVPLLLTVPGIGWVLAYTIAAELGDINRFPTPRKLTGYTGLCPRVYQSGERDLRGPLSKQGPRYLRWALVEAATHACTHPAYRDRYQQTKTRIGKQRGAKIAQIDLARRLTEAIWHMLTREQPFAPKGATDPLAA

SEQ ID NO: 443281 - protein, 445 aa, unidentified
MLKSSRETKYEIENLGDVIHPVCCGLDIHKTWIYAAILIYNFEKKQIHWITTRVTSFKKKLDKLAKWLIVNGCKYICMESTGQYWIPVFDALEDAGLKPIVAHPKYLKVLSGKKSDPNDARWIAKAFACGRVVASFIPPKAIRNLRSLVRFMIKISHEATSNKNRARNCLTSLGLKLDDVFSDVFGKSSRSIINYIIAHPSEKFDVAPFVDKACKTPIAMIQDSIDKAIDAKQDAGTLLKLRKALERLDDAEKDIQELKGNITQQMGAYKKQLDLIRTVPGFDTDPFTAMRVLIEIGPDMKVFPTMKHFCSWAGVCPHHDSSAYKVKGRRISRSGTYLKPLLVNIAKAVVRSKNHPEISRRFNRIKNRRGYMKAIIAVCRMFLTAIWNILSKGEPYRADGFMPANNNGNGKALSFSQALAYVRSRGYAIIDDNSGALTTTGSQGT

SEQ ID NO: 443282 - protein, 408 aa, unidentified
MNTLYVGIDVSSKSNVVYLMLPNGDKHSNFSVANSHEGSTLLVKKIYSALTSHSLDTVLIGLEATSVYGVNLVYFLREDATLAPFNRKIHVLNPKQVKKFHDTYNDLPKNDYVDSFVIADCLRFGRINKEVYMGEYRYKALQNLTRARFFAVQNLVKEKQRFMNVLFKKYSTMTQEKVFSDDFSTTALAVYDEFESAEALANMDLHELTDFIIEKGKNRFPDPDAVAKAIQKAARSSYRLPKTVNDSVNQVLSISITSMKALESQIKEFDKAIKALMELLPNVLISIPGIGPVYSAGIMAEIGDINRFDNQASLAKYAGLAWKQHQSGGFEAEVTRLIPSGNRFLKYYLCEAAFSLVRCDKEYSDFYHLKYKEVNRCQHKRALALTARKFVRLVFRLLKDNLLYCPAK

SEQ ID NO: 443283 - protein, 319 aa, unidentified
MVLLMSPKTLYLGIDLSKHWLDAHLLPSGQTWHVATDQAALEAWIDALPPAITLVVMEATGGLETTVAALLARRGLDVAVVNPRQIHDFAKALGRRAKTDKLDAHVIALFAERMQPTARPFKEEQLQELDEMLARRRQLVEMLAGEKNRLAQARSPRVRASVESLIAWLERQIGERDRELGEAIKASPLWREREDLLQSAPCIGPVTARTLVAELPELGTLDRRQISALVGVACFTHQSGKWAGKSFCSGGRASVRAVLYMAALTGTRFNPVVKEFYQRLTAQGKPHKVAMVACMRKLLCILNAMVRNKKKWDLQLQTA

SEQ ID NO: 443284 - protein, 342 aa, unidentified
MTAIGIDTHKATLAACAIDELGRAIGEATFANDPAGHDAFIAWARLTAPEATIGVEGSSSFGAPLARSVQLAGLAVREVPPHLSRAERRRTRRPGKSDPGDALAIARVTARETNLPPIRLSDRTSELHLLLEAREDLIGEATRARNRLHAHLLVLAPGYGGTVANLVAVRHRATVGRLLRGNHTVQAELARALLTRLPRLERETAALTRRIGALVEGHPLLGLPGAGPITVARLIAEVGDVRRFRSPDALAALAGVAPIPASSGQTQRMRLNRGGNRQLNRALYVIAVSQSRFHPPAKAYVTRRMETDGKTWREAIRALKRQLVRPVFKLLVEGAEVLRAVA

SEQ ID NO: 443285 - protein, 356 aa, unidentified
MQNRKETNMTEPLMAGIDLHSNNLVIGIVDQSGQRLKHQKLDCDLQQVEQFLAPFKPQLKSIAVESTYNWYWLVDGLRARSYPVVLANPAQIDQYSGIKHADDKNDAFFLAELQRLNILPTGHIYDPVLRPVRDLLRRRMGLVHQRTALMLSFKSLYARTTGQAMSLSRLKSMDVAEAKTLYQHPANCLIAKVQKEHIEKLDQSIALLEKVVLQSARELPCYHQLNTLPGIGRILAMTITMEVGQIHRFKTPGDFASYCRTVDSQRLSNGKKKGDNNQKCGNKYLAWAFVEAANFAKRFDEHCRRWFDRKAAKTSTVIATKALACKLAKAAWHLMTQATDYDPKRMFPELALKTTT

SEQ ID NO: 443286 - protein, 359 aa, unidentified
MTIVAHTHPFVIGVDTHARNHALAILAAPTGEVIDDAQFPATAAGLTRAVSWVARRTSGDLDVLWVIEGVGTYGARLARAAADAGYAVVEAARMSARANRGVGKSDPLDARRIAQAVLPLDVTALRRPRADSGVRAAVRVLVASRDHMSAERTAAVNALTALLRVSDLGIDARRPLTSGQIATVAAWRTRQEDLATATARAEAIRLAKRVSALEEELRTNTKRVTELLTQSPARELLSQPGIGPVTAAVALTAWSHPGRLRSEAAFASLAGVNPIPASSGNTVRHRINQGGDRRLNRALHMAVVTRMRMDPRTRAYVERRTTEGRTPREIRRCLKRYLARQIYRHLNTAATVQNAPSTA

SEQ ID NO: 443287 - protein, 385 aa, unidentified
MGEAVSPTTKNGDKHMKTLNKYVGLDVHKDTIMVAVAESGRDGEVRLYGQIDSDLTALERVLRKLGGDGIVLHVVYEAGPTGFVVCRRLKQLEIDCIVVAPSKTPQAKGPRQKTDRRDAVQLARLHRAGELTAIHVPDAVDESVRDLTRARADAVHDLTRAKQRLKAFLLRLGYRYSGTANWSEAHQLYLRKLTLPLPALRSVMEEQLLAVDQATQRVNRLDELLAAQVPQWRYYPAVQAVMCLRGFRLTSAAVIVAELGDVRRFHHPKNLMAFLGLVPRENSTGDTRRLGAITKAGNAQARWCLIEAVQKALVPPKVSAPLALRQHGQPALYRELAWKTQVRLHKRGWNLIHRGLMKAKVNVALARELSGFLWDLLRQVPAPQA

SEQ ID NO: 443288 - protein, 391 aa, unidentified
MFYIGVDIAKNNHEASIIDSNGKLVSESFSFSNSIRGLEKFQKFISSFSIDSNNCIIGMEATGHYWLSLYSFLIYLGFSCIVINPIQSDAFRKMYIRQTKNDSVDSFVIAQILRFGEFSVSHFSDEDTFALRNLSRFRFALVDEASDWKRKLVAILDQVFPEYSSLFSNIYGVASRELLSKYPLPEDMISIPADELAKLLSKCSKGHFGIDKAKEIQEKASNSFGVKFALKSFSFQIKQIIAQISFLEDQILELEDEISSMINSLCPVITSITGIGDVLGAAIFSEIGDISRFERANQLVAYAGLDVAVKQSGNFNATDTKISKRGSPYLRRAIWLAASVADFKDPALSVYYQKLRQRGKAHGTAIGAVARKLTNIIFAVLRDNKAYIPNM

SEQ ID NO: 443289 - protein, 342 aa, unidentified
MKSATTIGIDLAKNSFSLYGVDDKGKTVLSRTLTRAGVVRFFANLPSCLVGMEACASSDYWARTIESLGHEVSRIHPQYVKAYLLGAKNDTNDAAAICEAVQRPNMRFVPHKSPEQIDIQCIHRTRQGYIKSRTALVNQARGLLAEYGIIIRQGISAIRNQLPLIIADEENALSGLMRRNIASLYESICFFDSQILEQDKLLKTVAKENEACQQLMQVPGIGIMTATILLTVAGVASNFKNGREFAAFLGLVPRQNSTGGKTRLLSISKRGDCYIRTLFIHGARSAITRILAGQTPKYRPNPWVIELIARRGRNKACVAMANKTARIAWSMLAQGTEYRHAA

SEQ ID NO: 443290 - protein, 333 aa, unidentified
MIPELSVGIDYHKDSLQVCILESSGIVRSNRKINNDVGELIKLVGTKSKNVVVAAEACNGSSSFLDVLHQQTNWEVKLCHPGYAQRMRSNPDKTDKSDGELIADLTRIGYLPEVWLAPEHLRDLRALVRYRALQMKEARAMKLRIRALLRNNRIKVVEGVSLWTIAGYSWLSSGVGLSEHSEWVMSRYLLDLRRLQDEVKAGTKRITEFVKTDSLAQKLLKYRGIGIITAAVMRAEIGTFTRFKTGKQLARFCGLTPCNRSSGNVSADSGLIRSGNNVLKACIAQGVWTLIRYDEHWKEFAKRLLDRGKPKGVVASAVANRWMRKLFHEVKHY

SEQ ID NO: 443291 - protein, 399 aa, unidentified
MGPPAPRTPTAAVLEYYTALFAALELSRSSWLLAVNVPDRDKISKYRITAGDGAALLKLLARLSAEAERRCDRPVKTISIHEAGLDGFWVHRLLESNGVESHVVDAASIAVNRRHRRAKTDRIDVEMLLRTLMAWARGERRVCAMVRPPSPAEEDERRLTRERGTLVTERVRHVNRIKGLLATQGVFDFEPIHKNRRQRLEDLCRWDSEPLPSRLKTELLRELDRLELVMSQIAALEAERDSILQANQAVASEKTQEAMSATAHAGAVGSQLLRLRGIGPEFASVLALEAFYRKFANRREIAAYSGLTPSPWQSGGLDVEQGISKAGNARLRKMMIQLAWMWLRHQPGSDLSRWFHQRVGNKRGKIRRITIVAVARKLLVALWRYVTQGLVPAGAELKV

SEQ ID NO: 443292 - protein, 417 aa, unidentified
MKNWNEITHYAGFDWAKDHHQVLIVDRQAQIIAEWEFDHSPEGWTKWREQIRAYPALAVAIETNQGVAVEQLLQSPVTVYPVNPRSAEAYRQRKTATSNKTDRLDAWSLADALRVDGHAWRALQPLDPIIQELRLLCRDELHLIGQRTELVNQLQQALSEYYPMALKAFDDWTLPSSWKFLEQFPTPEVLTKAGRRRWENFLHAHRLYRPQTHAHRLECFAQAAAFCGSPAVTRAKSLLAISLVKLLALLEKQLQTYREQIEKLFATHPDHDLFGSLPGAGPKLAPRLLSELGEDRTLFPDAQSLQCYAGTAPVSYQSGQVHKVYLRRQCNKHLRCAIHLWADLSRRWCHWAQVYYQQVRQRGKSHAEAVRCLGHRWLKIIWKMWQTRTAYDPELHTRNQIEHGSWVVQLIQQKAGE

SEQ ID NO: 443293 - protein, 331 aa, unidentified
MKFKHAIGIDVSKDTLDVVCHLTRAYIKVSNNNAGFKQLISWVKKQVHKELEQTLFCFEHTGLYSLELALFLEAQQLRFAIESPVSIKRSMGLKRGKSDKVDAFAIAHYAYLRREELKQYKMPSVHIRKMQVLLTQRDLLVSQRTALKNAQGEQHNVLAIGENKVLFDVYQQTIAHFNKQVEKVEAALNALIASDPQLHKLFRLITSIKGIGDVIGYYMLVYTGGFTQFETWRQFACYCGIAPFDHESGTSIKSAKRVHQMAHRKIKSLLFLAAATAVQFDPELKAYYQRRIAEGKKKRYTLNAVKNKLVARIFAVVKRDTPFVQIYLHAA

SEQ ID NO: 443294 - protein, 374 aa, unidentified
MLSARPAGACRPPPDQQKELAITTIADPERPRVTVGVDTHLDVHVAHAKDQLGRRMETVSIPTTPAGYQDLLAWARGLGEVEAWGVEGTGCYGAALTRFLGDQGQVVLEVNRPDRQARRRRGKSDPVDAEAAARSVQAGEVTTVPKAGNATVEMIRSLRVARQTAIKARTQAINALKALLVTAPAQLREQLRGRSAAMLVRQAAALEPGPLVTPTAAAKLALRCLACRYQALHAEVATLDTELARLVAKAAPGLVARFGVGPDSAGALLVAAGDNPGRLRSDACFSMLCGSSPIEASSGKTRRHRLNRGGDRQANAALYRIVVVRLRWHQPTKDYMARRLKEGKTTKEIIRCLKRYVAREMFTVLNQTVPTPAT

SEQ ID NO: 443295 - protein, 339 aa, unidentified
MQLYAGCDLHSTNNYWSIIDNDSKQIFSKKIPCNPQKILKMLEPFKSDLAGIAVESTYNWYWLVDLLMDEGYPVFLANPVAMKKYSGLKHSDDNHDAFWLAEMLKLGILPQGYIYPKKERPIRDLCRKRLQFVKIRTSLILSLQGIISRNTGQRIPAHKIKSLPQEAIAELVNKDDNLMLSVAMSKVAIDNTTRQIKYLEKTLTDQHKLKPHYQNLLTMPGVGPILSLTIMLETGPVSRFKQVGNYASYCRKVDSKWTSNNKNKGKGNKKNGNKYLAWAFSEAAEHARMFSEPAKRFFEKKMSQKNRMVAHGSLAHKMARAAYYIMRDNVPYNPQRMFS

SEQ ID NO: 443296 - protein, 426 aa, unidentified
MTNNNMAHNNITHPKMTHPKMKFTYVGIDSHKETHTAVFLDCFFDKLGEITFGNRLKDFDSFLTDAQNFKLNGTEFLFGLEDTSKYGRLLTKFLMSNGQTVKHVNAYLVAGERKNLGFEKSDSTDAQCAARILISKFQALPETEEDERYHILRTLVVRRDFLVRGKTALKSYLHSLLTIDFPNYHKFFSQLDGKTALEFFTKYPSPNMLNNTTVEELSQFLWNHSGGLLEMERAKEILSTIDTATTPVHEVRNNTVLSAIRQLQYNMQELEIIETDLYKVYKQFNTTLTSMTGLDLVSASKMLSCIGDIRKFATPAKLAKYAGVAPVSHSSGKRDIQFASTRGDRELNSLFYNLAVRMITTYEPGHKAINSFFHEYYHKKLSEGKTKRQALKCVQRRLVNIIWTMLTNNEDYVNPPMIGVKKTETL

SEQ ID NO: 443297 - protein, 465 aa, unidentified
MTRKRKSKRSVPAGRPESIPIWNPNAAGMDIGAEEIFVAVPADRDGQPVQRFGTFTSELGRLSEWLQQCRIETVAMEATGVYWIPVYQILETAGFELCLVNARYFQNVPGRKTDVSDCQWLQRLHSAGLLRGSFRPAQEVCVLRSLTRHRDNLIRLASTHVLHMQKALDQMNVQLHHVLSDITGLSGLAILDAILAGERDPRVLARLRDGRVKASEETIVQALTGDYRAEHVFTLKQSLTAYRHYQKLMAACDLEIEQQLKRFDAKVDAKAKPLAPPKVRRRKIFSNEPNFDLRSHLYRIFGVDLTAVPGISVLTAHTILSEIGPDISKFRSAAAFASWLGLCPHNDISGGKILSVKTRRVNNRAALAFRMAANALFRSQSPLGDFFRRMRAKLGAPPAITAAAHKLARIVFHMLTTRDAYDEAILNKNERGFRARAEARLRAQAKALGYSLVAAPAQAAQPKTA

SEQ ID NO: 443298 - protein, 346 aa, unidentified
MRFYTNQHKYYCGIDLHARNLYVCIIDQPGHILVHRNIQAHPDYLMQVIKPYMDDLAIAVECMFTWYWVSDFCLQHGITFVLGHALYMKAIHGSKTKNDKIDSQKIAMLLRGGLIPMAYVYPQRMRAARDLLRRRMYFMHKRSELISHIQNTRSQYLVEAFDSPVARKRHRHSIVEKFHDQAVAKTIESDLKLLNDYDDVIRDVENYLQRSVKTHDYNTFYLLRSIYGVGKILALVMLYEIHDINRFEKVQYFTSYARLVRPQKESAGKIKGGANKKMGNAYLKWAFGEAVLLLIRESEEVKQLHMKLKNKHGKKTALAILSHKLGRAVYYMLTRQKVFDVDRYVN

SEQ ID NO: 443299 - protein, 420 aa, unidentified
MTRKNNNKIISVVHPICCGLDVHKDMVSACTIITKADGEQTFVVNEFSTFTDDLYRLKSWLSSHACPVVAMESTSVYWRPVHNVLEDAFKVVLVNAKHVKNVPGRKTDISDSMWLASLLRIGVLKASFIPEKRIRQIRELVTLRKSYTRSLADYKRRVHKLFETANIKIASVMSNLFGKTGRNLIAKLIDTDIELKIEHVQQCAQGSLKKKVTELLRAIQGFFEDHHRFQLKMMMHTIEHLESEIEAITKRLDQILIPNHDLLEQLDEVPGIDKKTAQSIIGHIGDTLTAFRSDKALASWGGLCPGNNESAGKRKSGKSPVRKHPFKELMIEIAWAAVRTKGSYYKDKYYRLKSRRGAKRAIVAIAHRITKAIYHIIKHGRSFVDLGEAYLMSKSKEKRLKALKRKARHLGFSLVPVATK

SEQ ID NO: 443300 - protein, 313 aa, unidentified
MNEKFAGIDVSKHAFDLNVNGSDKVEHFTNDVKGVRKCSKALVKLAPALVVIEATGGYEMDLAMALQQAGLAVSVINPARIRNFAKAAGILAKTDDIDAKAISFFASALKPPTTAMITESTRKIKSLVARRGQLIRMRTAELNRQGHAVDKFVDKSLKATIKLLDKQIESIDKEIKGYINNDPEMNTKANIAESMPGIGEVTASMLVTELSELGSLTRRQIASLAGLAPIARDSGTFKGKRMTGGGRGDVRAKLYMPTLVAIQYNPAIREFYQRLLKAGKTKMTAVTACMRKMLTILNVMVAKKEYWKSELYA

SEQ ID NO: 443301 - protein, 461 aa, unidentified
MAQKRKKRGKPIQSLKTIKPDAAGIDLGSREHWVAGPPIEVDTPNVQRFGTTTPELLRLADWLKDQGVTTVAMESTGVYWIPLFEILDSRGFEVILANARQVSHVPGRKTDMLDCQWLQLLHACGLLRGSFRPSDDICRLRALMRERDTMIDQRSDWIRRMQKSLDQMNICVHHAVSDITGVTGMAIIRAIVDGQRDPRTLAAMRDRRCQKSEQQITEELTGNWRLEHLFNLRQALKMYDQFCEIVTEYDTEIIAYIKTLQPCVDDNETVPPPASKSKARNIAKKGQEPMRQALYQLNGFDLTTIDGIGVDTAAVVTSELGLDYDAFPDEGHFVSYLRLAPNLSISAGKKVPSKLKGTTTTRVATALRTAALSLRNSKTALGAFYRRISRRKGASVAVFATARKLAQIIYRLVRYGQAYIDIGAKAYEAQFNNRRLTYYTKALKEMGYKVKPLAAKEAQAA

SEQ ID NO: 443302 - protein, 341 aa, unidentified
MNTNAPQLGIDVSKLKLDVALLLSTGTHAATFANTPKGFLALARWLARFPVRPRVCLEATGTYALPVAHFLHGQGFIVSIVNPMAIHFFARTRMSRNKTDAHDATLIAHFGQQHQPRAWQPPTPAQAQLQPLVRVREQVLESRVVAQQHLESAPAATAKYFRAQIRLLDRQLRAVAGQIQQVLQAHPTLKESAALLTTIPGVGTVTAATVLAIIPEIDQLDNARQLAAFAGVTPSQRQSGTLTGRTRMSKLGHRRLRKALYFPAITALRCNPRVQALAIRLAQKGKAKMVIVGAAMRLLAHLIFGVLKNRTAFDPGYQRRRAGTTTNSRAAASLQLAPGCP

SEQ ID NO: 443303 - protein, 308 aa, unidentified
MDIAVFNPTDGLVHQTKINNNVKEIRGFLKGLKKQLKTEITEHLFCMEHTGKYGHAFLTASFLEKAKVWVELPVQIKRSQGLVRGKTDQWDAVRIAKYAHRFADKAVFWIPADKTIQDIKDLQVKRSRLVKAYSQLSQENKNDPIFKKPLLALKQGIQSIELKMEQLLEHNQVARQQYDLLTSVPGIGKQTAMALIVVTNGFTRLTESRKLNCYAGLAPFPYSSGSSVRGRTKVSKMGDMKLKVLLNLSAWNAIRAIPALKDYFKRKVAEGKHKMSVINAVRNKLLALALAVIKRNSPFIKENSFSFS

SEQ ID NO: 443304 - protein, 349 aa, unidentified
MLIIGCDYHPSFQQIAFVDIESGELRERRLVHPEEAEQFYGELKQRNVAVRVGMEASGHARWFERLLRQLEFELWIGDAAEIRTKRVRKQKTDRQDAQLLLRLLMEDRFPRIWVADAENRDLRQLLWHRHRLVQMRTRVMNQLHVVALNEGLQRKKALWRPTGRKELESLALAPWASRRRQDLLELLDQLTPQIQKLTQALEAEVEKRAVAQRLMTHPGVGPQTALAFELVIGTPDRFHRGKQIASYVGLVPEENSSGDRRRLGHISKQGNALLRFLLVEAAQATVRSQPQWKSRFFHLAMRRGRNIAKVAIARKLAIDLYWMWRRSCDYGQLKQFGSHAGKPGNLYGV

SEQ ID NO: 443305 - protein, 345 aa, unidentified
MKLHTIGIDLGKTIFHLVGLNVHGEVVVRKKFSRTQLLRFTANVQVTLIGMESCGGAHFLGRALREQGHHVRLIPAQYVKPYVKTNKSDYIDAEAIAEAVARPTMRFVPIKTDEQLDLQSLHRVRERWVMRRTAVINQIRGLLLERGITLRKGRRYVDAALPLILEDADANLSGALRMLLAQLKLDLDQLAERIDEADSVIQKTAEENEACQRLVEIPGIGPVTATAVIAAIGNGGAFHKGREFAAWLGIVPREHSTGGQQKLLGISKRGNSYLRRLFIQGARAVLQQHAKQSSGLSTWLAQLTSRAHPNVVAVALANKLARIAWAVLAKNERYRPPVLADAAAA

SEQ ID NO: 443306 - protein, 395 aa, unidentified
MISVGIDVSKGKSTVCILKPGGEVVKPPFEMEHAVEILDSLVSLINSFDEETRVVLEDTGHYHLPVASYLSSHGIFVCCVNALRMKKFCAQSIRRAKTDKIDAVRIASFGITYWSELTRAYDAPDTYGELRFLARQYYQITSILVKAKVNLSNLLDQVMPGISNLLQNQKDNHKLTEFVDRYIHFQTILDMGEKKFTADYCKWAKKKGYRCNERKAAEIFALAQNGIPSLPNSQSVKIAVREAIKLIHSTEESRNTILAQMQALCKTLPEYSVVRDMNCIGDALAPRIIAEIGDVRRFRNKHSLIAYAGIDAPPYQSGAFNASERKISKRGNSYLRKTGYEIMQSLIKHKPINDPVYDFIQKKRSEGKCGKEAMIAGLNKFLRVYYGKVMELYSE

SEQ ID NO: 443307 - protein, 353 aa, unidentified
MEQFIGCDAHKKFSVFVAVNEKGQAGEALRVAHDRQLYREFLARLPAHSAIAVEASGSYSWLVDEMERSGHHPRLCNPLEAKRRMGLTNKTDKLDARGLAILLRNGTLPEVWIPPAEVRDQRELLRLRIFLVRLRTRVKNRIHGTLARHNVQVPGADLFGVAARLELVARLPELPVHSREAVEQKLTTLDFLETQIESAERRLESIMKMSVEADLLKTLPCVGKILSMVLMLEIGRIDRFPTAAHLASYAGLVPRVRSSGGRTHMGQICGNVNRNLKWAFVETGNLIVINQRRFAGTHVVRLYQRIKRAKNHQKAVVAIARHLAEAAWWVLTKQEVYREPPGPRQQALSSTHG

SEQ ID NO: 443308 - protein, 352 aa, unidentified
MEKNNKLDFGGQHIYVGMDVHKKSWSVSIHTEQFEHKTFTQPPEVEKLTYYLERTFPGATYHTVYEAGFSGFWLHDQLREKGIDCMVVNPADVPTKDKERAGKRDRVDCRKLARGLRNGEINGIYVPPRVKVEDRTLVRTRQSMVRKQTRCKNQITSILFFYGIVIPEEGRWSRRFINWIESIRMERTSGDFALKVHLEELKHLRQIIAKLNRAILSLSRTEEYRADVLLLKSVPGISTLTAMILLTELADVSRFSSLDKLASYAGLVPDIRSSGETEYSTGITFRRNAALRALLIESSWIAVRKDPALTMAFNKLSTRMKKTKAVVHIARKLLNRIRFVLKNRQKYIPAVV

SEQ ID NO: 443309 - protein, 275 aa, unidentified
MNLRAIGIDLAKNVFQACGVNEHMKSQFNKRLKRNELLDFMRQQAPTMVVMEACYSSHYWGREMAKLGHDVKLIPAQHVTPFVRGNKNDPNDSFAITEASQRPYIRFVPVKTEFQQEILCLHRIRERLIKNKGALSNQARGLLSEFGVVFPCGHKALLNGLNGVIDNAQYSHRLQNMMIDMLSEYETTLKRLKGMEQQLEIFVEGSESGKILLSIPGIGIINASALLASIDKGQAFSHPKEFAVWLGLTPKQHASGNISKMGGITKRGDRYLRKQ

SEQ ID NO: 443310 - protein, 380 aa, unidentified
MKFYSKAHKHYCGVDLHTRSMYLCVQDYAGKKLLHHNYPADPQRFLQAIRPFREDLVVGCECMFSWYWLADLCLQEQIHFVLGHALYMKAIHGGKSKSDKIDSDKITTLLRGGTFPVAYVYPRGMRETRDLLRRRMHLVHIRAGTLAHIQNTNSQYNLPPFSKRICHARNRADVAERFTDQSVRKNIELDLDLIDHYDQLITQLELYLVEHAKVDDAFSFHLLRSVPGIGKVLALVLLYEIHTIDRFASAGDFLSYARLISTRAESAGKLQGVMGRKIGNAHLKWAFAEAACLMIRELDQAKRFVQRLEAKHGKPHALAVLRARIGRAVYYILKRKEPFDLKRFFGETQSSKAATAASPSITGSSPLVAGDAAEALAVGR

SEQ ID NO: 443311 - protein, 340 aa, unidentified
MFTNFVGIDVSKSKFDLALIKDQDKDHVIQGVFDNTRNGIKSMSKFLEKEHHVQFSETIFCMEFTGVYCYPLTDFFVKQDCHVWIEMPVNIIRSLGLQRGKNDRVDAHRIALYAYKNRDDVKLWKPQREAILKLRDLLALRERLIVAQKSLQMPINEKISMGDKKGAEMLRKGCQKSMSSLENEIGQIDKNLDDIIKDDPQLKELFQLATSVPGIGKLTALFMICFTNEFSMYTNPKQLACYCGVAPFEHSSGSSIRGRTRVSHMANKVLKRMLHMGAMSVVSRDPELRDYYQRKVAQGKNKMLVINAVRNKIIHRLCAVIKRGYGYQSEIIFKERLVLS

SEQ ID NO: 443312 - protein, 348 aa, unidentified
MTKLARIGIDTSKSVFQLHGVDEKEKAVLRKQLRRRQFLTFFAKLEPTLVGLEACGASHHWARELQKLGHEVVLIPPQYVKAYVGRNKNDKIDAEAICEAMSRPRVQERRVPIKSVEQSAAQMLLGVRASLIKRRTQLTNAIRGHAAEFGLVAAKGLDKIELLLVRIAGDDSLPALAKEMFAALGQDYAELEPRIAQIDKKLLAFHRSNEVTRRLMEVPAIGPIGACLLVTKIVDPYAFRSGRRCAAWIGLTPKDHSTAGKQKLGGITRAGDESLRAVLVSGATACIRHAKSGRGSPSPWLAELLKRKPPKVAAVALANKTARIAWKLMISGERYDPARRAAREALAA

SEQ ID NO: 443313 - protein, 372 aa, unidentified
MTEHSTLFVGLDVHKDSIAVGYADAEDRSEPMYLGPIGTRPADIDGLVRKLQSKGKRLLFVYEAGPCGYWLYRYLRRKGLECAVVAPSRIPRAAADRVKTDRRDALQLARLARSGDLSAVYVPEPEDEAMRDLSRAREATKRDVTMAKQRLRSFLLRHDIRYEGNSTWGPKHLRWLATLHFDRPAQQIVFQECLGTISQGTERLARLEAEIQEGLKGWRMRPMVEAFQALRGVQLRVAVTVAAELGDLSRFDSPRQLTAYLGLHPSEWSSGDRRRQGGIAKTGNAHARRVLVEGAWAYRYPARLSPEIQERQESLPEAVREIAWKAQVRLCKRFRALTARGKHSNVAITAVAREMAAFLWAIGRHMSATINL

SEQ ID NO: 443314 - protein, 342 aa, unidentified
MESIYYIGLDVHKKTIAFCIKTLSGKNVRQGVVNAERNALRHWLAELSCPWMGAMAATLFTGWIYDFLKPHAVELKVAHPEMLKAITAAKKKNDRADAEKLADLLRVNLLPECHMMSEELRELRRTLRYRNMVVRTAAQMKNKMAGLMMEVGATYDKKRLYGSKYFNQLMGRVEAVPDSVKELLQLSRSNLELFTAIQKKLVRTLRENELIRRRVELLMSIAGVGEIMALTWVLEIGDPTRFHSSREAISYCGLCSAQRESAGKEQRGPLSKKRNKHLQTMLIEAAKLAPRWNIQLAELHEKELTKGNCNRATLAVARKLVEYLLAVDRRGTAFEERQSQVA

SEQ ID NO: 443315 - protein, 409 aa, unidentified
MRYYLGVDWADQTHAVWVVDERGTKVAMRTVPHTAEGLSEWGRELDEWRAQGTELWAAIERPEGRVVDFLLDHGVVVYPVNPKALDRARDRFRQSAAKSDPFDARVLADFLRTDHARLRALRPSSEAAQELKLLTDDYQRQIRQQTRLVNQLTMTLKAYYPRALEVAELPTALARDFLQAYPTPAALTALTERQWQRWARAHRMHEARTQELWAVLQRPQLPVPAHVVRAKTRLMQSLVAQLTLVVEVVGTYREAIEDFFAQIPAAQWIRTLPIGDHGITAPTLWARLGDAPGRWESFRHLQAQAGTVPVTIRSGKQQVVRFRFACDKSLRYVIDHVAFLSLRWSEWARAYYAGQRARGHSYHQALRALSAKWLKIIFVMWKRQVPYDEQYHLATMTRQQLRLRQKQIA

SEQ ID NO: 443316 - protein, 388 aa, unidentified
MEVLYQSCAGIDVHQANIVVCILHGPLTSTRPKREMATFDTTTKGLRACHDFLSQFHVEAVGMESTGVYWRPVWHALCDDFELILAQPAHMKAIPGQKTDKKDAHWIAKLTRIGLLPRSFVPDETIQELRELTRQRKHYVESRNRETNRIHKILQSGGIKLTTYIEDIMGLSGRNLLQLLVDGTPITPRIVHQSVYTSLKKKVPQLLEALDDYFSDHHRFMLKQSLEIYDFYQKQIELLEERMNVYLSQYEKHVEILDSIPGIDVITASVIISEVGVDMSQFPTFGHLASWAGLCPGNNESAGKKRSTKIRHGNSYLKKCLCQAAFAVKRQKGSPLAERYYQIQSRRGSQKATIALAHQLLKIAYILLKEQMTYPEFLAQKKRLLGTS

SEQ ID NO: 443317 - protein, 373 aa, unidentified
MISVGIDVSKGKSTVCILKPYGEIVCSPFEVLHVEKELNALEDLLNKLDGEIRIVMEATGIYHLPILTFFHEKGYFVSVINPFAMKKYAKDNSIRGAKTDKLDSIMIANYGIEKWFKLQKYKGDEEIYGELKFLGRRYRHYMELHVKALQELTHILDYVMPGIKKMFNSWNEANGKDKLSDFVEQFWHFDLITSMSLEKFTEEYLVWAKEKKYHRSRSKAEAVYELASNGISTLSSGTPSTKMLVQEAISVLRTVDSSLFLILTRMQELAKTLPEYSTVREMGGVGDVLAVKLIAEIGDIRRLHSAKALIAWAGIDPPPYESGQFIGSKRKITKRGSSTLRKVGYEVMRVLKSHPAYSAKTEHSLRMSGALFR

SEQ ID NO: 443318 - protein, 355 aa, unidentified
MTMLAEDYDYVIGGDPDRDTIDLAVLDSATGGVRAHLIATTDKTGYAQVLDWANQHSTGRRVWALEGTGSFAAGLATELAQAGEDVVEVGGLRRTRGAKNDRLDAIRAARTALARAHQASPRARGIREAIRALTATRNAVIVSRTKAINELKSLIVVAPEHVRADLRGRTLAKQLAVIEAMTRLDAATAEHRVTVLTLQSIAARIRFLGHQVDELEPELGRLLSQHPSGPSLLAQPGVGPVVAAQLLLSWSHPGRLRSEAAFASLAGVAPLEIASGQRTRHRLNRGGDRALNRALHTVAITRLRSHPESRAYETARRAQGKTHRDVRRCLKRTIARQLYRVMESAARASVEPTMT

SEQ ID NO: 443319 - protein, 414 aa, unidentified
MAKEETISWFAGVDWGSERHQVCLLDARGTTAGEREFPHSGEGLAELGDWLLSMAGAASTVAVAIEVPHGPVVDALIDRGFVVFAINPKQLDRLRDRFSVAGAKDDRRDAYVQADGLRTDRRLFRRLQVADPRLIELRAWSRLAEELRRERVRLSNRVRHQLWRYYPQMLKVTDDLASPWFLELWAIASTPAKAGRLRKSTVERLLKQHRIRRMDAETVLHILQEPAIKVAEGVAEAASIHMRSLVARLRIVNRDLHEAERKLDELCTAISEIEQTSGQSLQRRDVAILRSMPGIGRINLGTLLSEASGPLSRRDYEGLRTLSGAAPVTKRSGKSLIVVRRYAAHVRLRNTVYHWARVATQRDSKCRARYTALRKRGHSHGRALRGVADRLLALACVLLQRQTLFDPYFGRPTA

SEQ ID NO: 443320 - protein, 350 aa, unidentified
MFIIGCDFHSRFQQIAMLDPSTGEVLERRLEHENGEAQKFYDSLPGPARVGMEATFNAQWFERILQEHNHEFWIGDAAEIRAAMVRKQKTDSRDALHILDLLLTNRFPRIWVPSPAERDLRQMLRHRHKLVRIRTSVKNQLHALAIGQGLCRRKKLWAKVGRKELESLVLAPWASRRREELLQLLDQLDPWIDKLDVAVTEAAESCPQAVCLMKQAGVGPVTALAFVLTIGPVSRFANSKKVVSYLGLNPSEASSAGRQRLGAISKQGNSMMRYLLIEAAQTASRLDPELRRDYQRLKFRRGSGVAKVAIARKLTVRLYWKLREAAQPVPSARMQGSPGSPVVGESLSPN

SEQ ID NO: 443321 - protein, 346 aa, unidentified
MTRYIGLDAHSESCTIAVLGGSGKRLRHERVQTSAELLKSFIKEVPRPRHLCMEEGTLSEWLCEELTPVVDKLVVVMPDRNPGNKSDLIDACKLADDLRRDAIRRPVYKAPGSFRALREAARTHYALQRDKVRTKSRLNALCRGCGHAELAKSMYAPTTRAEALQQLPEHLRPRAALFGQQLDALIECAAQAERTLQEESSRVPMVRRLATAPGLGVVRAAYIVAIVMTPHRFRTARQFWSYSGLAVVTRSSSDWVSEGAGKWRRSKTQQTRGLNHNRHPLLKNVFKGAALQITLMPDHPLGQAYQRLLTRTKPNLARLTIARRLAAAVLAMWKNGEDYEPARHST

SEQ ID NO: 443322 - protein, 347 aa, unidentified
MRKHNTIGVDLAKNVIQVCVVSVSNKELLNKELTRKKFTELLVKQKPALVAFEACATAHYWARVALRHGHQIKIIPAQAIVPFRQGHKTDSNDALAVAEAANRPNIKVAPCKGIEQQGMQSVQRSRELLVQERTALSNHLRGLLLEFGVVIPRGFAALTQRIPDILEDGENELPDIYRPTLARLYERFCRLREDIQFLDKQIACLVKQNEPCRHLTEMEGVGPISAILLFATLGTGEAFKNGREFSAYIGLTPKQYSSGGKTNIIGISRHVANRRLRAVLIQGARAYVHKMKEPQSPKDKWLWSLIQRAGYGRAAVALANKNVRTAWALLTRGTVYDKQYGNELQPA

SEQ ID NO: 443323 - protein, 361 aa, unidentified
MTKVSTMTSRAATTDFIGLDLSDKTATYVVLSAEGQVIKDGRLSLTRAGLSRAFAARPPASIAIEVGGHSPWVSRMLTELGYVVTVANPRQVKLISKGPRKNDRQDAENLARLLRYDREMLRPICHRGETAQADLALLRSRDVLVRGRTRLINSVRSMVKAAGGRLPKCSAESFHYKVQDHLPEMLKPALEPTLEVIAGLTEHIKTSTSKLEKLADERYPETYILRQPKGVGPLTSLAFVLTLEEALRFGKSRSVGAFIGLTPRQYDSGESHPQLRITKAGDAFLRRLLVSSAQYILGPFGEDCDLRRWGFKLMRGSDNQILKKKAIVAVARKLAVLLHHLWLTGEVYEPLRQAALEEEAA

SEQ ID NO: 443324 - protein, 339 aa, unidentified
MKLYGGIDLHSNNSYIVLIDSGGAVVQRSRVGNEIGLVLRSLAPYREQIDSLAVESTYNWYWLVDGLKAAGYAVKLANPSAMQQYQGLKYSDDRSDARWLAEMLRLGILPTGYIYPEAQRPLRDLLRQRSFLVRQGTAQRLHTGNILCRNQGRKSSRQQIGQMTVAEAQQLFPDRERTLAVESSLRVIEVLEQQIASIEKQVLSRIKPEAGFQNLQTVYGIGPILAMTIWLETGDIGRFHQVGDYASYCRCVASTRISNAKKKGENNSHNGNPYLAWAYVEAATYAARFYRQATRFVERKTAQVNRTLAIKALAHKLARACYYVLRDGVVFDPTRLLGS

SEQ ID NO: 443325 - protein, 396 aa, unidentified
MKTTRIGLDIAKQIFDLHGVDGRGKVVLRKTLRREQVSEFFAQLKPCEVGMEACGGAHYWHREISRLGHSVRLLSAHKVKPYLDGNKNNRHDAAAICEAMSRPSMRFVQPKSVAQQDLQTLHRTRALLVRELTALSNQMRGLLQEYGVVIRKGVAALRRVVPQLLAGDDQRLSAVLRQVVAEQLERFKYLQQRLASYDRQINRSCKQDQRCRRLLQVEGIGPLTASALVAAIGNGQEFKNGRHFSAYLGLVPGHSNTGDKTVMLPITKRGNRYLRTLLIHGGRAAVYAARHRTDPRSIWLNRLREGSCHNVAAVALANKNARVAWAMLRYGEDYRPCRAHRRAPDPATARTAQASQNHAGLRRAPRPPRPAEQRAFFRPALRSNEGRGEKMLRQRS

SEQ ID NO: 443326 - protein, 606 aa, unidentified
MRTDEKRWRNRKAKKELARRLQSENPGLEVVHPHAAGIDVGNGAHYAAVRPDRDSQSVRRFECFTADLYRLADWLQSCGVQTVALQSTGVYWIPLYNILEERGLEVYLVNARHTKNLPGRKSDVQESQWLLKLHTYGLLNNSFQPPSEIRTLRTYWRQRLQHVTGAATCVHRMQKALTQMNIQLAHVISDLSGVTGQLIVRAIVAGERAPQKLAELSHPRIQASRAEIAKSLEGNWRPELIFVLQQEMEMYDTYQRRVAECDQELQKHLRDFADTVPPPVKKELPPKKKKKQNKNNPHFHLADELERITGVDLTRIDGIDVIVAQTVISEVGLDMSPWKTEAHFASWLGVCPDNRISGDKVLARGTRHVLNRAATALRLGASTLLKSQTYLGAQYRRLRSKLGAPKAITAMAHRLARLVYRMLKYGQHYAVGRVWLPSFSHQAVRDIDLPSPVNKMLQEFAIGRQQGEFLFCTKSGKPLAQSYINTYILKPAGIPGCHALRRFRVSHLREVGCNEDILKCWLGHSNGSDITDRYSKLSENLELRRTRAERVGTGLDLSSVTGHPGPQTKKPRKPKSVVEVGTSQYIAGDEDLPVELLETPVPLVEV

SEQ ID NO: 443327 - protein, 422 aa, unidentified
MLAESQDEEQIIARVAAIDIGKAELVCCVRVTAEGNSKKRWQEVSTHSTMSRSLAELANHLVDLRIERVVMEATSDYWKPVFYLLEAHGLEPWLVNARDVKHLPGRPKTDVLDSVWLCKVAERQMLRPSFVPPAPIRRLRDLTRYRIDLVGTRTAEKNRVEKLLEDACIKLSVVASDIFGVSGREMMAALIDGERNPKVLAQLARSSMRRKIGELEEAFTGLFDDHHAFLLARMLARIDGIDADIAAVDEQIEAQLAPFAAAAERLDEIPGIGPVAAAIILAEIGVDMSRFPTAGHLCSWAKFSPGINSSAGKTKGSGSTGHGNRYLARILGEAAVGAGRTATFLGERSRRIARRRGKKRAIVAIGRSILVIIWHLLKDPDTRFHDLGADHFSRRTNPDTSKRNHVRQLEALGYTVTLTPAA

SEQ ID NO: 443328 - protein, 409 aa, unidentified
MRKMKPAGRQDRSARKKMNWKALEIVHPEAAGIDVGGSEHWVAVNPDRDEEPVRRFGCFTSDLREMARWLLEKGVRSVAMQSTGVYWMPVFEVLQQHGLEVFLVNARHTKNVPGRKSDIQECQWLLKLHAFGLLNNSFQPTDEIRIARTLWRQRGDLVAEAASAIQRMQKVLIEMNVQLSSVLSDLSGVSGMNIIGAILKGERDSWTLASMVEPGVKATLSDISRSLEGNWRDELLFVLGQHRDLYRFYQESIAECDVRLRQHLETFQSKADLETQPIGPKPKGKKGSKNAPHFDLRTELYRITGIDWAQINGIDVLTAQTVIAETGADLSAFPSEKQFASWLGLCPANETSGGRVLKRRTRKVINRASTAFRNSASTLLRSQSYLGAQYRRLRTRLGAPKLSLRWQGS

SEQ ID NO: 443329 - protein, 370 aa, unidentified
MSVRRILAKTINTDLEYEAIGIDLAKNCVSVALLTTDGEVVCIDRLDYSELEKSAQVLCPTTFAMEPCTEMNYLVQKLEAWGHRCLVIGGKNVQNYVENHYSGQKTDLNDAQALAFLAQDTQLRPIKAKDMEQQKYASLTTLREQYIKQYRQTIVSLKGICQSWGLNISKGISGKARLKDLIENHAAFPEELKESLVGMVTHAQTTQKALNKITKTLEELAKNDKLCQLIQTIPGLGPVCSCRLRATIGDIQRFKNPKDFPAYYGLVPRSIATGHNEKKGRITHRGDKTMRSLMVQGAGSVINMATRGKLKSKQLTKWILKKQKEKMPWGKLVCAVAAKLLRIVRAVLISSKPYNPKIAGVAKCSLPKGT

SEQ ID NO: 443330 - protein, 419 aa, unidentified
MTDPPLQSWLRFIAIDIHKHYLMIGAIDAAKQVVLPPRRVELARWPKWAHANLLSTDAVVIEATTNAWAIYDLLAPLVGRAVVVHPAKVKLIAAARVKTDKIDVLSLAHLLRADLLPEVWVPPQHVRDLRALLSHRRRLVSLQTTAKNRLQSVLHRLNLRPPDGDAFAHKQRAWWAELDLSPTERLRVNQDVATLAHVVAQIAAVDAELRCLSTSELWAEQVPYLVQLPGIALLSAMTILGAVGDITRFATAKKLVGYAGLGAGVHDSGKTHRDKAITKQGRRELRYVMIEAARAAVQSHPYWKDEFAQLERRIGDAKAIVAIARKLLMVVWHVLLAKSADRRADAEQVAFKLMVWSWKLSDEQRGGLSSRQFIRAHLIRLGLGAELTHITRGGTRRPLATIEEVLALRPELRGPPDTM

SEQ ID NO: 443331 - protein, 351 aa, unidentified
MMIIGVDYHPSFQTVAFLMEETGECGEQELNHSDGQAEKFYRDLKQRGISVRVGMEATGYSRWFERLLAELGFELWIGDPAEIKAKRVKKQKFDREDARLLLRLLRENNFPQIWVPDPENRDLRQLLWHRHRLVQMRTRIMNQLHALAMNEGYRWKKKLFSEQGRMQLEKLTLAPWASRRRQELLELLDRMNPTIAELTAAVEQEARKRPEAVRLMTHPGVGPLTALAYVLIIGTPTRFERGKQIGTYVGMIPCEESSARKQRLGHISKQGSSLLRFLLVEAAQAAVRKDPDWRRRYIHLAMRRHKSIAKVAMGRRLAVRLYWMWRNGCEYSQSLEFGSYAGQLEIGNGVK

SEQ ID NO: 443332 - protein, 404 aa, unidentified
MATRPQIWVGIDVGKTTHHACTVDETGKTVFSQKFANDQAAIEAVIARAGQTADRVRWAIDLTSPLALLLITVLLAADQAVTYVPGRVVNTMTHGFRGEAKTDAKDAKVIAESARMRRDLSQVTMPDELVVGLTQLTSYRTDLMADWVAGINRLRSLLGSIFPALEAAFDFSNRTPLILVAGMCTPAEIRSAGIHGATAYLAENGAWRPGIGKTAVAAVEAAGRQSLALPGEADTAMLVKRIARKLLDLDREIKDTDKLITARFREHPWAHIIESLPGMGPGLGAEFLVNTGGDLATFASAGRLASYAGLVPVPRDSGRVSGNLHRPKRYNRRLRRVFFMAALSSLRYENGPSRRFYDRKRSERQLHTQALLALARRLVDVLWALLRDGREFTLDSPVPVAVAA

SEQ ID NO: 443333 - protein, 371 aa, unidentified
MNTIVYVGMDVHKESYTLCCYSYDTDKVEYKQTIPSDYKLVLKYMESVRERYDGEVSFVCGYEAGCLGYSLYHQLKDHEVDCKILAPTTMAITNTSHVKTDKRDAANIARCLAFHTYSEVYVPDDEDNSIKEYIRMRDDQKLMLKKIKQQILAFVLRQGKKFEGGKTYWTIAHMKWLRSLDLKGLDKETLSEYLVTYDYLTEKIERLDNRIEELASGEKYKEKVQNMGCFLGIKTHTALSMVVEIGDFNRFEKAPKFAGFLGLVPSENSSGDKTNRFSITKAGNSHLRRLMVEAAQSYTRGNVGHKSIALKERQKGCPAEVIAYADKANERLRRRFYKMTLNKGINRNVATTAIARELACFVWGMATGNIS

SEQ ID NO: 443334 - protein, 363 aa, unidentified
MNEITTVGVDLAKEVIAVCAADGSGKTVFTRVFHRDAFAAWAVQLPPCGFGMEACGAAHHWARWLTSHGHTPRLMAAEFVKPFRKSRAAKNDRNDAEAVLTAVRQPNMRFVAVKSVEQQACLSWHRMRQGFSEERTALINRLRGLLGEFGVWRGRSAEVFTRALPLLEHDEALPLMVRRLLTDTGPHLARLNEAIAACEMEIKSHLKTNVAAQRITAISGVGVLTAAAVIATVTDARDFKNGRQFAAWQGLVPRQDSSGGKARLGHITKRGDTYLRGLLTQGARSALQAALTKEPLRRTRLQSWMVQLHGRVGYHKTLVAIANKHARMIWAILAKGEAYDADAWRRWTRSAPATPPAVCSMAA

SEQ ID NO: 443335 - protein, 362 aa, unidentified
MRIIGCDFHPGSQQVAIFDPETGEIVERRLRHDNGEAERFYRELEAPALIGMEAIGNSLWFERLMKQLGHQLWIGDAAKIRASYVRKQKTDRRDAGHILRLLLEQRFPRIWVPSAAERDQRQLLLHRHKLVRMRTRVKTELQHLALNQGMQKKRQLWSVRGRAEFENLALEGWTRQRRADLLATLALLEQQIEPLDEAVAEAAGEHPQARLLMTQPGVGPNTALAFVLTVGDVGRFAGSRQLSSYLGLVPSESSSGSRRRLGSITKQGNQFLRTLLVEAAQSAVQHDPGLRREYQHRCHHKARGVAKVAAARKLAVRMYWMLRTAVPYPAILGGEVHIEGSPSHSVAAKQAGLLSGRPRIPR

SEQ ID NO: 443336 - protein, 354 aa, unidentified
MSNKSNPSVATMGIDIGKNSFHVVGLDQRGAIVLRQKWSRGQIEARLAAMPPCLIGMEACVGAHHLSRKLQAHGHDARLMPAKYVRAYSKGQKNDFRDAEAIAEAVQRPTMKFVAIKTADQLDLQALHRVRERLVRQRTGIINQIRAFLLERGVAVRQGRRFLRIELPGILAKRSDVLSPRMMRIIEDLAGDWRRLDERIEGLSTDITRVVEQDPACERLMTVPGIGPIISSAMVAAIGTGDVFSKGRDFAAWLGLVPRQISTGDRTILGKISKRGHRYLRVLFVQAAWVVLIRPQSWERYGLKPWIEAAKKRLHHNVLAIALANKLARIAWAVLNKERNFECVRTTAPSSRPA

SEQ ID NO: 443337 - protein, 354 aa, unidentified
MSQSKAYVAIDVHARNCVMGWRNGRGQWQSAERFETAEKALLAHLAKIPADVKIVTVEESTLAAWVARTLHPVASQVIVCDPRCNASVHRDAFKNDGRDVEELSRLLWLGQLKGVYHPQEDSRAVFKALVQQYLDLRDTQVRLKQQLKAKYHLWGVTEVEGSRVYSPDERERYLALVADASVRHQLRRQYILLDAALQQEADAYREMLACGQRYPEIAQFERIPGVGPVGAHVFDAFIQTPERFPDKPTLWRYCRLAVTERSSDNKPLGFRRLDRQGNPELKALSYWAWRGALITHAANEVKQFYQASLARTQHRAHARLNTQRKIIATMWALWKKGDEYRAERFLSPADAAER

SEQ ID NO: 443338 - protein, 457 aa, unidentified
MMPRKKVRSKDDRSMPMLHPNAAAIDVGATLLMAAVRADRTSEPVRSFGTFTTDLHRLAAWFAECGVETVAMESTSVYWIPIYELLDARGFTVFLVNARDAKHAPGRKTDVCDAQWLQRLHSYGLLRASFRPKGHFIELRAYVRQRERLLEYAASHIQHMQKALTEMNLQLHHVVADITGATGLRIIRAILSGEHNPKALARLRDYRCHSSIETIEKALTGNYRAEHLFELEQALALYDAYHEKVSACDIRIEAVLKELSIGRGHKCDALPPSHRRTDQVNGLAFDVRSALFALLGKDIARIDGFGPYLALKLIAECGDNLLAWPSAKHFTSWLGLAPNNMISGGRVLSSRTRRTGSRAAALLRLAAVTVGRTDTALGAFYRRLSARIGKAKAVTATARKIAVLFYNAVRHGMEYVDPGASCYETRYRQRVVANLHRRAKTFGFVLQPIEPASGTVS

SEQ ID NO: 443339 - protein, 342 aa, unidentified
MSHRIYVAMDVHLKFIVAVWQSGRGKRKVMTVDVSADGFAKLVLAVGPGEVWAVYEASSSGLEVHERLTGHGWKVWLLAPTHLPQSTDSRKNKSDERDAHRMLDVLVAHGELGTKLPWVWIPPRKTREDREVVRRRLKLAEKLGQIKNEITGLLRIEAIRKPGELKTSWSDKHVAWLRGTAGEMKSPVGTVLLGLLEELGFYEEQIARMDKELRKLSEEPEYRSAVERMTELEGVGLLTAMTFLLELGDVERFKNRRGLARYTGLTPNRYASADVDHKGHISRMGPYRLRKVLNQAAWAHVRAGGHWATWYQITSQRRGKKIAVVGLMRKLAIDLWHLARAA

SEQ ID NO: 443340 - protein, 428 aa, unidentified
MLNKLDRLQQFQDLRGTIRGSDSILIIGVDVAKDKHYAFFGTSNGRTLWKKLIFDNSIQGFNKLLSMTQDLSIQHSLNARVFGLEPTATYHKPLAEHLIKKGEQVVYVSNVAAKNNRALLDGRWDKNDTKDAANVADLVGQGRCQYYDLAEDSLRELRSLLAYRAKLKKQEHALRMRIRNSLLAQYFPELDKQMPQGGQDGLILDIIAHDSAPARIAALPFEVFRQQYQMEKRHLIQEQRLRTIWEISQSSVGCALPASAAWEGRMLVEQLRQIRQTKRELEKQLKEVGQTFPAYAYLLSIPGFGPIVSAMTLAAIGDAHRYTSRKQVLRLAGLDLSASRSGKSSNNAIPVVSKQGKAGLRYALVQAAQIASYKDDVIRSYFTGLLKGRELERGIKLKMRVKLAAKMLVIAWTLMKRNEYFDSGYFRT

SEQ ID NO: 443341 - protein, 343 aa, unidentified
MQTTTTIGLDIAKSVFQVHGVDAAGQVVIRRQLKRRYVLSFFQKLPQCLVGIEACASSHHWSRELQALGHTVRLMPPAYVKPYVKRQKNDATDAEAICEAVTRANMRFVPTKTPEQQSGLVLHRTRHLFIRQQTSVINAIRAHLAEFGIVAPVGRRGVEELLTVVADPNDKRVPEIARACLSAFGAQLRSIKEQVLEFDRLITAWHRSNEMSMRLDEAPGVGPVLATAVVATVADPKVFRSGRNFSAWIGLVPKQHSSGGKDRLGIISKQGDRYLRGLFVAGALAVIRYAKIHGTKHRPWLTALLARRPTKIAAIALANKIARMVWAMMAKGERYKEPIALAA

SEQ ID NO: 443342 - protein, 311 aa, unidentified
MAECAGIDVAKDHLDWTVGSMAEVRQVPNTPAGVRRLVRKLQPLELDRVVLEATGGYERLLFQALVDAGLPVVRVNPKRVRDFGKGLGILAKNDSIDARLLAVFGAKAEPRLDPARNAEGRRMSELAARRRQLIQLITMEKNRREQMPRWLRADQESLIRILEGRVEKIDALLDETIAREPEQKDRFERMQTIPGVGPKTARAILADLPELGKLDRRKIAALAGLAPFAKDSGRKSGLRSIHGGRAAPRTALYLAALIASRFNPTLKAVYDRLKEAGKPSKVALVAVARKLLTILNAIVRDGTEWREAQQA

SEQ ID NO: 443343 - protein, 340 aa, unidentified
MSEITTIGLDLAKNIFQVHGIDETGTAVVVKCLRRSQVIGFFAGLPRCLVGMEACATAHHWARELTGLGHEVRLMPPQYVKAYVKRNKNDAADAAAICEAVKRPSMRFVPVKTIEQQSALLMHRTRDLLIRQRTMLINALRGHMAEFGLIEAQGLHKVAGLIAIVMDDRDERIPEMARQVLKVMTGQLDELQTRIAALETQVLAWHKNNPVSQRLATIPGIGPIIATAIAATVADPSVFRSGREFAAWLGLVPRQSSTGGKARLGGISKRGDSYLRRLLVNSAHTVLLCSKAAKVDPWIVSLRGRKPRLVVAVALANKTARVAWAIMSRQDTYRRAAVAA

SEQ ID NO: 443344 - protein, 412 aa, unidentified
MQVVYPRCCGLDVHKRSVVACLRIQEEGKPPVAEVRTFSSMSADLLVLHDWLLAHRVTHVAMESTGVYWKPVYNILEDTFTVFLVNAAHMKAVPGRKTDVRDSEWIADLLAHGLLRGSFIPPEPIRDLRDLTRYRKSLTDERVREVNRLHKLLESSNIKLASVATDVMGASGRAMMQALLEGSADPEVLASLARGRLRNKLPELRQALEGRFRDHHRFMLEQILGHLDFLDEMIAKISEEVVNRTVPFAKTIELLSTIPGVERKAAEVIISEIGLDMGRFPTDAHLASWAGLCPGNNESAGKHKSGRIRKGNRWLRRTLLESAWGASKSKDTYLSSQYHRLAARRGKKKAVVAVAHSIIVVVYNMIKHQKPYQELGADYLAKLNAIHVKYHHVKRLKTLGFKVILEPLENAA

SEQ ID NO: 443345 - protein, 407 aa, unidentified
MQQMQQVIIGVDPHKLSATIEVVDAQETLLGSGRFATDQTGYAAMRRYAKTWPERVWAVEGANGVGRPLAQRLLEAGEQVVDVPAKLAARVRLFDTGHNRKTDAHDAHSIAIVAVRTEGLRVLRVDGELEALRMLADRREALTRRRVQTVDRLQALLAELLPGHAKKDITTGQAKAMLASVRPRDIAGKTRRRIAADELAELVAVEAKIRKTTAELKTMVLARGSHLMDLPGVSPVVAARVLADVGDVARFADRNRFASWTGTAPLDASSGEQNRHRLSRAGNRRMNHMIHIAAISQLRLDTDGRAYYRRKRAEGKKPLEAIRCLKRRISDAIYRQLVADNQREALTASTGAGPGGHSGASHQSSAVDLPPHIDTSDQPLPGPATSTLQPTRRARKTTAVKPLTRAG

SEQ ID NO: 443346 - protein, 421 aa, unidentified
MKFKSQDKQNQLIENITVSHLVIGVDIAQEVHVARAVSFRGIALGTPLEFSNHREGFNLFGRWIQDLLKSFKLSSVIVGMEPTGHYWFSLARWLLDQGIEAVLVNPHLVKKNKENRDNTPSKSDHKDALVIADMVKNGYYSPVRFHPEAYEELRILMANRETVTKRLNAAVNQIHRWVDIVFPELRQVFKILTCTSAIATLRLFPLPKDIRRLSTEQVLGGWKQYVKRHAGVKRAELLISLAKTSVGTTQALHAYKLHLGQLLEEYDLAQRQLEQIENELNCILKRIPYSEKLLEIRGVSATCLAGVLGETGDLSCYSHGNALLRHAGLNLAEASSGKWRGKMVLSKRGRPRLRHFLYLMTMCMVMTNPEIRALHRYNVEKKKLKKMKSIMKLCSKVARLLVGLAKSSEAYDSTRVFPQAA

SEQ ID NO: 443347 - protein, 310 aa, unidentified
MSSSEVFVGVDVSKSELEVGVHPQTRTWKVANNDTGITELAMKLMELQPRLVIMEATGGLERPVQVVLEEAGLPVRVVNPRQSRDFAKALGLLAKTDAIDALMLARYGESVKPEPRPSKDKETRELEALLVRRRQLVHMLVAEKNRLSCAVKSIRPSIEANIAWLKKCLKEIEKETNRFIKNMPVWREKDKIIRSAPGAGPVLSSTLLALLPELGKLNRRQIAALVGVAPFNRDSGTLRGRRCIWGGRAWVRRILYMGTIAAIRWNPLIRAFYQRLIGAGKQKKVAITACMRKFLTALNTWYETKPCGIH

SEQ ID NO: 443348 - protein, 322 aa, unidentified
MCKIIGIDISKQTFDVGFIKESIWHHLVFENNEKGFSKLLKKVASDDWIVMEASGPYYLQLALFFYKEHKNVCVLNPLIIRRYSQTRLYRAKTDKKDAQTIAEYGAQYELKHWKPEIEEISKIKHLYTALELINKEIHQSNRQLGSFISSGTLDKDLAITLKGIIRFLKAKKDHLEKQIALKAEKNYNPTLERLKSIPGIGTKTAIMLTVITSNFDKFENHKQLIAYVGFSPRLYQSGTSVRGKGHICKMGKSQIRKLMYLCSWAAKRCNPDCIKMYNRLKEKGKPERVIKVALANKLLKQAFSIVKNQTYYTENFVEKACL

SEQ ID NO: 443349 - protein, 412 aa, unidentified
MTKVLRRVGVDWGSGAHQVCRIDGEEEPKQRGFPHTSEGLNALVAFVVEGDIAPEQVLIAIEVNHGAVVEALLAKRLPVCSINPKLLDRLRDRFSPAGAKDDRRDAFVLASCVESDAHAFRRIEPGNEENLRLQAATRLRGDLKSAFGADANRLWSELRDYRPGLLVLCPGADEPWLWALIEKAPSPSQGAKLTRASIGAVLKRHRIRRLTIEDLQTVLRKDVLSLRPVYIESHVARVLVLTAKLKLAQTQIDKIEAEIKTELTERVQSETQTKRRDLTILLSLPGFGPLTTATALGESGDAFERRDYNALRSLCGAAPITKQSGGSRYVVMRQFCQPRLRVALHISALQAIRTDPKFHDLYVRARARGQTVGRAIRNIVDRLLCLAVQLLRKNELYDITLRQLAPEVAAAS

SEQ ID NO: 443350 - protein, 391 aa, unidentified
MIYVGIDVAKDKHDCFITKSDGEVLFKAFTITNNLDGFNELHQKIASVMDDVTKVKVGLEATGHYSYNLLGYLIDKGLPTYVINPLHTNLYRKSLSLRQTKTDKVDARTIASMLMSDVNLKSYSDISYHNEELKSLTRYRFDKVKERAKLKTSVSRLVCILFPELEKLVPTLHITSVYALLSEFPGAKHIATAHLTRLTNLLSEASKGRYGKDTAITFRDAARASIGSNMPAKSLELKHTIKLIQELDSEIDEIENEIKIIMDEINSPILSIPGINYRMGAMIIAEIGDFNRFDSPDKILAYAGFSPSTYQSGQQDSAYAHMEKRGSRYLRYALYNATKYVCHWDPTFAAYLAKKRAEGKHYNVAISHAVKKLVRVIYHLEKTKQQYIKAA

SEQ ID NO: 443351 - protein, 280 aa, unidentified
MAPMHRQSIFNRKLRRAEVLRFFEKLPPCLVGMEACGGSHYWAREIAAFGHDERLIPPIYVKPFVKRGKTDAADAEAISEALTRKTMRFVPVKSADQQAAAMVLKTRALLVRQHTQAINALRAHLSEFGVIAAIGTATVVALIEIVRDEADMRLPKAAHFALAEIANQIEALTRQIEKLEREIVAEAKRDEDMRRLVTIPGVGAITAASIKALVPDPDGFKSSRHFAAWLGLTPKPHSSGGKERMAGYRKWAIQCSAPCSSSARPLSCGARVATPMRLNG

SEQ ID NO: 443352 - protein, 448 aa, unidentified
MILRMPKCVLERVCECAHTSDRHLPISGNGNMNTEKEIVCGADIHRDFLVATMISRSGLKLQEQFGMDQDGLLAFRSWILDHRCLRVAVESTGNYWYPIFCILESHVEFILANAFQIRNIEGKKTDRLDSERIAIYCLNDLIKPSRIYPKDYRELRSITRSREALVNARSKLKNQIHQLLAVCCIKLSSVISDSFGKSGRYIIELLLEGKTIEQIISGIPSKRVKKKADELRKAIRNGLDPVQILLIKTNLDAIDYLSEKIKLLEAEIAIKVKPFEEDLNIILSVPGIGLISAATILAEMGDYKDFQNADKLAMYFGIVPAVYQSAGKLRTGKITKRGSKHMRRILVQVAKAISKTKKSSKLKRFFMRVYTRSGKKNVAAIALARKVLCIIYHLLMKREDYQEPEVKKNKPKIPCCVSSLSTMDIDEMIKTISQAGYLVKKGLKEGCG

SEQ ID NO: 443353 - protein, 349 aa, unidentified
MHRNAPRAAAVYGVDLGKNLFHVVGLDERGAVVQRVKFRRDTVLAFFTRALPSLVGMEACPGSQWLARKLQAMGHTVRIAPAQFVKPFVKSQKNDTIDAEAIAEAVTRPTMRFTQVRTTEQIDLQALHRIRDQLVRSRTRLINQARAFCLEYGVAIRQGTGVFRSDLPRVLADDTNDLTPAMRVMLSELFEDVERVDQRIASVTRQIEALADREDKARRLMTIPGIGPLAATALLAAVGDGHQFRRARELAAWLGLTPREHSTGGKTTLLGISKRGTRYVRKLLVHGARSCVTHLNRTRDRIGHWLDALQSRMHVNKVTVALAAKITRMAWAIITRPGVIYERHDPVVA

SEQ ID NO: 443354 - protein, 345 aa, unidentified
MTNNIQFSSVCGIDIAKSVMQVYKVSSDGVVSNKAVKRADFLNEFRNIPPALIGMEACGGSQHWARELQSLGHTVRLMPPKLVKPYVTGLKNDKNDARGIYTALVMGVREVPVKSSAIRDLALLQTMRTKRQKEKVAKINHIRGILTEYGLVMGKSVNAFLAKAGSLIIELKERADVSPYIVSELLALFQEVKEAMAKIKELETNIESIAKTLKHYDLFQSAPGVGPITAATMLVLLCNPEVFKNGREFAAYIGLAPKSTGSGGKNVVTHIPKKYECNNEVRALLVQGAHAICRSKHKSDWVSSILARKPKKVAIIAVANKLARQLWIMAKKGETFERRFILAAV

SEQ ID NO: 443355 - protein, 339 aa, unidentified
MGFYSGLDLHSNNCVIGVMDETGRRLRKKRVPNELPAVEAVLAPYREELLAVVVESTYNWYWLVDGLQEGDYPVRLAHPAGNKPYSGLKHTDDGDDAYFLADLARVNCLSEGYIYPRQTRGVRDLLRQRGRLVQERTSHVLSIKNVIVREGGQALTRSQVEGLSDEAIAQLVRDSYGQVGIKALGKVLGVINEQIRHLEKTVLAQAKPDPVYQRLQTIYGVGPVLGMTIRLESGEMSRFPTVGDYTSYCRGTGSQRLTNGKPKGENNKRNGNAYLAWAFLEAAHFAVVNYPLAQRFFERKRAASNRILASKALASKLSKAAFYVMRDQINFDPERLFRS

SEQ ID NO: 443356 - protein, 376 aa, unidentified
MEHDSTLYVGLDVHKDSITVAYALGAGEVELLGKIGTSKTDIDRLCKRLQSKARRIRIVYEAGPCGYGLYRQLAGKGFECMVCAPSLIPKKPGERVKTDRRDAVKLVRSLRAGDLSAVYVPSVEDEAFRDLSRAWVSAKDDLKRARQRLKAFLLSHGVRYSGRADWGPAHRRWISVFAFDSAWQQLAFDEYRRAIEDRLAQCSRLEAALREAVANWRFYPAVLGLQTMRGVQFTTAIGILAELGDLSRFAHPRQLMAWLGVTPAEHSSGEKRRQGSITKTGNSYARKLLIEAAWSYRHPARVSPEIQRRHEGIPKAIVDRSWDAQVRLCRRYRRLAARGKNPNIVVVAVARELSGFIWDISQLAMSLAVPNAAQTT

SEQ ID NO: 443357 - protein, 350 aa, unidentified
MDKIITIGLDIAKQVFPVHGVDAAGGVVLSRQLRRGEVLKFFAKLPGCVVGLEACASAHYWAREIVALGHEVRLMPPTRVKAYGRRGRKNDRADAAACCEAVTRPSMCFVPIKTPDQQAALMLHRARQMLIEQRTRLGNAIRAHLGEFGIVARKGAGGLAALLQMLETAQDERVPAAIRPILQPLVEQWRGAAAQIAVLDRQIAAWHASNDASRRLATIPQIGPIIASALLATAGDATRFKNGRQFAAWIGLVPSQNSTGGKERLGAITKAGDRYLRQLLVVAASGMIRRVRANPLLSPWLAQLLARKPAKQAAVALANKLARIAWALLATGQTYRSQTYRTPTAAAAKP

SEQ ID NO: 443358 - protein, 410 aa, unidentified
MDVVYPRCAGLDVHKKTVVACVIVQGAKGKPQKTIRTFGTMTDDLLALGDWLAQQEVTHVAMESTGVYWQPIWNLLEERFTLLLVNAHHIKQVPGRKTDVGDCEWIADLLRHGLLKGSFVPDRTQRELRGLTRYRTALMQERAAEVNRLQKTLEGANIKLAAVATDVLGKSGRQILEALVAGATEAGDLAQLAKGRMRDKIPQLERALTGSFRPHQQFMVARHLAFIDAMDEIVAQVSAEIAERLRPAEADVELLDAITGIGRPTAEVWLAEVGSDLERFPTHGHLASWAGMCPGNNESAGKRKSGKTRKGNPALRTALVVAAQAAARKRDSYLSAQFRRLAARRGPKKAIVALAHSLLVIAYHVLKRRVNFMDLGPTYFDERNRMSVQRQLVRRLERLGYKVALEPLPA

SEQ ID NO: 443359 - protein, 315 aa, unidentified
MAMPVPVSKPIVGIDVAKNELVIYHAELDLLETIPNNKTAIKKWLKALPGAIAIAIEATNTYHLEFADLAYEAGCVIYMVGGYELSHYRKGVKVRAKTDALDAQLLARYLRKEADELHPWTPPSPLYRQLLSLFRRRAALVQARVSLTQSWANEPQLKASFAEQMKSMQRLEGLIEKMIGDRLKEAGLLAQLKRCMKVEGIGFLTGARLITTFQRGDFRNADAFIAFLGMDLRVSKSGQKDNRRSLSKRGDSEARRLLHNAAMAASRTAAWKEFYQAQRARGYSTTQVLVMLARKLARVVFALLKGQNEYQPKVG

SEQ ID NO: 443360 - protein, 391 aa, unidentified
MICVGIDVSKDKHDCFILSSEGVVLADVFTIPNNLEGFNTLLDKIRACSTPQDSIKVGLEATGHYSYNILGFLLDNGLATYVLNPLRTNLYRKSLSLRKTKTDRVDTRTIAAMLLSDTGLKPYTDTAYHNEELKSLTRYRFDKVKERAKLKTSISRLVCILFPELEKLVPTLHMASVYALLSEFPGAKQVAAAHLTRLKTLLADASNGRYGRTMAVEIRAAARCSVGSKMPAKSLELQHTIRLIRELDAEIEEIETAIQAIVDELHSPITTIPGIGYRMGAMILAEVGDFSRFDSADKLLAYAGMSPSTYQSGQLKNCYPHMEKRGSRYLRYALYNAAKYVCHWDPAFAAYLAKKRAEGKHYNVALSHAAKKLVRLIFALEISRQPYCPAA

SEQ ID NO: 443361 - protein, 405 aa, unidentified
MDVIIERACGLDVHKDNITACIMTSQGKEIQTFSTKTVFLLKLLDWIKENNCTHVAMESTSVYWKPIVNLLESEGIEFLVVNAQHMKALPGRKTDVKDAEWIAQLLRHGLLKASFIPNRTQRELRELVRYRRSIIEERARQHNRIQKVLEGANIKLGSVVSDIMGVSSKDMLRAIADGEDDPEKLASFARRTMKKKKEELELALQGYVNPHQRLMLKTILKHIDFLTEQIEMLDQEIAQRVQAYEEDIVRLDSIPGIARRMAEQILAEIGTDVKSQFPTAAHLCSWAALVPGHNESAGKRKSTRSKKGNKYLRSALTEAAQSVRGSKNYLGALYRRTAGRKGNKRAAIVVAHAILRIAYYLLTRKEMYVDLGEDYFDKQRQVSIVRHSVRRLENLGYTVTITEAS

SEQ ID NO: 443362 - protein, 335 aa, unidentified
MEFTYFIGIDVSKNDLDFAVMQNKTFLFHQKISNNPAAITTLLKELVKLPGFTIRQAIFCMEHTGIYSNHLLGVLFKKQCAVCLEAALHIRNSLGNIRGKNDKIDAIRIAEYAYKNRDQLRLWQPKREVIIRLAHLSATRSRLIEAQKLLTTPIKESGEFIPNAVAKENTRVCQATISSIKSDLVKVDNAIQEIIASDPELRRLFSLVISVDGVGKATATQVLITTNEFKDISKPEKFACYAGVVPFSKESGLFKGRPRLSHLANKKMKTLLHLAALSAIRYNQDMAAYYERKVTQENKNKMSTLNAVRNKLIHRIFACVNNNRPYEKNYQRLVA

SEQ ID NO: 443363 - protein, 426 aa, unidentified
MYSNTQNSKIAAITEKTLVIGIDIGSETHYARAFNWRGIEFTRKPFIFNNDDEGFEAFRVWVEELKTERDLDKVIPGMEPTGHYWFNLGAFLQDNGMRPVHVNPHHVKKSKELDDNNPSKNDRKDPKVIARLVIEGRYSYPYIPTGIYADVRNLSNLRLQAQGELTRIKNRIARWFAIYFPNYKDVYGKLDAVTGLAVLKVAPLPEDIVKLGAEGVNKIWRDAKMRGAGMKRAMTLVAAAEHSVGCTEASEAARYEIRILLSDYDLYAQRESELMSMINEAIIEIPYIDKLLEIKGVGLKTAIGFVSEVGDISRFDDPKQVQKLAGYAIVENESGKHKGEHHISYRGRKRLRYVLYEAAISVVAHNAEFKEIHQHYITRDKNPLKKMQSLIAVACKLIRVFYMLATTDNHYDGQKMMCDIKRPVVA

SEQ ID NO: 443364 - protein, 341 aa, unidentified
MEQATTIGLDIAKHVFQLHGADGAGHVLFRKRITRAKLPGFLAAQARCVVAMEACASAHYWAREIAKLGHHVRLIAPAYVKPFIKRQKNDAADAEAICEAAQRPSMRFVPVKTEEQQANGIVFRARDLLVRQRTQSVNALRGHLMEYGYVFPKGITHIETLVAVVEDLQSALPDSVRVILKLLVDTFTALEAQIAVLNAEINQRSKSDPTARRLMTIPGVGPIASTAITALVPAAEGFRAGRDFAAWLGLTPLQKSTGGKQKLGAVSKRGERTIRRLLIIGASAVVQQASRRGAPKGSWLAQMLTRKPKMLVTVALANKMARIIWALLVKGGTYRTPAVAA

SEQ ID NO: 443365 - protein, 339 aa, unidentified
MTIIRIGLDTSKHVFQIHGVDENEQPVLRREVRRQEVAKFFAKLAPTRIGIEACGASHHWARVLRGLGHEVVLIPPQYVKPYVQRGKNDKIDAEAICEATSRPMVQARFVPIKTVEQQAALTMLGVRDLLVRQRTMLINAIRGYAAEFGVTVAKGPQQVPELLRRLASDEEVPELAREMISQLAGQIDGLNAKLKAVEARMMAWHRHDQTSQLLATIPGIGPIGGVSFALKVPDPRVFRSCRHFAAWVGITPREDSTAGRQQLGRISKAGDEDLRRLLVLGATVVIRQAKPGRASPWLLALLARKSKKVAALALANKMARIIWAMMISGEVYRRRTAAA

SEQ ID NO: 443366 - protein, 283 aa, unidentified
MEQFSFFTGIDVSKLWLDIAVFKPDYGIVYQTRIDNDVKTIRSFLRNLKKQFKAEIAGHMFCMEHTGKYGHAFLNASILEQAKVWVELPIQIKRSLGLVRGKTDQWDAVRIAQYAYRFADKAVFWKPADKTVQDLKELQVKRSRLVKAYSQLSQENKNDPLFKKPLLALKQGIEAIELKMEHLIEQNESASHQYELLKTVPGIGKQTAMALIIVTNGFTRLTETRKLSCYSGVAPFPYSSGSSVKGRTKVSKMGDKKLKVLLNLSAWNAIRSIQRSKIISTGK

SEQ ID NO: 443367 - protein, 342 aa, unidentified
MQISTIGLDIAKNVFQVHGIDAAEKVVVQKRLRRRQVLEFFKALPRCLIGMEACATAHYWARELTKLGHEVRLMPAKDVKAYVKRNKNDAADAEAICEAVRRPTMRFVRIKSAEQQGQLMQHRTRDVLIRQRTQIINALRAHLAELGLVAAQGNAGVNELRAIVTDEQDTRLPIDARASVIVLAAQLEALESVIGAIEKRIKMQHRSSEASQRVEAIPGIGVIGASAIVATVADPTIFRSGRDFAAWIGLVPRQDSTGGKQKLGPISKQGDRYLRRILVVGAIAVLRRAQENPGKYPWLTQLLARRPFKVVAVALANKMARMAWALLAHGGTYRAPELAETA

SEQ ID NO: 443368 - protein, 461 aa, unidentified
MKVLYERVAGIDVHKDMIKVAIRSAGEKPWTRKTEILEFRTFYGVLQEMARLLRRRGVSHVVMEASGVYTEPVYYALREQDFTEVAVINPAHAKALKGHKTDARDCARVAELFECGLLHGSYIPAPELKEVRDLTRYRMKTVQARTSEIQRLGKALESAGIKLGSVASSITGTASTAMIDALIDGERRGQVLADLAIGRMRTAGKLADLSMALTGRFTEHHALLCRLHQDRIAGFDTAVAGLDERIAGKVTRWQREAGLLTSVPGFGDVVAQAWLGEIGPAPHLHFATCEKLACWVTLCPGNNISARKRKHGRTGDAGTYIKPMLVQAAWNAIRVRGRLQARYNRLVRRFGGDKNPGAKKKAITAIAHTLLKIAYQVLKSGTPYQDLGADFYTRRESPEQKQAWLERQLQKLHPGSTITITISPPEAALTPGAYYQPLPAAPEPPPTPHPGHSRRTTNAIL

SEQ ID NO: 443369 - protein, 375 aa, unidentified
MVERCGVGSFLKPWHSKFATPVFLLKPEQLRGPFEPESASLGVAEQLKEKEIMSSPSLETNIGIDISKEMLELAVHETNTHWTAKHEFTEFPKLIKSLRSLTPTRIILEASGGLENLLVSYLATAGLPVIVINPRQARDFARATGQLAKTDRLDAFVLAQLGATLKPAVRPLKSVETQELEALVTRRAQLVEMLTAERLRLQQAQQQRRQSIIRDVKAHISWLQKRLDQGEHDLSQLLRSSPLWRETDERLQSVPGVGPVTSLVLIAELPELGHLSNKQIVALCGLAPHARDSGKWHGKRTTRGGRARVRATLYMATLVATKYNLVIKTFYRRLLQAGKQKKVALTACMRKLLVTLNAMFRNHTSWQPSRFVSGA

SEQ ID NO: 443370 - protein, 413 aa, unidentified
MCNLLEVCCGLDVHKEILVACMLKGGIEEEPEPIIKEFSTLLSGLDEFKSWLIEHNCHDVAMESTGVYWFPIYNVLESIFYEDGQMNIIVANPHHMKNVPGKKTDIKDSQWIATLLRAGLLAPSYIPPKEIRELRDWTRYRDVLIKELVGHKNRIEKHLQQCGFKLSSILSDIFGMSGYELIRKLCEKGKLTALDVKGCLHGTLRAKSDEVQQAVAGRLSAHDRLFLTNLVKVMEHCRKEIEEAEWHITVYAQKYEPTLQLLETIPALQRRASTIIVSELGVDFSMFPTAGHLCKWAGLCPGDNESAKKKKTMRITKGNPRIKSVMVQCAWAATRCKNFFLRDWFYRLRARRGTKKALIAVARKLLAMVWHILTTGEIYEETRYEEIKKNQEERRKQRLKTEAAKLGFKLVPA

SEQ ID NO: 443371 - protein, 462 aa, unidentified
MTGKHEGERWESNRRELQGLPVIRRNVAGIDLGSERHWVCAPTPDGSGREIANFGATTAELIRLGEWLKARQVESVAMESTGVYWIAPHEVWEAQGFEVLLVDTRQLARVPGRDKKTDPTDCEWIQRLHSCGLLRGSFRPEEAVCMLRTLVRDKANLVAERGDWLRRMQKSLDQMNVRVHRAVSDIDGATGMAILRAIAGGERDALKLAKLRDPRCSKTEQEIAEQLSGHWREDHLFSLQQALKMYDAVEEQIAAYEQEILRKLGEMERAEQRGQTAPPLKNSNKANMIKKRGQEPTRQALYRMSGVDATHIDAIGVETLEVVLSEYGPDLSRFPTEKQFVAHVTLAPHVPTSGGKPLRKRKRNSASTRVAAALRMAALSLRHSQTALGAYYRKMAQRLGGDIAVFATARKLATLIYRLLRWGQPYVDEGAKAYEARYHQQRIGRLAATAKQLGYQLAPINT

SEQ ID NO: 443372 - protein, 313 aa, unidentified
MTDLCEYVGIDVSKAMLDVACFQSRAFQQFRNTPKGISKLVIWLLEIHPNLVVLEATGGLELACVAELMQAGLPVAVVNPGRIRGFARSIGQLAKTDKLDAMVIAHFAQATQPKPRKAPTPQEEQLSALLTRRRQLIEMLTAEKNRQHSARFGMQTDIQEHIDWLEQKLDQLDEEIQACIDQYPDWKQKADLLSSVPGVGRVTTVTLLGLLPELGTINRQQIAALVGVAPVNKDSGKRQRKRKVFGGRANVRSILYMAALSASNHNPQIRDFYNRLLKNGKEKKVALTACMRKLLVILNAIARSNQIIEASLA

SEQ ID NO: 443373 - protein, 345 aa, unidentified
MATMPQTLGGVTVGVDTHGKIHVGAVADPLGRILGTIEVTTDERGFRQLENYAKSFGTIERFGVEGTGAYGATLYRWLTNRGHEVLEVDRPDRKMRRMQGKSDPIDACAAAQAVLSGRASGVPKARDGAVEAIRVLRMARGSAVRGRTQAMNQMHALVTSAVDPLRTQLRSCSPAKLVDRCVGMRPGKLDSPAAATKFALRELARRHRALDEEVVRFDEELSRLVAKRAPRLLALVGVGTDVAGALLVTAGDNPDRLRNEASFAHLCGVSPIPASSGRIHRHRLNRGGDRSANQALWRIVMVRLSWDERTRAYAARRTSEGLSKREIIRCLKRYVAREVYEVLVA

SEQ ID NO: 443374 - protein, 396 aa, unidentified
MTTIGIDIGGRMHVAACCRDGQARADREILRMSQSRAGFTAFDGWLERQPDPVTLVTMESSGHYWMPLASHLRRRAIPVAVVNPLAAKYFARSRLARTKSDPADARSLAEMAMRDTPEPREPLAGVELRQAARFAMTLVTEQAKVCQRLIRLVELGFPELGELFDDPTCRTAREILRIAPTARAATRRRTSTLANANAGSGHRRLGTAKAERLQAAAADSIAVPELDAEVAFEVGFLLDQYDLLERQIEDADRRVAGLLDGELARRLQTIPGVGPSIAATLIAEIGDVGRFDDFDQLLAYAGVHPAERSSGRKGANPETSWHMSKAGNSHLRAAAYRMAVVGVQHNPVIAAHYARKRAAGKTKMNALGHCMRKALSIVWGVWRNEADFDPTWGVDA

SEQ ID NO: 443375 - protein, 403 aa, unidentified
MDHFAGLDWGSTTHAACVVNGRGKVLAQLETAHTAEGLRKLLRALAEIAPAEHMPIAIERPSGLIVDTLIEAGHPVVPIHPNALKASRPRYRAAGGKSDPGDAYILADVLRTDGHRLRTLQPASDEIKALQATVRARDALVEQRVSTANQLRALLESFWPGAVAVFGHIETNIALAFIDRYPTPASARHLGPKRMAAFLTRHGYTGRQQPEDLLARLRAAPSGLAGETEQATKGAVARSYVSILQPLMEQIKTLTKSIEDAVAELETGQVLMSLPQAGRVNAAQILAEIGDDPTRFQSEDQLAAEAGVAPVTQQSGKHRSVKCRYACNKRLRRAITMWANNSRRSSEWAADIYSRARSKGYRHPHAIRILARAWIRVLWRCWQDKQHYDPALHGNTRPFVKAA

SEQ ID NO: 443376 - protein, 523 aa, unidentified
MVTGSKKQKSTGSKKRFIGKPTGQIQQRVQAAGPEHFGIVAVDCAKRRSKWMLCDFYGKVILEPTSVEHTAGGLRVMTQRVTEACKAEGLTDSIVAVEMTGIYHKPVYRAFRKAHFDTRIVHPFASNHYRQPLHPDEKTDDKDLEAIFHAAVKGYGLATLPVGEVYQSLQAVSRHRHNLVKQRARLMVQIRRLLHQTMPGFADLFEDDKLYHKSIALPVALQFTSADAIRNAGVAGIAKHLNKTKVRFQTRTIERIVAWAGTAAEPSELATMHTRQWQQLNEVRRLFDEQIVATEQEMAGFLVNTPYILLLSVTGINVVSAARLAGEAGPIEHYASARAINGRAGLFPSRYQSDEVDHADGTLVRQCNRKLRGAAMLVAENLIKCHPYYRGLSELWKQRKVDPRDRRCRIANRAMRMVYQLVGGRQLWRGKGVDREYLLAKLQEFHRVHKTPIDQAIRDLNEAFAWLPQSAYAAEAKPLKELARKKRRGVQRIGDLMVPLLLRLGVSIEEDVESKTSEARSSD

SEQ ID NO: 443377 - protein, 465 aa, unidentified
MKKKVYSAVGLAHIQLDGILERHRRQAAVVGIDVGKLSAFVVVRWGGDDFERPWVVNNPRQVQDLAAVLVQLKSNGPMQVAMESTGTYGDALRQALSDAAIELHLVSGKRAHDYAEVFDGVPSQHDGKDAAVVAELCALGKSMPWSIAKQTDAEQQIGLLVDQMQAALRIKIQWLGRLEALVARHWPEACSGLKLGGGTMLRALSGYGGPQAIAADEQARQQLLSWGHGKVSAARVDEIIASARATQGMSQSAVDVQRVKWCAAEALARRLELRQYRRQLQQLGEEHPVIKLQGKVIGVASAGVLWRHLGDPRRYHCAGAYRKAMGLNLIERSSGMHQGELKISKRGPGPVRRTLHLASLRLIQDQKKVQRWYQRKLKIRNTGKQAVIMALSRKLALALWSIVHHQQPFDIDRLLGRPLQANRKLETRQSSAGQKRNASEQSNTARGGQLQRQSRRKGKPMTAGT

SEQ ID NO: 443378 - protein, 421 aa, unidentified
MMTESRDEEQIIARVAALDIGKAELVCCVRVPGKGTSTRRLQEVTTHSTMTRALTELANHLVDLGIERVVMEATSDYWKPVFYLLEAHGLDPWLVNARDVKHLPGRPKTDVLDAVWLCKVAERQMLRPSFVPPRPIRQLRDLTRYRSTLVAARTAEKNRIEKLLEDACIKLSVVASDIFGVSGREMMDALIAGQHDPKVLAQKARARMRTKIARLEEALDGHFDDHHAFLLTRMLGRIDTLDADITAVDEQIEAHLAPFAAAAARLDEIPGVGPVVAATIIAEVGVDMSRFPTAGHLCSWAKFSPGINSSAGKTTGNGSSGHGNRYLAAALGEAAVMTRRTDTFLGARYRRLAKRGKKRAIVAVGRSILVVVWHLLSDEQATFHDLGSDHYTRHIHPDTKKHNHIRQLEALGYTVTLTPAA

SEQ ID NO: 443379 - protein, 348 aa, unidentified
MTTLASQHVVVIGGVDTHADMHVAAACDHLGGVLGTQGFATTPAGYRALLAFLRSFGQLQVVGVEGTGSYGSGLARHLAEHGVRVLEVNRPDRQARRAQGKSDVVDAIAAARAVISGRARVIPKSHNGTVEALRTLQTVHRSARKARTQALNQLHALVLTAPDPIRSKLRVLPNAQLVATCAGYRPAGDDLAAITKLALRELAVRVRDLDAQINRLQAHRRRLITAAAPALLAIYGVGPDTATALLLAAGDNPHRLTSDRSYSALLGASPIKASSGKTDRHRLNRGGDRHGNSALWTIVITRMANQPATRAYVERRTKEGLSTPEIIRCLKRYVAREVFAALPRETLT

SEQ ID NO: 443380 - protein, 355 aa, unidentified
MSQEKYIGMDVHQATISVAVMDGNGKLVMECLLETKAETILEFVQGLRGTLSLTFEEGTSAAWLHDLLKPHVSRLVVCDPRKNALLKEGNKSDRIDARKLAELLRTNQLKAVYHGEHGIRTLKELGRSYLTLSKDVTRTMNRIKSLYRSWAIPCAGTGVYAPRHRAEWLAKIVEPGVRIRAERLYQQLDGLQSIRQQARRELLQESHQHPAVKLLRQIPSIGPIRSALLVALLQTPHRFRSKRQLWAYSGFAVETHDSGEYRYVRGKVQRNRERITVRGLNDNHNRDLKNLFKGAAISASTRPGPLHDFYVARVAQGMRPTMARLTLARKVAAITLTMWKKGVSFDPQQLSRQSV

SEQ ID NO: 443381 - protein, 341 aa, unidentified
MQHLAIDLGGTKSQICVRSAEGQILHEQALETARLGRFLKRQPTSRVVLETCSEAFRVADLAVSFGHEIRVVPATLVRSLGVGARRIKTDRRDAQVLSEVSCRIDLPSVHVPSDLARQRRSMCTMREELVATHTSLINCVRGWTRTQLLKIRPGDTKTFAKRMRAVALATKDGLPEYVERLLQVIEALQQQIVAADNELRSLAEEDPICQRLMTVPGVGPVTSMRFVAALDDRNRFPTAHAVEGFLGLTPGENSSSERQQRTGITKAGPAPVRRALVQAAWNLRRIRPSDPISQWAAQLEQRRGKFIATVAVARKLAGILFALWRDGSTYEPNHQARRSAM

SEQ ID NO: 443382 - protein, 336 aa, unidentified
MATIATIGIDLAKSAFSVHAVSDGGAVQMHCTVSRAKLLPLIAKLSPCLIGMEACSGSHEWARRFREMGHAVRLMAPKFVVAYRKGGKNDGNDAEAICEAVSRPNMRFVPIKTIDQQAVLTLHRIRQGFVTERTAIINRMRSLLAEFGIVVAQGANRARHDIAEHLDRLPILVSSSLRDLLDHLQGLDERVSQYDRQLSQLVRDDEVAQRLQSIPGVGPLTASAIVASVGNATEFRNGRQFAAWLGLVPRQNSTGGKARLGHITKSGDTYLRTLLVLGARAMLHRVARHQDRLSQWVAGVRERRGYARTTVALAAKNARILWALLTKGDRFVAVPA

SEQ ID NO: 443383 - protein, 347 aa, unidentified
MRFYTNQHRYYCGIDLHARSMYVCILDSQGQILLHRNMACAPELFLKAIAPYREDIAVAVECIFTWYWLADLCGKQNIPFVLGHALYMKAIHGGKAKNDKIDAHKIAVLLRGGMLPMAYVYPPEMRATRDLLRRRMYLMRKRSELLAHVQNTNSQYNLPEIGKKIAYKANREGVAERFSDPSVQRSIEVDLKLIDHYDQLLTDLELYIVRTAKQHDAHAFYRLRSVPGIGKILALVILYEIHDINRFPTVQDFVSYSRLVKCAKESAGKRHGTSGKKIGNVHLKWAFSEASVLFLRANPKGQRFVEKLSSKHGKAKALSILAHKLGRAVYYMLSRKQAFDMNKFFSS

SEQ ID NO: 443384 - protein, 402 aa, unidentified
MYNAVGIDVSKGKSTVAVLQPAGVIIRKPFNVNHTSSELDELVKYIGSLEGETRVVLECTGRYHEPVVKTLSEAGLFVSAVNPHLIKNFGNNSIRKVKSDPADAKKIARYTLDNWIELRQYSSMDNTRTQLKTLNSQFSFFMKQKVAAKANLIALLDNTYPGVNKLFDSPVRDDGSEKWVDYAYSFWHVDCVRKIGLKTFTERYQAFCKKHHYNFQPAKPAELFLASKDLIAVFPKEASYKLLIQQSIQQLNLASSHVEELRSKMNELASTLPEYATVMGMYGVGKTFGPQLIAEIGDISNFSHREALTAFAGVDPGVDQSGTHNSKSNKASKCGSNRLRKTLFQIMSTLLQTAPEDDKVYQFLVKKRAEGKPYYVYMTAGANKFLRIYYGKVKECIRNLEQ

SEQ ID NO: 443385 - protein, 452 aa, unidentified
MPAGKDITMHYQKVLKMPESIPYLSVGFDVGADFTWMSIMLPNGILIGKPFKIIHSDPQSRELAISKIKEAQEMYSLESRCFLESTGIYHIPLLCFLRDKGFDCAVINPIITKNSTNMNVRKLHNDKFDSKKAAKVGLDASLKASIVPDDAIIDLRNLVRDYYYFKDLQSAIVLKLHAELKVSFPAYLNVFSKVTTQTSLKLLEAYPLAADMLAAPKDELVEIIRSTARFGETYALARYDAICTAAKDAAVFGRALPSNALRIRLYIKMYREYQAHLDSILEELHQAVGKLEGTPDYDRISFIQTLHGVGFLSAVVLIAEMGSFDRFSSPKKLYAYFGLDPGVNDSGKFHGDRVHMSKRGSSLARRILHMVAINNLKVDKATKTPVNPVIYDYYTRKCASKKKSVAVGAVMHKICNIIFAMLRDNKPFELITPEEHRERYAAEHPESVNTAA

SEQ ID NO: 443386 - protein, 345 aa, unidentified
MNSKIIAVDLAKDVFEVAVANEHHRILERHRLTRKAFSAFLAAQPPALVLFEACGTAHFWGRTAQALGHQLRLLPAQYTAPYRRRGKTDRTDTEALLEAHRCDHIKPVPVRSVEQQMLQQLHRVREQWKHTRTQRINGLRGFLRELGFAIPLGAKLAQKHARHIIDDPGIPQPLKIVFSRMLDEIASLEADMVGVERQLKALTKTNADIQRLQTVAGVGLLTSTALVAAVGSPDRFPDGKHLSSWLGLTGRETSSGNRRHIGKITKQGDVYIRTLLVHGARSVLTRIKTLMRAGRPLPRLYQWASALEQRLGHNKAACALANKMARICWAVWTKHVDFNPNHVAA

SEQ ID NO: 443387 - protein, 370 aa, unidentified
MHQPTTLFVGLDVHKESISVAYAAGESTEPAHFVGPIGPRKRDLDKLVRRLQSHGGALKFAYEAGPCGYGLYRDLTDRGLDCQVVAPSLIPKRPGDRVKNDRRDAMEIARLLRSGDLIPVYVPTVEDEAIRDLCRARDATRLMLKSCKQRLGSFLLRLGLNYTGRANWSAAHRRYLAAVSCPTPTQQIVFQELVVSVEEQVSRLERIEHELRDLAPAWRLYPVVQALQAMRGVRWIVALTVVAELGDLTRFDSPRQLAAFVGLTPSEHSSGARRRLGAITKTGNPRARRVLVGGAWSYRFPAKVSKEIQQRIESLPPAIQAIGWKAQLRLCKRYRRLQSRGKHTNVVVTAIAREMLAFMWAIAKETPIVG

SEQ ID NO: 443388 - protein, 412 aa, unidentified
MTVTNQFAAHVGLDWADKKHDVCVQFKNGERVFDVIEHTAEALDAWLTELHQKVKGRIAIALELKKGPVVYALQKYPFITVFPVHALSLARYRQAFSPSGAKDDPQDAELALELMLRYPQKIKAIEPDNADIRLLQQLVEQRRQLVEDKRRFVNRIINTLKQYYPQPLEWFSHRGSLLLCELIIRWPSLQQLKRARRDTIRNFLNAKGGRAMALTEQRVASIDNAIPLTTDPSVIEANALMAAALATQIKVVSEIIKTYDERIETLFDTLPDAGLFKSLPGMGPCMGPRMLAALGDNRDRFNSAEEIQNYAGIAPVTERSGHKSWVHWRWQCAKFVRQTFVEWAAKTVNSSYWAKLYYQGLREKGKSHQSAIRALAFKWIRIIYRCWKARTCYDEAKYLLALEARHSPLLKP

SEQ ID NO: 443389 - protein, 352 aa, unidentified
MIVLGADTHKRSHTIAAVAAATGELLGEQTVAVGEHGFGILLQWARGLDQERVWALEDCRHVSGSLERFLIERGERVLRIPTHLSANARKGARQRGKSDPIDALSVARAALQEGLESFPAAHLDGPELDLRLLVDHRERLVRHRVELNSTLQWHLHDLWPELRLPGGALFSKKWSARIGRRLARAEQTMRVRIARDELRRLRELTLAINQREREITTLVQQIAPQLLTEPGFGPLIAAKLVGEIAGAQRFATPAKLARAAGVAPIPASSGNTRRHRLDSGGNRQINAALHRVIVTRARCHQPTRDYITRRRSEGKSTREAIRCLKRYLARRVWQLLQPAGPIPDQAINTSIS

SEQ ID NO: 443390 - protein, 375 aa, unidentified
MSFTSDTILVALELSNSMWLVGTRMPQAKKSEMHRIDAGDTSALLKLLAGLKARCEGKSRVAAPIACCFEAGRDGFWIHRFLVKHGIPAHVVEPTSILVNRRAKRAKTDRLDAEGLLRVLAAYLAGDTQICSMVKVPTPEEEDNKRTHRKREYLVQERTRIENRMEALLFTQGIRSRPSLRSWERDMSALQTADGRELPHHLGAELNRLRRRLELVRQLIRELDAERAAHLADASEDDAVTAKVVALTSLYGIGDNFAAVLGREVFYRRFGNRKRLASYVGLTPMPHQSGNMDKDRRIGRAGNGRARKTLFQAAWLWLRYQPQSSLSMWFRERVGELKGRTRRIAIVAMARKLLIALWRFTEDGEIPAGAIMRAA

SEQ ID NO: 443391 - protein, 338 aa, unidentified
MNIKFLGVDLAKRVFQLHGINAEGEVVLKKRLNQKGLIEFIAKMPTCFIGMEACSTSHYWARKFKVLGHEVKLINPAFVKPYVKSNKNDEKDSEAICEAMTRPSMRFVQIKSIEQQDLQALHRIREQLISNRTALANQIRGLLSEYGIVLPQEIQNVRKLLPTVLDDASNELTNFSRSLFQELYVDFSYLDNRIKSCDAKIAALFKSDERCQRIGDIPGVGNITATALISAIGDLNTFKNGRAFSAWIGLVPKQASSGQKQILKGISKRGNSYLRKLLIHGARSIVFRTKDKTDQRSLWIEQLKNRRGMNKAVVAVANKNARIIWALLAKNERYREAA

SEQ ID NO: 443392 - protein, 389 aa, unidentified
MFFLGIDIGKNTHVASLIDDKKNIIFKAFSFSNSIDGAQTLLSKIETHKSDLEIGMEATGHYWFSIYSFLVEKGFVVHVINPIQTDGWRHGLEIRKRKTDIIDSILIADLIRYGNFVETSLSNEDYLSLRNLSRFRTYLISSIGNLKRKTIALLDQVFPEYESTFSDIFGKTSKEILKTFSTPSDFESISSDKLNQTLENIRAKKYAKKKINELSTKAKSSFGVNFCLDSFSLQIKLLINQISFIDEQVSTVEEKISAIMKKLDSPISSIPGIGPINGAVILGEIGDISRFSNASKLVAYSGIDATVSQSGNYEASINRMSKRGSAYLRRALFQAALRAEFCDPVFSAFYQKKISEGKHHLVATNAVARKLIHTIYAVLSKNEKYVVQA

SEQ ID NO: 443393 - protein, 315 aa, unidentified
MVDVPCFVGIDVAKAQLDIALRPAGERWAVPNDASGIAPLVDRLQALHPTLIVLEATGGLERAATAALAAAGLPVVVVNPRQARDFARATGQLAKTDALDARALAHFADVIRPTPRPLPDAQTQELRALLGRRQQLIVMRTAEQNRLAGTSGRLQTDIAAHITWLNARLATLDDDLETTLRASPLWRENDDLLQSAPGIGPVCARTLLLELPELGTLTRQQIAALVGVAPLNCDSGTMRGRRTIWGGRAHVRTVLYMGTLVATRYNPRIKAFYERLLAAGKVKKVALTACIHKFLTILNAMLKQRTPWQPQEVQS

SEQ ID NO: 443394 - protein, 417 aa, unidentified
MMSEATWFAGIDWASRKHQICLLDAAGRIVGEREVAHSGAGLAELCDWLVASSGAEAGAVAVAIEVSHGPVVETLLERGFLVYAVNPKQLDRFRDRFTVAGAKDDRRDAQVLGDSLRTDPHCFRRLGLDDPLVIELRAWSRLADELQQERTRLTNRMREQLWRYYPQALQLTDDLAADWFLAFWQFAPTPDKARRLRESTLARLLKQHGVRRLKAPEARRLLRQPPLLVAPGTAAAAGAHLRSLVARLRLVNRQLREAQDNLDSLCLEFADAEPATPGQQNEPRDVAILRSLPGIGRINLATLLAEAPEPLKRRDYHALRTLSGVAPVTRRSGKHTLVLRRLACHRRLSDAVYHWARVAIQHDPNSRHRYAALRHRGHSHGRALRGVGDRLLAVACAMLTNRTLFDPTRYAVQPAAA

SEQ ID NO: 443395 - protein, 356 aa, unidentified
MSEVTTRVSSWTIGVDLGDRFSQVCVLDAAGEVAAGFRVATTAKGFDRGLSRYRGARVVLEVGTHSPWVSHGLEDLGYEVIVANPRKLRSITHNDRKDDRTDAEQLARLGRVDPKLLSPIRHRGLSAQRERTRLAVRDGLVRARVLLVNQARGLAKPLGLRLPKCTTEGFARRMRRDDRTEAFPGMASLVAMVEQLTVQIAALEKQVEAVSEERYPETARLRQVPGVGPLTALAYVLTIEDPQRFRCSRSVGAYLGLRPRRRQSGDQDPMLRITKAGDPYLRRLLVQCAHHILGPFGPDTDLRRFGLRLMARGGRAGRKKALVAVARKLAVLLHRLWVTGETYEPLRAVAAQTAAA

SEQ ID NO: 443396 - protein, 426 aa, unidentified
MKSTQNEKISQIKTWTLVVGIDVAKEIHYARAFDYRGIELAKLLKFSNTAEGFQNLEQWMQDICQRHNKTDIIVGFEPTGHYWFTLGDYLKNLGHRLAIVNPFHVKRSKELDDNSPTKNDRKDPKTIAMLVKDGRYREVYIPEDVYQELREAIGERDRLVQRMTSIDNQVNRWLDIHFPEYQTIFSDWQGKAALLTLRHFPTPEKIVSAGPEKIEAIWKASMKRSAGLKKAQELVKVADGSIGRKTGLVTAEASLQNLLTEYELYRKQYEQLEQLMMDLLKQVPNAEKLLDIKGVGLITVATFVGEVGNINRFQDPRQIQKLAGFNLVENSSGKHNGKTRISRRGRRRLRHGLFMAMITILATNQEFRMLHQKNLTREKNPLTKMQSIIALCGKLIRVFYGLLRNGTDYSAEKMLGDIELGMRAAA

SEQ ID NO: 443397 - protein, 383 aa, unidentified
MIIKYSVGLDVSSKKINGSISLIDDNQKVTVKSSIVFFNTLKGFSELSLWIKKWHTQPIIPLVICMEATGVYHENCALYLFEKGYDVSIILPNKARHYLISIGLKSKNDSIDAKGLAKMGAEQCLDLWQPAGKYFYELRQYTRQHQNLQEQKTVVKNQLHVLEFGMYEIKSVVKQLNKVIQLFDKQIKELEKIIKKHLESDEIVKQKVDNICQIKGIGTLTVATVLAETNGFELFKNYKQFISYSGFDVVERESGSSVTGKTRISKKGNSHIRRALFMPAFTAVKYQEPSFFGLYERTYAKHGIKMKSYVAVQKKLLTTIYHLWKKNEEYNPNYIFIIQEKEQELSSLLGFEKAASTQKNSPNQVEAIQGKHPVKNHSRLPLC

SEQ ID NO: 443398 - protein, 353 aa, unidentified
MTATNQFAAHVGLDWADKKHDVCVQFKNGERVFHVIEHTAEALDVWLTELHQKVKGRIAIALELKKGPVVYALQKYPFITVFPVHALSLARYRQGFSPSGAKDDPQDAELALELMLRYPQKIKAIEPDNADIRLLQQLVEQRRQLVEDKRRFVNRLINTLKQYYPQPLEWFSHRGSLLLCELIMRWPSLQQLKRARHDTIRNFLNAKGGRAMALTEQRVVSIDNSIPLTTDPSVIEANALMATALATQIKVVSEIIKTYDERIETLFDSLPDAGLFKSLPGMGPCMGPRMLAALGDNRDRFNSAEEIQNYAGIAPVTERSGQKSWVHWRWQCAKFVRQTFVECDPTRVIWTQP

SEQ ID NO: 443399 - protein, 423 aa, unidentified
MDTMHERVAGLDVHKATIVACVRIWAGAKVERECRTFDTTTDGLSALLAWLVDCRCSHVAMEATGVYWMPVWKILSDGAFSLIVANAAHIKNVPGRKTDMNDAMWIADLLACGLIKGSFIPEEKVQELRALTRTRKQLVREQARHVQRIDKTLAEANIKLGSVISDIMGASGRRIIQAMIDGVRQPNKLAELAGKQLKASPKELYDALHGRLTDHHRFLLALHLKQRDGLDETIRKLDVEIAQRIEGMEAEAGGSKTPFRHLIGLLTTIPGISAVAAPAILSEIGADMSRFETAGHLVAWTGLCPGQNESAGKRKSSRLRKGAPWLKTMLVQCAWAAKRSKNSYYRAQFFRLQARRGPQKAICAVAASILTAIYHILKNGTEHHDLGVAYFDRRPTEVKASRLVARLKKLGFTVQLQPIAEAA

SEQ ID NO: 443400 - protein, 336 aa, unidentified
MQRTIIGLDLAKHVFQVHSVEALGGRVEKRRLRRGQVLAYFAKLPPCLIGMEACATAHFWARELSRLGHDVRLMPPQYVKPYVRRGKNDAADAAAICEAVSRPSMRFVPIKSEEQQSLLVLHRGRDLLVRQRTQLINAIRGHLAEFGLIQAQGVANVTRLVDAMHKDVAIPEHARVIITLFAEQLGTLEKQIDLIEARIAACHKASAVSQRLATIPGIGPIIATAITATVADPSAFRSGREFAAWLGLTPTQKSTGGKRRLGRISRKGDQYIRRLLIIGAQTVLLRSKVAKANPWIQNLLARCARLKVAVALANKMARIAWAVMAKGEPYRQIASA

SEQ ID NO: 443401 - protein, 341 aa, unidentified
MQHFVGLDVSVKETAICVVDEQGGVVARTTVESEPAAIVSWLLGRGIRFGRVGLEAGAMSPWLYAGLVEAGLPAVCVETRHMHAALSARINKTDRNDAHGIAQMMRVGLFKPVHVKTPASQRRRLLLTSRKLLQRKVQDLENDLRGSLRNFGLKVGVVGAAGFDRRVRELAAGEPFVAAVVGPLLEARAMLRLQLAKLHKMLLDLVRDDPVCRRLMTAPGVGPVVALTYRACVDNPGRFDRSKCVGAHYGLTPRLYQSGETARVGRISRCGDAMLRASLFEAGLVLLTNPRIRWSPLKAWGMAVAKRRGMQKAVVAVARKLAIVLHRMWRDEIDFRWSKAA

SEQ ID NO: 443402 - protein, 414 aa, unidentified
MFAVGVDVSNGRSMVAVLQSKTSVLMKPFEIPHTAEGFASLAGKLAGLDGEVRIVMEHTGRYYESFARAMHSAGFFVSAINPLAIKNYQDGINIRKVKTDKADAMKIARFALDKWEILPQYTPMDTIRYDLKTMHRQFQLSSKTKTELSNNLIALLEQSYPGANQYFDSPVRPDGSQKWVDYVDTFWHVDCVARVSQNAFVERYRKWCKRHGYNFSQQTAIDLHTDARQKFPLVPKSDTCKLLVREAVSQLNAVSRTVETYRTEMDRLASQLPEYETVMAMTGVGKSMGPQLMAEIGDIRRFPHQKSIVGFAGTDPIKDDSGDKVSDSKPSSKRGSPYLRKTLFVIMSILLQLHPQDDPVYQFLDKKRSEGKPYYVYMTAGMTKFLRIYYGKVRDCLKEQGLWEQTPDATGKAD

SEQ ID NO: 443403 - protein, 346 aa, unidentified
MKILALDLGKYKTVGCAYESESGAHQFKRGLTTVAGLAGMVQEVKPDRVVIEICSIAGWVCDLMWGLGVEVQVANTSDDAWRWRKVKQKDDRRDALKAARLSAVNQIREVYVPAIEVRQWRALITYRQQLVRRRTKIKNHIRDLLLREGQLLGRGSSCWSEAGLKQLGERARPFSECGPAELWRGELQVELEQLQELQRQVATVTAQLNKMGAGEARVQLLRTVPGVGPRLAEAIVALLDQPQRFRKASQVSGYIGMVPKALDSGETERRGHITRQGSRVVRSLLVEVAWAGLRHNAWVRQTYQRLSGGKKARKKIAIVAVGRKLLVKCWAMLRDHRAWDWQPQIT

SEQ ID NO: 443404 - protein, 333 aa, unidentified
MNNFYFIGVDVSKKKLDVCLMCNNQVLHEEIIPNNSTAIISQFRAIQQEYEIDGGHLIICAEYTGQYTYPLTCSCSALGIKLWLENPSSIKYSSGSIQRGKDDKTDAKRIAIYAMRFHDKARYYKHPTKEIERLKRLEAERSLYVKDLNKYQAQLNDQAEYMDAKLFKEKSKRLKKLIRVFEERIEELNTEMNQVIHSCEVLYHQYCLLQSVEGVGAVVATNMIVVTDGFTRFDNARQFNCYAGLAPFQYTSGSSQHSKARVSHRANKEMKALLHLAAMAVIRKKTSELKDYYLRKTEEGKSKMSVINAVRAKIVARMFAVIKKNDFYQPTLA

SEQ ID NO: 443405 - protein, 331 aa, unidentified
MAQNELVVVGLDVAKDKVDACVRSSSQRQTFPSTPEGRRSLIRWLRKHKVGKAAMEASGGYEQEWAKALREAGIEALIVDPKRVRNFARSAGRLAKNDPIDAEMIAWFAETFIEARGQTYDAAREKLAQIVTARQALIDVQTSLRNRREHSTPEIVQKMQGRLLKQIAVEIAKLEAAIAALIKATPRFAELAEIIESVPGLARSTSAGLIGTMPELGQTSNKAAAALLGAAPYDDDSGKRRGIRHIQGGRRKARNAFYMACMGAATRHNPVLKAFYDRLIAKGKKPKVALTACMRKLIVILNVMIARGEKWDASRCEVSDPAGLPPSACTA

SEQ ID NO: 443406 - protein, 414 aa, unidentified
MKRFCGIDWAEDHHDVAVIDVEGQLVIKRRITDDPDGFAELLGMLESVGDTSSDPVPVAIETPRGLLVAALRATGRPVYAINPMAVARYRERHSVARKKSDHVDAMTLANILRTDAHMHRQLPADSDLVRSIAVLARAAQDAAWRRTRATQELRSLLREYYPTFLDAFAGTVHTNLAKPEARAVLAIAPTPQQGAKLTKPQIIAALRRAGRQRMLDETATRIQHALRRPQLRQPLIVEQAMGRQAVALLATLNTECANADNLIAASTDAFRQHPDYQIITSFPGLGESTGARVLAEIGDDPLRFTDARGLKAFAGSAPITRASGRSTSITHRRVKNNRLAAVGFVWAFAAIPRPGPAKDHYERRRAHGDRHAAALRHLFNRFLGQLWHCLQTRQTYNESKAWQSLTTMPEPNAA

SEQ ID NO: 443407 - protein, 347 aa, unidentified
MEKHTTLAVDLAKSVYEVAVSQHPGRVAERHRLSRPAFERFLAERPAATVLMEACGSAHHWGRVVRSLGHEPVLLPAHGVKPYVLRNKTDRSDARALLEALRNADLFPVPVKTVAQHALTALHRTRSAWMATRTARINLGRGLLREFGIPIPVGSAHVVPRILELLHDSTSAVPHAIRPTLDSLCSEIRELERRIKAIEKQLAELARDIPATNRLLSVPGIGLLTATALVAFVGDVGRFASGRRFASYLGLTPRERSSGNVRRLGSISKRGDAYIRMLLTHGARAVLRSAVMAARSDKKLDPLRAWAVGLQQRRGHNRATIALANKLARIAWAVWKRDQPFQDRKAA

SEQ ID NO: 443408 - protein, 357 aa, unidentified
MRKIITGEHPLTIGLDLGDRRSYLCAVDANGEVSSRFSVPTTQRALQRVFGGLAASRCVIEVGTHSPWVSRLLASLGHEVIVANAREVRSISHSRSKNDAADAEQLARLGRADPKLLKPIRHRSEQAQRDRARLSTRDGLVRARTALINQARSLAKALGHRLPACDGASFARRLQQEHLEELFPGLAALVECIAQLSQAIRAQDREIERLCQQRYPETALLRQVQGVGPITSLAYVLTVEDPRRFAKSRSVGPYLGLRPKQRQSGDRDPQLRISKQGDAFLRRMLVQASHYILGPFGPDTDLRRFGERLSARGGRLARKKARVAVARKLAVLLHRLWITAELYEPLRVGAREEVLTD

SEQ ID NO: 443409 - protein, 364 aa, unidentified
MHKETLAVAIAAPERLGEVRYYGTINNEAQAVRRLFQKLQGLYGNILSCYEAGPCGFRLYHQLTAMNIKCQVIAPSRIPKSPTDRIKNDHRDAISLARLLRAGELTPVWIPDLTHEAMRDLIRARAAAKRDSRVARQRILSMLLRTDKHYAGKHWTGKHRTWLANQSFSQPSQQIAFQHYCQSLEQIEDRILQLDQEISRLLPEWSLCNLVCQLQALKGVGQLIAITLVAELGDFSRFSNPKQLMAFLGLVPGEYSSGNSIRPRGITKVGNSELRRLLYEAAWSYRTPAKVGAWLIYYRPDSVTQYSKDIAWKAQQRLCSRYRSLTAKGKKSQVAITAVARELTGFMWDIALAAQSSFSQQKQN

SEQ ID NO: 443410 - protein, 430 aa, unidentified
MEQSTRFVGMDVHKDTIVVAVTATGEVGKATAYGTFPNTAAGLEKLVKRLRQAGDGPTKFCYEAGPCGYGIHRALTKMGEDCMVIAPSMIPRKSGERQKNDKRDAGSLAVLHRGGLLTAVWVPDAAHEAMRDLIRARLAAVRAVRAARQQLSAFLLRHERVYPGNRTPWTKAHRGWLADQSFTQSAQQIVLEESIEAVRLSEQRRDRVDGYLRAQIPSWSLFPLVQNLCALRGLDMIAAAGLAAAIGDPSRFATAPHFMAYLGMVPSEHTSGPKRRIGGITKAGDIHARTLLIEAAHSYRYPARIARHKLAAVDAVPEAVGEIAWKAQTRLCQRYRHMVARGKLTQVVVTAIGRELAGFVWSIACITSDPAVGGNIVTALYDEVTACCGEVMTTSEEVARQVQEIVPTQAPSVRHSPQTMAASAGMSRPG

SEQ ID NO: 443411 - protein, 352 aa, unidentified
MLIIGCDFHPRFQQIAFADSESGEYGERRLSHPEEARRFYESLRGSQVRVGLEATGGFRWFERMLSGLGMEMLLGDASAIRAAAPRKQKTDKRDARHILRLLMEDRFPSVWRPPVENEATRHLLLHRSRLVRFRTQVTNQLNAVGNNEGLVGERGWSQKRRQQIEALDLEGWDAERRRDLLALLDELERRIGSLQQAVEKAAGENAAACLLMTQPGVGPIVSLAYVLTIGDWQRFPRGKHVASYLGLIPAEDSSSDRRRLGHISKQGNSLLRWLLVEAAATAQRYDPNWHRQYVRLSIEKHHGVAKVAIAHKLAIRLYWMLRSGQDYRQVMERGSHARQSVCPVGRSSRPIE

SEQ ID NO: 443412 - protein, 369 aa, unidentified
MTFFIGVDLHKTQFTVHVRTEEESESLDQIRQYPTTADGYTEFLARISRYKETGSDVKIGVESTGNTRFFKNQVEKAGAEVTVINTLKFKVINESAKKTDKHDASTISEFLSKDMLPESYLCGKETENIRRLLKSRERLVRSTVGQKNEIHALLVSLGLSDELRSLQSKKGRQRILDTLESNNDYVLEAQSVKLMFEIIERIEESVKIIEKQLVELTKDDEMVNRLLTIRGCGKITAWTIRAYTEDISRFASAKKYAAFCGLVPWVQDSNETIHHGKITKRGPQELRTCFVQLVLGIRRCKDTSNWRMMQRYEYMKTNKGSGKSIVAAARKMAEIVRAMLSDKKDFDAQKMIGIYKPMSLAEETLTAMN

SEQ ID NO: 443413 - protein, 343 aa, unidentified
MEHFAGLDVSVKVTSLCIVDDAGGIIREAKIESDPDALLQVLKNGAYHFKRIGLEAGPLSQWLFSALAEAGLPVICVETRHMRAALKAQINKTDRNDARGMAQMMRAGLYRPVHVKTVRSQKLRMLLTHRKLLQSKAIAIENDLRATLRNFGLKVGMAGAVKFEARIKELVENIPDLAILVEPLLIVRRTLREQFGIVHRRLLAVVRQDEVCRRLMTVPGVGPVVALTYRSTVDVPARFRNSKAVGAVFGLTPSKYQSGEIDRTGAISRCGDEMMRVMLYEAAQSMLYSRKWSWLKAWAMQIARRRGIKKAIVALARRLAVVMHRIWVDGTEFRWTRQEAAAA

SEQ ID NO: 443414 - protein, 414 aa, unidentified
MNDPTVSALPTATVFAGIDWASADHAVCVIDAAGAVLWRHTVAHSRAGLARLTGRLSELGVARVGIERPDGPVVEALVDAGLRVSVVPPRQVKNLRSRYTRAGKDDRFDAYVLADAMRTDGHRFTDLTRDAAETIGLRALVRGRQDLVEVRVGLVNQLRHTLELAFPGAVGLFYDLHSPIARAFLRRFPTATEAGVLDEQAMTTWLRAEGYCGRTPAAVLVDRLRSAPTGLTGAEAAARRHVTLALLSSIDAIEAQVAELTHRIKEALGRHPDAPIFTSLPRAGKLRAAALLAEIGDARGRYPDPQTLAAAAGVCPFTDESGKHRAIGFRYKVDTKLRRAIIDFADDSRHANPWAADLYARARTRGMRHPHAVRVLARAWTLVIWRCWQDRHPYDPARHGALNRYLSQATAAAA

SEQ ID NO: 443415 - protein, 458 aa, unidentified
MPRSQRRTTRAVTTPVLHPHAAGVDVGATELYVCVPLDRDPQPIRRFGTFTEDLRAVATWLTQCGVTTVVMESTGVYWIPLYQILEPRGVEVCLVNARHVKNVPGRKTDVQDCQWLQYLHSVGLLRGSFRPPETVCAVRSLLRHRDTLVQLAATHTQHIQKALTQMNLQLHHVLSDITGVTGLAILDAILAGERDPQVLARHRDRRIKASRETIAKALVGDYRPEHLFTLRQSLVSYRHYQQLIGACDGEVQALLGDFASQVDPAVHPLPPPTRARRKPRGLPAAPGFDLRTELYRILGTDLTQVPGLQTPTVHTLFAELGADLSPFPSGAHFASWLGLCPDNRISGGKVLSVQTRRVKHRVAQALRLAAQSLFRSQSVLGGFFRRMRAKLGAPKAITTTAHKLARIIYHLVTTRQPYDESRLAAAEADHRRRTESRLRSQARALGFQLVPAPVQSVS

SEQ ID NO: 443416 - protein, 403 aa, unidentified
MNNVAGIDVSKGKSMVSVLRPFGEVVAKPFSIGHTGSELKDLANYLKSLDGETRVVMEHTGRYYEPVARFLHEEGIFVSAVNPKLIKDYGNNTLRKVKTDKADARKIARYGLDNWAELRQHTPMDTIRMQLKTLNRQQSLYAKTKTMMKNNLIALLDQTYPGVNALFDSPVREDGSQKWVDFATAFWHVDCVRNMSLTAFAERYRKWCKRHGYNFSQSKAVEVHTGAQDLIAMLPKDALTKTMVRQAIDALNAVSASLERLKAEMQALAAQLPEYPVVMAMHGVGDSLGPQLMAELGDVARFTHRNAITAFAGVDPGADQSGTHEAKSTRVSKSGPPELRRALFLVMDCLLKTQPQDDPVYRFMDKKRAEGKPYLVYMTAGANKFLRIYYGRVKEYLASLEEN

SEQ ID NO: 443417 - protein, 339 aa, unidentified
MSKPNQPIQAMVFCGIDVSAATLAVAVQQEDQRFEQRVFDNSAGGHKSLIGWLRKRKARVRVSLEATGMYSLDLALALDGADGIEVAVLNPKVIHRFAQTLRRSKTDSADAQVLAEYSRRMPFTPWRAPSLSGLQLRTISRHIQGLTVEHTRQNNRLHCGEKSGVTPRCVINDLKRSMASLQRRIARLRREALELVRSDEAMQKRFDLLICIPGIAEISALQLLGELASLSPEMSVRQWVAHSGLDPAHQVSGTSVHKPSRISRAGNRHLRRALYMPALVAVRRDPHLKAFYEILLSRHKAKLQALIAVARKLLHAIYGIFRTRTPYDGSKLFPQLGIA

SEQ ID NO: 443418 - protein, 347 aa, unidentified
MSITMIGLDTAKSVFQIHAVNETGKTEMKRKLSRNDLIPFFKKQELCTVVLEACGAAHHWARILTGLGHDVKLIAPEAVKPFVKKGKKNDAADAAALCEAASRPDIKFVPMKTTEQQAILALHSARSLLVKQQTMLANAMRGLATEFGLTVPKGISKLEELTVLVDTDETFPVKARQAFTGLFDQCEALTESIVTFEAEIVAHARHDETARRLATIPGIGPITASLIAATVGDIGMFKSARHFAAWLGLVPRQHSTGGKTRLGRITKTGNREIRKLLVLGATSMVYRAPQWNSAAGLWVRGVLERRPVRLATVALANKMARIAWALMTRKEVYQAKGRTEPATEAAA

SEQ ID NO: 443419 - protein, 428 aa, unidentified
MNEEDRSRLEEFRQFRKEVRGSAEYLLVGIDVAKDKHYAFFGTATGKTLLKRLVFENSREGFQKLLVQAEAMKVQGGLKKVVFGMEPTANYHKPLGEHLIRCGRRVVLVSGVAAHENRKTLDGRWDSNDTRDAANVADLVSQGKCLFYEFPVGALQDLRNLLSLKKRLKRQEHGYRVRIRNHLLAKYFPELDQYYKQSESTSLAIVHWCLDPSVIAGLEYKRFVEMVAPGKGRLSRESRLQAIWKLAVDSVGCEAGSAVEFEAQLMVEGLKQIRQALQSIEEKIEEICSSFPEYEYLLSIPGFGPDVSSKVLGAVGDPFRFQNGQQVLKLGGLDLNAERSGKSSDLARPVISKKGKADLRYALYQAALIASIRDRHFIISFTNQLRGREKEPGIKTKMRVKLAAKLLIIAWTLMKKKEPFNPDYLRLE

SEQ ID NO: 443420 - protein, 354 aa, unidentified
MKRSAKYVALDVHQATTVASVREQSGRVIARSVLPTEQLALVEFFGGMRGTVQVAFEEGTQAQWLHDLLVPLVDRVTVCDRRGQRRQGNKSDQVDADHLSGLLRQGGLRAVYHGGGANRAALKELTRTYRNVVEDSTRVMLRLKALFRARAVRTPGQSVYNPATRPEWLTKLPDRAARFRAEMLYRELELLRELRPQARTAMLAEARKDPAWAVLHTIPFIGPVRVALLLATMQTPWRFRTKRNLWAYAGLAVVTYSSSDHEFIAGKPVRRRRAPLTRGLNRNHNRVLKDVFKGAAIAAIGRPGPLQDLYHGMLARGLREELARVTLARKLAVITLRLWKTGEPYDPAKLTLRS

SEQ ID NO: 443421 - protein, 448 aa, unidentified
MKMDIMNPNAAGIDIGSRSHFVAIGQSDSDVREFGVFAHDNTSLANWLQDNNIKTVALESTGTYWQNLYLVLQQKGFEVILANGKFTKNIKGRKTDVQDCQWIQKLHSLGLLSGSFLPDDETEKLRTYCRQRTAWLNQGASVIQKMQKFLRLLNLRLDIAVTDIVGLTGLKIIHAVCNGITNPKKLSKLVHRNCKKSPEEIALALNCNHRTDLLFGLKQEYEMYLTIRDKIEECDKHIKTFIDQHFNLNPQKKFLKAPKKIYKKKNKNAPKNMDLNQIAYQYFNGVDLMSIEGVSDRTVIALMSELGPEGFKKFPTYKHFTSWLRLSPNNKISGGKKLSRRVGKGSNNVKTALRRAANVLGNLKDSHLGHFFRRIAYRKGRVSAITATARKLAVIIWKMVVEKVPYKPPCPYEFRDQKRSRILKEMRNKINKLNISPMDLGLNLNRIE

SEQ ID NO: 443422 - protein, 341 aa, unidentified
MDAGYDGRQIVGIDLHRRRSVIVRMAAETGQRLETVRIDNDPVALAAQIAKAGEAPEVVLEATYGWYWAVDVLQDGGARVHLAHPLGVKGFAYRRVKNDERDAADLADLLRMGRLPEAWIAPPATRQLRELVRHRAKLVALRSGLKAQVHAVLAKQGVQVPMSDLFGTAGQQLLDELCLDPAYNARVVSLRRLIDALTFEIDIVARRVAAQLAGHPGYRAVQAIDGVGPILAMVLVAEIGDVHRFPGPEQLCSWAGMTPKHRESDTKVHRGRITKQGNRLVRWAAVEAVQRLRGGVIGQTRVRIGERRGANIGKVAAARKLLTLVYYGLRDGHIRCLARPA

SEQ ID NO: 443423 - protein, 377 aa, unidentified
MKRIRFVGLDVHAETIAVAVAEQGGEVRSLGVIPNRGEAIRKLIKRLGPVQELRFCYEAGPTGYVVYWQLAALGAQCAVVAPTLVPMKSGERVKTDRRDALKLARNYRAGELTPVWVPDAAHEGLRDLVRAREAAKKDQLRARHRLGKFLLRQGKRPPADVKPWTVNYLLWVKREVHFEQLAQEATLLDYINEVEHVAARIERLDRAIEDAVKLAPPRMRAVIEALQSLRGVAQVSAVTIVAELGEISRFNHPRQLMGYSGVVASEHSSGERIRRGGITKTGNAHLRRIVIEAAWAYRHRPVVGWSLRKRQEAVSEEVKEIAWKAQHRLYGRYRKLTDRGKKTQKVVTAMARELLGFIWAIALKVEAEKHQPVRRAA

SEQ ID NO: 443424 - protein, 369 aa, unidentified
MDHHSVAYVGFDTSKTKHAVAVAEGGREGEVRYLGEIEATPAAVERLLGKLAGKYKTLHVCYEAGPTGYGLYRHIRALGHACDVIAPSLVPKRPGDRVKTNRRDAVTLARLLRAGELTAIWVPDEVHEAVRDLVRAREAAAQDLRHKRQQVLSFLLRHGRIFTGHRHWSRAHLRWLAGQAFNHPAQQIVFQDQVDAVADAQARLERLDHQLAELVPTWSMAPVVAACQAMRGVSFLVAVTFVAEIGDVRRFESPRQLMAFLGLVPCERSTGDTVRRGGLTLAGNRRVRRALVEGAWSYRHPARVTETIRVRLENLPKAVREIAWKAQVRLSARYRRLIAAGKKAPVAIAAIAREMAAFLWAIGRVVEPA

SEQ ID NO: 443425 - protein, 346 aa, unidentified
MLYAGLDLSRKRLDFHLLDGEGATVEVGAAPPDADGLLGLTRRLDRHHEPIRAAIESMNGARFVHDRLELAGWQVEIADAQKVKGLAPLACKTDRIDAWVLAELSRRELVPAIWLPDPAVRGERERARWRLHLVRHRSSLKQRVHAVLLAHGKPCPVSDLFGVRGRELLARLALPEPWQGSVEASLRLIDELNREIAACERELQRLGADHRYVPLLLTVPGIGWVLAYTIAAEIGDIDRFATPTKLTGYTGLCPRVYQSGERDLRGPLAKQGPRYLRWALVEAATHACSAPVYRDRYQHTKQRLGKQRGAKVAQIDLARRLAEAIWHMLTRNQPFAPAGAADPLAA

SEQ ID NO: 443426 - protein, 325 aa, unidentified
MTRTICGVDISSQSLDARVGREGAFAQFPNTTEGIHALAAFCHAHQVDLVAMEATGGYEQLAFAELSEQGLPVAILNPRAVRQFAQSMGSLEKTDRIDAAMIAWYAEVKKSQPTRLAPKSQQHLRALVTRLRQLTEIRTAQLNQQRLVTDRAVQASFKKLLAVVARQIRQIEQRIAALLDLDPLWRELNQAFRTIKGVADRTVARLMAEMPEIGVLSNKRISKLAGVAPLANDSGQHQGKRAVRGGRASVREILFIVASVVGRYEPDFIAFQQRLRALGKPPKVVRIALAHKLLVRLNAKAREVRQRMQTLESAPAALSAGSKAY

SEQ ID NO: 443427 - protein, 317 aa, unidentified
MTEPCGVGIDVAKATLDVAWSTNPTARWQTTNDEEGWAALVAHLRTLQPTVIVLEATGGYEIGAASALSAAGLPVAIVNPRQVRDFAKALGRWEKTDAIDAGVLAAFAVRMQPAPRPLPDDLHADLQALVTRRRQLVDMLTAERNRVPLARGAVRKNLRDHIAWLEKQLGKTDRDVRTRIEASPIWRVRDQWLQSVPGIGPATSACLLACLPELGTLTHRQISKLVGVAPVPDDSGLRHGYRRIKGGRSDVRTALYMATVSAITHNPPIRAAYRRWRAAGKLPKVALVAAMHKLLIHLNAMLKQQTGWHPIPTAPTT

SEQ ID NO: 443428 - protein, 404 aa, unidentified
MELTAIYRCVAALDVHQAKLTVCILFLNDEGEVITKLKEFGGFKKDRRAMSEWVASFQPDLVVMESTGIYWKSPYAALEKQQLKIDVVNARYVKQVPGRKTDIADAQWLAILARNGLLRGGFVPPVQFRELRLISRQMQKMSGILSSEKNRVHKLLSDAGIRLSVVLSDIHGKSAREMIKGLLAGETPQQVLKYASKRLKATEEELLDALQGDISPSHHFVISEVMMHIEELEARIKLFQQALIEGLSPCKGILECLQTIPGIDEMSAAMLLVEIGDDMSAFGSAAHLASWAGVCPGNNESAGKKKSGKARKGNPYLRRILCEAANAASRTQCGLQDKFKGLVVRRGRKRAIFAIAHKLLKIVFLLIDRGEYYRDAKIDYDALSVQRNAPRWIKKLRQYGYITA

SEQ ID NO: 443429 - protein, 479 aa, unidentified
MVKKNHSEFLCDSETGEVLETGTEIQYTKDYGVGIDCHSRFLQISVLVKNGPSVFEYRNQFDTDWQSVVNAKEWVVSVIETNSSPFVHITDELHYCIESTSVYHVVVLKAWEGIPSVINPSIAGASKKKTDVLDAKMLAVQDLTGIWPSSFIPSSEVDQLRLLLAERDNFNRLAARTSNRINNSLLKFGYTVGRDGSVTKNTKVREMIEDQISDDPSDHYNVCPEGIPENVKCVFIEEYMQYDMYRELVRDYDKRIRSMVCSMNWETADSEIPGRQMLKILCTAPGIGEQTAILWLAKIVTPRRFRNEKALAAYCSLDPSLKVSAGKVTSTVKRGGCKDLHSALCVAASNLVRRHNEPFGRWGYNIAVNSGRWKKGISAVARKLAVSLYFMSLRGEEFSYEKYRMMTEPDVIDISIEELANKEPAFKRYVRILISGNIHTTKQLVHSYYLCDLTNIKGLGKKFYGLLKEYIGNQEKYRS

SEQ ID NO: 443430 - protein, 402 aa, unidentified
MNAVGIDVSKGKSMVAIMRPFGEIVSAPFEIKHTASDIHSLVELINSVEGESRIVMEHTGRYYEVLAHQLSEANLFVSAINPKLIKDFDNDSLRKVKSDKADSVKIARYALDKWQNLKQYNVMDELRNQLKTMNRQFGFYMKHKTAMKNNLIGILDQTYPGVNTYFDSPARSDGSQKWVDFASTYWHVDCVRKMSLNAFIDHYQNWCKRKKYNFSQSKAEEIYGKAKELVPVLPKDDITKLIIKQAVNQLNSASTTVESLRTLMNETASKLPEYPIVMAMKGVGASLGPQLMAEIGDVSRFTHKGAITAFAGVDPGVNESGTYVQKSVSTSKRGSSSLRKTLFQVMDVLIKTHPQDDPVYQFLDKKRAQGKPYYVYMTAGANKFLRIYYGRVKEYLSSLPES

SEQ ID NO: 443431 - protein, 421 aa, unidentified
MPNIEIGVDFMVKENFIYVGIDLHKETHTAVMIDCYNQKLGEITFPNRPADFPKLVTKVKKCNTDAKEVVYGLENAYGYGRPLAVWLIDKGYFVKDVNTAISHRQAKHRGAMYRKSDSDDAEAIALATLNMLDKLPDACPNDAYWSLGQLVHRRDNIMKQRTRLVNQLHEQLCIAYPSYKSFFNDISRPTALYFWEHYPSRKYLRGKSVEDLREELVPVSHNRCSTKNCEKILDAVASDKVKNNAYQDARDMVTLSIVSDLQHYDSQLAEVDKMLEQMYKMLGCTLTTIPGVNVITAVKILAEIGDIKRFSNANKLAQFAGIAPLHLSSSGKGKDVATKQGNRRLQATIYFLAIQMVQVSSKGTPRNSVVRAYYEKRKAEGKTNQQALICISRRLISVIYGMLKNGTEYRMPVVENAGENR

SEQ ID NO: 443432 - protein, 320 aa, unidentified
MQSVCGIDVSKDRLDIMVLPERQYFSVGNDAVGWAELVERLRGLSISAIGLEASGGYERGAMRALLAAGMPARQVNPFKLRQFARASGVLAKNDPLDARMIASFVAIMPTQPAQPRAPAIERLAEMLAVRRQLSAEKVAAENASRLLEDTMLQRLSRRRIRRLAADIEMLDRHLAEIVGTDAALAHRYRLLTSMPGVGLVLACTLIALLPELGRMSRKQVAALVGVAPYAFESGKFKGRRCIWGGRAPVRNVLYMGAMSASNWNPVLKAFHDRLKAAGKLPKVVIVAIMRKMITALNAMVRDDVVWADHLSGRHSVPTAR

SEQ ID NO: 443433 - protein, 426 aa, unidentified
MEQHEHYAALIGIDWSDRKHDVCLVDAATGSRELSVISHTPEALNEWARALRARFSGEKVAICLEQSRGSLIYALLKYDFLVLYPINPQTLSKFREAFTPSRAKDDPSDAEYLVELLVHHRERLKAWTPDDERTRTLQLLVEHRRRLVGDQTRISNRLTALLKGYFPQVLQWFPDIRTKMVCDFLLRWSSLDALAGVRRATLLKFFREHNSQRTETVEKRLAAIKAAVPLTTDKAVINSSVVMVRALVSQMKATLAAVKEFDAQIEELCQTHEDFELFASLPGAGKVYASRLLTAMGSNRERWATASELLRFSGVAPVIERSGKSSWTRWRYFCPKFIRQAFVEYAGESIRHSEWAKAFYASQKAKGKSHQAAVRALAYKWIRIIWKCWQTREKYDEARYVECLRKKGSKLVAEPASAEAGTGELA

SEQ ID NO: 443434 - protein, 467 aa, unidentified
MSSESCNFFWDYDPDIKPAMILRMPKCVLERECECARTSDRHLPISGNDNMNAEKEIVCGADIHRDFLVATMISRSGLKLQEQFGMDQDGLLAFRSWILDHRCLRVAVESTGNYWYPIFCILEGHVEFILANAFQIRNIEGKKTDRLDSERIAIYCLNDLIKPSRIYPKDYRDLRSITRSREALVNARSKLKNQIHQSLAVCCIKLSSVISDSFGKSGRYIIEQLLEGKTIEQIISMIPSKRIKKKADELRKAISNGLDPVQILLIKTNLDAIDYLSEKIKLLDAEIAIKVKPFEEDLNIILSVPGIGLTSAATILAEMGDYKDFQDADKLAMYFGIVPAVYQSAGKLRTGKITKRGSKHMRRILVQVAKAISKTKKSSKLKRFFLRVFTRSGKKNVAAIALARKVLCIIYHLLMKREDYQEPEVKKNKPKIPSCISPLSMMDIDEMIKTISQAGYLVKKGLTEGCG

SEQ ID NO: 443435 - protein, 408 aa, unidentified
MALYVGDDWSEDRHDVHLMNEAGERLAARRLPEGVEGIAALHGLVAEHALGPGEVVVGIETDRGPWVAALVAAGYHVYAVNPRAVARYRERHHVGGGKSDAGDAKVLADLVRTDRHNHREVAGDTAEAGAVRILARAHQQLIRDRVRVTNRLRNALREYFPAALQAFPNLAHSDAVGVLAKAPGPREAARLTLPQLRAALRRGGRQRNLERRAAEVRAALRAKQLDVLAAASRAFAATTRAAVAQIEAINRQIAELEAELESSLEEHPDAEIYRSMPGLGAVLGARVLGEFGDDPERYESAKSRRNYAGTSPLTVASGRKHTVRARFVRNRRLSDAVDRWAMCSLRASPGCRAFYDRRRAVGDLHHQALRALGNRLVGYLHGCLRARTLYDETVAWGHRSQLSELTAA

SEQ ID NO: 443436 - protein, 334 aa, unidentified
MDTISVGVDIAKATFTAALWQAEHVEELGTFPNTADGYGALQQALARRPAAPAAVQLTVEPTGGYELGLAHWAYAQGWRVSCPNPRQVREWAAGLGRRAKTDRQDAVVLARYGAERQPPAWQPWRTELSELDSLLRRKDELTGLLHQERMREQALRARPGIAGAVRGSITRLIEALEEELREIEQAIGARQRTTTLAPVVARLQTVPGVGPTTALPLLVLLERWDQLTHGRGDPKGLVAYVGLDPQPYESGTSVRRRAAISRQGNRRLRARLYMAALGGIRGDNPLRHFYDRLVGRHKAKKLALVAAARKLLVWAWAVYYSQQPFDAARVARPA

SEQ ID NO: 443437 - protein, 330 aa, unidentified
MFFIGADIDKRKVHCVLLLEPATGKQRSKVVANTPEGMHQLLAWAQKQTGQPASELQVIMEATGPYHETAAYTLYEAGATVSVVNPKQLKDYAKGIGHKAKNDGQDALALADYGANRRPRPWQPPPPEFRQLHALLQRLEALEKDLQRERNRQEKATVSAASATVLASLVRSIAFLEQEKKRLLSEIDGHIDRYPHLRADQDRLRSIPGIGPVLSRWALTLLQQGQRFSSAAQFAAYLGLIPSEHRSGETVYQRPQLSKTGPGHLRAKFYMAAMVAVRYNPVIRAHYERLLQRGKSKMSALGGAMRKLAHICFGVIKNQTNFQTQTPQEA

SEQ ID NO: 443438 - protein, 366 aa, unidentified
MSEWWDILGSDGSSRRRVNVELEEVLVSIVCGFDVHRDQITFDLVDQLSGEVRTGRLVPATRAGLREWLGSLDASRLSVALEATTGWRFVVEELERAGARAVLAEPADTRALRGPKRRAKTDRADARHLRELLERGAVPESWIPPTHLQESRTLVRLRQSLSDEHRVWLQRVHAQLFHQGAPPVRTRLLGAEGAAARADLSSAGRALVETAERMCESLSDEIAVLDSQLVVWARRHPACRALQRLFGVGVITSVALYAEIGDARRLSSSRKLVRLAGLDVTVSESADKRSPGRLSRQGAPLLRWAAYEAALSACRRGSPDHADYQQLRARIGHGRATLTIARKLLRRCHHVLVAVGDDLLKPLPES

SEQ ID NO: 443439 - protein, 433 aa, unidentified
MICAEIERCAGIDVGKERLAVCVMVGPLAGEPRAEFREFGTIAAELEGLRQWLQAEGVTHVVMESTGSYWKPVFNVLEDSVQVYLANSQEVKNRKGHKTDKKDSWWLAHLLRHAMIRPSFVPPRGLRELRDLTRRRRKMIGVATSERNRVDKILQDANVKLSNTLSDIFGVSGQFMLEALLEGKATPEQIAQFAQRSAKRKIPEIIAALEGHRMTEHHRQMIRYSLEHLRFLEEHILELDQQILAKIKALGYLPQWKLLQTVPAIKENSAASVLAEIGPDMGQFGSEKNLSSWAGVCPGNNRSAGKNKGSKTTKGNRWLRGTLTECAWGAASKKNCFLKEKFWRLATKKHRKPPATMAIAHTLLVLSYQVLKTGQPYRERGLPVMDEKQKNRLICHHVRRLGKLGIRAYSLPMVESPKTPKSKKKKKMAAKKN

SEQ ID NO: 443440 - protein, 341 aa, unidentified
MEEYVGLDVSMEETSVCVMDAAGEIVWEGKAATEPGELVRTLRVRAPAAVRVGLETGPLSTWLWHELQEAKVPVVCLDARHAQAALSMRINKTDKNDAAGLAQLVRMGWYREVKVKRLATHVDGALLASRALLVRQRCELENEIRGLLKNFGLRVKATKGRAFGQSVAALADKQPMLREMVLALLAAWSSLRLQIAVLSRRIEQAAMDDPVCVRLMTMSGVGKLTSFAYRAAIDDPARFRHSASVGAYFGMTPRRYNSGEIDRMGRISRCGDALVRSYLYEAANVMLTRSRGSNPLKVWGLKLAKRVGWKKARVALARKMAVVLHRMWCDGTDFGAPKVKA

SEQ ID NO: 443441 - protein, 318 aa, unidentified
MSHGYDKFVGIDVSKDALDVHGLPDGSPSRFDNTAAGRAKLLSLLPQAGACLSVVEATGGYERDLVAEAVTAGHHIAVVNPRQVRDFAKALGLLAKTDRIDASVIARFAETTRPVPKGYDERQEQLRELIVRRRQLLDHRTAEKNRSEMAHSSLVRKSVLKLIETLNKDIQRIEKAILQLVESNDDWRERFEKLKGVPGVGGQTAATLMAELPELGHLNRQQVAALVGVAPFNRDSGQFRGRRAIWGGRQSVRNALYMAALSAKKHNPVIREFAARLMAKGKPPKLVLTACMRKLLIILNAMLHSGDSWSPRVATLTP

SEQ ID NO: 443442 - protein, 387 aa, unidentified
MARKRTLSTLDTSIAYEAVGLDLAKEDTAIAAFGPDHEGPYLIDRMPYDKLYELLADMAPTLVAMEPCSGAHQIAEQIQELGHEVMMISGRHVQAWVKDHCNGQKTDLNDAFAILNLAYDRWLTPIRGKTREECRLLALQASYRQLKGQRTKTMVHVKATLHAWGFPIRAGSFNQKALHELIDANREAFGDEVVETLHLMINRVHDLDHDIATVLKLLTEATQRDPRASLLRSIPGFGVLTTSRWCAVVGDIARFDSPKQTMAFIGLVPNNRITGHHTETSSGREARGQGKMSKRGDKMLRSLCILGAGALCLMVRNDRLPDCPFVASIKERLASPRPWFKVLVYVAAKLVRIATALLKYGETFSFEKAGISKAVLKQWELEQAKAA

SEQ ID NO: 443443 - protein, 459 aa, unidentified
MNNHEELIGIFKSVGHEKTIFIGFDIGKYYHVCQICNGYKEPLMSAFKFNSTESGYKEFKLAFDDILKINMPDYMIFGCEPSGTYYLNLMNQLSIDYPNADFRLVNPLATSAQRKMEMEHNKSDPIDVNAILELMLQGLSYPLPIQDQVYDEIKEYVRYYDKLSSQLVGLRNRILLCIDELHPGFRIPNSTYFNSQAGKQFLRVLPDPRLLKDMNLVDVLKYFEEAGEHLSAQMAMRFSIAAKDILIPDKPVIKAKINTLKGVIKQYELTEELKIQTKLEIEQIASQFTFSKEILKLVGLGPLTLGRIIAYLNNPYRFSNGDQVAKYAGLVPRHSSSGVYSGKESLTHMGHPQLRSVTVQLTQHLISSTGYFTAFYNHLVIDKGKDINLAIVATAHKVLRVIYHMMIFNDKFNPPSARNSELSSSKIERVTKQKLKQRNRKGTVIPLTQINSEEYHTRV

SEQ ID NO: 443444 - protein, 340 aa, unidentified
MNIVFLGIDLAKNVFQFCGLNQAGKPAYTKRTGRKELLQTVANIPAGLIGSEASTGAFHWQREFEKLGHQVKIISPQYVKPFVRGQKNDGNDAQAIAVALMQPTMQFVPPKSPEQQDIQALLRARQRIVNHRTATVCQIRGLLLDRGIPIGSAVSRARRAIPVILEDAENGLSPRMRRTIAELYDLFNDLERRIHFFDKEIETVFRQSAACQRIAKVKGIGPKTATAVVAAIGKGTEFKNGRHFAAWLGLVPRQHSSGDRQVLMNMTKKGDKHLRTLFIHGARAVVRVATNNNDDYMNQLVNQLKERRGFNKTTVAVANKNARIIWSMLRNETEYQAVGS

SEQ ID NO: 443445 - protein, 420 aa, unidentified
MKEPTVKDFAALIGIDWADQKHDVCEIPFDSKRPKYSIISSKSQAIHDWAMNLKKRYPSKKIAVACELKKGPLIYALEKYPHIVIFPINPSTVAKYRKAFTQSGAKDDPSDALIQAEILDRHMDKLSPIFPEDSEIRALKQLVEDRRKLVQNRVDLSNLITATLKNYYPQVLDWFNEKDTIIFCSFITKWPSLADAKRARKQTLINFFEQHNSRYTEVNERRVEEIKSAFSLTDDKGVIEPNKIFIEVLIPQLRLLIEATERFDKEIKQRYKKQNDKSIFDSFPGAGPKLAPRLLVAFGANRDRYKSASDMQKMAGIAPVLERSGQKSWTHWRYSCPKFLRQTFVEWAGQSVRFSFWAKAYYEQQIEKGKPHNTAIRSLAFKWIRIAFRCWKTRTPYNESKYLEALKKRRSPLLKYAANV

SEQ ID NO: 443446 - protein, 400 aa, unidentified
MRVVFGIDVSKVSSEVAILVNGEKVHNYTMSNDAIGFSRLLGDLRTVHKPEIIFEATGVYSRRLQTFLEDNGYAYTRLNPLEAKKQLDSLRVRKTDQIDAEKLAQSQFVLNRKPTYVQEEVYQNLRDLSRFYQNLTEDIVRAKNRLHKALQVTFPELENILSIPTGEQYWNLVIAFPCKDFVLELSKDKLSESIRQSTSKRISDKRVAYLAEKLIALANQSYCAVKKNSPMLEEVRYYTKELLRLSEQRQAVLDEMVELAQPLPEYDILLSIPGIAETTATSIIGELGDIRRFQSANQINAFIGIDLRHYESGNFIAKEHITKRGNPYARKILFKCIHNIASASHTNPCHIADFYEKRKRQSQTTSTKPHTIASIHRLIRTMYYLIMHNKLYDYASTQNQ

SEQ ID NO: 443447 - protein, 349 aa, unidentified
MYASVDTHKDTLAVAVIDHAGRVLRQLELPNQDSGYARLLALLTSHNVARVGIEGSGNFGWPAAIYLFERGVSVVEVPPLMTSRERLSRPGQGKTDPVDAIAIARITAREDALPPVRPMTGQAADLRVLTDYRDQLVNERTATANRVHTDLLWLRPGYQHQLPHLTNMAHLHAALKLLDGDDSIRAAVTRARLDRMLTLTEQLAELRIQIDALVKTNGSTLHEIYGVGPVVAATIIGHVVDVRRYPTRHHFATANGTAPIPASSGRTVRHRLNRGGNRQLNRAIYTIAITQIRAETEGRAYYQRKRAEGKTSREALRCLKRRLSDLIYRTLRADLANAAQQTPTLSIAA

SEQ ID NO: 443448 - protein, 383 aa, unidentified
MSSNTIDHEHAIIIAIELSRSTWLVAARLPGVEKPRFHKIGAGDTAALLSYLSSLQTRVLARTGAAPALYCCFEAGRDGFWLHRFLTTHGIANHVIEPTSILINRRARRAKTDRLDAEGMLRVLAAYLQGDRQACSMVRVPTPDEEDAKRIHREREHLVQERLRIENRIQALLFTQGIYKRPSLRSWDRDLAAVRTGDGRELAHHLRAELDRLRRRLVMTLELIREVEAERDEAANANPKDQTCGKIASLCLIRGVGANFAAVLTREVFYRSFDNRRQLASYVGITPMPYQSGGMDRDRRISRAGNPRARTTMIQLAWLWLRYQPGSDLAKWFRDRVGTLTGRTRRIAIVAMARKLLIALWRYAEDGVVPAGADIRAEAATAA

SEQ ID NO: 443449 - protein, 356 aa, unidentified
MSEKLNSAIAVIGIDIGKNSFHLVCLDQRGAIVLRQKWSRGQVEVRLANLSPCLIGMEACVGAHHLSRKLQALGHDARLMPAKYVRPYSKGQKNDFRDAEAIAEAVQRPTMKFVATKTVEQLDLQALHRVRERLVGERTGIINQMRAFLLERGVAVRKGPRFLRAELPTILAKRSDVLSPRMLRIIEDLAGDWRHLDERIEGVSSEIAALVDQNAACKRLMSVPGIGPIISSAMVAAIGTGDVFSKGRDFGAWLGLVPKQISTGDRTILGSISKRGNRYLRVLFVQAARVVLGKLKPEDWERYGLRSWIEAAKKRLHHNVLAIALANKLARIAWAVLHKGRAFECVKTNAVASQPA

SEQ ID NO: 443450 - protein, 384 aa, unidentified
MKKRSTETTRRMRERKAAGGIKDAVSGGSGTAKSLTIGLDLGDRMSQVCVLDSMGEIVEETRVATTKTGLTRVFDVERLGKSRVAMEVGTHSPWVSRLLREMGHEVLVANSRKLRFIYQNRGKTDRVDAESLARVARMDPALLSPVKHRDEEVAQDLAVLRARDLLVRTRVKLIGHARGAVKSAGHRLKASSTRAFTAETESMLPKELRETLGAVYTAIDALSEQIRALNQRVREMATKKYPETGLLRQVAGVGYILSLAYVLTLETPDRFEKSRMVGPYLGMVPARRQSGDSDPQLRITKEGDGFMRCLLVQGAQYILGPFGPDCDLRRFGLALEGRGGKYARKRAVIAVARKLAVLLHKLWRSGEVYEADRRLALVSEPAQA

SEQ ID NO: 443451 - protein, 425 aa, unidentified
MLGVGIDWAEEFHLVALGRPGDGVIEVSRVEHTPAAIDALVGRIASLEPDPAEVRVVLETRHGMLVERLVDAGYAVVPVNPDLVARRRGPAKKKDDAEDARIACLIALDRFEVLRPLVPHGEMAGELRAIARDDLRAGRDERRLLNRLRADLIATFPAALAIAGEDLGAPTFLRLLERWPTQDALAEASTQELEAFARAAHHGWPTRFAEKVHAALGGEHFVPRDYLVRAKADTIRLGVTQLLAIGAQRRAWERRMGELLLGAPRRGRDKKPREEDMGQAFPGGEIYLSFPGLGDRLAARVAGEVGDHPEQFSTPNSLQCYAGRAPVTRRSGKSELVVACRLACNRFLADAVHQWAFCSLEKSAWAREFYDAQRARGKGHNAALRALGNRWLEVLWHCLDRGVPYDEALHVANRNRALGRAPKAA

SEQ ID NO: 443452 - protein, 392 aa, unidentified
MTIQAQVSVYSQVFVPRDYDVFAGLDVDHHSIAATFSDHGRLMQSLRLPYSAPQLLNYVRKHFPQQRVAFVYEAGPTGFGLYDELVAAGHPCLVVAPPMVPRAPGQRVKTNRLDSRKLSTALRGGELKSIHVPAPKYRELRHLVQLRDTHVQQLTATKCRIKALLLYEGIAFPSDEGKEKQWSARVVNELLELPCSESVRFKLDQLVGTLHFNFNSAAAAQKQIRHFCQKDPELRQSMGWLKSLPGIGEIIATHLVARLGDPSLITNVRQIAGFLGLVSSEHSTGDKQNRGEITRAGDSRLRNKLIQSAWVAIRQDPELREFYSRVYQRHPKKVAARKAIVAVARKLTTRIYAVLKEQRPFVLREVSTAPLTTEETAGHRGRLDGQQNEQSR

SEQ ID NO: 443453 - protein, 375 aa, unidentified
MKKNNTVKQSLKKGTKKTTKGAQESITIGIDLGDKASRYCVLNGTGEVTEEGGVSSSKKGMMQMFGALRRCRIAMEVGGHSPWVSRLLIALGHEVIVANARQVKLISTSSRKNDRLDARVLARLARMDPELLRPIRHRSEQAQLHLLEIRARSVLMEARTSLVNAARGLVKALGERIPKCDPDQLGVEKLTSLPAPLQETLRPLLEEVSSLTEKIEVYNERIEQIARNEYPETELLKQIKGVGTLIALTFVLTVGDAGRFESSRDVGCYVGLRPKQSDSGESQPQLGITKEGDCYLRTMLVQGAHHILSARGPDTDLKRWGLKLAERGGKNAKKRAIVAVSRKLAVLLHRLWVTGEVYEPLRNSNARAAEKKTAA

SEQ ID NO: 443454 - protein, 371 aa, unidentified
MRKGEEEHPFDIEILKFRVMTTVVSQCAGIDCAKKDFWVTFSTCDSERTIDHRSTHRFLMNDAGLKAFIKWIGKLRDNAIPFSLVLEATGVYHEKLLNLLYDLGYKVVVVHPKRAKDFSKTVHVKKVTDRIASKYLATMGLEKKLQPWVKPEKVYRDLKVLTRESSKLQEKISVVKNELEAEEYRQEENNRTVKRLNAELKLLKKQKAEVLTEIKEMINGSDFLRSKAEKIMSIKGIGIVTTATVIAETDGFAQVRNKRQLVSYAGYDVMNQESGTSVNTPSRISKRGNRRIRKAMHMAALSSIKHGENKELFVRIVSKTGIKMKGVVAAQRKLLVLMYILWKTDKPYDPNYMAKKRGDIMSPEELDLVRS

SEQ ID NO: 443455 - protein, 345 aa, unidentified
MSEVSIIGVDLAKQVFQVEGRDASGRTVISRQLRRRDVLPFFRKLSPCLVGMEACASAHYWGREIAALGHDVRLMPPTRVKPYTKRGKKNDAADAGACCEAVSRPSMQFVPLKTVEQQTALMLHRARKLLIDQRTQLCNAIRGHLAEFGVVARRGDGGFKTLLAFLEDEQDSHVPAPIRPILAPLVAQWRAIGEQIGALEQQIVAWHKASPDSQRLDTIPHFAALTASAFVATVTNPRRFGKGRQCAAWIGMVPSQHSTGGKTVLGPITKSGDRYLRQLLVNAGAGLIRRVKADPSISPWIAGLLQRMPAKQAAVAVANKLARIAWAVLVSGKPYRASALTGATP

SEQ ID NO: 443456 - protein, 388 aa, unidentified
MCVLEAGGNPLVERRTAHDERGVNGLCELLVELDVKRVAIERPDGVVVERLLEAGLVVLPIHPNQLKAARPRFRAAGGKSDSFDAFCLAELARTDHHRFRVLAPDSDETKALRVLTRAREDLVRTRVSLTNCLRAELEAFWPGADGVFCRIDSPIALAFLERYPCPTDARGLGEKRLAGFLTRHGYCGGKSAAQLLARLRSAPEGRAQEAEEQARKIAVLSLVAALKPLVEQIGALDSQIAHAVRAHPDGEIFLSLFRNPGSTLTAAKLLSEIGDRRERYPTAEALAADAGMCPVAKESGKRKVATFRRACDKRLRDTLATLADSSRQHNPWAKDIYLRARQRGCDHPHAIRILGRAWVRVIWRMWQDGVPYDPLKHGGRRRLNAAGG

SEQ ID NO: 443457 - protein, 452 aa, unidentified
MKRKHIYSAVDVERLDVALILQALAVGCIVAIDVAKTKFVAALATATGEVLKLVKFDHPRQTVAFLGLLKALRGAELEPKVVMEPTGTYGDALRYQCHRLGVPVHMMPPKHTHDFAEVFDGVPSMHDAKAAAVLAKLQAVKPAPVWQPETEAQRDLRAWVDQRHPIALTLALHHGHLEAMLARHWPEFGAVMDVHVRRSWFALLRAFPGPRAVNAAREEAAGTLHRASHAQLGHERIEAILNAAKDTVGMPMTKGEEHKLRAITEQIEAHTHRQDSVDAEIEALVRQDAVLSRLATVVGPACAAAIAALVGSPLDFVSAGAFEKAMGLNLKERSSGERIGQLSITKRGSGQTRQLLFMAVLRLLNSDPVVIAWYRGRKAYKAGLPIKAIVAVMRKLARALWHVARGETFDAKRLFDVRRLDLNSVTIRPRFKFKNAPQASAQAHSEGGAAIA

SEQ ID NO: 443458 - protein, 410 aa, unidentified
MDVIVECPGALDVHKASVTACVRTPTGGGGREPHLAEFQTTVRGLLGLRDWLAAHDVTQVVMEATGVYWKPVWHILEDDFELMLVNARHVKQVPGRKTDMSDAAWLCQLAEAGLLKANFVPPKPIRDLRQLTRYRKTQVAERQREAQRLHKALEDTNVKLDCVASDLLGKSGRAMLDALVGGTTDPEVLADLAKGRLRQKIPALREALEGRFNELHALLIGAILAHLDFLDEQIDRLSDAIEERIAPFDRAVELLRTIPGVQRRTAEVIIAEIGTDMRIFPSARHLASWAGQCPGNDRSAGKQRSGRTRKGSRWLNAALKDAAMAAIRTRNSYLRALYERQRSRIGHGKAIGAVKHSMLVAVWHMLTNGQLYDDLGPDYYRRRDPARTTKRLVAQLERLGHTVTLQEAAA

SEQ ID NO: 443459 - protein, 387 aa, unidentified
MNNAMGAKMQTIKTKAGVDVSAKTLRAVRRGGTDDEEREFSNDAAGHRELLKWVGKSARVCMEATGVYHLQLALLLRRAGVEVMVVNPRVAKDFARALGNRSKTDRVDAWTLLEYVDRMEFLAWEAPSQAVLELRELGRRMGELVQELVVEKNRSHAKGASRISKFVMADVKAHVAQIEKRIKQVEAAAMQVVQGDDDLWKRFEILRGVRGVGRRSAIQLLTELAVLDPTMTVKQLVAYAGLDPRSYESGTSVHKTVRISKTGNARLRAILYMNALSAIRHDRGARLFFAGLVARGKKKMQAIVAVMRKLLHGIWIVQQRRVTFDSSILFAASLAKAESSDSAVAAIQPEPSQSHPKGRSEAEELRQQLDTGSAQATRSPRKRSKAA

SEQ ID NO: 443460 - protein, 383 aa, unidentified
MKSVCGLDVHKDSVYLCILSEFGELIEKVFGVLTYQLEEMRDLMLHHHVVEVSMESTSVYWIPIWRVLSPHFKLNLAKPYFIKQLPGRKSDVKDAQWIAECTMKELIRGSFVPPEIIQQLRQYDRRIFDLNEEIVRKLSKLDAVLQRCNIRLSNYVSNVDTKSYKTVVRAISQGISAPEELVKLIHGRIINHHGIDVITASLKGVVSLAEIDMISQLRDELDMAEAHKEKCQARMLEICEREFPEELKRLQTIPGIKERAATSLIAEIGTDMNKFETANHLASWSGLKPRNDESNKKIKSRSITHGNVYLRKTIIECAWAASRTKDCFFSRFSYHQTQVRKKNKMKVLVAVARKMLIAVWHVLHDNTNYIDFTTDRKTSRTKG

SEQ ID NO: 443461 - protein, 352 aa, unidentified
MQHFIGCDVHTRNQVVAWIEEETGEIKKRRLEHEGKEVREFYAQFPRGTVVGIEATFPAYWFERLMGELGHELWVGDAARIRASEVRYQKTDQRDAEGILDLLRTGRFPRIWVPSLAERDLRQLLVHRMKQVRARTQVKNQLHALAISQGVCRKGKLWSVKGRKELESLALLPWAARRRKELLESLDRLDEQVRELDRAVEEAGRARPEVALLRTHPGVGMVVSLAFVLTVGPIERFSNSRKLVSYWGLNPRENSSGGRQRLGSISKQGNTMMRWLLVEAAQTAARLDPQLRRTYQRLKKQKTSAVAKVAVARRLAVRLFWMLRTRHNYTQLVHMSGSPSSAVVPPTAEPNL

SEQ ID NO: 443462 - protein, 365 aa, unidentified
MEWPAPPSGVVRSPANQEEEGMDISVLGVDLGKNVCSVVGLDASGAVVMRRKVRRETLIALAEKLPPCVVGMEACCGAHHLGRVFVAHGHDVRLMSPEYVRPYIKAQKNDDRDAEGIAEAATRPTMRFVELKSQDQLDMQTLHRSRDRLVGERTALINQLRAILLERGMVAPQGKRKLEQFLAVLMDEQGGAGLSPRMIVLVADARAQWAELDRRISTFDAEFVRWVKENEEVRRLTTIPGVGPIVASALVAAVGRAESFDRGRDLAAWLGLVPRQFTTGGKPKLLGISKRGNKYLRRQLIHGARAALPYVAERDTPLGRWVKGLMSRTHRNVVVVALANKLARIAWAVLQRGKPFDARAVSVAA

SEQ ID NO: 443463 - protein, 393 aa, unidentified
MICVGIDVAKDKHDCFILSSEGEVLADVFTIQNNAEGFDTLLQTIRRCVCPGDKIKVGLEATGHYSYNILGFLLDKGLDTYVINPLHTNLYRKSLSLRKTKTDRVDARTIAAMLMSDVDLKSYTDTAYHNEELKSLTRYRFDKVRERAKLKQSVSRLVTILFPELEKLVPSLHMASVYALLSEFPGAKQVAGAHLTHLKAVLYDASKGRYGRDMATTLREAARCSVGSVMPTKSLELQHTIRLIRELDAEIEDIEAAIQSMMDEMQSPIMTIPGIGVRMGAMILAEIGDFSRFDSPDKILAYAGMSPSTYQSGQLSLSGAYSHMEKRALGICATRFTTPPNMSAFGILSFAAYLAKKRTEGKHYNVALSHAAKKLVRLIYAMEKSRQSYRNAA

SEQ ID NO: 443464 - protein, 361 aa, unidentified
MVKVGSWAGLDVHARSVLAVTMDAETGELRTARLGGETAKVVDFCAGLPGPTRVAYEAGPTGYGLARALEAAGVGCVVAAPGKIERPAQDKLKTDQRDAERVLRLLMIDALHPVRVATVEEEALRDLVGAREDVRGDLMRARQRLSKLLLGHDILYDDAHSTWTQRHRAWLRAQDLGGGAQATLTDYLGAIDTLECRRGQLETTIEQLVPCSPYAQTVARLRCLRGVDTLSAVGLAAEIGDFTRFERAGRVASYLGLVPSETSSGETRRQGAITKTGSRHARRLLVEAAWHYRKTPARGVTLQRRQDGQPANVIAISWQAQRRLYNVWQRLAEQRGKRRTIVAVAVARELAGFCWALARAD

SEQ ID NO: 443465 - protein, 378 aa, unidentified
MDKDSGEVLLQPSSFSNTKDGFDSLIQKLSSYSKDSILIGMEDTGHYYFALLKYLLEKNFTVALINPKTTDYTRKMQNGITKNDKLDTLTICDVLDTPVRKKQYRITKVNSFDLYEQKQLTRHHHNLKEELNVYTNRLQKCIDIVFPEFNSLFSSKYGIIYMNVLKTFGSAENIASTDIRTIRKCFEIKGRGNRISLTAQQLKDSAKSSIGISSAAEVIKIKHLISQIELINEQLAETDKKIEEFSIQNNSPILSIPGISHFSGTSILAELGEISNYSKPSKIIKAAGVAPYHYESSQYDAQHTAITKKGSPYLRKTLYQIILPVINNNNPVFKQYYDLKISQGKGHHCACGHCVRKLLRIIYHLSSTNQQFDDALLR

SEQ ID NO: 443466 - protein, 400 aa, unidentified
MIAVGIDVSKYKSTVAIISNTGEILLPPKVYTHTYSALLTLVSLLKKQNDDIRIVMEATGHYHYPILKLLLDHHFFVSVVNPYIIKKYNDNNLRKVKTDKQDAIRLAFYALEKSYCLNAYVPAGEKYADLKFLYQQYTQRIHIIQKEKINLCHLLEESMPGLYDMLSTSVRNPSKNLLYSFVKRFKSFNRIKRMGKERFLNSYFKMAAEIGSRRRKNYALDIYEMAKDCIATGSTEPYSTMAQEECLRSLILAEEAANRLCEQMNSIANTLPEYPLVRSMYGVGDKIAPQLIALIGDIRKFKSGKALNAYAGNDAPPYQSGQFESKNRHISKRDSTELRKVCFEIMCCIKVHKSPEDPIYQFMQKKETEGKAKKVAIMAGINKFLRIYYARVSEVYQKAL

SEQ ID NO: 443467 - protein, 412 aa, unidentified
MQVLFPRCCGLDVHKKNLVACVLVPGADGKAARFLRTFGTMTADLLGLTDWLLAYGVTHVAMESTGVYWKPVYNLLESSFELLLVNAQHIKQVPGRKTDVKDCEWIADLLQHGLLRASFVPERPERELRELTRYRTSLIRQRASEVNRLQKTLEGANIKLGDVVSDIDGRSAREMLEALVAGESDVHQMAEMARGRMREKIPQLERALVGQFGEHQRFLVTRQLAHIDYLEILIGELDQQVRERLRPFEEALQRLDTVPGVGRRMAEVLVAEIGTDMSRFPTHRHLASWAGICPGIHRTAGKRKSGKCRKGSPGLRAALAEAAQAAGRTKETYESSLYHRMVSRRGKNRGAVAVGHSLLVTVYHLLKEGTPYRGLGAHHFDERDRAAVIRRAVRRLEALGCQVTLKQLKQAA

SEQ ID NO: 443468 - protein, 344 aa, unidentified
MDHFAGLDVSVKETSICIVDDTGRIMKEVKVASEPQALLKVLGNPAYRFKRIGLEAGPLSQWLFSGLAEAGLPVVCVETRHMQAVLKAQINKTDRNDARGIAQMMRAGLYRPVHVKTLRSQKLRMLLTHRKLLLSKAIAIENDLRGTLRNFGLKVGMVGKVRFEARIQELVENIPDMAVLVESLLIVRRALREQIVILHRRLLAIVRDDEVCRRLMTIPGVGPVVALTYRATVDVPARFRKSKSVGAVFGLTCSRYQSGEIDWSGKISRCGDEMMRVMLYEAAQSMMRSKKWSWLKAWAMQIARRRGMKKAIVALARRLAVIMHRIWIDGTEFRWTREQAVAAA

SEQ ID NO: 443469 - protein, 415 aa, unidentified
MKVVFPTCCGVDVHKTFVVATIITTPTDSLQPRYQKKRFSTFNSDLNRFADWLLEHNCLDVCMESTGKYWVPVFNILEKRGIRVVVANPKWVKAVKGNKDDTKDSKWIGDLFRIGLVKSSFIPSLEIRILREFTRYRYKLVSMKSSEKNRFQNAFTVCNVALDSVVSDMFGKSATAITDYLTSNESFDPEHCVSLLQRSLKKKAEQVLESINGFSIADEQKVRIKIVREHYDFIDKLIAKVDTCVNEMVANYEGEINLLCTIPGIDRNSAITIISELGTDMSQFGSSKRLCCWAGLTPGNNESAGKKKSVRISRAGVYLKPALVQVAHAAVKDNSNPYYKLKYERIAKRRGKKRAIIAIARMILTAIYSMFCTGEVWNPVDLFKIDMPEHLKEQQLTKAIKQATRFLEKHGLSVA

SEQ ID NO: 443470 - protein, 340 aa, unidentified
MDTIGLDLHKRESQLCVLTEAGEILERRIVTSRERFTVVLGGRPPARILLEASTESEWVARHLESLGHEVIVADPNFAPMYATRRRGVKTDRRDARTLAEACRLGAYRRAHRASDGQRHVRAELAVRDALIRTRTRTVALTKALVRRDGLRLPSGAPAHTDAKLAALPLSPALAAELAPLRALWAPVNTQITAADARLAHVAAGDPVVVQLMTAPGIGPVTAVAFVATLDDVTRFASAHQVEAYLGLTPREYSSGEQQRRGRISKTGNARMRSLLVEAAWRVLRTKDPAAAPLRAWAEGVAQRRGRSIAAVALARRLAGILYAMWRDGKDYRAPPPATVA

SEQ ID NO: 443471 - protein, 315 aa, unidentified
MSDMPCFVGIDVAKAQLDIALRPSGERWSVPNDTNGVTTLVDRMQTLQPTLIVLEATGGLERLVTSALATAGLPVVVVNPRQARDFARATGQLAKTDALDARALAHFADVMRPTPRPLPDAQTQELRGLLGRRQQLIVMRTAEQNRLAGASGRLNQDIEAHIAWLNARIATLDDDLETMLRASPLWRENDDLLQSVPGIGPVCARTFLLELPELGTLTRQQIAALVGVAPLNCDSGTLRGRRTIWGGRAHVRTVLYMGTLVATRFNPQIKAFYQRLLAAGKIKKVALTACMHKLVTILNAMLKHRTSWKAQEVQN

SEQ ID NO: 443472 - protein, 352 aa, unidentified
MNEKYVAMDVHKASVVVGVRDKAGKMIGQAVVETKAQTIRDYVRGLSGTIHLTFEEGTQSAWLYDLLRPLVAECIVCDPRRNKLLADGNKSDEIDVAKLSELLYLGRLRPVYHGGQGTRTLKELAHNYEALVKDNTRVKNRLKAIFRGRGIGYQGDEIYDCQEQGKWLAKLTEGGVRERARQLYEQLQQLERWVAAARRQMLAESRRQPAKKNLQLIPTLGEISVAQLIATVDTPHRFRSKRQFWTYCGLAVVRHTSADYRFEQGELRRRVKPGPTRGLNRNYNRRLKRIFKSAALTGSIKGPFKPYYERLLARGLSSELAQVTLARKIAAITLTLWKKGERFDPEKMVKPA

SEQ ID NO: 443473 - protein, 323 aa, unidentified
MIKDTKYFGIDISHLFFDVTDSDGNYYQFKNTLIGFKKFIKLLSPDSHCVMEATGYYHYQLAYYLQESGIKLSVENPLSVKRFIQMKLSKIKTDKSDSKLICEYAKQVDLKLWQGQSKHQLECLQMTRLLSVYTKQSTMLKNKIHGELVLGNPSKLVVTSIKRSLRQVKKEIKTIEDKLLVLVKEVHQKVLTNLKSIPGIGPKTSLMLVVLTDGFERFKSGSELCSYAGLTPIIRQSGSSINGRPRISKIGNQKLRNLLFMCSFNACKYNKACKAIYDRIVAKGKSKKLALIAVCNKLLKQAFAIAKSGLEYDNTYRSTLVKN

SEQ ID NO: 443474 - protein, 340 aa, unidentified
MEFKFVLGVDISKGWFNYCLMSEDFEIVKEGEVENRPDAISLFISELFVAEGLADMGGTALVMEHTGLYVRHLADGWLGAGGRLSIVPAMKVSRLLGGQSGWDEKSDVIDARRLAECGFRYSDMLTPWKLPDDAIRILNALNATRKRLLNALNMLKVPLGESRLFDGAEVAEAIGEGCGRAIAALGDDLKRVEEKIRNLVRNDGRLGKLFDLITSVEGVGPVTATEVIIATEGFEKFRPDQAKAFARYSGVAPLKKQSGKVSRRNRTGKRANRKIKTVLTMGATSLIGTKSMLGQYYERRIGEGKPHFSVVNAMRNKIILRIFAVVRNQVTYDKNLNFIN

SEQ ID NO: 443475 - protein, 401 aa, unidentified
MGMRRDFPHSCNGVEAPRLVVFEVINLKRGKGKSVEQITRAGATGQGCMCIARVGADLAKRVIQVHAVDAGGRVVCRRALPRDKFIAWCSRLPAGCVVAMEISSGAHHWARRLVEFGLVPRLMSAQLVEPYRSQGATGKNDANDAAAICEAASRPSMRFVPVKSVEQQSMLCVHRLREGLKAERTGCINRIRGLLAEFGLAFAQGPEALRRVLTDVLEDASNEMNTLARLVIQRAHSQWRELDAHIAWCDERIAQHARDNPAVKAASQLMGIGIVGASAAVATVDDFGQFKSGAQFGAWCGIVPRQHSSGGKTQLGRITRRGDTYLRSLLVQGAKSAVLTAHKRSDAISHWALALRERSGWQVAAVALANKNARILWAVMTKGQRYDANHVSVKPLAAMTG

SEQ ID NO: 443476 - protein, 345 aa, unidentified
MSEINLVSIDLAKRVFQVEASDAAGRRLWERRVWREELAELIGSLPATTIAMEACATAHHWGRQFSAMGHAIQLIPPPAVSRLVDRRKKNDRSDTRAIRKAAGDEDVRAVSLKSMQSQAEQFEHRVREQWVHQRTATINQLRAMLGEFGIVLPKGAGVLLSRRADLLADRRLAGMDRLERLMGAQFDLLERLSAMIDEADRRLRQLARTSPVARRLTSIPGVGPVISTAMAAAVPDAQAFANGRAFAAALGLVPSQHSSGQTVRLGPITKRGSRYLRANLVHGARSLLTRVKRSAAEPSDGLMVWARGLLGRMHWNNAVVAVANKLARIIWALMANGGLYRPRPA

SEQ ID NO: 443477 - protein, 463 aa, unidentified
MARQKAKGKQKRRHEPMKMELPIELKNVNLNAAAIDIGSRRHFVAVPEGRDTMSVRQFGVFTGDLEELAEWLYQCGVTSVAMESTGYYWIPVFELLERKGFEVKLVDARQTKNVSGRKSDMLDCQWQRELHTVGLLKGAFRPPDAVCVIRGFMRQREMLVQAATMHIQHMQKAMTQMNLRLNNVVSDITGVTGTRIIKAIIGGERDPQVLASYRTKECKNSAKVIAQSLLGNYRAEHLFALRQAFELYEIYQEKLKDCERELMKVVQQQPHKTEAEPPSLERKLRSRDKMRGEVDVRSELYKQTGVDLFRVPGLGSETLLMVSGEAGTDMSPWQSEKLFSSWLGLSPGTKESGGKILSRRSKRSRNRAAAAFRIAAASLRNSPTALGAFYRRIRARGGEAKAITATAHKLAKIYYRLLKYGEEYVEAGEKAYEEKYQQQRIKALSKQAALMGFVLVAATTVQA

SEQ ID NO: 443478 - protein, 387 aa, unidentified
MYYIGIDISKFKHDCAVIDDSGEIVTPSWSFTNDAEGFSQLKLLLNSLDTETRIGLESTGHYGMNLKLFLESNNFSFMEFNPLLINRFVKSKSLRKTKSDSIDCMMIAHYLMTVEYKPYPSSFYHTEKLKSLTRFRDSLIRLRSRQLVELTNILDKVFPEFKPFFGSRFSVTALYILSNYSSPEKIANMNSKSYEALRKLSRGRFSTVDFAKLKQLAKNTIGTTEDYLLLQMQIVLDIYRQLDSKVDETEVSIKECVSDMNPPMLSVPGIGIESAAIILAEFGDFSKFKNASQMLSFAGLEPGYFQSGTSETTGKMVKHGSSYLRYALMNCAQTVVNYEPTFAMFYSKKRAEGKPHRVALSHVVKKLLRVIYTLQTKNIAYDADFVR

SEQ ID NO: 443479 - protein, 413 aa, unidentified
MEVLYPRCCGLDVHKSSVSACALVREGARTHKKYARFGAMTRDLEELAGWLHELGVTHVALESTGVYWKPVWNVLESQFHLLLVNAQHVKNVPGRKTDVKDSEWIAELLQHGLLRPSFVPVARIRDLRDLTRARASLSEEASRVVSRIQKVLEDANVKLAGVATNTVGKSGQAMLDALVLGEDNPEKLAELALGHLRAKIPQLRLALEGKVRDHHRFLLQRLLIQWRFVIEEIAVLDQRLEQIGAQEPSLLAAVARWVTVPGIDRVAAWSLVAEIGVNMAQFPSAAHLASWAGVCPGNHESAGKRLGGRMRKGSPWLRRMVCQSAWAAARTKNTYLSAQFRRLASKRGKHRAIMAVAHTILIISYYMQKNQCDYQDLGTDYFDRLHADGLKRYLVKRLEGLGHKVTLLPQDAA

SEQ ID NO: 443480 - protein, 346 aa, unidentified
MHYIGMDCHITTLEFAVVNEAGRLVKAQSVATSVNGFMEFVKRVPPPRTIYMEEGTLAAWALETCVRFRETLVITDAKKNHWIGSSGQKNDSIDALKLAQLARGGYIKEIHHPVGQRRRFRELMIAYHDTVRSTTRIKNKIKARFRQNGIQCTGATVYSETYREEWKGKLPQEATLLLILDGLWRQLEQSEQTEEELLAAARAQSKHYPEIKHFEAIPGIGFISAATISAMLETPHRFADKKKVWMYAGLGIMTRSSGGKTYSEKLSTDYNRLLKYTMKQAAEAAIQAKDNPFRRKYLDMTLLRGIAPHRAKLTIARDMLATMWAMWRKGEKYSPKIREKAACKQD

SEQ ID NO: 443481 - protein, 316 aa, unidentified
MTQISTTAGIDTSKAKLDIAVHGRIEHWQVENALVGWRRLVAALTGAEVTRVGIEASGGYECGVVDYLRDKGFIVLVLQPTQVKAYARMCLRRAKNDKIDAVLIAACAAMIDQARIDPDHRLAKLAQHLTFVEQIEEDIARFKVRLEHVGDRRHRRMVVTDIARLKARREAELARIVTVLRAHDDLVRRLDLVLSVPGIGERTAIALIVRMPELGRVSREQAAALAGLAPFDDDSGKHRGERHIAGGRRRLRRSLFAAALPAAFRWNKALIELYSRLTKRGKAHNEALIACARKLLIYANTVVQRGTPWTERPAAA

SEQ ID NO: 443482 - protein, 341 aa, unidentified
MKLTTISIDLAKNVFQIHGADERGKAVLKKQLKRDQVVPFFANLVPCKIGMEACGSAHYWARKLQALGHSVQLIAPQYVKPFVKRNKNDAADAEAICEAVTRPNMPAVPIKNASQQAILSVHRARQGFVKARTAQANQIRGLLAEFGIIIPQGISHIAKRVPEIIEDGENELPGSFRLLIQRLVDHLKVLDQQVGELEREIQAWHRENEASKKLAKIPGIGPMTASALVASVGNARSFRNGRQLAAWLGIVPKQHSTGGKATLLGISKRGDTYLRTLLIHCARAVIRVAERKPQPDAWLGKLLTRRNKNVAAVALANKNARTIWALLAHDRAYESDYRMAA

SEQ ID NO: 443483 - protein, 403 aa, unidentified
MAKYHVGVDVGKYRHHVTIRDISSDTYYKSFSLTNDREGFDEFISSLEKLSADKNDFLIGIEACPYGVNLSYFLLGVGFNLVEVNPFRAGQFRKAQGKKAKTDKIDSRTIAAILSLGDHKILSIPDPILDNLKDLTRFRTDLVNERATMIIHLHEALSILFPEFNSVFRQLDSAGALAVLATFPGPEHIITAGEETVGKTLSLASPHKMGRGMARRIIEAARNTVGVIQKQPGLGIKISILAKRITSLQLTIRELDKQITEMFDSLPCKLQGFPLGRAPTLAAIVSEIGDIHRFPTLKKFLSHLGWCPQTFQTGNFRLEHPRMSHAGNKYIRRLIWMLSVFSVRVVPLYREYFKRRVMEGKAKMHVLIAVGRKILSTLYAMLKKGVPYDPNWEENGHIAVAGR

SEQ ID NO: 443484 - protein, 342 aa, unidentified
MDLGDKTSRYCALNTAGEVIVEGACPTTKKGMAQLFGAMAHCRVAIEVGTHSPWVSRELKKYGHEVIVANARQVKLISQSSRKNDKLDAQMLARLARMDPALLRPIRHRSEEAQKDLMTIRIRSALVEARTGLVNAARGLTKATGERLASCDADQMNAGTLEGLPADLRDGLKPLVEEVESLTEKIKECDGKIEQIARDRYPETKLLRQVSGVGPLIALTFILTIEDKGRFAKSRDVGCYAGLRPKQSESGERQPELRITKEGDVYLRKLLVQGAHGILMERAPDTDLKRWGRKLAGRGGKNAKKRAIVAVARKLAVLLHHLWATGEVYEPLRNSQAMAKAA

SEQ ID NO: 443485 - protein, 413 aa, unidentified
MQTLVEHGCGLDVHQSTVVACLLRVRQDGKVQKQLRTFGTTTRELMGLREWLLSEGCTHVAMESTGVYWKPVYAVLEGGELEIVVANAQQVKKVPGRKTDVKDAEWIADLLCHGLLRSSFVPPQPIRELRDLTRYRRKLVESRSAERNRLLKLLESANIKLASVATDVFGLSGRLMLKALVAGQASLPEMAELAKGKLRRKIPQLELALEGKLQEHHRFLLQLQQDRLDAVEKDLATLQQRIQQKLQPYAAQLALLREIPGVDQTLAAVIIAELGVDMSVFQSVSQLASWAGVCPGNNESAGKRKSSRIPKGNLYLKTALVEAANAAARAKGTYLRDKFYRLKARRGYKRAAVAIAHKILVSIYHMLSQNVSYNDLGDLYLDKLNAHHLTRNLVHRLQRLGYTVTLTPQEKAA

SEQ ID NO: 443486 - protein, 322 aa, unidentified
MEKLTRIGIDTSKYVFQLHGVDEDEQPALKRKLRRQDLHKFFGSLPRLRIGMEACGASHHWARELQALGHEVVLIPPQYTKPYVDRGKNDAADAEAICEAMSRPKVQRRFVPPKTLDQQALQMLLVVRNGLVKRRTQVCNAIRGHAAEFGFVSAKGPWRVEELLAKVEQSQVMPELARQMFKVLAGQYRHADAQLREIEATLMAQHRNNEVSQRLADIPSVGPVGAMVMAAKIGDANRFRSGRDFAAFIGLTPKDHTTGGRKKLGGITRAGDEMLRVYLICGATAVIRQLKHGRGHNSPWLKELVARKPEKLAARRHVSPGS

SEQ ID NO: 443487 - protein, 428 aa, unidentified
MKVTQKNQKVNRKKVLMVSYDISQKDGYFYSEYESADKIYCLEDIVDNNPRAIKNHYLELDDICSRLGFENIHIFFEPSGGYENIFKRLAFKKHYEVNYVSGEATRKARVIESNDDSKSDDKDKRIILTLAQLSKVLSCRNLPETYSQLRQLGLYYEDVSNIGVIFRTQISDIAKSIFPEQAVKSRFLYSVTGTVIIKKFGFNPHKIVKHGYSSFKYRMKNSIPRVSEKSLKSIFRKAGAAKELLSEAEAEIIEKQLMWHYKKYEEISERKEEFKEEMCELYKTLPEYDKFSQIKQISDDMMARMVAETGPIADFSCLAKLMRYAGLNIRIKESGKFKGQNKISKKGRSLLRKILFQIVFSYLIKKGKLYNEYFYAKKDAGVKGMIIMTNIMRKTLKMLYGVYVSTMTFDIDRVHKNNTEYIKIEKAV

SEQ ID NO: 443488 - protein, 331 aa, unidentified
MNMETGTSVWQQFPNTRGGGRDLVRMVKRLANGIPTDQWLFCGEDTGNYSRLISDYLAEKGYFMWLQNPYCIKKSESIIRRGKDDRADSAVIAEYAIRYADKATRYERPPEVISQIKALLSARDSLVKTRMALANTVSEIPKADRQGEAVTLIKSSTKRLIKDVETEIERMEQKIDELLQKDEDISHNSEILHSFKGIGRINAAYLIAFTNNFRKFDLDPRKIATYWGVAPFARQSGTALNTKPHVSRFCNKKLKAAISNSANSAIMWNKPFREYYLRLIERGKCEGIAKNNVKNKIIQTLTAMIRKGEKYNPDFMLTTKASVKCVNSLGS

SEQ ID NO: 443489 - protein, 408 aa, unidentified
MNTLYVGIDVSSKSNVVYLMLPNGDKHSNFSVANSHEGSTQLVKRILSALTSHSLDTVLIGLEATSVYGDNLVYFLREDATLAPFNRKIHVLNPKQVKKFHDAYNDLPKNDYVDSFVIADCLRFGRINKEVYLGDYRYKALQNLTRARFFAVQNLIKEKQRFMNVLFKKYSTMTQEKVFSDTFSTTALAVYDEFDSAEALANMDLHELTDFIIEKGKNRFPDPDAVAKAIQKAARSSYRLPKTVNDSVNQVLSISITSMKALESQIKEFDKANKAQMELLPNVLISIPGIGPVYSAGIMAEIGDINRFDNQAALAKYAGLAWKQHQSGSFEAEVTRLIPSGNRFLKYYLCEAAFSLVRCDKEYSDFYHLKYKEVNRCQHKRALALTARKFVRLVFRLLKDNRLYVPAK

SEQ ID NO: 443490 - protein, 358 aa, unidentified
MSQPSVTHPTCIGIDLGDSHSHLFVLDLASGEVLEEGRIPCTPAAFRRRFAGQPPARIAIEVGCHSPWVSRLLAEAGHEVVVANARKLRLIYENDSKSDRVNAQYLARLAAADPQLLHPVRHRGAKAQADRAVLVARDQAVQCRTRLVNCVRGLVKSLGHRLPKCDPEGFHNRVRETIPAELLPAVEPLLDVLAILQQKIRALDKVIERLCQEQYSETARLRQIKGVGPVSALNFVLTLEDPTRFTKSRTVGSYLGLRPGRKSSGRGDPELHITKAGDTMLRRHLVNCAQYILGPFGEDSDLRRWGLKLAGHGAKSAKKRAIIAVARKLAVLLHRLWLSGATYEPLRNSREPAHATAQ

SEQ ID NO: 443491 - protein, 343 aa, unidentified
MKLSRVGVDLAKNVYQLHGVDRHGKAVWKRRLRRGQWLQALLDKAEPGCVIGMEACTGAHHWARELQSRGYTVRLIAPQFVKPYVKSNKNDANDAEAICEAMSRPNMRFVTVKSVEQQDIQATHRVRTELKEQRTAKANQIRGLVAEYGLVAPQTLLALRRAIPCWLEDADNGLTDYFRSLLHGLWGDLVALDDRMAELDKQIKKLADSSEVAQRLQQLRGVGPLVATALIATVGTGEQYCKGKQMAAALGLTPRQCSSGDKQRLLGISKRGDVYLRTMLIHGARAVVSQAKHRDDRLSRWVTSIAKRSHPNVAAVALANKTARMAWAMLRNDANYDPDFVIG

SEQ ID NO: 443492 - protein, 400 aa, unidentified
MKEFSNKVVNTETASSVIAMKVGQREGRYAAYIGLDVHKDSIAVAVAWPGRSEPESRGEIANKPKTIDKLIRRLSESAGGGVLLFCYEAGPCGYGLYRQILASGHDCQVVAPSLIPRKPGERIKTDKRDALKLSRHLRAGDLTAVWVPDEEQEAMRDLTRARDDMKSQERKARQQLNAFVLRHGQAWPSGKTRWTQTHFNWLESMRFEQPYLQVVLQEYIEAVKAATQRVTDMTDQMMQALPHWSLGPIVDSLVALRGIDKIAAMVLLAELGDISRFQSPKQLMAYLGLVPSEHSSGGRRRQGAITLTGNGHARRMLVESAWSYRFQARQTMHLKRKAQNASAEAKAIAWRAQKRLCGRYRTLTQAGKNTKLVCVAIARELVGFIWDIVRHEMPRLQAHR

SEQ ID NO: 443493 - protein, 382 aa, unidentified
MDRKCSWSRIIGLDLSKATFKGCILSGEGFTDRKNFSGEMKQDESGYVLINNTIQAGDIVLMEAGSSSFNLARYLLKNSRANDVVVLNPANLRIIWDSQKKNDKADAMKIACIARDMRPESWPRVTVPSEQEQSERSVIMHWVFLRKQETMLFNRFFALFNSLGYPEIDKPKLKSKSEFRVETINNLLSSNELAFTDAVMLDEQITVIQSQLHFMEDRLRTICLNHPKQALAWLSLPGIGLINAATLIAYIGDGSRFTKPDQLLNYAGMVPKQNQSGTVDIKGKITKRGCSAIRRNVVQGAQVVMQLPATCEITKFAYRKKKECPFNGKVAVAVANRMLRTGLALLHHNDLYRPMIQDGYDRLERKLNVNKLQALVPYLTSN

SEQ ID NO: 443494 - protein, 393 aa, unidentified
MRYAGIDVASEKHAVAVVDEKSDVIQGPRFFGEDAQGHAELFSVLGPPAEVFVAMEATGHYWMNLYAALVAADYPVAVLNPLQTHRFGGEALERTKTDAIDALAIARFAAQKRPTATRLPDEATEELRELVRLKDRLLQDFGDRVRQLHRVVYLGFPEFTKLVPHLDTELATAILRECPTAKAFDSISVRRLSKLSYDGRHVVGSDLAKALIDAAKVSVGRHHGNAYRLQVRYFCDDLDVLRQRIKELERDIKSKLDDHEIGKLLTTIPGIGPQTSARLIATLGNPADFRDAGALAAYVGAVPGLKQSGKKQRLHGGLTNIGNLALRAALYMPTLTAVRCNPWLSCFYRRLVAKGKPRKVALLASMRKLLLAVYSVAKHREPFVPILPAPAAA

SEQ ID NO: 443495 - protein, 401 aa, unidentified
MASVRDNATRIKRFRELKATLRTHRQRLLVGIDVAQADDVVHLRHAHTRVVVPTLTIPNTPRGFTALWARIQQAQRATGCREVVCGLEPTGTYHQAIATFLEAQGADVVLVSSSVAYWNRRTQDGTWDKHDPKDAANCADLLEQGKVLFYSQPTGPLAELRHLVRCLRRARSELAACKARWRTTLRPALAPMGAPLPPRLWAELPAVLQAWERAAPGRPAVPKGRLPLGLATACADLGAQVTAVQARIVALEAACTPVAERLPASALLRSIPGIGPTVGAILLAEIGDIAWFTKFSQLRKLAGLDIIRIQSGQFAGQARISKCGRGLLRWALYQAAVGAARTVAGRAHLAALKAKRRGDRYAGFKAVVELAAKVLRIVWGVWRSGSPYDPMRPGGLQRQAR

SEQ ID NO: 443496 - protein, 319 aa, unidentified
MMAQNDSVVVGIDVAKDKVDACIRAFKLRQTWSTAQGQRKLVAWLRKHQVNRAVMEASGGYERVWARMLREAGIEVRIVDPKRVRSFALSAGRLAKNDAIDAEMIAWFAETFSEAPSQTHDAAHEELQTLVKARLGLIDLRMRLVSQSEHAAPGLVQKAHAHILKSLAGELAKLEAAISAKIKSTPDFAERAEIIESVPGLAETSSANLVAGMPELGQVSDEIAAALIGVAPYDDDSGKRRGERHIKGGRRWVRNAIYMPCVGAATQNNPVLKAYYQRLLAKGKEPKVALIACMRKLIVILNTMIARRQKWDPSRYVLN

SEQ ID NO: 443497 - protein, 455 aa, unidentified
MLVGNILAVSWLEVRETALLYVIVGLFHWFFRAKFLAISMNHFTGGVEDMELKPIHGSAIGLDVHQRHVTTCLIAEQEDGSIHTETLTFGTFKRDRRALAKWARDANPGIVVMESTGIYWKSIYRVLEREGIIAAVVNARHVKQVPGRKTDVADSRWLAVLARCGLLRGSFIPPEQLGNLRLIARQRQKMVGMLSSEKNRLHKVLTDGGVRLAVVVSDIHGRAARSMIECLLEGGTARDALKFASSRLKATPEELLDALDGDLTPTHRFVLREILRHIRELEARITRFEAQLLAEMEPYRWALDLLQTVPGIDAVGAAMLIVEIGVDMNAFVTPQRLASWTGLCPGNNESAGKRRSARVRKGNPYVRRLLCEMANAARRTKSMFQSKYSGLVIRRGHKRAIIALAHKILKIVFILLSRKVPYQDSTVDYKELMVQRNAPRWIAALRQYNMLPTAA

SEQ ID NO: 443498 - protein, 408 aa, unidentified
MDVVVERVAGLDVHQATVVATVRVPGPAGRQSVTETFGTMVADLLALREWLQAHGVTQVALESTGVYWKPVYYVLEDAFTLLLINMQELKHLPGRKTDVKDSEWLAQLLECGLLRASFVPPPPIRELRDLTRYRLQQVRDRAQEVNRLCKVLEDTGLKLTTVVTDVMGASGRAMLAALVEGTTDPAVLAELARGRLRKKLPALRRALQGRFRRHHGVLIEQILAKIDFLEETIDRLQAEIDARLVPFEPMLARLDTIPGIDRIGAISIVAETGGDMRRFPTAGHLCSWGAMCPGHNESAGKRRSGKTRKGNKYLRATLIQAALGATRKQGSALQARYHRVKRHRGHKKAVVAVGHQLLEIAYYVMRDSVTYDELGADYFDRRHAERAVRRHVRQLQALGFRVTIEQAA

SEQ ID NO: 443499 - protein, 401 aa, unidentified
MISVGVDVSKGKSTICILKPYGEIVCSPFEVQHEEEALEAFADLLAKLDGEIRVVMEATGIYHLPVLTFLHDKGYFVSVINPFAMKKYAKDNSIRGAKTDKLDSMMIANYGIEKWYKLQKYEGDEETYAELKLLGRRYRYYMELHVKALQELTHILDYVMPGIKKMFNSWNEANGKDKLGDFVEKFWHFDLITSMNLEEFTEEYLSWAKEKKYHRSRSKAKAVYELACNGIPTLSSNTPSTKMLVQEAVSVLRAVDSSLALILTRMQLLAKSLPEYSAVREMGGVGDVLAPKLIAEIGDVRRLHSAKALIAWAGIDPPPYESGQFIGSKRKITKRGSSTLRKVGYEVMRVLKCHPAPKDDAVYNYILKKEAEGKSKKHAKIAGLNKFLRIYYARVMEVYQQ

SEQ ID NO: 443500 - protein, 462 aa, unidentified
MAAKRRFPAPRRSTTSSPPKPQPALTVTNPRAAGIDVHDGVHWVAVPPDCDPEPVRRFGTFTADLEALADWLTACGVDTVAMESTGVYWIPLYELLERRGFKVFLVDARAVAKVDGRPKSDIHDCQWIQRLHSYGLLDKAFRPQDEIVVLRGFVRQRQNLIAYASQHIQHMQKALVEMNLKLTLVVSDIVGKTGMAIIKAILAGRRDPVELAKLRDERCKRTEEEIAKALVGNWREEHLLALKQAVELYEFYHCKIAECDRAIDDYLKRLPNRAGENPLESQPRKSRKKDNEPMFDARKRLYEMLGVDLTAIDGISVGVALIIASEIGHDVSAFRTEKAFSNWLGVAPNHKITGGKIKSRKTRPGANRIATALRMAGASLLRTPTALGAFGRRMRSRVGSPKAITAVAHKLAKLVYRMLKHGEEYVKQGAEEYEALYRERRIAALRRNASALGFRLEAQPAK

SEQ ID NO: 443501 - protein, 432 aa, unidentified
MSTFVKTDEESGFAALVGIDWGDKQHAWSMRVTGSTKCERGTIDHSPEGIDAWVLTLRSRFDGQLIAMAVEQSRGPLVFLLAKYPNLRIYPIHPRSSAQFRKALHPSGAKDDPADADILRELLEHHREHFRPLSPDTVETRGLQNLVEARRKLVDERTAHSNQLTAQLKLYFPQMLDWFDDVASPLVGAMLERWPTLQALRKARREGLRSFLAKQNCRGRERIEERIEQIRKAIPATNDQAILVTAVTMTKVLVKQIAVLREGITALERQIAKTSEAHPDFPLFDSFPGAGPVLAPRLLAAFGSQRDRFASAADIQQFSGIAPVTERSGKSEWVHFRWACPTFLRQTFHEWAGHSIDSCDWARAYYQQQRARNNGHHAAVRALAFKWMRIAFRCWKDKVPYDDALYVDSLRRRGSPLVKLLDSNNRSLRPAS

SEQ ID NO: 443502 - protein, 360 aa, unidentified
MNDGNRATPMVTAGLDLGDKYSYLCLIDTDTGKVLEEGRLRTTPEALRRRFCSEQRMSVAIEVGTHSPWVSRVLKECDHEVLVANPRKTRLIYGQGRKTDKLDAEKLGRLARVDPKLLSPLEHRGEASQAHLALIRSREVVVRSRAQLINHVRGTVKSFGARLPKCSTASFHKKVAACIPEELQPALEPLLETIASLSTRIRHYDRELEELAQEHYPETKLLQQVQGVGTLTALSFVLTLEDPGRFEESRQVGAYLGLVPGKDQSGERDPQRRISREGDEMLRRLLVGSAHYILGPFAQDSDLRGHGLKIAGSTAAKDARKRAVVAVARKLSVLLHRLWISGEVYEPLYNARRQPKGLAA

SEQ ID NO: 443503 - protein, 402 aa, unidentified
MIFVGDDWAEAHHDVYLMDESGRRLGSQRLPEGLTGIRQLHELIAEHAEEPDQVVIGIETERGLWVGALTGAGYRVFAINPLAVARYRDRHHVSGAKSDTSDAKLLADLVRTDRHNHRLIAGDSPEAEAVKVLARTHQSLIWTRNRHTNALRNALREYYPAALEAFEDLAHGDALGVLGRAPTPQVGAHLDLAAIQSALKRGGRKRNIAARAHEIRAALRTEQLTAPAPVAAAFGATTGATVGIIAELNRQISELEASLDKHFETHPDADIYRSLPGLGVILGARVLGEFGDDPNRYTDAKSRRNYAGTSPLTIASGKKRAVLARHVCNRRLYDAIDQWAFCSINTSPGARALYDQHRAAGDLHHQALRALGNRLVGILHGCLRHHQPYNEHTAWAHRIAAA

SEQ ID NO: 443504 - protein, 497 aa, unidentified
MTPRPGRPLVISDSECLVLTLAVVTVAGMITDGKEQQVKVRVGIDIACRAAHQAACADETGRIVWSGHRFHTRAEELEVLWARLPGDATEVMIVMEPTRNAWVPLAAWFRRRGATVVMVPSEQSADLRAYYAKHAKSDRLDAELLARLPLLHPDGLHPETANGPGDPLKRAVKLRSGLVRRRSACMQRLDALLEILGPDWVAALGSDMTQTTFKFLAAWANPHQVKRLGRARLARWFQRQTRKAWGERRADAVVSAAEATLALWSPTNLDYEALAADIAVEASLALELARQIAGIDERIFDLYCDADPDQILLSVPGIGKILAAQIRGRLGDPHRFTSLAAARAFSGLIPRQNSSGLTETTGGPTKQGDACLREALFLAADHARKTDPTLAARYQRLMCDTGRHHTSALCTIATVLLTRIVACLRTSTPYQLRDTDGSPITPEQGRAIIAERYQIPSEIRAARRAVSNARSHQRGWDERTKQGVAERSTMPPVPPAA

SEQ ID NO: 443505 - protein, 388 aa, unidentified
MIYVGIDIAKLNHFAAAISSDGEILIEPFKFSNNYDGFYLLLSHLAPLDQNSIIIGLESTAHYGDNLVRFLISKGFKVCVLNPIQTSFMRKNNVRKTKTDKVDTFVIAKTLMMQDSLRFMALEDLDYIELKELGRFRQKLVKQRTRLKIQLTSYVDQAFPELQYFFKSGLHQNSVYAVLKEAPTPNAIASMHLTHLAHTLEVASHGHFGKDKARELRVLAQKSVGVNDSSLSIQITHTIEQIELLDSQLFSTELEMANLVTCLHSVIMTIPGIGVVNGGMILGEIGDIHRFSNPKKLLAFAGLDPTVYQSGNFQAHRTRMSKRGSKVLRYALMNAAHNVVKNNATFKAYYDAKRAEGRTHYNALGHCTGKLVRVIWKMLTDEVAFNLE

SEQ ID NO: 443506 - protein, 429 aa, unidentified
MQNESTPGARGPVFCGVDTHADSHWLCVLDWRGRRVLSRRFPADAGGYEALAGAIAAAGEPACVAMEGTSSYGAGLTRHLASLGMPVREALSPARTQRRRPGQGKCDESDAERAARAAMSGSKLGTPKSQDGWVDGVRCMLAARSGAVKARTSAINTARSLLTTAPEGLRSRFRGMGGPRLMEELPSVRAEGALGAALGALADLWAAARDAALDMELAIEASLEENCPALLAMYGCGPVSAAKLAVAAGDNPGRLRSEASFAAICGACPIPASSGKTVRHRLNRGGDRQANSALHEIARQRVMRDPETAEYAERARGRGKSDREVMRCLKRYVAREAYRALMRPHEIRRPEDASELVAARRAAKVSQVRAASILGTSEKYISMLERGQRELKPIRRAYEAWVEAGLPLDWDRQAFEAERKMDSKKHLAK

SEQ ID NO: 443507 - protein, 387 aa, unidentified
MKAKNKVTQIGLDSHRTFSKVTARGPDDQIVWRQRLDHRDRMKLRKQLEAWPKGTPVVLESTFGWGWMSDELLDAGLDPHLANSRKVAAWRDARGLAKSDRIDSDLLSELWGEKSRWWEVWLAPPEVRDQREWMRYRMAMVRMQTGIKNRIHAVLHRHGIVSEHSDLFGTKGRRFLSLLIAPNDITLPESGRATLKGHLQLLDQVRRQIAQVTRELRKQLAQTPAGRRLVSLPGVAWILGYTILAEIGRIGRFRSARKLASYSLIVPRADDSGEEDSDSPKGRHIGHAGRRTLKWAWIEAAHGAVRSGGRFRQIFDRVTDGGKRDRNRGYIVVAHELCRIAYVLLKKDVDYSEDRPERPGRRSKRSVKQDSRPGMGQPVAPMVAAVA

SEQ ID NO: 443508 - protein, 386 aa, unidentified
MPQLNDLSRSLVTLEQDATLIAVIEMGQSSWLVAGIVPGVERQPLKKLAVDESALLKLLHRWREEAEQAGHKIKRIAVAFEAGRDGFWLARWLRARDIEVHVIHASSVAVSREHRRAKTDRLDTELLKRVFLGWLRGERHHCKMVAIPTIKDEDGKRPNRERESLVGEQSRIINRIKATLVRLGIRGFNPKLKKAAERLEGLRTPEGEPIPPNTLSELHRDMERRRLVRDQIRQIESARLDHLEHEPGEAAHAMVRLLARVMGIGIETADMLVQEVLSRNLRDRRAVARYAGLTGSPDESGKKRREKGLARSGNPRVRRGMIQLAWRFLMFQKDSALAQWFRARTENARGTRKTMIVALARKLLIALWRLVRDGVVPDGVILRPAQ

SEQ ID NO: 443509 - protein, 316 aa, unidentified
MAAVMIGIDPHKASHTAVAIGAAEEPLGQLPVRASASQAERLLGWAAAWPERAWAIEGAGGLGHLLAQQLLAAGERVLDVPPRLGARVRLLATGDTNKNDPNDARSVAVAALRSAGVRAARRDDHAAVLRVWSKRHRDLGRTRTQVVCRLHAVLCDLVAGGVSKHITAAHAARLVELITPSGAVEAARCELAAAFTEDLRGIDDRIRRTRKKLAIAVQAAGTSLTGLFGVGPVIAAAVIGDVRAVARFPGRDHFAAYNGTAPIEVSSGDRKVYRLSRRGNRRLNHAIHMAAVTQIRHRRYRPAASSHPVSARRFQP

SEQ ID NO: 443510 - protein, 378 aa, unidentified
MYRIIKIGMDVHSTNYTLCAMEPVIGAEDRIFANIKVTPDYKNVLMFIENLKLKLGLNDTYDIECGYEAGCLGYSLYNQLTAAGVRCVILAPTTMLTQQGQRIKTDARDAVMIAQCLSYGGYHPVYIPAEEDDSVKEYLRMRDDHKLALKKVKQQINAFCLRHGHRYEKTKWTIAHLKWLKQLELSALYRETLDEYMASYDEQTAKIERFDKRIEELASQERYQKKVKKLGCFLGIKTHTALSLIVETGDFERFAKGNVYAAYLGLAPGERSSSDSINRLGISKAGNQHLRLLLIEASGGICKGAVGHKSKDLRQRQNGNPADVIAYADKANTRLRSRYYKFIRHGKKRNVAVAAIARELACFIWGMMTDHIQMQKAA

SEQ ID NO: 443511 - protein, 360 aa, unidentified
MNNSSSSNHQSIVGGVDTHKDLHFAAVVDAYDRVLANNSFPTTRQGYKSMLNWMRSFGEVRRIGIECTGTYGAGLLRYLQQFDIEILEVTSPDKIDRRRRGKNDSIDAENAAHAAFAGIRTVTPRTRDGMVESLRVLKVCRKTAIAARRIALQMIQMNIISAPESIREPLCAMTRMQLIRTLVTWRPDLSGYRNISTAYKIALKSLARRYLELHDEIADLDVMISAIVDELSPELIAGKAIGYESAAQLLITAGDNPDRLKSEASFAALCGVNPIPASSGKISRHRLNRGGDRAANSALHIIAIGRLRTDNKTKEYVDKRLTQGHTKLEALRCLKRYIAREVYYILKKRNNLINSIQIAA

SEQ ID NO: 443512 - protein, 350 aa, unidentified
MDIVGAFDLHRKQITFDYIEMDSGEVHRGRIQPADRENLRLWLERFTERFPAQHAAIAVEATTGWRFVVEELGRAGIEPHLAEPAETNSLRGRKKRAKTDRLDAGHLRDLLVIERLPESWIPPEHIQEIRTLMRMRHTMIEERSAHQQRIHAQLFHNGYPQQRNVLAADRRERLQKMELPRAARKVVDLSLAMIEHINEELEPIEAELRTYALSQAGCRALMEYYGIGELTSVAMLAELGDTRRFSSSKKAVRFAGLDVTVQSSDEKRAAGRLSRQGSPVLRWAAFEAAMVARRRGSPDHDYYVETKERIGTNRAALSIARKLIRRAHHTLRELGEEAMSEPAAVNNSSV

SEQ ID NO: 443513 - protein, 334 aa, unidentified
MTTWILSIDISKRKFDAALSMGEKFKTKAFPNTPSGHRALLEWLARYDADHVHACMEATGSYWEALATFLHDEGHRVSVVNPAQIHAFAKGLLTRTKTDRQDARLIARFCEAMKPGFWQPRPREERELFALIRRLDALKGMRDQERARLQEAHEAVADEIEGHIEGLERAIRELEARIRDHIERHPGLRDKRDLLASIPGVGETTVHQILSRLSVLSLLGSAKQWAAYAGLSPGERSSGQRQAASSGMVRLGDARLRKALYFPAMVAKQHNPVFRRFAQRLRSNGKRPKQIVVACMRKLLHIMYGVLKSGQCFDPSCYGMPAHTISEMRVARTS

SEQ ID NO: 443514 - protein, 392 aa, unidentified
MDARTVNNLPPAATHDGAVRCLMTIELSKKSWIVAVNTPLSDKISKYTVKGWNGLLEVIGKIRARVGRELQRPVEVVSCYEAGYDGFWLHRLLEENGVRNFVIDPASLQVDRRARRVKTDYIDATKLLRSLMAYLRGEPKVWSVVRVPTIAEEDDRRLHRERDRLINERVQHVNRIKGLCAVHGIYHYQPLRSDRMKRLEQLQTADGRELPPRIKAEILRELQRLELLLQMIKAIEKERNLMALGTAPSTYGNAKKVQRLVKIVSIGPEIATVLVSEVFFRQFNNRREVGGYVGLTPSHYQSGASSRDQGISKAGNPKARTIMLELAWLWIRYQPDSPFTIWFRERVGTAKGRIRRITIVAVARKLLIALWRYIETGVVPTGAKLKACNPIR

SEQ ID NO: 443515 - protein, 425 aa, unidentified
MDFKQNHKINQVTEKSLVVGIDIAKRTHYACFVDDRGRVLQKSFSVSQSRDGFEKLYSRILSAMKENGKTEVIVGIEPTGHYWLNLAYFLEDRGIPLAMTNPMHVKRSKELDDNLPTKHDKKDALVIARLIKDGRFSYPRILKDMEAELRVGSTLRGKLTEELGTVKNMIIRWQDRYFPEFSQVFPSLGKMALAALEFTPFPGDLLHKKPDELLELYRKSEGMKSPQRPKAVRLIEVAANSIGVTEGRKMARYEIATLVRRYRQLEQEIEELTERLVELVRTSIEYEFLSSVPGMGDATIIDLLAEIGSFSHYEDPRQLIKLAGLTLRENSSGKHKGQKRISKRGRRKLRAVLFRIMMPLVRHNEAFKKLHEYYTTRTVNPLRKKQSIVVLCGKLLKVLHGIVTKHRKFDAQRMMKDIPCIEKAA

SEQ ID NO: 443516 - protein, 392 aa, unidentified
MIYVGIDVAKDKHDCFISNSDGEVLYKSFTISNNREGFETLFQRIVSVAEDLNNVKVGLEATGHYNYNLLGFLLDKGLPTYVINPLHTNLYRKSLSLRKTKTDKVDSRTIATMIMSDLNLKSYSDISYHNEELKSLTRYRFDKVKERAKLKSSVARLINILFPELEKLVPSLHMVSVYALLSEFPGASHVASAHLTRLTNLLSQASKGHYGKDTAILFRETAKTSIGSLMPAKSLELKHTIKLIQELTSEIDEIESAIKQIMVEEIQSPILTIPGISYRMGAMIIAEIGDFSRFDSPDKILAYAGMSPSTYQSGQLDNCYSHMEKRGSRYLRYALYNATKYVCHWDENFGAYLAKKRAEGKHYNVALSHATKKLVRTIFAMEKSGQAYIPTV

SEQ ID NO: 443517 - protein, 356 aa, unidentified
MSEKLNSKIAVIGIDIGKNSFHIVGQDRRGALVLRQKWSRGQVEARLANLPPCLIGMEACTGAHHLSRKLQALGHDARLMPAKYVRPYCKGDKNDYRDAEAIAEAVQRPTMKFVATKTADQLDLQALHRVRERLVSQRTGIINQIRAFLLERGIAVRQGLRFLRAELPDILAKRTDVLSPRILRIVEDLSGDWRRLDERIEGLSSEIEALARQDQGCVRLMSVPGIGPLVSSAIVAAIGTGDPFSKGRDFGAWLGLVPEQMSTGDRTILGSISRRGNRYLRKLFVQAAWVVLVKLGPEQWERYGLKSWIEAAKKRLHHNVLAIALANKLARIAWAVLHNGRAFEYVKTNATASRSA

SEQ ID NO: 443518 - protein, 337 aa, unidentified
MIVIGVDVHKHSLTAVAVDELGRTVADRSGPVGGDVVVWAQTLEAERLWAVEDCRHVTRGLERTLLEAGERLVRVPPRLTAPQRRRGRVRGKSDRIDALAVARAFLQEPLLDGPRAGEETLRELKLLVDHRDDLVAERRRCQQRLRWHLHELDPTLAVPLGALDRAVWLDRLGRQLARREQTTQVRIARDLVGRCRTLTRSIGELERELHARTAALAPRLLQLPGCGPLSAAKLLCEIGPIERFPTDAQLARHAGVAPLDASSGKHQRHRLDRGGNRQLNRALHRLAVTQGRVHPPARAYLERKQGEGKTRREAIRCLKRQLARTVYTTLKNEPLLT

SEQ ID NO: 443519 - protein, 339 aa, unidentified
MNEVTLIGIDLGKHSFHLHAQDAAGRMVFRKKLSRQQLLRTLANVPCCRVVMEACAGSHWLARQLAGMGHEPRLISPQFVRPFVVGNKNDFGDAQAICEAACRPSMRFVSPRNEAQQTVSAMHRLRERLVRERTATVNQIHGFLLEFGISLPRGAALMSRLPTVLDHETLPPRLVGLVVRLRAQVHYLEEQLRQVEQDLKAALREDDKSRRLLEIPGIGPITASALAVELGDARQFANARQFAASIGLVPRQYSTGGKPTLLGISKRGDRNLRRLLVQCARAVMQHTASRTDALSLWVKTLSTRRHSNVVACALANKLARIAWAVLARGTHYQARALTT

SEQ ID NO: 443520 - protein, 342 aa, unidentified
MERITTIGLDIAKSIFQVHGVGRSGSVVIQRRLRRSQVLSFFSKQPSCVVGIEACASSHFWAREIGALGHDVRLMPAAYVKPYVKRQKNDTADAEAICEAVTRPTMRFVPVKSPEQQSIMVLHKTRQMVMRQRTKLANTIRAHMAEVGIVAPIGRKGLELLLGIIGQNEDGRLPEISRSCLRMLADQFSMVRAHILELDRAIVADVRHNECAKRLMAIPGVGPLLASAMVAAVPDPGMFKSGRNLAAWIGLVPRQNSSGGKERLGGITKQGNRYLRQLLFVGSMAVIRYAERHGTRRPWLVRLMARRQTKVAAAALANKTARMIWAIMTTGERYREPLLQAA

SEQ ID NO: 443521 - protein, 352 aa, unidentified
MTDQRRVVAGVDAHTDEHHVAVLDGQGRLLATAAFPTDAAGYESLIRWLRLHGRIDRVGVESTGAYAAGLARALLADGIDVVEVNQPHPHARQRLGKSDPIDAELAARAVLSGTARALPKLTSGIVEAIRQLAVARSGALKARTAALQQLDDLLITAPEQLRAELRRARTLKARAALCLQLRPNAARLHEPLQAAKLALRSLARRVHALDQELVELDSQLERLVASAAPRTVALFGVGTQCAGQLLISAGQNIERLHSEAAFAKLCAAAPIQASSGRTTRHRLDYGGDRQANRALHMIAVCRLRHDPRTRAYADRRRSEGLNRREILRCLKRYIARQTYHSLRADLEALNST

SEQ ID NO: 443522 - protein, 355 aa, unidentified
MKNQAIHYLGLDVHQATIVASVRNEQGTILMHATVSTEATAILALVRAWGPRVHVAFEEGTQAQWLHDLVEPHAERVIVCNVRGKSEVENKSDRIDANDLSEKLRLGALKAVYHGAPSVLTLKELMRNYNSLVEDATRVMLRIKAIFRARAIRTPGTSVYRAARRKEWLDQLTTPGARVRAGSLLEQLDLLLKLRLKAKAAMIAEAKKQPGWKSLRSIPFLGDIRTAQLLAIMATPYRFRTKRNLWPYAGLAVVTRSSADQEFVGGQLRRRAKASRTRGLNRNHNPMLKSILKGAATAATAKAGPLKDIYEACLARGTKPEMALLTLARKIASIALRLWKKGELWDPAKLTMQTT

SEQ ID NO: 443523 - protein, 376 aa, unidentified
MERGSLMLNTTTFVGLDVHARSIKAVALDAMTGEVRSATFAYDAAAVAEWVRSLDPAAKCVYESGVTGFDLQKRLAALGVDCVVGAVSKMIKPPADRKRKNDRNDAEFLARMLSVGNVVEVWVPDDECEAARDLVRALDDAREDLKRCKQRLSKFLMRHGYAFSETTPTGRRKGSWTAAHWAWIKSISFPEKADDDVLAYYVDAVRQAMEDKARLERLVEAEASKPRWKRRVDSVRCLKGIDVTSAADLVFEAGEFSRFKSARSFAAWLGLTPSEHSSGESVRQGGITKAGNKHLRRVLVESAWHYLGCSPHSKDLAKGQVPDPAARRHAAKGVRRLVERRRAMLERGVHKNKANVATARELACWCWAVGRMVENG

SEQ ID NO: 443524 - protein, 341 aa, unidentified
MNVKTIGIDLAKNVFQIHGVDEHGKRLFNKQLRRAQMASFFANIPPCLIGMEACASAHFWANKLISMGHNVKLMAPQFVKPYVKTNKHDAADAEAICEAVTRPNMRFVPVKTAEQQAVLALHRSRQSFIKQRTAQANQIRGLLAEFGIVVPRGIQQLQRRLPELVEDAHNPLPVLFRTQLSLLQHHMAYLFDVIATLDKQIEQCYRQNALCQRIGKIPGIGPVTASALIATIGKANNFENGRQLAAWLGLVPRQHSSGGKQVLLGISKRGDTYLRTLLIHGARAVLQSAKHKQDAVSSWANQLMARRNNNIASVALANKNARTVWALLAKEREYCAPIISA

SEQ ID NO: 443525 - protein, 315 aa, unidentified
MTPAKFYVGVDVAKDWLDVAQRPEGAPWRVSNDEIRIAALVERLVQLRPALVVLEATGGMEMPVVGALVVAQLPTAVVNPRQVREFARATGRLAKTDAIDAQVLAQFGEAVRPELRPFPDAATQELSALLTRRRQLVGMLTAEKNRLRTAAKAVRADVQEHIRWLERRLSDLDGQLAQSIRSSPSWRERDNLLKSTPGVGPVLSVTLLADLPELGTLGRKEIAALVGVAPLNWDSGHLRGKRRVWGGRSRVRAALYMAALVAARRNPVLRAFYQRLVEAGKPKKVALTACMHKLLTILNAMIRHRTPWSLEHHAL

SEQ ID NO: 443526 - protein, 271 aa, unidentified
MKHATSSVCVPVLTMGIDVGDQRSQACIVDGTRTVLEEFSFETSAMSLCDKLRREPCQVILEVGPHSRWMQKSLESLGHRVRVVDARKIQLISRSNHKTDRRDARTLAQLGAGVPELLGDIKHRSDQAHADLTVLLTRDHFVQLRTATINRTRGVLKSVGVKVPKMATKAFHARVGALVPSALKRGLQPLLDELQSLQLRIHSLDREIQAMAARYPAVAKLSAIPGVGNLTALAFVLALDDPGRFKKSRDVGPFVGLTPRKRASGARPATT

SEQ ID NO: 443527 - protein, 344 aa, unidentified
MDHYAGIDVSLECSSVCVVDAKGKIVREAKVASEPEALIDWFHSLGFDLARIGLEAGPLSQWLYAAMKKAGLAVELLETRHVSDAFKAMPVKSDRNDARNIAQLMRLGWFRPVHCKSVSAQETRAMLTARKLIQTKLQDIENSLRGILRGFGLKVGKTTKRRFAARIGELVTGHPALETIAAAMLAVHMALLREFNGLEKRVRAMSVLDAKARLLMSTPAVGPIVSLTFACAIDDPSRFTSSKRAGPLFGLTPKKYQSGETDYSGRISKTGDASVREALYEAAHIMLTKPIKGCAQLKSWAMRIARRAGMNKAKVALARKLAVIMLRMLKDNLPFNPAATAATP

SEQ ID NO: 443528 - protein, 348 aa, unidentified
MLADQVDYVVGVDTHRDEHTLAVVVAATGVVVGQRSMRASGRGYAEALRFAEQQAGSRVWAVEGAGHYGAGLARYLSGRGETVLEIGRGPRDERRLQGKDDSLDAIRAARTALASKTLALPRSGQRREALRLLLLARRSAVDVRRLALVQLRSVIVTAPDPLREELRALPVQRLIVRCSRLHRTSSAPPDELATKQVLRSLARRIEAATAEAAELEREILAHVRALAAPLLDEPGVGPIVAAQLIVSWSHNGRVRSEAAFARLAGAAPIPASSGQTVRHRLSRGGDRQLNRALHTVILHRRLHDPATKDYIARRLAEGKSRRDAVRLLKRYLARHLYRVLENQTPLMT

SEQ ID NO: 443529 - protein, 342 aa, unidentified
MESTRHIGIDLHRNCFTACVRLENGRNYLTEWRLEQLPKFVAKLRPNDEVAVEVTGNTRLFHDAVAPHVKRVVAVNPNQFQVITHSVKKTDPNDARNLALYLAKDLLPEVRMKDKTRAQIASLTQTRDTMVKLRTALKNKINNICSAHGVNLSKESLASEKGLKAVLEMPFDPLVDLELKILVEQIRSLNKSIAELEETISRESQKLEGHKHLTSIKGIGGLSAGILLSIIGDIGDFADEGKLAAYFGIVPRISHSNETEHSGRITKRGTKLGRTTLVQCALIAQRYSPYLKNYYERKKNRGTGKAIIALARKFLGIIYRTLKNKWLFEDFPNFVLAEEATA

SEQ ID NO: 443530 - protein, 413 aa, unidentified
MTDANKFSPNQVLIAIDIAKQSHDAMIAWPSGRTQAVKIANSLAGYGRLIRCADTDPHSLCVAFEPTADYHRNIAYWLQAHGVRCFLVSSLACARAREMLFKTRDKHDRKDAHVILYLMQQGLMQPFYDPLVAETMDIQELSNTYHQISLARTRCQHSLVNHYLTLYFPEMERYLHNSRSEWFCRLLLRYPTPRSITRYKQSTFVKRAWEVVGRKVAKQRFLEELYETATSSIGLPIDPTSLAASTFKLQLERYLTLSLQRSELEKTADNILLQRDDYRLLRTLPGVGPVIALMIIAESGDLKRFRHYRQYLNFCGFNLSAVKSGQQQGRYQLSKRGNARLRYAYWLAAVSATRQRENSFRYKYERYIRNDPDNADLKRKGRVAVATKMARVAHALVKQNTNYRGFYEFGHGT

SEQ ID NO: 443531 - protein, 319 aa, unidentified
MNETPVCVGIDVAKATLEVAVRPSGAQWVSANDEAGIQTLLGQLRALAPTLVVLEATGGYEHAVAATLATAGMPVVIANPRQIRAFARATGQLAKTDAIDAQILALFAERVRPTPRPLPDDATQALEALLTRRRQVLEMLVAEKNRLGVARASVRRDISQHIRWLERRVADLDRELHAGVRASPVWRAQDDLLQSVPGVGPVLSYTLLAALPELGTLGRKQIAALVGVAPLARDSGTHRGRRTSWGGRAPVRTVLYMATLTATQWNPVLRHCYQRLRAAGKPHKVALTACMRRLLLILNAIVRTQTPWRAAPTAARATA

SEQ ID NO: 443532 - protein, 411 aa, unidentified
MNPVIGLDVSKGESQVQAFLDKGKPYRKSFKVSHTVEGLGLLEKFLDEVRRETGKKPPIVLEATGHYHSAVVQYLEDRGYLLIIINPLISYKAKSSSLRKVKTDAVDAYQLCELFYKEDLEPYKKRGVQLLNLRNLTRQHENITGVLIQTKLQFQAILDQVFPEYRGVFGDLYSVVSLLTLSEFPSSEDILEASLETIADKIAQLCKSRSYRWANEKAIELKAAANRNPFEKTLYQSHILSLSIFINIILQYKEHLSKLETEIDALAKEVEEYNIIKSIPGIGEKIAATIISEIGEIDRFNNPKKLVAFAGIDPSVFESGKFTATKNRITKRGSSRLRHALYMAVRCAIRDCRKKKTTDEVIPRNKKMREFYDKKREEGKPFKVAVIACVNKLLHWIFALLKSKTTFRDIS

SEQ ID NO: 443533 - protein, 339 aa, unidentified
MGLYAAIDLHSNNSVLVVLDAKDKVVYEKCHPNDLQTILAQFKPHKKSIQAIAVESTYNWYWLVDGLMGAGYEVKLVNTVAIKTYYGLKYSSDEHDARRLAHQLRLGILPTAYIYPKEERAVRDLLRKRSQLLRNRTMHILSIQNLVTRNSGKAITQAGIRKPDEKALGLYCGGNALRIMEIKSSLEILRCLDGQITVLERKVPEQARLKPEFKQVTTIDGVREMLGMTITYEAGDMERFEEVGQFASYARCVESSRWSNGKKKGEGNRKNGNKYLAWAFIEAAYSAIRYNERIRKFFQRNKARTNSIVARKAVAHKLARACYHVIRDQVPFNEEKAFA

SEQ ID NO: 443534 - protein, 355 aa, unidentified
MNDAKYIGLDVHQATISVAVLDSAGKLVMECILETKAATILQFIHGLRGSLHVTFEEGTCAAWLHDLLKPNVTQVLVCDPRKNALIKAGNKSDRIDAGKLADLLYLNKLNPVYHGETGIRALRELARSYLALTRDTTRVMNRLKALYRSWAIPCAGQRVYAPRYRSEWLAKISEAGVRRRAEIYYQQLDALRSLREQVRRDLLAEGRKHSATKLLRQIPSIGPIRAVLLIALLQTPHRFRTKRQLWAYCGLALKTSTSGEYRFVEGQLKRSKKFLAIRGLNTNHNHDLKNIFKGAATRAAAVPGPLQGFHAGLVARGMKPTMARLTLARKIAAITLIVWKKGVGFDAEYLKQQAA

SEQ ID NO: 443535 - protein, 341 aa, unidentified
MAFYCGIDLSARESSLCVIDDNQSIVFEQKMSNQIQRIEHSLQPFKTDLRIVVESTFNWYWLVDGLQSAGYDVCLAHTLGLQMITGAKVKTDRRDAFALARLLRAGMIPKAYIYPAQSRAVRDLLRRRQRLVRQRAYEYGQIRQLLLRCGVIDIGRNAVKEIDDDDLTDLFDHPMLVLHAGQQLERIRLYSEQLEEMESSILAQAQARPEFARLQKVPGIGVILGLTILYEIGQIERFPDVRCFSSYCRLVPGVAQSGTVSRRGRASKQGNPYLKNAFSQAAVTAVRCYPQVKSYFERHLKGQKSGKRKLVVYNIVAHKLARAVYHILRDGAVYQMEKLFN

SEQ ID NO: 443536 - protein, 343 aa, unidentified
MSISMIGLDTAKSVFQIHGVNETGKVVLRHKLRRSELIAFFEKQESCTVVMEACGAAHHWARMLTGLGHTVKLIAPEAVKPFVKKGKKNDAADAAAICEAASRPNVKFVPVKNLEQQGILALHAARSLLVKQQTMLANAMRGLATEFGITVPKGMQKLDELMTLVNTDESIPKQAKQAITGLHDYGKELNEGIETFEAEIVAHARHDETARRLATIPGIGPITASLIAATVVDISLFKTARPFAAWLGLVPRQNSTGGKTRLGRITKAGNREIRKLLVLGATSMVGRADGWNSAVGAWLRDILQRRPARLVTVALANKMARIAWAVMTRKEVYRPKGGIAVAA

SEQ ID NO: 443537 - protein, 308 aa, unidentified
MLIIGVDYHPSFQQIAFLDTETGECGERRLVHSDGEAERFYRERKLAGVKVRAGMEATGHTRWFEQLFAELGFELWIGDPARIRAKRVRKQKTDRQDAQLLLTLLMENRFPCIWVPNRENRDVRQLLWHRPRLVQIRTRVMNQLQAIAMNEGVRRKKGLWSQSGRAQLESLSLAPWSSLRQDLVELMDRLNPIIEESSAAIKNDAEKRTEVQLLMTHPGVGPITALAFVLVIGTPQRFRCGKQIGSYPGLIPCEDSSAGHQRLGHISKQWKLLLRFLLVEAVSLGEGWRLFQREQNGAVLKAHAEVCL

SEQ ID NO: 443538 - protein, 427 aa, unidentified
MLKHNTEPNPAEEFAAFLAIDWADQEHAFHLQVVGQSKIETGTLEQKPHVLGPWVAKLRERFGGRPIAVGLEQSRGALIHALMAYDFLALYPIHPTTVAKYREAFKSSGAKSDPLDAGQILEILTKHQDRLHRFNPDTVETRLLGRLVEDRRKAVDLRTTHIQALGANLKEYYPQALELTNDNLSSRLAGDLLIKWPTFEDFQQAKPSTIKRFYYGHNVRSPEVIERVLALAEKSQALTTDPAIVESGSRLTQMYVRLIQALNPVIEQYEQRIQRVFDAHPEVKLFTGLPGAGPVMAPRLLAFFGTDRSRYAAALNVQSFTGIAPVTKSSGKSRVVYARAACPKFDRQTFHEFSRLSVTHCQWARNYVQYYTDKGKKYHTIIRALAYKWIRILHKCWKERTPYNEDQYLETLKKRGSIFATLHLQTK

SEQ ID NO: 443539 - protein, 344 aa, unidentified
MVMIGIDPHKRTHTAVAIDNGERVLDERLVHATGAQVPELLEWAKRLDGGERIWAIESAGGLGYLLAQQLLAAGEQVVDIPATLASRVRLLGTGRSEKNDPNDARSVAIAALRATELVPVRVEDHATVLRLLAGRHTQLGWAYNKTACRFHAVVAELVPGGIGQELVVSQARTLLADYQPVGAVAIERHALAVEMLDELERLNTARKTLRKRIGVAVASGTTLTDIFGIAEVGAAIILGQVGDVTRFPTADRFAAYNGTAPIEWSSGNPKHPIRRLSRRGNRTLNHVIHIAAVTQIRHRHSPGRGFYDRKRDEGMTSRAATRALKRRISNTIYRHLVTDAARQN

SEQ ID NO: 443540 - protein, 371 aa, unidentified
MEHTRFVGLDIHKQRISIAVAESGRSGAVEYLGEISNDPVAIGKLCERLMRSGKKLAFCYEAGPCGYGVHRQLTGIGHRCDVVAPSLIPTKPGDRVKTNRRDATMLARLHRAGELTPVWVPDADHEAMRDLIRLRGVVRQIVTRARQHLQGFLLRHGRKHGRGTAWRMAYRRWLSTLAFKHPAQQIAFQDYVDAIMDAERRLKHVEEQISDLLPEWNLRPVVDALQAMRGIALINAVVLVAEVGDFTRFTNPRQLMAYFGLVPGEQSSGETIRRGGITKTGNTYARRALVEGAWAYRMRARIGRHKVDRIEALPKIIRDIGWKAQVRLCTRYRRLRARGKTANVVNVAIAREMVGFIWSIACTIQSMPKTA

SEQ ID NO: 443541 - protein, 382 aa, unidentified
MPAYADPTPTPISADTIFLAFELSGTSWLVALHAPDADKVERHRLSAGVAAEVLGLIARTKARVTRRLGTTPRVACCYEAGRDGFWLHRVLEAEGIASHVMDPTSLQVDRRARRAKTDRLDAQALLRALMAWSRGERQVCSMVRPPSPEHEDERRLSRERGTLLKERLRLSNRIKGLCAAQGIYHYEPLGADRRERLARLVTGDGRALPGRLAAEIGRQLDCFELVLRHLAEVEAVRNARAAQARQEGGSKLAALLRLKGIGPELATVLELEVFHRHFANRRDVAAYAGLAPSPYASGGTSREQGISKAGNRRARKALIELAWLWLRHQPESALARWYRDRVGTATGRVKRIAIVALARKLLVAIWRYVETGLVPAEATVRT

SEQ ID NO: 443542 - protein, 313 aa, unidentified
MKKTICGVDISKATLDAGIEPGHLFASFDNDAVGIAALIAFCEENGVELVVMEASGGYERRVFAELWAHGMSCALTNPRSVRRYAEAMGILEKTDRIDAFVIARFADAKNLAPTPLLSQAQQRLKALVARLRQVTDDLTVQKQRRSSAFGNAEIQTSIDEVIALLKRQSRLLEGEIASMIDDDPLWAKLAEAWREVKGVAGRTVARLHAELPEIGILSNKAIAKLAGLAPIADDSGKRRGKRSTRGGREGVRTILFIVAATAARYDENLRNFRDRLTKAGGEKMVIRIALARKLLVILNAKAREARAEYANAT

SEQ ID NO: 443543 - protein, 317 aa, unidentified
MNTQNSQKEINVGVDTGKTQLDIYIRPLDIFFSVTNDKEGIKSAIKQIKKHSPTRIVIEATGRLEHEFIVACSKAGLLFSVANPIHIRKFAGAIGLLAKTDKLDAQLIARYGETIKPEPSKLKPETLQRMSDLMARRRQLLTIRTMEKNRLQIMPKEITSSIKPILTAIQKQVDKVEMKLAELIESCPEYSAKNDIIQSMPGVGNVVAFNLLCNMPELGYCSNKQAAALVGVAPVNRESGIYKGQRRILGGRHQIRTVMYVAMMSAIQCNPVFKSTFQRLVEAGKPKKIAIIACVRKMIVILNSMVRDGVMWESKMA

SEQ ID NO: 443544 - protein, 335 aa, unidentified
MKKFYIGIDISKEKLNFCYRKGLEIVLEEECTNDVTIIKKAFRDSLKTLNSTFDDVLVCAEYTGRYIYPLTVACQDMGLFLWIDDPTRIRNSFGIIRGKNDAIDAARIAEYAFRYSDKAVRYTIASKALVSIKNLLSDRGFLLQDRKRYQTQITDQRKYMEHSEFKRKSQRWNKVIKVIDEQIKAIDTEIDNLIASEPMLAHQKELLKSIDGIGDRIAINMIAVTAGFTRFRNARHFCSFAGLTPYRYDSGSSIRSKSRISKRANQNIKALLHLSAVNVATRMKENEYREYYERKIKEGKHVMSVLNVLRAKLVHRMFSVIARDEFYTKNICPIL

SEQ ID NO: 443545 - protein, 415 aa, unidentified
MGQQRNKVCGVDIHKKFLVATILTRDGTKMQKRFGTDIDDLLNFRDWVLKENCDCVAIESTGVYWYPVNAVLENKVELILANAHQIKHTPGRKTDALDSEWIAEVALNNLIDPSRILPKEDRELRRLTRTRESLVKIRSQMKNQVHQGLESCSIKLSSVLSDSFGKSGRYILDGLIKGKNIDEIIAGIPSKRVKNNGDQIRSAIKIGLDQIQVFLIQSHLDTIDCLTKKLDEMDLEIKQRISGRKDDLKIVMSVPGIGFTAATTILAEIGNYQDFSTPDKLAAWCGIVPSVYQSADKLRTGSITKQGSKHIRWIMVQVAQAAAKKKGSKLRKFFLRVKAKKGHNVAVVALARKILCILHHLLMNREMYQEEGVEKSRPSRLDWSSATTDKMSLQTMIEIIAKAGYEVRKTERDGG

SEQ ID NO: 443546 - protein, 343 aa, unidentified
MEYYVGLDVSLKQTSICVVDQTGSVVREGVVDSDPEAISVYVRSKAPGAVRIGLETGPTSTWLWTELKRFGLPVICIDARHAKAVLKMQINKNDRNDAIGIARIMQTGWFKEVHVKDIDSHSVRALLASRALLVKIKRDLENHVRGLLKNLGLVIGRAKFNVFAVRAEELIEGRPELIAAIRPLLEARNAVEQQVSELDRKVMKLARRDAQVQRFMTVPGVGPITALAFKATIDDPARFARSRSVGAYVGLTSRRHASGEIDWSGRISKCGDAMLRSYLFEAAGVLLTRVPKWSTVKAWGMRLAKRNGLRKAKVAVARKLAVILHRMWIDGTEFNWSKKEIAA

SEQ ID NO: 443547 - protein, 388 aa, unidentified
MQDVADQSAAPTTIGADLCAIFISLELSRSTWLVTSLSPGGGEKMSKHSVCAGDIAGLLARFSELSRKACARTGRSFPVIVIQEAGLDGFWIHRVLLSEGIESHVVDAASIATSRRRRRAKTDRIDGETLLRALLAHRRGEPRVCSMVRAPTPEDEDRRRICRERKVLIMERVQHVNRIKGLLFSQGASGYEPLRRDRRVRLDALQTGDGRRLPQHLKAQVCRELDRLELLLEQIKAVEAERDALLNAEQTKASAPPPMLLGVRGVGPEFASVLWSEGLSRHFDNRRQVAAYAGLAPTPWQSGSVHREQGISQSGNRRLRTTMIQLAWLWLRHQPGSALTLWFKDRMERNGGRRRKTTIVALARKLLVALWKYVSAGVVIEGALIRPA

SEQ ID NO: 443548 - protein, 329 aa, unidentified
MEGPWTSSASTISKAKFDAALLLGERIKHAVFSNTEAGFQQLLAWLAKHRPDPTVPLHACMEATGNWGLELADFLHAQCVRVSVVNPARIKAYGESELARNKTDKLDAGLIARFCRAHSPPAWVPAAAHLRELRELVRRCDALRAARVQELNRQKAGFASPAVARSIAAHIGWLDEQIEAVMDEARHLIAADPVLSKNLALVRSITGFGEVSATILLAELPNIADFTPKALAAFVGLSPSDHSSGTSVRKPGKISRIGTERLRSTLYMCALSAKRTNKPLAAFVARITTAGKSPKVILIAVARKLLVYAHAVIRTQKAFDSSPDALLPA

SEQ ID NO: 443549 - protein, 430 aa, unidentified
MKFNTQNKKIEAITETTLVIGIDVGSETHYARAFDYRGIEFSKKPFKFSNSEAGFEMFKAWILDIKEKHEKDKVVPGMEPTGHYWFNLGKFLQDNEMKLVLVNPHHVKKSKELDDNNPTKNDRKDPKVIAGLIKEGRYMIPYLPEGIYADLRTASNMRFQIQSELTRVQNRISRWFNIYFPEYKTVYGKPDAISGMMVLKKAPLPEDILTLGVEGVNQIWRDAKIRAVGKKRAQTLVEAARHSVGTKEGATAARIEIRMLLEDYESRNNRLQEVMSLIEELVKQIPMAEKLMEIKGVGIKTVSGFLAEVGDISRFSSPKELQKLAGLALVENSSGKHKGQTTISRRGRKRLRYLLFEVAMSLVGKNPEFGALHHYYTTRRINPLKKMQSLMAVAAKLIRVFYAMLTKGVEYDPAKMLGDIKRPPEYMQIA

SEQ ID NO: 443550 - protein, 432 aa, unidentified
MNPFSVSPEPSPVAAWVGLDWADQQHVICLYEVATGQSTVSRLEQKPEALQDWLSQLRQRFGGAPVAIVLEQARGAVIYALLSADFVRLYPVNPQSLASYRKAYAPSGAKSDPADAVLLMEMVRKSPERFRAWKPDDADTRSLQLLTQNRRQLVNQKTALTNQLTSLLKTYYPQALELAGALDNLQACDFLKPWPTLEALQQARAGQIRQLYREHGRPSSEQLDRRLEQIRQARPLTSDPAALLSGSMMVQVLVEQLRPLLAAIERFDRQIAVIFGKHPDRPLFDHLPGAGAVLAPRLVAAFGTDRDRFQSAQQAQQLFGIAPVTEQSGKQRWVHWRWACPKFLRQTFHEFAGHSRHWCGWSQALYQRLRRCGKGHHAALRVLAFKWIRILFHCWKTRTGYDEQIYLKSLQKRNPTLWAEIQLLPPRKKKVA

SEQ ID NO: 443551 - protein, 410 aa, unidentified
MPEYEFYVGIDWGTQSHQVCVTDASGTRVVERPVAHSGLGLAELVAELSRHGREPTRIAVGLEVPRGALVDTLLERGVHVFALNPKQLDRFRDRYSVAGAKDDRRDAFVLATALRTDRAAFRRLDPEDPRLLPLRELSRVHDDLGQERSRLTNRLREQLWRFFPQALTLCPAADEPWLWALVAEAPTPTQAQRLTHSALRALLARHRMRRLSAEELYAALQAPSLYVAAGAVEAATEHIALLLPRVRLIDEQQRRCEHRLDRLLEELARPGSELEQQEHRDVTILRSLPGVGRVVAATMLAEASRPLANRDYQTLRAQAGVAPVTRQSGKGCFVVMRRSCNHRLRTALFHWARTSVRLDTHCRAHYARLRQHHGHARALRGVADRLLRILMAMLTNHTLYDPTRRHPAAA

SEQ ID NO: 443552 - protein, 275 aa, unidentified
MESAFALVWFGCSFCVEYAFQLYWVEVETGEVANRRFTKQQLIEFFSHRAAGCVALEACGSAHWWARKIAALGHKVVLLHARFIRPFVQNNKTDATDARAIWTAAQQPGMRFVAPKTADQQAILALHRMRSLLVKSRTMQVNQLRGLLYEFGVTLKAGRVVGLAEVRERLHEIEQVVPGVLFDALRDQLHHIDLIDGEIRKLERQIVAWQRQEAACQRVTSIPGIGPLTATALVATIGDPAAFKSGRELAAYLGLVPRQSGTGGKLRLGGISKSV

SEQ ID NO: 443553 - protein, 354 aa, unidentified
MEYGAIDLHKRESQIRIVTADGEVIDRRIPTTRDRLTATFWGRARMRILIEASTESEWVAKHLESLGHDVIVADPNYGAMYARRSRRVKTDRRDAAALADACLHGNYRPAHRRSARQRIVQSMLNVRRELTDSRTRAILIARAITRAEGFRIRSGRTETFLDRLAALELPASMTATLLPLRSVIEVLDDELAAADDQFAKLVAADPVATRLMTLPSIGPITATAFIAALDDAARFDGAAQVTSYLGLVPREYSSGEHQHRGRILRSAHPHVQSLLIQAAWRMSRSSDPKTAGLRAWADAITRRRGKKVAMVALARRLARILFAMWRDETEYQAKRIRVINGTAPAIMDGAAAVV

SEQ ID NO: 443554 - protein, 386 aa, unidentified
MPDTVHPSSAPAAIRIHLGAIFVSLELSKSTWLVTALSPGSEKMARHSVPGGDLAALLQCFGKLREKAEKREGQLYPVVVIQEAGLDGFWIHRALEAEAWITSHVVDAASIAVSRRHRRAKTDRVDGEMLIRALMAHIRGEPRVCSMVRVPSLADEDQRRIGREREILVAERIQHTNRIKGLCFNVGIRDYKPLHRDRRQRLEDLCTGDGQPLPRHLKAQISRELDRLELLSAQIKAIEAERDALMEQAKENDPRTLLLALNGIGPEFANVLANEGLFRDFNNRRQVAAYAGLAASPWKSGSIDHEQGVSKSGNPRLRKTMVQLSWLWLRYQPDSQLACWFQQRVSQNGGRGKKVAIIALARKLLVALWKFATRGVVIEGAAMSHA

SEQ ID NO: 443555 - protein, 349 aa, unidentified
MEHYVGIDVSLERSSVCVVDVGGKIVAEAKIESHPDAIINFLRKLGLSIERIGLEAGPLSQWLHAGLTKGGFETVLLETRHVKAALSAMTVKTDRRDARGIAQLLRMGWFRPVHCKSPGSQEVRALLVARKQLLGKLLDVEFSIRGILRGFGLKMGVVTRTGFEGRVRELCAGQAMLEQIAEAMLAARAALRKEYSKLHKAMLALVRRDAICRRLMSAPGVGPLVAITFKTAIDDPARIRKSKAVGALLGLTPRKYQSGETDVTGHVSCVGDTMARTALYEAANAILSRVTRFSALKRWGMDVAKRRGMKRAKVALARKLGVILHRMWMEGTSFRWTKEASQAPQIARA

SEQ ID NO: 443556 - protein, 345 aa, unidentified
MTQYKRVAVDTSKAVFTLHGIDQQDRPVLRINLRRGQMISFFKKLPPTVIALEACGASHYWGHELTAPGHTVRLIPPQYVKPYVKRGKNDRNDAEAICEAAGRPGMHFVPVKSVTQQAQGMVLKVRETLIGQRTALINTVRGHAAEFGIIAGKGAGKIVPLLSAIEQEAAIPPEAREMFVLLGQQINEIDARIKEVDAKLNAAHKASEVSQRLVTIPGVGPVTALTLAVEIDPAMFESGRHLAAWAGLTPKERSTGGKQRMGGISRAGNERLRVLLVSGATAVINAAMRPGSQQMTEWLRALLLRKPRKLVAVALANKMARTAWAMMTRGETYRRPSAAAGAVAA

SEQ ID NO: 443557 - protein, 385 aa, unidentified
MKEQNFVPREFEIFGGLDVDKKSIAVTFMSHQGILQSFSMPYRAEHLLSYVGKHFEGKKIAFAYEAGPTGWGLYDRLTREGHVCVVAAPSMIPKVPGQRVKTNRLDSQKLSEHLRGGQLKSVHVPSESYRQLRQLTGLRDTFVQDIVAMKLRIKALLLFEGLEFPPAPAGSQWSLIVRGKLKTFSCSSAVRFKLDRLLESLESSEKQALQTIQEIRRFYQQDNELCQAMKYLKSIPGIGEIVASHLLARIGDPQQIGNVRQLAGFIGLAPSEHSTGDRVARGHITRSGDGRLRSKLIQAAWSAIRQDPELREFYRSVYQRHPRDRAARKAIVAVARKLTTRIYAVLKQQRPYVVREIVHSAPLTQEETSPQGTTRRRGEPGEILS

SEQ ID NO: 443558 - protein, 347 aa, unidentified
MRFYNNQHKYYCGIDLHTRKMYVCILDEKGEIREHRNMKTDRDAFLKTIAPFREDIVVAVECIFTWYWVADLCHNEGIPFVLGHALYMKAIHGGKAKNDKIDSHKIAALLRGGMIPMSYVYPEKMRATRDLMRRRNHLMRKRSELYAHIQNTNSQYNLPDSFGCLARLKNRNGIVEQFEHPSVQESITADMEIIRSYDVILSQLEKSIINMANHHDPVSYALLQTIPGVGKIIALIILYEVENIRRFASVQDFVSYSRLVKCAKESNGKKCGSGGSKIGNAHLKWAFSEAAAFFAKNNDPAKKYLDRLTKKHGKSKALSILAHKLGRAVYFMLKNKEAFNQNKLLNL

SEQ ID NO: 443559 - protein, 351 aa, unidentified
MPRPSTVHAVTTIGIDMGKNTLHMIGLDSLGGIVLRERVSRGRIASRLANLPPCLIGIEAGMATHYVARALAALGHDVKQVPPAYAKPFRQGHKNDFRDAHAVAEAVQRPTTRFVPAKTNEQLDLQALHRVRSRLVSERTAVINQIRGFLLERGIIVRQGLRFLRQALPDILAKRTDVLSSRMVRIVADLASDWRQLDERIDPVTDEIETLAKSDDSCRRVMTVPGIGPIISSAMVAAIGSGTAFARGRDFSAWIGLVPKQLSTGDRTILGRITKRGNGYLRTLFMQAARVILLRPASWPKHGFGIWLARAAQRLHPNVLAAALANKLARIAWTVLAQERSYEARVTKVAA

SEQ ID NO: 443560 - protein, 462 aa, unidentified
MSQSHRCPDCPQPARRRMPAAEVRIVHPHAAGIDLGSQHHYVAVPADRDAEPVRRFGCLTPDLREMARWLKACGIETVAMEATGVYWIPVMQVLEEAGLEVFLVDARQAKNVPGRKTDVKDCQWLQQLHSLGLLTPAFRPADAVCVLRSYWRHRKSLVELVSMQIQWMHKSLEQMNVQLHKVLSDVTGVTGMKILRAIVRGERDPVVLARMRHPLVHSSEETIVQALTGDWRAEHLFTLGQALELYDVYQQKIQACDQQIEAYMKTLEGRVEAKDLPKSPAGARRKNQAHFDLRAQLHRWSGVDLTRIDAIDAMTAQTVLSECGIDMSRFATEKHYSSWLGLCPNHEITGGKVRRRRTRKVRNRAAQALRLAAQSLHHSQTALGAYYRRMRGRLGPAKAITATAHKLAILVYRMLKYGMEYVDQGQQAYERRYQQQSLKSLAKRARQMGYAMVNIDSGELVS

SEQ ID NO: 443561 - protein, 380 aa, unidentified
MEYCTTIGADVSDRTTKICVMTKAEGGERRIVVETTCATTKAGLEEAFAKFDRSWPVAFETGTHCRWMDRLFRKMGFKTIVGNPSKIPSITKSNTKNDRNDARELARLAIADPAMLHPVFLRDEVYQQMLRFHHARNILISQRTQTINQIRGFAKSMGHRIECSSAEKFHEQSKADWPKELEECAWPLMGVLKAVSIKIKAYDKLIARLAERPEFKSMVERVRVVYGIGLIGSTVFIAAIGGRPDRFDHTRDIGAYLGMIPKQDQSGDKDKQLHITHAGADIVRATLVECAGVAMMSNAKDTDLKLKGLRVAMHGGRIARKKAKVAVARGLAVTMLALLQHPEREYVPLSDEGKKGFERYRAEMEYLAMQKASRKNKKVA

SEQ ID NO: 443562 - protein, 336 aa, unidentified
MYSGIDLHSNNSVVAVIDDGDRVVAQKRLPNDIAKIAGFLARWQDELAGVVVESTYNWYWLVDGLQDAGLHVHLANTAAIKQYDGLKHSGDETDAQHLAHLLRLGILPTGTILPREHRVVRDLARKRMQLVQSCTTHVLAVENIMARQLGGRMTSNQIKRLTEDTIDSLPLAADVGLAIKANVAVIATLQSQIEILEKRLQERVKPRPQYGLLTSVPGIGQTLATVIVLETGPIDRFPDVGNFASYARCVDSVLTSNRKKKGEGNVKNGNKYLAWAFVEAANFARRFCPEAKRFHERKKAKTNNIVATKALAHKLARACYHILKEGKPFDATRCFA

SEQ ID NO: 443563 - protein, 366 aa, unidentified
MAEYIMTGCDPHDKDNLLLSAEDARNPEQRSYPNTQAGRGKMIAELKRRQQESGAKKILFAYEASSLGFGLYEELTEAGIVCFVLAPTKLLRSPKRRLDKPDERDARDILGALRAHVLAGNELPDVWVPDPETRADRALVRMRLNLAEKLTVTKNQVQALLKLHGLKKPASVRNNWTEKFHQWLAELATSPQSPLVPRERLALASLIRQVRSAEEEIQELDRNVAEVATQPRYAEPARTLCGELGVGLLTAMVFLTERGDLSRFQNRRQIGAYLGLVPAKWESGQQDDRKGHLTHQGPARVRKVLNQAVWSRRAHPQQTREFFEDLEQRAPKRKKIHVVGHMRKLAILLWHLGLEAPRRAGSYVNT

SEQ ID NO: 443564 - protein, 322 aa, unidentified
MEEPTVVGIDIAKRKFDVVLLVEGKEKSGAFQNTPDGFAMFARWLERYGAGRVHACMEATGVYGDGLARYLHGAGHVVSVVNPAKVKGFAQSELSRTKTDRADARLIARFCRAMRPEPWQPPAPEVKELQALMHRVQSLKDMVSQEQNRLETTEGPARSSIERTISHLEEELRITRELIRDHIDQHPDLRGKRELLESIPGIGPATSAMILAEFGDVMRFQDARSMAAFCGLTPRQHQSGSSVRGKTRLSKTGSSRIRRALYMPALVAMTHNPVIAAFCQRLRAYGKCPMVIVGAVMRKLIHIAFGVLKSGKPFDPAIAMTA

SEQ ID NO: 443565 - protein, 317 aa, unidentified
MTQTSITTAGIDTSKAKLDIALHGRTERWQVANALPGWRALAAHLTKAHVTRVGIEATGGYERGVVEYLRAAGLVVLVLQPIQVKAFGRVHLRRAKNDVLDAVLIAACAAALDQVRIKPDQRLAELAQHLTFLEQIEEDIRRCKTRLEHIDELRLRRLVLGDIARLKARRLAEIRRIAKQLRSHPDLAARLDLVLSIPGIGERTALALLIRMPELGCISREEAAALAGLAPFDNDSGQHKGQRRIAGGRARLRRSLFAAALPAAFRWNKALIALYGRLTATGKAHNAALVACARKLLIYANTVVQRGTPWTERSLRV

SEQ ID NO: 443566 - protein, 455 aa, unidentified
MPRTTTGDRPELKPVNVEAAAIDIGSKMHMAAVDPACTDTPVRAFGTFTQDLHDLADWFKACGVTSVAMESTGVYWIPAYEILEQRGFEVILVNARYAKNVPGRKTDVSDAAWLRQLHSYGLLRGSFRPDAEIATLRAYLRQRERLVEYAAAHIQHMQKALMEMNLQLHHVVSDITGATGMRIIRAIVAGERNPDVLATYRDVRCHSSIETIRAALVGNNRDEHVFALTQSLELYDTYQAKMFDCDRKLESLIAALTDKGAKPVGKLSRPRVKTKQVNTPSFDVRAALYGVLGVDLTEIDGMGPSLALKLIGECGTDLKAWPTAKHFTSWLCLAPGNKISGGKVLSSRTRRSSSRAAALLRLAATTIGRSDTALGAFYRRLSSRAGKAKAVTATARKIAVLFYNTLRHGMTYRDPGADHYEEQYRSRVLANLKRRAKSLGFVLQAVPGDAELAVS

SEQ ID NO: 443567 - protein, 385 aa, unidentified
MSQLNDLSRSLTSLEQDNAIIAVIEMSQSSWLVAGIVPGIERHPLKKLEPNEGELLRLLMRWRAEATKMGCTITRIAVAYEAGRDGFWLARWLRAHDIETYVIHPTSVAVSREHRRAKTDRLDTGLLKRVFIGWLRGEPDHCHMVTIPTLAEEDAKRPNREREGLVRERTRIVNRMKSCLARFGVRSFKPTLRKAPERLATLVTPEGVPLPANTLLELRRDMARLRFIMDQIKEVEEARGQRLEQAPQEKSHAMVRLLARVIGVGIETADMLVHEILSRSLRDRRAVARYAGLTGAPDESGSRRQEKGLAKAGNARVRRGMIQLAWRFLLFQKDSALAQWYRTRTESAGKKRKTMIVALARKLLIALWRLVTIGEVPAGVVLRAA

SEQ ID NO: 443568 - protein, 430 aa, unidentified
MAPINGECMMDKERSWFVGIDWAAQEHVVSLYDGAGNKIGQRKFSHGGTGLTDMIAWLLKASGGEPGEIHVGIETPHGPIVEALLERRFNVYSINPKQLDRFRDRFTVAGAKDDSRDADVLSDSLRTDMRAFRKLSIADPLIVELREWSRIDEELKVEHGRLTNRLKHQLWRYYPQMLELADDVGAKWFLELFEAVPTPEKAANVREKTIARILKNHRIRRFDAAHVLAELCKPALAVAPGTIEAATAHIRSLIGRIRIINGQLADAGQQLDRLCKKLSEPVADEDGEAAPGQKPEQRDAAILDSLPGVARTVLATLLAEAPDTLQRRDYHALRALCGSAPVTRRSGKSRMVVRRYACNHRLRNATYHWAQNAIQHDHTSRAKYDALRARGHGHARALRSIIDRLLSVACAMLDSGTLFDPEFASKRATG

SEQ ID NO: 443569 - protein, 437 aa, unidentified
MDQHSIVVGLDVHKGSITAAVLPPNVARPQETCTIENDARAVERLVKRIMKNGNAVFVYEAGPCGYTLHRQLYRLGCQAAVIAPGLTPVRPGDRVKTDRRDAENLAQLYRAGQLTEIRVPTGEEEAARDLVRAREDAVADRLRARHRLSKFLLRQGRLYDGKQAWSQKHYAWLRQQRFELTLAQQTFDAYLRGVEEADARLASLTTQVLELAQRPSYAALVQGLRCLKGVDTLTAITLIVETQDFRRFGHARAYMDFTGLVCSENSSGDRTRRGSITKVGNAHLRRVLVEAAWSYSHHNSSGATITKRRHGCPAAVVQIARRAQDRLHRRYWRLTQRNKPRPVAIVAVARELAGFVWAIAHSVSSTTAALSTRNRFRGSTDVFWTWRRSSGQEHPRGVYVADRLTSVPTHVPRLRQLPTNHNHVRSARFVRVTAEYA

SEQ ID NO: 443570 - protein, 391 aa, unidentified
MVCVGIDVAKDKHDCCILDSDGTIRADCITIPNNMDGFKQLLQTIRNCTKKSDKIKVGLEATGHYSYNILGFLLDNDLAVYVMNPLHTNLYRKSLSLRKTKTDRVDARTIATMLLSDVDLKSYTDTAYHNEELKSLTRYRFDKVRERAKLKQSVSRLVTILFPELEKLVPSLHIASIYALLSEYPGAKQISEIHLTKLTNLLVTASKGRYGKDKAIQIRDAARTSIGSVMPAKFLELKHTIKLIRELTSEIDEIEVSIQKIMDELNPPILSIPGVGIQSAAMILAEIGDFSNFESPDKILAYAGCSPSTYQSGKLTNCYAHMEKRGSRYLRHALYNATKYVCYWNPVFAEYLAKKRAEGKHYNVALSHAMKKLVRLIYALQKSGKAYLAAA

SEQ ID NO: 443571 - protein, 412 aa, unidentified
MQTLVERGCGLDVHQATVVACLLIVLKNGRVEKQLRTFGTTTRELLSLREWLLSEGCTHVAMESTGVYWKPIYAILEGALEIVVANAQHIKKVPGRKTDVKDAEWIADLLCHGLLRSSFVPPKPIRELRDLMRYRRKLVESQAAERNRLLKVLETANIKLANVAADVFGMSGRLMLRALIAGKATPQEMAELAKGLLRKKIPELQLALEGKLEEHHRFLLELQLQRLEAAEKDLLALEQLIRQKLEPYAAQLALLDEILGVDWTLAAVIIAELGVDMSVFGSSSQLASWAGVCSGNNESAGKRKSTRTPSGNVYLKSGLVEAANAAARAKGTYLRDKFFRLKARRGYKRAVVAIAHKILVAIYHMLSQQVSYNDLGDLYLDKLNKNHLTRNLVHRLERLGYAVTLTLQPKAA

SEQ ID NO: 443572 - protein, 353 aa, unidentified
MTLYIGVDFHPHQQTVAWCDTESGESETMDLVHKMEEVRHFYTSLREPAIVGIEASARAVWFENMLFESGHKLFVGNPVLIRKRATSRHKNDRRDAELILELLLRGEFPALWRRPPASNQILEILRLRSALVRQRTQVYNRLQALAHNAGLPKGRMRTLAFQELIKAVDMDEAGSLGRSQYFSLLGSLSDRISELEEWLKAKASSDTRSDLLQTQRGVGYLTALVTIHTLGDVSRFSRVGKQVASFAGLDPLERSSAGKTRFGQVSKAGSPLLRFYLGQAAQMAARSDAHLKSFCKRLAKKKPKAVVKTAASRKLLVKLAIMLRDNITADEFDRRGRTVGNARLSARSEMTVI

SEQ ID NO: 443573 - protein, 427 aa, unidentified
MPYRIAGIDVHKRMLAVVVADVEVEGPYQFEQRKVGTSPAQLRALADWLVEREVEEVVMESTAQYWRPVWETLERYWRPRRQTPPSARPRARTLHLAQAQSNRGARGRKKDFPDAERLVKRLVAQELTLSFVPDAEQRLWRTVTRRKYQLTQNRVQVHNRLEALLEEAHIKLSSLVSDLLGLSARRMLQALADGETDAAKLAELADQRLRATAEQLCDALGACTELNSVYRRLIAMALDELRLVEAQIVALDEEMAHLIHPHQGAVERLAAVPGLGVDSAQQIIAEVGPTAGTFPSPKQLSSWVGACPGDEESAGVSTSHRSPTGSRPMRRLLNQAANAAVKTKGSIFELLYRRLVPRLGHAQAIGAIAHRICRLIWKLLHQGVAYEERGPAVTKQRKQARTAKMIRDLRRLGYRVELVLAPSGSPA

SEQ ID NO: 443574 - protein, 394 aa, unidentified
MTAAYTGNVSTQSGVLHLAFELGWTHWKLAFTIGYGQKPRQRTIRARDLAALEQEIAKAKKRFKLADAAAVVSCYEAGRDGFWLHRYLTARGIANVIVDSASIEVNRRKRRVKSDKLDANKLVNMLIRYHAGERKVWSVVWVPSVADEDRRQLHRELQELKDEQTRHSNRIKGLLASQGLDLEVVDELLPAWLAAARLWDGTALGADLQRRLVREYERWQFVHRQVLDLSIERRRRMLCDATAHVAMVRRLLGLAGIGGNGAWLLVYEFFAWRKLQNRKQAGALVGLTGTPYQSGGSEHEQGISKAGSRRMRKMLVELAWCWLRWQPESALSKWYGRRFGTGKGPARKIGIVAVARKLLIALWKYLERGEIPAGAKLVDWRSKLTSHKVKKPAA

SEQ ID NO: 443575 - protein, 320 aa, unidentified
MPRGCNRAAAHNRILEEPAMAKARTLVGLDVHATKIVAAVLDAETGEIAFFAMTADIGRTAGFCAGLPRPVRVAYEAGPTGYGLARELIKRRVDCVVAAPSKIPRASGDRVKTDRRDAELIVRLLFAGKLHAVRIPGAEEEALRDLVRAREQVRVDLMRCRHRLSKLLLRHGVRFDDGDAWTERHREWLGEVVLEWPAAQATLLDCQGAIDALCHRRDGLEREIVSMLPSSPWREQVGVLRCLRGVDTLSAVGLCAEVGDFTRFARAGQLMSYLGLVPSENTTGHQRRLGSITKTGSAHARRLLVEAACITARDRTSANA

SEQ ID NO: 443576 - protein, 419 aa, unidentified
MGQNKPKKLGKVNGNTLVAAIDIGKKKNYGYFRAPDGQDIKPFAFYNLRGGFEIFWTKLVEFQKNHDLEEVVVGFESTGPYAEPVIHFLRKKKIRLVQTNPMHTKRLKELTGNSPNKTDEKDPKVIADVIALGHALTLVIPEGPAAELRRLSQARERAIKVRTAFSNQLQHLLFIIFPELSWTIKNMKSKTVLYLLENFPTPESILAMGLEGLCAILRKTSRGKLGLDRARQIFEAAQKSVGINEGKDSILLEINHLVSNIRNEDRFIESLESQMKHYLKQVPYCQSILSIKGIGEVTAAGLIGEVGDFRKFTTIAEVMKLAGLDLYEISSGHKKGQKRISKRGRSYLRKILFFAAINMVKDEGILHAHYQQMLDRGMPKIKAVIAMCRKVLRITFAIVRDNTVYVSNHQHGLGSKLAA

SEQ ID NO: 443577 - protein, 453 aa, unidentified
MPKIRSSTPQNLTQVNPGAAAVDIGSTMHMAAVNPEQTDTPIRAFGTFTHDLHDMAVWFRSCGVTSVAMESTGVYWIPAFEILEQHGFEVILVNARYAKNVPGRKTDVSDAAWLRQLHSYGLLRGSFRPNAMVATLRAYLRQRERLVEYAAAHIQHMQKALMEMNLQLHHVVSDITGATGMKIIRAIVSGERDPNVLASLRDVRCHSSTETIRASLIGNDRDEHVFALSQSLDLYDFYQVKVLECDRRIESVIAAMTSDLATPLAPLPKIRTRTKQPNAPSFDVRAALYGLIRTDLTQIHGLGSSLALKLIGECGTDLRAWPTVKHFTSWLCLAPGNKISGGKVLSSRTRRSSSRAAALLRLAATTLGRSDTALGAFYRRLAGRIGKQKAVTATARKIAVLFYNALRFGMVYRDPGAAAYDERHRGRVIANLQRRARSMGYELAPMTAEECVS

SEQ ID NO: 443578 - protein, 329 aa, unidentified
MKSSSLVPVKKYIDPVIGVDVAEDKFDVAVTSSAETIYTFENNASGHKKFIAAIKPLGSRLVLMEASGKCETRLALALQKAAIPFRIENPAKLKNFNRAMGIIEKTDSIDAVTIALAAEKLNLQPALNFLDPYIIKLKENIRFRRTLMADKLRHENRSRRLIDRPLVKYVENFNAKLKKLIARLDVKIKRMINSNQAVRDKYELLTTVPNVGFVTAVSIIAECPEIGCIGRRQISKLAGLAPIANDSGKVTGKRRIKGGRKNIRGALYMSVLSAMKKNPLIKRFYDKLREKGKPAKVAMTACAHKLLLLLNAMVKLNRPWNEFYNEKLF

SEQ ID NO: 443579 - protein, 392 aa, unidentified
MQAAADRAEAPTAIQTDLRAIFVSLELSRSTWLITSLSPSGGEKMSKHSVPAGDIAGLLRRFAQLKEKARARTGRDFPIVVIQETGLDGFWIHRMLQSEGIESHVVDAASILTSRRGRRAKTDRIDGETLVRTLMAFKRGEPRVCSMARAPTPQEEDRRRVCRERRTLVGERVQHVNRIKGLLFAQGVFGYEPLRKGRRERLEDLRTGDGRLLPVHLKAQIVRELDRLEVVLEQLKIVEAERGALLKPATDAAASPPAMLLQLKGIGPETAAVLWSEGLFRQFDNRRQVAAYAGLAPTPWQSGSIDHEQGVSKAGNPRLRTTMVELAWLWLQNQPASALSLWFHERVRRLGGRMRKTTIVALARKLLIALWRYTTAGVVIEGAVMKAAPATI

SEQ ID NO: 443580 - protein, 320 aa, unidentified
MLSFCGIDVSKDRLDVMVLPEEQCCSVPNDAGGWAALVERLRNFSIAAIGLEASGGYERGVARALLAAGISVRQVNPFKLRQFARASGVLAKNDPLDARMIASFVAIMPTRPAQRPTPAAEKLAEMLAVRRQLSAEKVAAENASRLLEDAMLQRLSRRRIGRLAADIELLDERLVEIVASDVVLAHRYRLLSSMPGVGAVLACTLIALLPELGGMTRKQVAALVGVAPYAFESGTLKGRRCIWGGRANVRQVLYMAAMSASNWNPGLKAFHDRLAAAGKKPKVTIVAVMRKMITTLNAMLRDDVVWADRLGSRHTMPTAR

SEQ ID NO: 443581 - protein, 339 aa, unidentified
MELYVGMDLHSRNTYFGILNEEFKRIFKKRVNNSLPLILNTLEPFKDEVKGIVVESTYNWYWLVDGLMDAGYADIHLANPCAIKQYEGLKYTDDQHDAFWLAKLLALGILPEGYIYPKESRPVRDLLRRRSFLVKHRSSYIHSLQSMIERYTSLRVSGNDLKKLEIQDLREIFEEEHLLLSAEACLQNIKFLTWQIKRIQKAVKDKVRIQRPFDLLMTVPGIGEILALTIMLEVGDIGRFPKVGDFASYCRCVPTDRRSAGKSKGKGNSKNGNRYLSWAFIEASNYARGYNERFRRYYQRKAAKINKIVATKALASKLARICYYIMRDKVPFREEAVFC

SEQ ID NO: 443582 - protein, 369 aa, unidentified
MGYCSEVFVGIDVAKARNAIAVADGERGGEVRFIGEVDASEESMRRVVKRIAANCGRAHFCYEAGPTGYGLHRLITSLGHSCTVVAPSLIPRKPGDRIKTNRCDAVGLARLLRAGELTAVWVPDEGHEAMRDLVRARAGAVGALRIHRQQVSSFMLKHGRVFERPKSWTMRYLRWLQEQKFDHPAHQIALQEMVEAVRISKERVERLEAAIEEFVPQWSLAPVVQALQALRGVDLIVAVTFVSEIGDLSRFESPRQLMAYLGLVPSERSTGDTVRRGSITKAGNGRVRHMLVESAWTYRHPPRVGAKKLYKLEQASPAVREIAWKAQTRLTARYRALSAKGKKTTIVCTAVARELVGFMWSVGREALVP

SEQ ID NO: 443583 - protein, 412 aa, unidentified
MLFVGDDWAEDHHDVEIEDEAGRRLARRRLPEGLAGIAQMHALIAACLPAEWADLAEGEAAGRVKVGIETERGPWVQALVAAGYEVFPLNPMSVARYRERHSTSGAKSDAADAHLLAEIVRLDREHHRPVAGDSSEAEAVKLVARAHQSLIWDRSRHVLRLRAALREFFPAALEAFADLDAPDTLELLGRAPDPDAAAALSQAKIAAALGRANRRDAASRAREIQAVLRAPQLRQPPPVQAAYAAVVSGQVALIRALNIRIDELGEVVAGHFGRHRDADIYASQPGLGVILSARIMAEFGDDPRRFADARARKNYAGMAPITRASGRRKVVLARYARNRRLADALHQWAFCAMRGSPGARTYYQQLRARGIGHQAALRQVANRLVGILHGCLAARTHYDEHLAWDHHQQSAA

SEQ ID NO: 443584 - protein, 367 aa, unidentified
MKKISTVAVKQSKNISGKKLTIGLDLGDRSSWYCVLDEAGEVLLEQKLSTTPKAMKDVFGAMPRCRIALETGMHSPWVSRLLSDLGHEVIVAHARNVRLIGESRKKDDRLDARTLARLARIDPQLLSPVKHRSAKAQADLTVIRARAGLVRSRTALINTARGLTKSYGERLRGCNPRNMNPEKAQQLSPELQAALEPLLAAIESLSERIHEYNQQIEKIARESYPQVARLEQVKGVGTLIALTYLLTLEDPHRFRKSRDVGCYVGLQPGRRNSGKSEPQLPISKEGDPYLRTLLVQGAHHILGPFGADSDLRRWGLKLAERGGKNGKKRAVIATARKLAVLLHRLWVSGETYEPLRNSHQSAMPAAA

SEQ ID NO: 443585 - protein, 321 aa, unidentified
MSKISRIGMDTSKQIFQLHGVDEAERVVLRRKIRRKEVLALFAGLAPTVVGIEACGGSHYWARELRRLGHEVKLIAPQFVKPYVKRGKNDAADAEALCEAMSRPTMRFVPVKSAQSQAALMLAGVRDRLVRSRTQLANAIRGHAAEFGLVAAKGRARIAPLLARIQADPTLPALARQLFAGLAREHAQLEARLAAIDAELMAWHRDNEMSRRLTRIPGVGPVIAALLAMKTPDPHAFGSGRQFAAWIGLTPKDHSTAGKVRLGTITRAGDETLRSLLVVGATAVIWQVRRGTGRQPRCWSASRPSSPPWRSPTRSPASPGS

SEQ ID NO: 443586 - protein, 387 aa, unidentified
MSDSFDVRKSCKPFDQSRSLVAVIELSQGSWLVGGLVPGLGRHPLKKLKPEKEQLLALLLRWRDEALKAGHAIDRIAVACESGRDGFWLVRWLLAQGIEAYVIHAASVAVSREHRRAKTDRLDTEMLTRAFLGWLRGEIRHCSMVTIPSCEEEDVKRPSRERETLVNERTRLINAMKADLARLGIRGFYPRQRNAAKLLERMCTAEGGPIPPNTLAKLLRDMERLQLVVAQIKAIEAARLKRLEATPQDKPHAMVILLARVVGIGVETADMLVREILSRKLRDRRAVARYAGLTGAPDESGSKRREKGLAKAGNARVRRGMIQLAWRLLRFQKDSALVQWYRERTADGRGGLRKTMIVALARKLLIALWRLVTLGEIPEGFNLRPAL

SEQ ID NO: 443587 - protein, 402 aa, unidentified
MFLVRPIDGHPQEAGSARRQQGEVEASPEAVDVWVSELLLRFSGRRIAVALEQKRGALLCLLSKYAALVLYPVHPATVSRMRAALYPSQSKDDPKDADLLLDILLHHRKHLRRLDADTVETRKLQILVEDRQLVDQGTAYGNQLRAKLKLYFPQALRWLPDLHTVVAGEFLKRWPTLPLLQKARRETLEKFFHEHNCRSEERIRQRLEEIPQAVVATTDAAIVDSSVAMVRAMVDLLAVLCTHIAELDREIAATAAVHPELPILSSLPGAGPVMVPRLIAALGTQRQRFACASELSAATGIAPVMQSSGQSQWIHFRWACPKFGRQSFHEWAGHSLAKCTWAQAFYQEQIRKGKGHHAAVRALAFKWQRILFRCWQDHQPYDEEKYLAVLRQKGSPYAQAAA

SEQ ID NO: 443588 - protein, 394 aa, unidentified
MKLVGIDVGKNSHHFCVMDKETGELNVTPSSFPNNKEGFDFLINSLKPYSKKSILIGMEDTGHYHVALLKFLLSNGYTVALINPKTTDLTRKMEGGITKNDKLDTITICDVLDTPERKKQYRITKVDRFDLYEQRQLTRHHHNLKEELNVYCNRLQKSIDLVFPEFNTLFSSKYGIVYMNLLKTFGSAEAIASTDIRTIRKCFEIKGRGGRISLTPEKLKECAKNSIGISSEVETIQIKHLVSQITLIKEQIAEIDKKIEEFSITNNSPILSIPGISHFSGTSILAELGDIGNYSKPSQIIKFAGVAPYHYESSQYNAQHTAITKKGSKYLRKTLYQIILPVINNNPVFKKYYRLKISQGKGHRCAQGHCIRKLLRIIYHLLETGQSFDPALLR

SEQ ID NO: 443589 - protein, 343 aa, unidentified
MSNDTRIAVDVAKAVFEIAISDREGRVSRRERPKRHQFLPFLAQQPPATVVMEACGSAHYWAREIQKLGHRVVLLPPHHVRPYIRRNKTDRTDAKGILEASRNDDIRPVPVKTVNQQVLTSLHRLRAGWMLERTARLNTLRGLLRELGVFIPVGSREVVPAVWAVIEDADSNLPDALRTIFAEACREIREIEARVRLAEQQLASIAEQLPAVEHLQTIPGVGLLTSTALVGFIGDIQRFPSGRHFASYLGLTPREYSSGLKRNLGRISKRGDGYLRTLLIHGARSVLVHARKQQPDRLREWANQLAKTHVHNKAAVAVANKLARIVWAVWKHERPFALMARAA

SEQ ID NO: 443590 - protein, 345 aa, unidentified
MPIVGGLDIHRKQITFDYLDTVTGQVCRGQISPADRVHLRAWLARFAGRGDVAFALEGCAGWRYVAEELAAAGVTAHLAEPADTAFARGRKRHAKTDKTDARHLRMLLAEGRLPECWIPPGHILECRALLELYNDLRRERTAWAQRIHAVLFHQGAPALGEGALRTEQGVAGLRAAAAAHLSPAGQLQVATALEVIDALEARLHVVRHQLTDAARHLAGAKALAARLYGVGPVTALAITCWLGGAGRFSSSRQAVRFAGLDITVSSSDRKGPPGKLSRQGPPVLRWAVYEAGKAHARTSAPDHRYYAAVKDRKNSKRACLSEARKILRQAHHILAELGDDALAAA

SEQ ID NO: 443591 - protein, 354 aa, unidentified
MRVLRKEEKGSVVGKRVYVGIDVRKESWQVTVRTEGEEIFNGRIPGQYQSLKKLLERYQGCQMKVAYEAAPFGFWLSDKLSEDNIDAMVVPPSLIPIESGNRVKTDKRDSRKLARLLESNMLKQVYVLTPEEREHRDLLRTRRQIVDHRKDVARQIKSKLLFYGIVSPFSATPYWSLKYIEWLRALSFATDYLKESFCLLIDLYEYLTRQIARINRKVARLCRDKKYLDRIKLLCTAPGIGRLTAIEILVELQDISRFKSAEELASFIGLTPSEYSTGEKTRQGRITRCGNTRVRTYLVESTWILITKDPVIRLKYLKLKAARGGKRATIAIARKFILIIRRMLLDNTPYRMAA

SEQ ID NO: 443592 - protein, 417 aa, unidentified
MKLSSNAIPIERYVALDIHKEYVMAGGMNREQEWVLRPRRVEMERFRAWAVTNLRMGDAVVIEATTNIWDIYDIVVGLVSRVVVAHPAAVRQIAEARVKTDRQDVERLLRLLIADIVPEVWVPPVHVRELRALISYRWRLVKMSTMIQNRLHSLLHRHNIHPPEGGLDTEKNRSWWEQQEFSPLETLQVKQELATLYQVEKHKGEVEQELGRMSNSEPWASQAAYLMQLPGVGVVITMTVLAAIGDIGRFESPKKLVGYAGLGAGVHDSGKEHRDKKITKCGRKELRWAMIEAAWRAVWHNPYWKKQFEALKRRKHPNQAIVVIARKMLVTIWYVLSKQEAYRYASEEDLAYKMLIWSWSIGKEAHQGMTPQQFAKYGLLRLGVGEHLTRIVRDGLPRRIAPTEEVLALRPELRPPE

SEQ ID NO: 443593 - protein, 372 aa, unidentified
MNYNTVYVGMDVHKESFSLCAYTIEAEKASHYQRTEADYKKVLNYLEFLRTIYGDDANFICGYEAGCFGYTLYHQLTANNVKCIILAPTTMLEQRSKKRIKTDRRDAEIIAKCLAQHNYSPVHIPTAKDEETKEFLRMRDDHKLALKKVKQQILAFCLRHNYRYDGKSHWTAAHLKWLKALTPEALYKEILDEYLLTYQTLSDKIERLDKRIEELATQDEYKEAVKKLCCFIGVKTHTALSVLVEVGDFKRFASAQHFASYLGLVPGEDSSGDDQNRLGITKAGNRHVRLLLTEASQCYARGQVGFKSKELKSRQSGNTPAVIAYADKANERLRRRYYKMVLNKCKKHNVVKTAIARELACFMWGMMTDNIA

SEQ ID NO: 443594 - protein, 312 aa, unidentified
MHEHFVGIDVAKATLEVHVRPSGESVTVAYDEAGLHQLVARWQALPATLIVLEATGGYEVTVAATLASAGLPVAVVNPRQIRDFARATGQLAKTDRLDAAMIARFAEAVRPAVRPLAVPAAEALGALVARRRQLVDMLAAERNRQSQARPRQLQQRIGAHVHWLTKAVADIDKELTTTIRATPVWRQKDELLTSVPAVGPVTAHTLIADVPELGQLGRRQIAALIGVAPLNRDSGQWRGRRMIGGGRAQVRTVLYMATLVAVRHNPRLAAFYARLTAAGRPKKVALVAAMRKLLTILNAIVRDRRPWHPEIA

SEQ ID NO: 443595 - protein, 342 aa, unidentified
MDKVSIIGLDLAKRAFQAHGARADGGVAFRKKLSREKVLSFMAEQAPCVVAMEACGSAHHWARAIGDLGHEVRLIPPAYVKPFVKRQKNDAADAEAICEAASRPTMRFVAIKTEEQQARAMLFRTRDLLVRQRTQLINALRGHLSEHGMVVPQGPSHVKAMAKAVEEVTASLPLLVVELCRVFLEQIEKLSEKITELEKATSNEAARGSMSRRLQTVPGVGPITAMAIETFAPPMSIFKRGRDFAAWLGLVPRQHSTGGKQILGKTSKMGQRDIRRLLIIGAMAVVRWASRKGAPEGSWLRRMLARKPRVLTAIALANKMARSIWAMLTKSEDYMAPAAVAL

SEQ ID NO: 443596 - protein, 441 aa, unidentified
MAMRKRDEEVVFPNAAGIDVGASSHWVAVPRHAREDSVREFGAMTDDLNAMADWLLACGVDTVALESTGVYWIPVYEVLEQRGLKVWLVDARQMKYVPGRKSDVQDCQWLQKLMSLGFLRAAWRPEGEVCVVRAVARQREVLLTEQASWVQRMQKSLVQMNIQLTEVLTDVMGMSGQAIIRAIVAGERDPKALARHRNSRVKASAEQITKALTGNWRDEHLFVLRQALAMYDDIARHLSECDTKLQALLTELGQAKLDLGKAPRAGSKSRADFDVRQTLANWAGVDLTRINGLGLAAVMKILSEIGPDLSRFANVKHFCSWLGLCPGTKISGGKVLSAKTKRSVNRVRQALKMAAMSLSHSDSALGAFYRRLCSRMDKPRANTAVAHKLARMVYFMLTRGEDFVDQGQQRYEEQQHQRSVAALKRRAAALGFDINPTSAPA

SEQ ID NO: 443597 - protein, 355 aa, unidentified
MNQAKYIGMDVHQATISVAVMDSTGKLILESILETKAATILQFIGGLRGSLLVTFEEGTSAAWLYDLLKPHVANVLVCDPRKNALLKDGSKSDRIDARKLAELLRGNHLSPIYHGENGVRTLKELGRSYLTITKDLTRVMSRIKAVYRSWAIPCAGPAVYRRRHRAEWLAKIVEPGVRLRAERLYQQLDALEPLRQGARRDLLAESRKHPAVKLLRQIPYLGPIRSALLVALLETPHRFRTKRQLWAYSGFGLETHDSGEYRYVKGQLRRNRERVTVLGLNENHNHDLKNIFKSAAISASTRPGPFQEFYAGLLAKGRRPAMARLTLARKIAAITLTIWKKGVCFDANELHRQAA

SEQ ID NO: 443598 - protein, 408 aa, unidentified
MKTLQKRCAGLDVHKKEVVACLRLVIRGKATYEVRRFPTTTRGLLELADWLEQAGCTHVAMEATGVYWKPVWHMLEGRFQQILANAAHIKGVPGRKSDVNDATWISDLLAHGLIRASFVPPQPIQELRDLTRTRKQLTREIVQHTQRIQAVLEEANVKLSSVITDILGLSGRRILKAIVAGETDPVRLSELGGTRLAATRSELADALHGRVHSHHCFLMGQHLKTIEQLEETITAFDARIEAALDLFRDAVERLKDVPGLSETSAQILIAEIGMDMKQFPTAGHLLSWAGLVPRLDESAGKRRSTRVRKGAPWLKPVLVQCAHAAARKKNSYFEAQYLRLKARRGPKKAVVAVAASILTTAYHMLADGTCYQDLGADHFARRNPRRVVAKLANRIRSLGYEVVIKAAA

SEQ ID NO: 443599 - protein, 336 aa, unidentified
MFIIGCDYHPRFQMIAVLEKATGEVKVLRLEHENGEAKKFYSSLPKGVLVGIEATGCTAWFERMVSECGHELWVGDPAEIRARMVRKQKTDERDALHLLDLLLTNRFPRVWVPSPEERDARQLLQHRQKLVGMRTSVKNQLHGLAMGQGLCRKQKLFSESGRKQLEALELGAWASRRREELLTLLDDLNPKIAELDKAVEAEAARRPEVVRLRAQKGVGPVVGLAFVLTLGTVERFRRSRQVVSYLGLNPLENSSGGHQRFGHITKQGNTMMRWLLVEAGQTAARLDAELGRVYKRLKLRRGANVAKVAIARRLAVKMYWILRQVPDPAPAGSHVR

SEQ ID NO: 443600 - protein, 356 aa, unidentified
MTNTIPTEVIIGVDTHRDVHAVAAISALGVHLASTTIPASRNGYQALATWATSLGAVRAIGIEGTGSYGAGLSRFLTERGHTVFEVNRANRHLRHQKGKSDAVDAEGAARAVLAGQATGHPKSGTSTVEMIRHFKVARDTALKGRSQAMQTLKAIIVNSPAALREQLDRITGKMTLIRHLAALRPGPVTSTLASAKTSLRAIARRWLALNAEIREHDAQLGALTAARAPNLIAAHGMAAGTAAEMLLLVGDNPERIHSEAAFAKMCGACPIPASSGKTTRHRLNRGGNRQANAALYRVAIVRMRSHQPTLDYVRRRTVEGKCKAEIIRCLKRYIAREIFGYLCRSSKPATSSCGAP

SEQ ID NO: 443601 - protein, 339 aa, unidentified
MSGVSTVGVDLAKNVIQIHGVDADGEAVVRRQLRRSQFLAFFEGCSACLIGIEACSGAHHWGRQLRSMGHEVRLMPPSYVKPYGKRGKTDAADAEAICEAVTRPSMRFVPIKSEAESAALVLHRARDFPVGQVTQVGNAIRAHMAEFGIVTAKGSKRVASLEEELESLPEAARLPLRALFDQLAETQGRIDLLTKEIEEVHRQNEVSRQLASIPGVGVLTATAIAATTPDVGNFSSARDYAAWLGLTPKQHSTGGKPWSGGISKMGNRYIRRLLYLGAMARIMVRRRSRHAGADWLSRKLATKETRVVAIALANRMARTIYALLRDGTSYRPRIGMMPG

SEQ ID NO: 443602 - protein, 312 aa, unidentified
MSEFIGIDVSKAVLDVAAHASGTHLQVENSEQGFKQLCDELVGLAPELVVMEASGGYERLCAAALAHAGLPVAVVNARQVRAFALATGVLAKSDTVDARVLAHFAAAVRPAVRPLPDEQRAVLDELMGRRRQLVGMLVMEKNRLAQARDRGVRREIKSLVTILEKRIRGCDGELQRLIQASPIWREKEDLLRSFQGIGPVSARALVVELPELGALNRKQIASLAGVAPIARDSGSRRGRRAIAGGRGQVRAILYMATVTAMRVNPQIRIFYERLRQAGKPFKVAIVACMRKVLTILNAMMRTHTRWQPPIVA

SEQ ID NO: 443603 - protein, 332 aa, unidentified
MDTSKNVFQLHGVNAAEQPVLRRKLRRKDMVAFFERLAPTVVAIEACGASHHWARLLGSFGHEVKLIAPQLVKPYVKRGKNDAADAEAICEAMSRPTMRFVPVKTADQQAALMLMGLRDRLIGNRTQLANAIRGYATEFGLTAAAGLAHLGPLLKRIQSDNGLPSLARELFALQLGAQIDQLELKLKAWRRANDCSRRLAEIPGLGPVGAAMLQMKTPAPELFRSGRQFAAWLGLTPKDYSTGGKVRLGVITRAGDEGLRSVLVVGATAVLRHHKGGEGRGALASWLDQLLKRKPLKLVAVALANKIARIAWKLMLTGERYRLNPEPAVAGA

SEQ ID NO: 443604 - protein, 354 aa, unidentified
MANYYIGADVDSKMTELAIEKNEKIIRRYRVPTSIPALREVLGSISGTKFLTFEEGPMAGWLYRNLKDDVDELIVCDPRRNKLIACDGDKDDSIDSGKLAGLLRGGYLKAVHQSDDIGRVVLKQWVSLYHDKVREAVRQINKIRGRCRMYGIRIPRRVLRDQLVRSQWMAKLKEKVLAEQLAVLWMGYDTANKQSKMAKKQLIRHIKGYEIVRYWSELPGIALIRSTTMLAYLDTPWRFSSEKKLWKYCGVGLQRTASGTDRYGRPNRGKLKLAWAVNRRLKDVVLGGTMSAINQKQNIFSYEYERMIRNGLSESNARHAVARKLLSVMWAMWKTMSRFDGSLVCCSSETVRAS

SEQ ID NO: 443605 - protein, 347 aa, unidentified
MTMRLDWARGPEAIKTHYFCPFLRIATMTISTIGVDISKDKFDAARLSAQGKYKHKKFTNNPEGFAAFLVWLASFGDEEVHIGMEATGAYSMPLAEFLAEKGYAVSVINPARIHAFGKAGMGRAKTDKADAKLIAQFVQEKKPALWTPPPHNIRELQALLRRVEHLLEMRQMEQNRLDTASPTVVGSIKAILELLDRELETTRERIRKHINDDPDLRRRGDLLDSIPGIGEATLAHLLVALSDHYGFDNAKQAAAHAGLDPKIKESGKWIGKTRLSKSGDPMLRKALYMPALVAWRHNPAIRAFCERLKANGKNGKAIVCAAMRKLVHIAFGVLKSGKPFDPKLNPA

SEQ ID NO: 443606 - protein, 402 aa, unidentified
MNAVGIDVSKGKSMVAIMRPFGELVSTPFEIKHTTSNIKSLVELINSIEGESRIVMEHTGRYYEVLAHQLSEANLFVSAINPKLIKDFDNDSLRKVKSDKADAVKIARYALDKWQNLKQYSVMDELRNQLKTMNRQFGFYMKHKTAMKNNLIGILDQTYPGVNAYFDSPARSDGSQKWVDFASTYWHVDCVRKMSLNAFIDHYQNWCKRKKYNFSQSKAKEIYGKAKELVPVLPKDDITKLIISQAASQLNSASTTVESLRTLMNETASKLPEYPIVMAMKGVGPSLGPQLMAEIGDVSRFTHKGAITAFAGVDPGVNESGTYEQKSVPTSKRGSSDLRKTLFQVMDALIKTKPQDDPVYQFLDKKRAQGKPYYVYMTAGANKFLRIYYGRVKEYLASLPES

SEQ ID NO: 443607 - protein, 388 aa, unidentified
MNLRADKSEPLTAIHTDLGAIFVSLELSRSSWLITSLSPRGGEKMSKHSVPGGDFAGLMERFAQLQEKARLRTGQSFRIIVIQEAGLDGFWIHRALQNEGIESHVVDAASIATSRRRRRAKTDKIDGETLVRALLAYKRGEPRVCAMVKAPTPGEEDRRHLCRERKALTAERVRHVNRIKGLLFSQGISGYQPLRRDRRQRLEELQTGDGRAFPQHLKALVNRELDRLELLLKQIKTVEAARDALLAVGQTAKPTPAAMLLDIRGIGPEFAAILWSEGLFRHFENRRQIAAYAGLAPTPWQSGAVDREQGVSKAGNPRLRTTLIQLAWLWLRNQPRSALSVWFHERVSRNGGRLRKTTIVALARKLLVALWKYVTAGVVIEGVTMKVA

SEQ ID NO: 443608 - protein, 418 aa, unidentified
MSEAENTRAVRRYVGLDIHKHYCVIAGVDREGRVLLPPVRVEHADLEEWLKKKLHSDDQVVIESTTNAWHVHDLLEPLVERVVVANPIKVKQIATARVKTDIRDTLILARLLAANLVPEVWVPPIPIRQMRQLLSQRRQLVETHTQILNRMHSVAHRHHLKHERGKRFNEKTIGWQKDERLSKLEQFQLSLEMENKVYIEKQIERISQEVRKLCHQRPWADDMTYLMQLPGFGVITAMTVLAAIGEIGRFETPKHLASYSGLTPGLEHSGTKYRGKGVTKEGRRELRWALVEAAQMAVKSEPLLKMKFQALQKRMHRNQAIVAIACHLLEVVWYVLTRHQPYRGFTHERIAYKYLTWAWRMDEAARDGLTRQQFARYYLMRLGIGHDLTRIALDPKHPRKIASEAELLALRPELQSIE

SEQ ID NO: 443609 - protein, 408 aa, unidentified
MEVVYRRCCGIDVHKRKIVACLMTGQRKRDTREFGTTTGALREMAHWLKAEECEIVAMESTGSYWKPLYNVFELEGINAMVVNAAHMKTIPGRKTDIKDAEWIADLLRHGLLKASFVPDKDQREYRELTRYRASRVEERAREVNRMQKMLEGANIKLSSHVSDIMGKSAKKLIQLAISHKELTHKQISMACTGPLKATIDELKASLEGIISPLQRSLFAEVIRVIEEQTEQIERIEAMIRQYTTEAYDVAAKAIDAIPGIARRSAEQIIAEIGVDMSRFPTAHHLCAWAGVAPGDNESAGKRKSGKTRQGNKTLKKTLILCANSAINNKESFFYAQYQRLVVRKGRKKAIVAVAHSMLIAVYHVLSGNEFRDLGADYYTQFNREKKAKSLVKQLNRLGYKIDCPDIAA

SEQ ID NO: 443610 - protein, 340 aa, unidentified
MAITTIGLDLAKSVFQAHGIDESGATVLVKKLHRKQMLPFFSKLPPCLIAVEACGTAHYWARTLAALGHEVRLIPPSYVKAYVKRGKSDALDAEAICEAVQRPTMRFVPVKTVEQQGILMTHRARSLLVRQRTMLANALRAHLAELGHVANPGIGNLAKLAEQVMADKDVLPSYARTALEILIRQIMAVSAEITELDQQLATWHTQSEASRRLAAIPGLGIITATAIAATVTDAEQFSSGRQFAAWLGLTPRQHSTGGKTRLGGISKQGDRYLRRLLVVGATAVMRHVKDKPTPMANWIRKLSEKKPFRLVSVALANKLARIAWVVLTRKEAYHPYAHLT

SEQ ID NO: 443611 - protein, 380 aa, unidentified
MTRISVGVDVSKNRSTVCIMGQDGKFIMRPFLVWHSTEELDFLADTLKRLNGEVRVIMESTSVYQYPIALQLKERGLFISIVNAYKVKKFANTDFRGGKTDKKDSRTIASYGISYWDKLVEWQIPKDTYFNLDLLNRTYMNAKKHRQIILQELQHYIDCAMPGMDKELHPLNLSTKKDFMLDFVEKFWHRDEIVNMTEAEFTEVFTAWAKKKGYRPVEGKAAKIYAIAKSCIPYYPANPTVKTILQCIVDKLSGVNRTLVTIVTQMIEEAKKLPEYQIVREMPGVGDPLAARFFGSAGDIRRFKNSKALVAYAGIDSPPDESGDFSSTHRHITKKGSKVFRDTGYEIMMALRAQKRTWEKVRKNAEVYDYMLRKEAEGKP

SEQ ID NO: 443612 - protein, 342 aa, unidentified
MENITTIGLDIAKSVFQVHGVNCSGEAVLRRRLKRARMLPFFAKLPPCLIGIEACNNSHYWARELTALGHDVKLMPAQYVKPYVKRGKNDAADAEAICEAVTRPTMRFVAVKSPEQQSLMMLHRVRLMLNRQRTQLSNAIRAHISEFGVVAPVGRLGVDRLLKIVEDESDDRIPDDARLCLQMLAAQLAVVKQQVLENDRRVLASARRTELGCRLMEIPGVGPLLASAFVASVADPKVFKTGRDLAAWIGLVPKQNSSGGKERLGGISRAGNRYLRQMLVVGAMAVIRYAQRHGTTRPWLVKLLERRPAKVAAVALANKNARMVWALMTSGERYREPLPLAA

SEQ ID NO: 443613 - protein, 410 aa, unidentified
MELEHRRCCGLDVHKEAVVACLRLVADGKVTTEVRTFQTTTADLLRLFVWLAANECTHVAMEATGVYWKPVWHILDDGDFVLVLANAAHVKNVPGRKTDVNDAMWLAELLAHGLIRASFVPDAQTQEMRNLLRTRKQLVREQSSHVLRVQKTLEDANIKLDSVLTDLMGKSGRAMLEALIAGETNPAKLASLADRRVRASPEEFREALRGRVTKHHRFLLRLHLNQIDALDAAMAAVDAQVETNLGPFRTAVDLVMSVPGIKNLGAHVIVSEIGIDMSRFASAAHLLSWACICPRNDESAGKRRSNRMRKGGTWLKTTLVQCAWAAARKKGSYLQAQFHRIKARRGPKKAIMAVVASMLTAIYHMLKEGTTYQDLGSNHFDRRSTEQQKNRLVKRLAELGYAVEIKPLAA

SEQ ID NO: 443614 - protein, 346 aa, unidentified
MIIVGCDFHPSWQQVAVLDAETGEVTERKLVNGDGEAERFYRQLPVPSLIGLEACGNSQWLIESLQHLGHEVWIVDAAQIRASYVRKQKTDRRDAAHILKLLVEGRFPRLWMPSAEQRDLRQLLVHRHKLVEIRTRVKNGLQHLALNRGMQKKSKLWTQSGQKALRELPLDSWAACRREDLLGLLASLDKQIERLDVAVKQAADQHPQARLLMTQPGVGPITGLAFVLTLGDVSRFKRGKQVASYLGLIPREHSSGGKQRLGAINKQGNTFMRTLLVESAQTVTRLDEGFRKQYLHRCHRMAKGVAKVAAARRLAVRLFWMLRTNTGYPEIVRIESSPAMAVVGES

SEQ ID NO: 443615 - protein, 386 aa, unidentified
MQIADRSEAPTAIRTDLGAIFVSLELSRSTWLITSLSPGSGEKMSKHSVRGGDIAALLERFTQLQEKTQARTGKRFEIIVIQEAGLDGFWIHRVLQSKGIDSHIVDPASIATSRRRRRAKTDRIDGEALVRALLAYKRGEPRVCAMVKVLTPEEEDRRRLCRERKVLIAEQIEHVNRLKGLLFSQGISGYEPRRRDRWTRLEELQTGDGRLLPKHLKAQIRRELNRLELLLEQIKAVEVERDALLAAEETSAPAPAALLLNIRGIGPEFAAILWSEGLFRHFDNRRQVAAYAGLAPTPWQSGVVDREQGVSKSGNPRLRTTLIQLAWLWVRHQPRSALTLWFEARVKRNGGRLKKTTIVALARKLLVALWKYVTAGVLIEGAAMKV

SEQ ID NO: 443616 - protein, 344 aa, unidentified
MSNLDTCGIEVSAKQLVVRLRRDEKLEPWRSFDNTPQGHALVVRYLRRAGRVVRVCLESTGLYGLDLALTLLAAEGLEVMVANPRAVRNFAKALMQRSKNDPIDAGVLEEFAARMPFQAWQPPSPTALALHALTRRLHDLVEILAAEKNRQHAAGLSQTTPAAVRRDLARSVRAQERAIQRLTQQTRKLLAQDPQLTERFQLLDSVPGIGETSALQLLGELAVLSPDLTARQWVAYAGLDPRVYDSGSSVHKKPRISKAGNQHLRHSLFMPALVGVRYDPHLRAYYQHLQVLGKVKMQALVAVMRKLLHAFHAMFRTHQPFDGSKLFRLAPTPTPEVNRALVTA

SEQ ID NO: 443617 - protein, 439 aa, unidentified
MQRREAEKGVAEPDWAAFIAIDWADQKHDWAMEVPGENMRERGQVAHTPEALDAWITQLRRRFGDRPIAVALEQSRGALLFALSKYSNLVLYPLHPGTTSSFRQAMYPSGSKSDPLDADVQLDLLVKHRDRLQVWKPDTEETRLLQFLVEDRRRRVDQRTGLLNQLTARLKLYFPQILKWFLSIDSTLAWQFLERWPDLESAQKAPRQKLKAFLTQDARSCPADVDQFINRIREAIPATQDRAVVNSSTLFVKGLVCELQLLRTTIQNYDKQIETIVKQHPDFPIVSSFPGIGKALAPRLIAALGTQRERFPDAGSIQTYSGIAPVREASGKREWVHVRWACPKFLKQTFQEWAQHSMTRCAWARRHYDAQRTRGKGHQAAVRSLAFKWIRILFRCWKNRTLYDETRYTESLGRRSSPLSTDVQIGWKNVAGFWKPAVL

SEQ ID NO: 443618 - protein, 347 aa, unidentified
MKFYTTLHKYYCGIDLHARLLYVCILDEHGNKVVHQKIKADPHQLHKLLKPYIGQVVVGVECMHCWYWVSDFCRKINVEFILGHALYMKAIHGGKAKNDKIDSYKIASLMRGGNFPLAYNYPAETRATRDLLRRRTYVMRHGSELKSHVVNTDSQYNLPAQSLNLKNVSAREGLRHYYDDPVVQRMIALDMNILDCYIRELKHVESFIEGQAKEHYGALLNIARTFPGIGQILALTILYEIGDIKRFPSVQQFASYSRLVKCKAESAGKTYGTSGNKIGNAYLKWAFSEAAVLYLRGNDNAKRYLAKLQKRMSKGKALSALAHKIGRCVYFMLRDRQVFDEDKFLNR

SEQ ID NO: 443619 - protein, 369 aa, unidentified
MTIYTLKAAPTASAVELKNNNKSSKAKRILVGCDVHLRGYQAARKIDEGAIGVVDNFRSEEALLLYIEKQRQQAEQVVVVYEAGPLGYTLYRKLSATGVLCYVCAPDSTQQRKKRRKNNKIDARNLASKLFNYLNGDPHALPLARVPSEAQEQQRMASRQHDQLVEERKRLGAKGNAMLLSQGIGSWSNWWRPKAWSQLSRVAPQWLLERLQIWVDVLKILDEKISLAKAALARACSGPRPKGVGALSQMQLQSEVLDWSLYRNRRKIACLVGMVPSEWSTGDKESRGSITKVGVPALRRIIVEMVWRMVLFQPQYKPVQKWQEVLKGPNPALKKKAVVAIGRQLMVDLWRLQTGRVTAQDLNLIMVEN

SEQ ID NO: 443620 - protein, 482 aa, unidentified
MKKRNIFQNQSQEILAIFEVAGNRSKVMCVPMDYAKKDHVVMFCNGNGKIIRKPFSVKNSPEGKIFLIDQVTKSCRHHGIKPEHVFYGGEDCGSYADNFIYALRSENYLVAGVNAHDAKKQRENMQASTDRLDLMGICKLLISCRGNCSPAQSGIYWTLRTLVRQRRKLVSISTAVRSRIHTIVDRIFPGFLNEKKSGIWPFSKGSLALMANKFSAHQILRRRPVTLSKFLASHLVHHPNHCTEKLQKYASQVLLPPADHIAALQISLEMQVTLLTCLQENIDHINKEIAQYLAQTPGAFLTSIRGIGITLAAGVTSEIGDPYKQKSLSNLVSYSGIIPKVKQTGGAQGKTRVKKVAKRCNRILKNYVVQSAGHIGIFGPDDLKSDYKRRDAQGQHADFGMSRRFLRMAISMMKTSQTYLPKSLRANTAKMGDRAGYYLSTWPKLTEKWYRAQALDIAFDKGMPLGQWRNIVQELYGIELSL

SEQ ID NO: 443621 - protein, 336 aa, unidentified
MNNIEACGVEVSARELVVARKGKQGLQLTRFANAAGGHRQLLRTLTRGGQRVRVVLEATGLYALDLALLLSAHQQVQLMVANPRAVRHFAQAMMQRSKNDQLDAVVLLEFAERMPFTPWVRPPENTLALWAIARRLQALTKLCTAEKNRAHAMGLSQAIPATVRRDIDRSLRFHQRAMKKLRQQALQCIAADAQLQQRYQLLRSVPGLGEISAVQTLAELLLLPADRDVRQWVAYAGLDPREYSSGTSVRKHTRISKVGNAHLRRALYMPALVASRVEPHMRGFYEHLLARGKSKRQALVAVARKLLHAIYGMFRSQRPYDGTRVYLAAALAEKFS

SEQ ID NO: 443622 - protein, 338 aa, unidentified
MTIIAIGIDLAKNVFAVNGVDETGKAVLVRPSVKRDALVELVAKLPPCVIGMEACSGAHHWARQFQAHGHTVRIIAAKFVAPYRLSGRKGKNDAADAQAICEAVQRPHMRFVPIKSEHAQGQLSIHRVRQGFIETRTATINRIRGLLSEFGVVLPQKAEVVRREAGLRLEALPGWANTAIGDSLSELHHLDERIAEYDRHIEAMAKADDRGVKLMAMPGIGAKTASALLASVGNGHDFKCGRQLAAWLGLVPGQYSSGGKQRLGRITKAGDSYLRTLLILGARAVVAAGKNKTDRLSRWAQNVAERRGYWKAVVAVAAKNARMAWAMLSKGEAFKPLT

SEQ ID NO: 443623 - protein, 414 aa, unidentified
MNAVGIDVSKGRSTIAVMRPLGEVVASPYDVAHTDSELSKLAKMLKSLKGETKIVMECTGSYHLPIAYTLHNAGLFVSTVNPVLVHGYGNNTIRKTRNDRKDSVKIANYALSNWLDLPKYVPEEDTRHMLKTYSRQYSKYVKIKTMLTNNLISLCDQTFPGVNKLFTSPPRKRDGHEKWLDFTAYFWHCECVCSLSVKAFSERYRKWCKREGYYFSQDSDNEIYEAASSHVSVIPKNDVTKLLITQAVAQVTAVSETVAVIAAEMKRLASTLPEYSVVMEFYGVGEILGPQLMAEIGDIYRYPKKSSLVCFTGLEPVENQSGQFAGNEEISKQGAPHLRKTLFQVMDCILQNAPADNSIFKFLDRKRAEGKHYYSYMCAGSAKFLRIYYARVKQYLDDSKLTQRNNLLGSVSHS

SEQ ID NO: 443624 - protein, 483 aa, unidentified
MKERPKRRCCGIDVHKNSVSVCILPPKGQADQSIKRRSFPTFTRDLRQLRNWLKNCGVSEIAMESTGQYWRPLWNILEGEFEKLLLVNPQHIKGLDGRKTDRRDAQWIAELLEDGRLKGSWVPPREIRELRDLTRQRVHTLEDRTRVRNRIEQLCQSNNIKVSSVATDLFGLSGRSMLKALVEGKRDAGWMADYARGTLRNKKRELESALDGTFTAEQRWLLGRELAQMEWLEKQLEAMEAEIERRTARFSEELRRLVTIPGVDRITAWTIIAEVGVDMKTFENARHLASWAGLCPGNRESGGKRMSGRTRKANCYVKRALCQAAWAASHTKNNYLAAFYRRLCLRKGAPKAVMALAHHIMTIVYHILAHQTEYVELGADYYDQRNKPRVVNRLLKRLQNLGFEVTLKPSSPVLIEPPSTDPSACVPESNALSLDNPSSPAPLHKRRRGRPCKCMERGIICKHAPVADLNSLIPQPSATQEFS

SEQ ID NO: 443625 - protein, 326 aa, unidentified
MFFIGIDVSKAKLDCSLLLDVASSKRRAKSVANSKAGISELLVWCVKQQVATHELHAILEGTGVYHEQAALALADAGATVSIVNPAQVKDFGRSLGVRTKTDGVDSLVLARFGAMLSPRPWTPPTQEARVLQALLSRREAIAQDLQRERNRLEKADATDTPALIRQSIVESIAFLEQQLTKLQQDIDEHINKYPDLKADRDLLISIPAVGPQVGNHLLAIMHNHQFQSAEQLAAYLGLVPVERQSGTSVRGRPRLSKAGPARVRAILYMAAIVGTQHNPHIKALYQRLQDRGKTKMSALGAAMRKLVHLCFGVLKTRQPYQANYAI

SEQ ID NO: 443626 - protein, 378 aa, unidentified
MRFYNQPHRFYCGVDLHARTMYLCILDQAGAIVLHQEVPAEPGAFLEAVAPFRDGLVVACECLFCWYWLADLCAGEKIAFVLGHALYMKAIHGGKSADDRIDSQKIAQLVRGGNLPIAYVYPKGLRETRDLLRRRMYLVHKRAEVVAHVVNTNSQYNLPPFGKKLIYARNRQALKIAERFADASVRMSIELNLRLLDTLDDLIGDVELYLVRTVKVDDADTFYRLRSIPGVGKILALVLLYEIHDIHRFASEGMFLSYARLIRPLKTSAGKVKGGGGAKIGNAHLKWAFSEAACLLARESDQAKRFLARQQKKHGKPKALGILAARLGRAVYQMLRQKKAFDPKRFWSGEPGVSGAQLKKAAVKRPRRAKGSRCVLEA

SEQ ID NO: 443627 - protein, 349 aa, unidentified
MEIVIGVDPHKATNAVAAIDEQGELVGQQIFPANRKGLRALQRWAKQFPDRRWAVEGASGIGRPLAQKLLAAGERVVDVPPKLSSRVRVLSAGNARKNDRLDAIFIALSALRNDQLVSVQPEDGPEGHAEVLRLLTERREDLVVERTRVLNRLHVLLRDLLSDAVRRQLSADAAAQLLRRARPKHPAGRVRRHLASELVRDVRALDRRIAKLDERIAVEVEASGTTLTKIFGVGPILAAKIIGIVGNVARFPSKAHFASYAGVAPIEASSGEMVRHRLSLAGNRRLNQVMHMIAVCQARSDPRGGAYHRKKLAEGKSRREAIRCLKRRVSDAVYGALVADSGSTSLASA

SEQ ID NO: 443628 - protein, 389 aa, unidentified
MYYVGIDVSKYKHDCFIVTGDGVIIHDAFSFTNDRDGFQTLLSALTPLGDHSEIRIGFEATAHYTLNLKLFLENAHYSFMEFNPVLISKFTKSQTLRRTKTDAIDCASIARWLMTVEYKPYPSGFYHIYSLKSLTRLRDSLVRQRSFYIVKITNVLDHTFPEFKPFFSNKFSKTALYLLENYGNAEKMSHMNSQSYENIRRISRGKFTPRKFLELKSLAANTVGESNEMFDSQLSSLLALYKATVKEIESLEKDITDLILEINPRSLSIPGVGPLSAAVIYAEFGDISRFSSPQKMLSFAGLEPSFYQSGTSAHGGHMVKRGSPYLRYTLMNLCIPLMKYNIVFAEYYAKKRSEGKHHRVACTHLAKKFIRILYKLEKDKTDFDPVKLR

SEQ ID NO: 443629 - protein, 397 aa, unidentified
MIAVGIDISKAKSTVAVIDSDGTVLASPFTMAHTQPEMEAFVTYLKGLGEPTTILMEYTGHYHYPVLKKLQDEGFPVCIVNPYQMKKYGDVEIHKAKTDKKDALRIAAYALEKSYKLVPYSSMEQKYEDLKFLSRQYNQRISYVAKLKVQLIALLDQTMPGITRILPLNSRNPEKCALLLFIKRFKSFDEIQRIGKARFLASYDVLAKKASERSASSKGLSIYELAVDSITTRGEDPYIWLSQNQCVDLLSTTQNAADEIISQMRNIAETIPEYKVLRAMHGVGDRLGPIILAEIGDVHRFHSGKALNSYAGNDAPPYQSGQFESRNRHISKRGSSALRKACYEVMQALKLIKPQDDPVYLFMLKKEQEGKPFNVAKMAGVNKFLRIYYARAMELYK

SEQ ID NO: 443630 - protein, 312 aa, unidentified
MDATVVGIDVAKDRLDVCVRPSGESFVVARTGAGIEELAERLQKLAPRIVAVEATGGFETVVAAGLAAAALPIVVVNPAQVRAFAQALGRRAKTDPIDAAVIAHFVEATKAVPRPLPDETTRLLADLIARRRQIVEMMAAEAQRERRLTNKRLKKSIVRLRKALEKELAELDGEIDDHVRGSPVWAEKEDLLASVPGVGPIIARTLIAELPELGSLDRRKVAALVGLAPWTRQSGQWRGKSFIGGGRKSVRNALFMAAMVAARHNPILKRFRDKLVAAGKPKLVAIIAVARKLLIILNAILRDKTPWQPKTA

SEQ ID NO: 443631 - protein, 347 aa, unidentified
MSHKTAATVAHTIGIDTGKNTLHLIGLDDKGAIVLREKIARGRITARLANVPGCLIGIEAGMATHYVARELSALGHNVKQVPPAYAKPFRQGHKNDFRDAHAIAEAVQRPSTRCVPVKTDDQLDLQALHRVRSRLVGQRTAVINQIRGFLLEHGIAVRQGLRFLRQQLPDIMAKRSDVLSPRMIRIIGDLSADWRRLDERIEHVTEEIEVLAHGSEGCRQLMTVPGIGPLIASAMVAAIGNGAAFAKGRDFAAWLGLVPKQMSTGDRTILGRISKRGNRYLRTMIIQGARVILLRPANWAKHSFGPWLTAAANRLHHNVLATALANKLARIAWTVLMQARSYEARVN

SEQ ID NO: 443632 - protein, 344 aa, unidentified
MLYVGLDLSRKRLDWQALDPEGAVAAVGAVPPDRDGLVRLADRLDERPVLAVIESMTGARFVHDQLELAGWDVRIADAVKARGIAPLACKTDRIDCWVLAELARRELVPEVWLPDPAVRAERERARFRLHLVKHRSSLKNRVHAILFQHGVPNGHSDLFGVGGRRLLERLALPEPWASTVQASLALIDTLDEQISGCERELRALGADHPYIPLLMTCPGIGWVLAYTIASEIGEITRFATPRKLVGYTGLCPRVDQPGERDQRGPLRKNGPNYLRWALVEAAHTACRHPAYAPVRERMRERHGQKRGSKIAAIEIGRRLSEAIWHMLTNSQPFAPAGAAASLAT

SEQ ID NO: 443633 - protein, 420 aa, unidentified
MHVLTDKPFTACIGIDWADSKHDACLQAAGSEQREFTRFSHQVDSIEAWAHSMHQRFGGPIAVVLELSKGPIVYALQKYEFFVLFPVNPSMLAKYREAFIPSRAKDDPTDAELALDLLMRHPERFKELQPQSVEMRTLISLVEQRRRLVSDKIRFTNRLRNTLKQYYPQTLEWFDHIDTPIFCDFISRWPTLLQVKRARRSTLERFFHAHNMRFAHVLEARLRSIKDATALTLDEAVVTPHRLQALVLIDQLRVTLQAIQRFDDEIAALASKHADYPLFSALPGAGPHLAPRLLVAFGEQRERFRNAAELQKYSGIAPVTERSGKKHWVHWRWQCPTFLRQTFVEWAAQTINKSFWAGAFYSQQRAKGCSHQAALRALAFKWIRILYRCWATRTPYNEAKYLRALERRESPLLQQFAAPK

SEQ ID NO: 443634 - protein, 371 aa, unidentified
MKGTTYVGMDVHKKSIVVAMLRPEGVKPAEMEVPNDTSGVRRLIQALKREGEVLSCYEAGPCGFGLKRRLDAAGIGCVVIAPSLIPGRPGDRIKTDRRDSRKLAELFRAGLLTEVYPPTPEQEAVRDLTRCLGDAKQDLHRARQRLSKLLLRHDKTFADGHAWTGPHRRWVNDVSLELAGPVRITFDTYLLTIQQTEERVHFLEKEIGNIAQTEAYREAVGWLRCFRGIDTLSAMILLAEICDFDRFLAPRQLSAYLGLVPSEHSSSERIRRGAITRAGNSHARRILVEAAWHSRHKPGGGIGLRKRREGQPLWAIAIAQKAERRLNARFWKLTMAGKPSRKVVTALARELATFIWAMMRSGQLHKPSLAA

SEQ ID NO: 443635 - protein, 320 aa, unidentified
MQTPSALLNIGADVAKDTIVVACAEGGFPVREVANQRAAVLAFLKGLPAGCRIGVESTGTYHELFAEAAHQLGFVVFVLNPKDTHHYAKAVGLRGKTDRVDAQLIARMIAHEHVKLHAWTPPTAQQREIARLITRRATLISLRGAVEMSLHELGGFADELKALRRHFNQLIARLDLRAKALIEASPERKQNFARLCTISGVGPVVGTALVNTLERVPVKSADAFVAFTGLDPRPDDSGQHRGKRRLSKRGPAELRRLLYLAALSAVKTKPWKSLYERYRARGVPSTAALVILARRIARTAWSIYTYKTEFDPARLTRSLT

SEQ ID NO: 443636 - protein, 350 aa, unidentified
MVTIGADLHKRTHTVVAVDDNGRRLAERTVSATPAGHLELLTWARERFPERRWALEDCRHLSRRLERDLVVAGESVVRVPPKLMAGARRAGREPGKSDPIDALAVARAALREPDLPVARLDGPEREVRLLLDHRDDLVAERTRAQNRLRWHLHELTPGEEPVARGLDRRVVLDALEAHLSGMEGTVARIARDIVGRVRELTAVIDRLEREIEAVVRPLAPTLLALPGCGVLTAAKLVGETAGIDRFRSSSAFARHNGSAPVPVWSANSGRHRLSRTGNRQLNLALHRIAITQMRLEGKGRDYIAKRRAAGDTKTEAIRALRRHISDEVYRRMRHDDGLRAASQEPLALAA

SEQ ID NO: 443637 - protein, 347 aa, unidentified
MNSRKVAPVETKGKSWVNEDYDHYIALDWSEKIMAVARTTDPRRQPQAFERPSDIEELRQHILSLKGRKILTFEETTSAQWLYLELCDIVDRIIICDTFHNRLLVHGPKTDKIDAVKLCTLLCAGLLKEVFHSADTLYELRRLVSGYDDVVQAGVRLLNQHHALERAGGPTHRAGQFAPFVTDYLQQSIALYQKVKPEYEKKFEQLCRRHRLLRNLMELDGIWTIGAVKILAVVVDARRFPTAGHYLSYCGLVKHHKLSGGRYYGQRQGQYNRILKSVYKTAVAAALKGHNPFREYYDYLLSKSVAEHNARNAVARYLAKVSYGMLKSGEPYQPYRWRDEAPLAANT

SEQ ID NO: 443638 - protein, 365 aa, unidentified
MLYLGIDQHKRQLTVNLRSEDGSVILQRQVSTQWEKVHAFFADLAEKAKADGGFFAILEVCGMNPWLLDMLNQYGCREIVVIQPTERSKQKTDRRDAGELAHTLWVHRQQFLDGKHPLGLRRIQPPTAQEAADRQLTMLRARLTRKRTAVLNGIHKILARHNLEQACPTKKFQTKKVRRWLAEMELPALDRLELNLLLPQWEQLDEQLESVETKIAERAAIDEQAKLLESIPGIGHYSALAIGSRIGNIERFKHADSLANFFGLTPGCRNSGEATKRLGSITKRGSKMVRYLLNQAVIKVLRHDGAMRNWFKRIKKRRGAKIARVAVMRRLTTIIWHMLKKKQKYRYDSPIKKHKEFEAFEGSAA

SEQ ID NO: 443639 - protein, 358 aa, unidentified
MAGKVTETAVVGGVDTHKDLHVAAVVDQNNKVLGTQFFSTTRQGYRQMLAWMTSFGALKRIGVECTGTYGSGLLRYLQNAGLEVLEVTAPDRMERCKRGKSDTIDSECAAHAAFSGIRTVTPKTRNGMIESLRVLKTCRKTAISARRVALQIIHSNIISAPDELREQLRNMTRMQLIRTLGSWRTDASEYRNVTNVYRISLKSLARRYLELHDEIADLDVMIAAIVDELAPELIKRNAIGYESASQLLITAGDNPQRLRSESGFAALCGVSPVPVSSGKMNRYRLNRGGDRAANSALHIIAIGRLRTDDKTKEYVARRVAEGHTKMEAIRCLKRYISREVYTLLRNQNRQINSIPIMA

SEQ ID NO: 443640 - protein, 418 aa, unidentified
MRAIGRSIGLDVHRDFCEVAIADDGAVRSAGRVETTPERLELFAQSLSADDQVALEVTGGAWEIARILEPHVRRVIVVSADDTGIRQARAKTDRLDARTLAKLLAAGELDAVWMPDERCRVMRRRLARREQLVRSRSRAKNEIHAVLMRRLKGRPPVSDLFGVKGRKWLGELELPVEEAETVQAALRHIEFLDAEIAEVERLIAREALGSADARRLMTVPGVNVICAASFLAAIGDIRRFRSSRQLVAYLGLDPKVRQSGSEPARGGPISKRGSASARWALVEAAWSVVRQPGPLHAFYERIRARRGHGKAVVAAARKLAILFWCLLSRGEDYAHQQPSLTAKKLRLLEITAGAPTRKGQPSGVWATRERMRQAERELAQQAEASYTRTVRDWQAARPAKAEPAGPAKVGASVTPGHA

SEQ ID NO: 443641 - protein, 341 aa, unidentified
MGIVTVGIDLAKNVFALHGVDQSGKAVFIKPKVVRGQLLEMVAQLPPCLIGMEACSGAHHWAREFSRFGHTVKLMAPKFVAPYRMSGKRGKNDAADAAAICEAVTRPNMRFVPVKDVDQQAILCLHRTRQGFIEERTALYNRLRGLISEFGIVLPQKVERLRREIGAHLEALPGWANRCVGDLLAHADRLNERTEECDRAIAEAARQDARSRQLMQLPGIGPTTASALVASLGGGHDFKNGRQLAAWVGLVPGQYSSGGKARLGRITKAGDAYLRSLLVMGARSVLAGLGDKQDRFSRWARSLVERRGYWKAAVAIAAKNLRLSWAVMKYGDNFRLTAAIA

SEQ ID NO: 443642 - protein, 327 aa, unidentified
MRQAKSLTEKAKTTVAFDVCKAALDVHIRVDGKAFQVPNTYEGFDQIALVLADYDVSLVLMESTGGYEDASACYFQSVGYDVAVINPRHGRNFAMAMGKFAKTDRIDAAILADFAAVIDTRPDRARFIKPPTDEERKFLSQMVARRRQVVDLLSTEKQRLSHADDYAKQSINKVVAFIESQLAEINKDVSFYLKKNYSGLSKMLSEIPGIGELSVGLLVGDVPELGQIGNRQLSAVIGVAPFNHDSGKMRGKRCISGGRQNVRNVLFMGVMSATRYNPVIKAFYDRLINKGKPKRVAYIACVHKLLRIINAMVRDGTSFNPDLHAVS

SEQ ID NO: 443643 - protein, 348 aa, unidentified
MRTCCNPKEAEVKYSGIDLHSNNSVVVVSDEVDRVLVRRRVANDVAAILALLAAHREELVGVVVESTYNWYWLVDALQAAGYRVHLANTAAIKRYEGLKHSDDEDDAAYLAHLLRLGILPSGYICPPAARAVRDLARKRMQLVRSRTAQILSVENMLSRETGAGMRSRVVQRLTAQAVAGFGFNPEVERSMCANVAVIKTLNREIDKLEQRLHQCVRLRPEFGLLTSVPGIGPTLATLIMLEVGTIERFAAVGNFASYARCVDSARISNGKKKGQGNVKNGNAYLAWAFVEAANFAHRYCAEARRFYERKKARTNGVVATKALAHKLARACYHMLKENQPFDVKRCFA

SEQ ID NO: 443644 - protein, 341 aa, unidentified
MDYIGIDVHKTVSTVCVLDKEGNLKNELIDIPTSAKGLRRLLEIADPSDCRILFENSTRSHFVYHFLKDSGYDVTVAHSTDLIAIGRSKLKTDRIDARKLAEYAMRMDSGEVQFSVCNITDRENMVMKSLCRLNLTLVRMRSDMVRRVREYLSLQDIKMPAGYVSVKSARAIRFLEGLDDPVLRNMMTVIRDLNHRVRQTEDDIERMTVTDEDMKILTTFPGMGLKSAAVVISAIDGIERFDSPRKLVSFLGADPVTRESAGKRKKGHVSKDGDTLTRYTLHNVVIAHVYRYRDTELSNYFHRMRARMEHSKAVMAAVRKLICIIWAMLTFREPFRPFPQG

SEQ ID NO: 443645 - protein, 359 aa, unidentified
MNKNSMFFVGLDLGDKFSYITIVDQDGERIEESRLPTTKASFQRKFSTLQPCRIAMEVGAHSRWASHLLNNLGHDVLVANARKLRAIYHNPRKGDRVDAETLARLARLDPELLSPIHHRSTQAQADLAVLRSRDAIVRCRTLLINHTRDMVKASGSRLPSCSADSFAHKVAPDIPEPLRPALAPILDTIASLTQQIKSYDQKAEELCSEHYPETRLLRRISGVGPLTSLAFILTLENPDRFRRSREVGPAIGLVPRRDQSGDQDPQLRITKTGDVYLRRLLVGSAQYILGPFGPDCDLRRWGLKLAERGGKNAKKRAVVAVARKLSILLHRLWKTGEIYDPFYLAGKHDQTPEAVPAAA

SEQ ID NO: 443646 - protein, 455 aa, unidentified
MSNRSRRGLSRGDRRRNEKLARLREIIARETAVLAFDLAADKQVCALTDPDSRVLARRTARVRAWQLAQTLDWGLAAAAEAGFTSVVVACEPTGHRWRVLDQLAAERGVVLVCVQPLLVARAREAEDFTRNKNDDTDAMIIARLVTELRCYLPERADPAWARLRHLGARRARLVVEVGAARQQVRDLLECAWPAVLDAAGKPLDSANWLTVVATGLDRIGATGELSELGQRGWEDFAAAVRAELAPTRWYSAIVRAVFDAATDPAAAAVGVVDQRAGALERVRFALADLAHLRARIAEVETRMTRVLDTLGVTELVTGIPGVSAVGAATILAEAGDPTRFSSARALVKHAGLCPRANESGKDTGTTSISGRGRPELRLAAWRAVFTALQHNPVLAARHAHLTGRAENPLTDTQARIAIAASLLRQLHAVIVTRTAWDPAIAAGLDRREDGAACAA

SEQ ID NO: 443647 - protein, 417 aa, unidentified
MESLYTHCCGLDVHAKTVVACLLTPDQKQVRTFGTMSQDLLELADWLTAAGCTHVAIESTGVYWRPVYNLLEGRVHVILVNAHHVKAVPGRKTDVKDCQWLADLLQHGLLQASFIPPPPIRELRELTRHRESLVRDQAAVGNRIQKVLESGNIKLGQVVTDVLGVSGRQMIRALVAGERDPQVLAAMAKSRLRSKMDTLRLALEGRLTEAQRFVLGELLDTYEQLEAAVLRASEKIETLLYHQEPTLGKAVTLLESAPGVGHRVAQIVVSEIGIDMGQFPTDKQICNWAGICPGNNESAGKRRSGKTSNGNRYLRSALVQAAWTSRRVRDCSLSRLYQRLIRRMGKKKALIAVAHRLLIVLYHMLREGRLYEEREAPVMAERQRVKAGNRLVRRLESLGFRVTDETVEPVAVAPSTG

SEQ ID NO: 443648 - protein, 452 aa, unidentified
MSNASGVSRGDRNRNARLAKLRELVPAANAIVGIDLADRKQMVVVTDHDSKVIARRTFTCRAWDLGAALEWAAGRAGMAGFTGVTVACEPTGHRWRVLMQLAAEREMAMALVCVQPSQTTWARRAEDGTFDKTDDKDAVLIARLAAQLRCYVPEPGDETWARLRHLGTRREQLITEQISQVQQMRDLLECVWPAVLDVSRRPFLRQTWIAALSVVLERDGGDSARTLRLGAARFEQAVRREITRGGGQKPCLRLVRAVFAALSDPVGVVTHRRGALERVQFLLTDWKATGQRLSEVEVRMIGVLDELALTELVISIDGLSALGAAAILAQSGDLRRFTSARALVKHAGLAPREKLSGTFVGRTKLTGQGRPSLRLAAWRAIWPAMHHNSVYAARVTYLTTRESNKLKPVQAQAVIAATLLRHLHAVVTTGQAWDPNIATHGYRARRTQTMAA

SEQ ID NO: 443649 - protein, 372 aa, unidentified
MPDVISTAPADVRLWVALDVHKLSIVAATLPPTGGQPEVAQIETTRVAVRRFIDRLGGPEGLAVCYEAGPGGFDLLRVLTELGVACDVVAPSLIPVRAGDRVKTDRRDAKKLVRLYRGGQLSFVRPPSPETEGLRDLMRCRDDLRCARTAARHRVSKQLLRHGRIYRDGKSQWTLMHRAWIARQRLDDELAHAALAQMLIHLDGLDRQLDALERNLEQIARSERWAATVEILTRFRGISTRTALGLIAEIGDFARFGHPRELCAWLGIVPSEYSSGQQRHRGHITKTGNHHARRLLIEAAWSYRHRPRRPDRGPQPDARAWQAQVRLHRRYHHLTTERGKRSTVATVAVARELACFLWAAATDQPFALEAAA

SEQ ID NO: 443650 - protein, 429 aa, unidentified
MTKSPARDEVLYLRAAGVDVGKRFVVACVRTPDPRRAGRWLLETERFDTTAEAVRGLRDWLTDRAVEVLALEATSDYWRAVYYPLQDAGLNLMLVNPAHLRGIRGRKTDPSDAAFLARAAASGMVLASFVPERAIRELRELTRRRTEIRADRGREIQRLEKELEDSGLKLTSVLTDVTGVSSRRILTALVDGERDPAALAELAVSHARAKIPALTAALEGAFTDHHAFMCRHFLAQIDHLAGLVTELDTRIAELMRDRDQDLSNLDTVPGIGRTAAEIIISETGGDMAPFATAGRLASWIGVCPGMNESAGVNKSGHTRHGNANLKRILGTAAMAAIKQKTSYYAVYYRRLAARRGRQRALVAVMHKITIAIWHVLKRKVAHQDLGADYFTRRDPQRAMRQIVKQANALGMTVRFDPIPARRETAPITP

SEQ ID NO: 443651 - protein, 375 aa, unidentified
MEGAPMLDTTTFVGLDVHARSIKAVSLDVMTGEVRAATFGYDAGAVAEWVRSVDPRARCVYESGVTGFDLQKRLSGLGVDCVVGAVSKMIKPSADRRRKNDRNDAEFLARMLSVGNVVEVWVPDDECEAARDLTRALEDARDDLSRAKQRLSKFLLRHGLAFDERTPTGRRKGNWTRAHWSWIESIRFAEGADNDVLAYYVDAVRRAAEEKARLEGLVEAEARKPRWRRRVDSLRCLKGVDTATAADLVFEAGEFSRFRNARSFAAWVGLTPSEHSSGESDRRGAITKAGNKHLRKALVEAAWHYLTCSGRPKDLAKGQAPDRGARRHAAKGVRRLVERREALLARGVHGNKANVATARELACWVWAVGLMAEEA

SEQ ID NO: 443652 - protein, 317 aa, unidentified
MKQEGPYIGIDIAKAYLDLAEHLSGEPWRVANDEAGIRAIVTRLRELAPTLVVLEPTGGLELPLTAALAAAGLPVAVVNPRQVRDFAKATGRLAKTDRLDARVLAHFAHGVRPTPRPLPDTQTQELAALVTRRHQLVQMLTAEKNRLASTRPSLRQRVQAHIRWLKKELADTDKRLSNTIQDSPLWRTKQDLLQSVKDVGPVVSITLMAALPELGTMEHQQIAGLVGLAPLNRDSGLLRGKRRIWGGRARVRAALYMATLVATRHNPVIKAFYQRLLAAGKVKKVALTACMHKLLTILNAMVMHNRPWNHQWNLRRS

SEQ ID NO: 443653 - protein, 338 aa, unidentified
MAMYCGIDLHSRDCWLAILDDRLKVVREAKISNDLEAILDFLKPYREDLEGIAVESTFNWYWLVDGLSEAGYQMHLVNTWAVKQWEGLKYSDDRHDARWLAHLLALGILPEGYIYPKQERSVRDLLRRRAFLVRKRTSFLLAMRGAFECRTGLRTTSGEVKQWTAKDVEFYLDDPVEALGITCLLEPMKALDGQIRIIEKEALGRARLRDEFAPLLSVWGIGKVLALTMMYEVGEIARFRKVGNFASYCRLVKSARLSAGKRKGSGNARNGNPYLSWAFSEAAHFAVRYHPPAKKYFQRKRSKTNGIIAIRALAHKLARASYYVMKDQVDFDPERVFG

SEQ ID NO: 443654 - protein, 418 aa, unidentified
MQYAPTTVLPATPPGRVTAGIDWASTDHAVCVVDARGAVVCRFTVEHTAAGLTELLRRLAKAGAREVAIERGDGPVVDAVLNAGLTVVVISPNQLKNLRSRYGSAGNKDDRFDAYVLADTLRTDRARLRPLAPDSPATVTLRATVRARRDLVAHRVAVCNQLRAHLQRAFPGAVGLFADLDSPISLAFLTRFDCQDRADWLSPKRLAAWLTSVGYCGRKDPAVLHQRLTAAPRGAVGDTGAALAHTTRAFLAVLTNLVEQIKVLEAQIAEQLALHADNQIFTSLPRSGTVRAARLLAEIGDCRARFPDPESLICLAGVAPSTRQSGKHKAVTFRWAVDKQLRDAVCDFAADSRRANPWAAKLYNDATARGKDHPHATRILARAWLYIIWHCWHTNTAYDPTQHRALQRLLNQDQPSTA

SEQ ID NO: 443655 - protein, 438 aa, unidentified
MRDVGSRGRREWLHVVRRVRQHSAEFDLVTMERPTAESQLARITLRRGKSSGAEPHTKGVGRMSKIRFVGLDVHAETIAVAIAEPSGEVRSIGVIPNRLESIRKLIGKLRPASQLRVCYEAGPTGYILYWQLIALGVQCQVVAPALVPTKAGDRVKTDRRDAEKLARCHRAGDLTAVWVPDEAHEALRDLVRAREAAKTDQLRARQRLGKFLLRHGKAPAVKITPWTAKHMDWIKRQVHFDQQALEATLLDYVQEVDHAAARIERLEKSIDEAIATAPIEIRAVVEALQSLRGVAKMTAVTIVSEVGALSRFENARQLMGYSGLVPSEFSSGKTIRRGRITKTGNAHLRRVIIESSWSYRYRPWLGSELRRRQQNLPDDIKEIAWKAQHRLHSRYKKLAASGKNKPHIVTAIGRELLGFVWAIGVTTETQHRTNAAAA

SEQ ID NO: 443656 - protein, 371 aa, unidentified
MQQPDGVAGIDAHKQVFSVAVLDGRGGRCAVASFATSPEGLTDAVALLDSFDFAIGRIGVEGSAGLGRHVTQALITAGYDVREVQANRTAERRRRRRRHKTDREDAEAIARETLADPDLPPAGKQRRPDPAWEELVAVRNRRKSLIGQRVRLLNEAEAVLTGLPLTVRAALPQTSRVRPRLRALQQGVANSVQVTAADRVNLAWLVETAGDIARLDARVTELAKKIPPLLGRLGSTLTHEHGIAEVGAMDLLVEVGDPTRFATEAQFARWCGAAPVAVSSGEGDQAPTHHRLDLAGNRQVNSVLHLMHVTQVRGYPPARDYIDRKRAEHKTKREARRAHNRHLANVVIRRMWADHARRHTTNAQPPAAAAA

SEQ ID NO: 443657 - protein, 394 aa, unidentified
MIYVGIDIAKDKHDCFIVNSDGEILFDVFTIQNNMDGFEDLLFKIKSVEKNPDKVKVGLEATGHYSCNILGFLKNKGLSTIVINPLYTSLSRKSISLRKTKTDKVDARTIASMIMSDVSLKPYSDTLYHNEDLKSLTRYRFDKVAQRAKLKQSVSRLVNILFPELETLVATLHGKAVYELLSEFPSAQHIASANLKHLTHILDKASKGRFKRVTADEIRETARKSIGSYLPAKSLELKHTIKLIGELNTEIAEIETEIKKIMDAIDSPILSVPGIGQNLGAVIVAEIGDFSRFESPDKILAFAGCSPSTYQSGQLYSSHAKMEKRGSRYLRWALLNAAAYVCKWEPTFAAYLAKKRAEGKHYYVALSHAAKKLVRVLYHLETTGDTYHPTSILS

SEQ ID NO: 443658 - protein, 284 aa, unidentified
MAAASVITLGVDTHKDLHAAVTLDALGRHLGIASFPTDDAHHADLWQWVAGFGQLTQAGVEGTGSYGYRLAQFLTGRGITVFEVNRPDRAARRRRGKSDPVDAENAARAVLSGDATATPKTRTGPAGQLRALLVARRSATKSRTQAELQLRSLILELDDDQRAQLDRRRTDHLAAACATLTGADGISLALASLARRWQFLDTEVRANTAQVEAIVRQTAPRLLNQPGIGPITAAQLLATAGDNPDRLSSEAAFAALCGVSPVEQVAASTSSIISNSTRRVSSLR

SEQ ID NO: 443659 - protein, 410 aa, unidentified
MEVVYEWCCGLDIHKKSIVACLSLPGPRGMAATTVRTFGTMTADILALSDWLAEAGCTHVAMESTGVYWKPIWNLLEGSFTLLLVNPRHMKAVPGRKTDVTDAEWVASLLRHGLLTASYVPERPQRELRELTRYRTTLVRERTAEANRLQKTLEGANIKLASVATDILGLSGRQILAALVAGETDAAVLAQYAHGRLREKLPALTQALVSRFDTHQRFMVAQQLAHVDFVDAAIAQVSAEIAARMQPLDDLLERIDTIPGIGRYTAEALLAEIGTDMSRFPTAGHLASWAGMCPGSNESAGKQRSGKTRKGDAWLRALLVQVAHAAGRKRGTYLEAQYRRLAARRGKSRAAVAVGHSILVILYHVIRDGTVYDDLGPQYFIEREREGAERRLVRQLEGMGYTVTLEPHAA

SEQ ID NO: 443660 - protein, 343 aa, unidentified
MKEVSTIGLDLAKNVFQIHGVDASGEAVIRRQLRRRQVIAFFRKAPPCLVGMEACATSHYWARALQALGHEARIMPANYVKPYVKRNKNDAADAEAICEAVTRPTMRFVAVKSAEQQSLMMLHRTRSLLVRQHTMLVNAIRAHMAEFGIVAPVGRRGMAVLFSAISDPADERLPVPARPCLESLVAALMTVEREVASHERRIHSWHRSSETSRNLETIPGIGPIIATALVASVSDPSIFKSGRELAAWIGLVPKQNSTGGKERLGRISKQGDPYLRWLLVTGAMSVIRHGRKTGFANNPWLADLMQRKPTKVAAVALANKTARTAWAVLVTGETYCRPAVTGA

SEQ ID NO: 443661 - protein, 449 aa, unidentified
MKNQARMIKSQDGNKLAIVNPNAAGIDIADTEMQVCVPEDRDGENNRRFGSFTQDLNTIVDWLKDCRITTVAMEATGIYYLSLFLKLQDAGIDVLLANPQDVKNLSGRKTDAADAEWLMVLHRYGLLKPCYQPGNVARQIRNLTRQRSNLIRMAEKEVQYMQKAMEQMNIKLSTVISDITGLSGRKIITAILDGQRDTYALASLAESNCKASQEEIALSLEGTWDEDLLFMLKQSLDAYDFFLSQVSDCDTEIEKLLSLYGARIDSANAELVRCKRKKSRSKNAPKMDIENFAYQLWGVNVFEIPGLKDTAVMHLIGELGHDFIDKFESAEKFSSWCNLAPNNKISGGKILSSKIMKRKNPVGQIFRTAAAPLARDKGEMGNYYRRMKAKSGALQANVATAHKMAKIFYTMVKNKVAYDASKVGLNERELTERKIAKLERALTRLKNAS

SEQ ID NO: 443662 - protein, 441 aa, unidentified
MADKAVTTLEPVWAAFVALDWGSQKHAWILQPADGGEREEGYLDNTPEAVAVWAADLHRRFDGQPVAVALEQKRGSVVNLLLAYAHLVLFPVPAAMSASYRKTFVPSGAKDDPGDAGWILDLLLRHRDRLRRLEPDDANTRLLLMLVEDRRQLVDDKTRLALRLQDCLKQYFPQLARWFDVDTALVADLLKHWPDLQHLQRCHDGTLRIFFRKHHSGEDLTAKRIEAIRAAVPATHDAAVREACSLKARHLSESMAALREQITRLERRRDELVNSHPDAPIFGSFPGAGKATIPRLIAAFGTRRERYQSAFEVECDSGIAPVHVRSGKLDRVGMRRACQDFTRQTFHEFAGQTIPRCGWAKAFYQAHCHQPQQHHAAVRALAFKWIRILFRCWKNRQPYDEQLYLTSLRRRSGLLGPALAPVTGVKWTDVAGFSKLSGKNS

SEQ ID NO: 443663 - protein, 347 aa, unidentified
MLYVGLDLSRKRLDWHALLADGERLGAGACPPDSDGLAHLVHRLGAEQRPVLAAIESMSGARFVHDQLELAGWDVRIADAQRVKGLAPLACKTDRIDAWVLAELARRELVPEVWLPDPGVRAERERVRFRLFLVHKRTALKNRVHALLFQHGLRAPVDDLFGAGGRRFLARTRLPEPWHSTLAASLHLIDVLEEQIAGLERELRRHGAEHRYLPLLMTAPGIGWVLGSTIAAEIGDIARFATAAKLVGYTGLCPRVRQSGEVDRRGALSKHGPPYLRWALIEAAHNAIRSHPAYRARAERTRARLGQKRGGTIAALTVARSLAEAIWWMLTRNQPFAPAGATIPLTA

SEQ ID NO: 443664 - protein, 356 aa, unidentified
MGNKKYIGMDVHQASISIAVSDAAGKVLMECIIETKAATVLEFIHGQRGSLWVTFEEGTSAAWLYDLLKPHVAKVVVCDPRKNALLKAGTRNDRVDARKLSDLFRAGLVTPVYHGESGVRTLRELSRSYLTVSKDLTRVMNRLKGLFRSWAVPCGGQQVYSPRQRATWLEKLREAGVRRRAERLYEQLDFLMRIRKETRTEMLAESRKHPASKLLQQIPRLGPIRVALLIALLQTPHRFRTKRQLWGYCGLALQTRNSGEYQYKGGQLQHAKKPPALRGLNVNHNHDLKNIFKSAATRAGTCKDDPLGKFYQNLLATGMEPPMARLTLARKIAAIALTIWKKGERFDPAKLNQQAA

SEQ ID NO: 443665 - protein, 355 aa, unidentified
MNDAKYIGMDVHQATISVAVRDSRGNLVMEAILETKAETILQFIRGLRGSLYVAFEEGTWAAWLHDLLQPHVARVLASDPRKNALLKAGNKSDRIDARKLSELLYLNKLSPVYHGEQGIRTLKELARSYITITRDLTRVMSRLKAIYRGWGIPCAGQQVYAPRYRAEWLAKISEAGVRRRAELYYQQFDALAALRQGTRRELLAEARKHLAMRLLRQIPAIGPIRAALLIALIQTPNRFRTKRQLWAYCGLALRTYTSGEYRFVGGQLKRSKKVLAVRGLNINHNHDLKNIFKGAATRAAATAGPFQDFYQATVARGLKPHLARLTLARKIASITLLVWKKGARFDAEHLKQQAA

SEQ ID NO: 443666 - protein, 328 aa, unidentified
MAKEKFDVSFLRLSSKSNVVTPVHHVVRNTQNGIKAFLKGLPSDSVLVAEHTGVYGERLLKMCTEMNVKIAYVGGHVIHTYKSGPDRGKTDEQDCNVLREFGERFTDKLVYTTFPEEDIYELRQLSRQRTMLVEERKRIMTADKTEDCRPYRSEAVKRSMQHIVDLLDEEIKDMERDMLTVIRKHDKISNSYDIITSVNGVGLVTAVELIVKTRNFTTITTAKQYSAYAGTAPYEKSSGKMNQGAHVSKWGNRRSKTLLYICAECARMHNKEMKLYYERRTIIDKKAHHYVLNAIANKLLRLIFSLINKNEKYNPCYIQRDPRSININ

SEQ ID NO: 443667 - protein, 324 aa, unidentified
MIDGILGIDVSKNTLDVSIAICTKVRSKSFANSSDGWRLLLDWLIAQNIQRVHACLESTGRYSLGIAYALYEAGHVVSITNPAQIRDFARTKLGRNKTDGVDASHIREYCELFKPSPWEPPTQAHRRLGELQTIRSGIIAGLTEWKNRKNSGIVDVEAQALADATISHFTSQLGAVDEAITRTIDNDCDLRSKRDLLLSISGVGETLAGVVLAELPGPDVLRSSAEVVAYAGLNPRQYQSGTSVVRATRISKIGNAVLRAALYMPALSAMRYNPAIVALVTRLKSQGRLKPKQIVVAAMRKLLVLCFGVLKTRRPFDAAIAMGC

SEQ ID NO: 443668 - protein, 411 aa, unidentified
MVKENFIYVGIDLHKETHTAVMIDCYNQKLGEITFPNRPADFPKLVTKVKKCNTDAKEVVYGLENAYGYGRALAVWLIDKGYFVKDVNTAISHRQAKHRGAMYRKSDSDDAEAIALATLNMLDKLPDACPNDAYWSLGQLVHRRDNIMKQRTRLVNQLHEQLCIAYPSYKQFFNDISRPTALYFWEHYPSRKYLKGKSVEDLRAELVPVSHNKCSTKTCEKILDAVASDKVKNNAYQDARDMVTLSIVSDLQHYDSQLAEVDKMLEQMYKMLGCTLTTIPGVNVITAVKILAEIGDIKRFSNANKLAQFAGIAPLHLSSSGKGKDVATKQGNRRLQATIYFLAIQMVQVSSKGTPRNPVVRAYYEKRKAEGKTSQQALICISRRLISIIYGMLKYGTEYRMPVVENAGENR

SEQ ID NO: 443669 - protein, 423 aa, unidentified
MDIIYEQVAGLDVHKDTVVACVRIVAEGKTRRECRTFSTTTDQLVELRVWLEECRCTHVAMEATGVYWMPVFRILGEGVFELIVANAAHIKNVPGRKTDVNDATWIADLLACGLIKASFVPNEEIQEFRSLTRTRKQLVREQTRHVQRIEKTLVEANIKLNSVISDIMGASGRRMIEAMIKGVRQPRQLAELAGNGIKATPKELYDALHGRLTEHHRFLLDLHLKQWDGLDETIRKIDREIDQRIADTHTKGGSGEVPFRTLIELLSTVPGISTVSASAIVSEIGGDMSRFPTAGHLVSWCGLCPGNNESAGKRKPSRLRKGAPWLKTMLVQCAWAAKRKKDSYYRAQFFRLQSKRGPQKAICAVAASILTAVYHILKNGIEHHDLGASYFDRRPVELKAGRLVAHLKKLGFNVQLQPIPEAA

SEQ ID NO: 443670 - protein, 438 aa, unidentified
MSNKVFFNLDDLFISVGIDVGADFSWMSIALPNQQFVGKPYKILHNSIDSLTTAVSKIKEAEELYSLESRIFLESTGIYHYPLFCYLRDKGFNCSVINPIITKNSTNINIRKVHNDRFDSKKAALVGLKPDLKVSLMPSDLALNCRNLCREYYDLMDNRSAYVNKLQGELRMAFPQYLGIFSKVTINTSLTLLETYTSPSAFLKADKQEIIDIIKSTARFGLTYAQNKYNAIIQAATDANQFGYIIDSNIKRIRLYISFIRKYDEEINNILESLHELVDANEDADFVKQIRLIETFRGAGFLSAVSIMGEIGDFSAFSKPKQLFAYFGLDPAVKQSGKFEGTKVQMSKRGSAIARRVIHTLTLQCISISRNGEAKNPVLREYYLKKCDSKPKRVAMGAISHKVCNMIFAILRDNKPFKIIAPQEHIKQYNAAKCDIAA

SEQ ID NO: 443671 - protein, 387 aa, unidentified
MVQINDLSRSLAAFDPISTLVVVVEMSKASWLVSGVVPGVERQPLKKLEPDATALLRLIERWRNEAVRAGRPIRRIALAYEAGRDGFWLARWLIARGIEAHVIHSASVAVSRERKRAKTDRLDAAMLMRVFLGWLRGERGHCGMVAIPTMEEEDARRPNRERESLVNERSRIVNRMKSALARLGIRGFKPHLRKAPERLAGLRTAEGTGLPANIIEEFRRDMARLALVREQISSIEKTRAERLERAPDTGPHAMVRLLARVIGIGIETADMLVREILSRKLRDRRALARYAGLTGSPDESGLKSREKGLAKAGNARVRRGLIQLAWRFLMFQKDSALARWYRTRTEGPSGARKTTMIVALARKLLIALWRLVTTGEVPDGVELRPAA

SEQ ID NO: 443672 - protein, 420 aa, unidentified
MPAGKDITMHYQKVLKMPESIPYLSVGFDVGADFTWMSIMLPNGILIGKPFKIIHSDPQSRELAISKIKEAQEMYSLESRCFLESTGIYHIPLLCFLRDKGFDCAVINPIITKNSTNMNVRKLHNDKFDSKKAAKVGLDASLKASIVPDDAIIDLRNLVRDYYYFKDLQSAIVLKLHAELKVSFPAYLNVFSKVTTQTSLKLLEAYPLAADMLAAPKDELVETIRSTARFGETYALARYDAICTAAKDAAVFGRALPSNALRIRLYIKMYREYQAHLDSILEELHQAVGKLEGTPDYDRISFIQTLHGVGFLSAVVLIAEMGSFDLFSSPKKLYAYFGLDPGVNDSGKFHGDRVHMSKRGSSLARRILHMVAINNLKVDKATKTPVNPVIYDYYTRKCASKKKSVAVGAVMHKILSLIHI

SEQ ID NO: 443673 - protein, 338 aa, unidentified
MQTYAGIDLHSSNNFIGVINDKDKILYGKRHPNRLDDVLRALDPFKDSLQGVVVESTFNWYWLVDGLQEQGFSVHLANPSAIQQYEGLKFTDDQWDSVWLAHMYRLGILPEGYIYPKEHRAVRDLLRRRLLFVRHSTSHILSLQSMISRNLGFKMSNNEIRKLKSEDIDGLFACPNLVFMANNSLSAIKFLKKISLDIEKKVKSQVKMRQEFEKLRTIPGIGNILGLTIMLEVGDIGRFAKVGDYSSYSRCVESKRLSNGKKKGENNKRNGNKYLAWAYVEAAQFARRYCVKAQSFYQSKEAKTKPVVAIKALSNKLSKASYYIMRDQVAFDEEKLFG

SEQ ID NO: 443674 - protein, 412 aa, unidentified
MKADMEVVYERACGIDVHKKVIVVCLITGQRKAETKTFGTLTKNLREMVAWLKEERCQMVAMESTGSYWKPLYNIFELEGIEAIVVNAQHMKAIPGRKTDVNDAQWIAKLLRHGLLRASFIPDKEQREYRELTRYRNSRIEERAREINRLQKMLEGANIKLSSMVSNIIGQSGSNLIKLAVRHNELALDQVAGVRSERCKSSAQELLDSLTGIISPLQRELFTEVMQIIEEQTHQIERIETMIKKYTTESYDIAAKAIDEIPGIGRISAEQIIAEIGTDMSRFQTSKHLCSWAGICPGNNESAGKRKGGKTCKGNKTLKKTLVQCATSAIKNKESFFSAQYQRLVVRLGGKKAIVAVAHSMLIAIYHVLLGEAYCDLGGGYYTQFNREKKIQSYLNHLKKLGWQPPCPAVAS

SEQ ID NO: 443675 - protein, 364 aa, unidentified
MEQITRGECGGVVVRVGVDLAKRVIQVHAVDASGLLITGRALARERFIAWCSQLPAGCIVAMEASSSAHHWARKLCSLGLDARIIAAHLVKPYRKQGSGGKNDANDAAAICEAASRPSMHFVPIKSVEQQSILCVHRLREGVKEERTACINRIRGLLAEFGLVFAQSPKVLRLVLADVIEDASNEMGTLARLTLQRAHAQWRELDEHLAWCDERIAEHARINEQVKKGTTLLGVGPVTASAVVATVGDFRQFRNGAQFGAWIGLTPKQHSSGGKTRLGRITKRGDTYLRTLLIQAAKSAVLTAHRRPDRISKWLCALRERSGWQIAAVALANKNARILWALMTKGEAFDANHLSVKPGMSPQPT

SEQ ID NO: 443676 - protein, 344 aa, unidentified
MKIVGCDLHTRYQQIAMLDAETGELVERRLEHESGEARAFYAGLAGAVRVGIEATGHTRWFERMLGELGHELWIGDAAQIRASVVRKQKTDARDAAHLLDLLLSDRFPRIWRPSLEERDLRQLVWHRQKLVWMRNAVGNQLHALAMGEGVCRKKKLFTKKGRVELEGLKLGPWASHRRQELLTMMDQLDASMKELDQAVAKQAEQNQSATLLMTHPGVGPVTSLAFVLTLGPVERFERSKQVVSYLGLNPREHSSGGRQRLGAISKQGNPMMRSLLVEAGHTAARLDSELRQDYQRLKIRRGSGVAKVAIARKLAVRMYWMLRSPASYAQLVRMQGSPWATLVG

SEQ ID NO: 443677 - protein, 413 aa, unidentified
MFKIFRKNCCGLDVHKTWIYACIGITDANGRTVYKQARFSSFTKGLNELAEWLAKYNCKDVCLESSGKFWIPVFNILEKTCFVTLAHPKYTKPQKGNKTDRKDAKWICDLFMCDMIKPSFIPGLEIRQLRDLMRYRTKLTNMKTSEKNRALNCLTVSNLKLDDVFSDVFGKSSTSIIQYLLEHPGESFDVRPFIHAHCKTPVEEIQAAVEGAISVPQAIKLRQCLNHINEIEKHREEINLEIQALAEPFSPVLELLRTIPGLDTQPITAIAILSEIGPDMSVFPTSKHFISWAGCCPRNDRSARRTKSTRISRAGQSLKPLLVQIANALLRSKEHPEFKNRYRRIKANRGHKKAIIAICKMLLTAIWNVLSKVEPYSAKGYLEPKPAKEEKVLTQSQALDLLRKRGYTIIDSA

SEQ ID NO: 443678 - protein, 390 aa, unidentified
MRYFIGIDVAKFKHTACVIDTYGTVLVESFDFTNDIIGFQSLLKNIKPFLKKKHLVGMEDTGHYGDNLRNFLLEKQYKVVMLNPIVTSHIRKASNKAKNDRIDCFVIANTMMNPNFYRDQHAQSIDYATVRQLTRMHHTHTEEINRYKCQLQKSIDIVFPEFNSLLNTKYSKTYLEILDTYHSAYTIANTDIRLLRNTLKNVGVGRSVSISAEQLKKAAKESIGQHNLAIEMDIPFLISLIRRLTSILGEIDKKIEEFSHQLNSPILDISGISHFSAMSIISELGDITYFSSEKKLIKFAGVNPCVYESGTYSMTHTRLEKKGSKYLRKTLYQIIDVVIRFNPVFQAFYQKKISQGKSYRCAQGHCIRKLLRVIYKILSTGENFDSTKLK

SEQ ID NO: 443679 - protein, 391 aa, unidentified
MICVGIDVAKDKHDCFILNSEGVILADAFTIPNNLKGFQTLLDKLRDCSTPQDSIKVGLEATGHYSYNILGFLLDNGLATYVLNPLRTNLYRKSLSLRKTKTDRVDARTIAAMLLSDAGLKPYTDTAYHNEELKSLTRYRFDKVNERAQLKQSVSRLVCILFPELEKLVSSLHTASVYALLEEFPDARQIAAAHLTRLKTLLAEASRGRCGRDMAVEIRNAARCSVGSRMPAKSLELQHTIRLIRELDIEIEEIETAIQAIMDELHSPITTIPGIGCRMGAMILAEVGDFSRFDSPDKLLAYAGMSPSTYQSGQLKNCYPHMEKRGSRYLRYALYNAAKYVCLWDPAFAAYLAKKRAEGKHYNVALSHAAKKLVRLIFALEKSGQSYSPAI

SEQ ID NO: 443680 - protein, 318 aa, unidentified
MLNESFVGIDVSKDWLDVGWEPAQQSERLVHDEVAMVGLCERLVQERPCLIVLEATGGLETHLASALAAAGLPVAVVNPRQVRDYARACGRLAKTDRIDALVLAAFARAIRPQVRAPKDDETLELGALLARRRQLIDMRVQEKLRLERASPVQRDSIKEHIAWLTERIARLDTDLTHRLRNSSLWRDKEDLLKAIPGVGTITRVTLIALLPELGKLNRREIAALVGLAPFNRDSGQHRGERVIWGGRAQVRRVLYMASVAAIRSNPVIRAFYQRLRAQGKPGKVALVACMRKLLTIMNAMLKHNTPWNPNALDLEHSC

SEQ ID NO: 443681 - protein, 355 aa, unidentified
MITIGADVHLKTTTMTVINHDGTKITRRKINNDPDELVEFVRQFPGPKQFAMESCYTWPAVYELMNKEFDQFHLLHATKMKNIIESQSKCDKHDADEIALLTHRGYIPAAHTANAQTRQLRGLLRTRVGLARDIAGIKNHIQAILNANTFYSQRPKNFKDIFCKRGLAYLQSIHFPEQDQFTISQLFKQKEHLEQLKKQFDERIQALHADDPDLRILRTAPGMNGKVLNYIVLAEIDTIDRFRNSDALIAYAGLVARDKSSGDKQRKGRLRTACNQYLKWALIEAAVPAMLKDKALRDYYRKVKESYHGSAAKIAVARRLLRSIYHMLKEQRPYSSNGRPQITHMMTLSSASSAR

SEQ ID NO: 443682 - protein, 389 aa, unidentified
MPSVSERPEAPTAIQTHLAASFVSLELSRSIWLITSLSPASGEKMSKHSVRAGDVAALLARFSELKRKASERTGKSFPIVVIQEAGLDGFWLHRVLQSEGVESHVVDPSSIATSRRRRRAKTDRIDGEALLRALLAYKRGEPRVCAMVKAPRPEEEDRRRLCRERKVLIAERVKHVNRVKGLLFSQGISGYEPLRRDRRQRLDELTTGDGRPLPVHLKTQIRRELDRLELLLDQIKEAEAERDALLAAPQPAAPAPAGRMLLEFKGIGAELAAVLWLEALFRHFDNRRQLASYAGLAPTPWQSGSVDHEQGVSKAGNPRLRTSLIQLAWLWLRHQPQSALTLWFKERVSGNGGHFKKSTIVALARKLLVALWKYVTAGVVIDGAVMKDA

SEQ ID NO: 443683 - protein, 457 aa, unidentified
MSQTKRSRKSRGLFPVHPAAAAIDVGAALHVAAVGPDRDKEPVRTFRTFTDDLHRLADWFAQCGIRTIVMESTGVYWIPVFEILEQRGFEVMVVNARDAKHVPGRKTDVSDAQWLQRLHEYGLLRASFRPEAEIAGLRTYLRQRERLLDYAAAHIQHMQKALMQMNLQLHHVVSDITGVTGMTIIRAIVAGERDPNVLASHRDRRCHASVEMVCQALVGNYREEHVFALTQALELYEVYQTKVTACDEQIEAILKRLKKNAPPPASKLLPVRQRTHQPNAPAFDARGALHAILGVDLTQINGLGPYLALKLVGECGTNLAAWPTAKHFTSWLGLAPHNKISGGKVLSSKTRRTSNRAASLLRLAAGTVGRTDTALGAFYRRLSARVGKAKAITATARKIAVLFYNTLRHGMAYADPGATYYEDRYRQRVLNNLQRRAKSLGFVLREAGLDTARADVS

SEQ ID NO: 443684 - protein, 345 aa, unidentified
MVEIITIGLDIAKNVFQVHGVDAAGEVTVRRQLRRAEVLKFFAGLRPCLVGMEACGSAHHWARQVGELGHQVRLLPPAQVKPYVKRGKKNDAADAAAICEAVSRPHMQFVPVKSPESQAVLLLHRARDLLVRQRTMLINALRSHLAEFGISAGQGKGNFAKLVACLEGETGEALPALAVSVLRLLAAQIDDANAKIEELEKAIVARHRNGEASRRLATIPGIGPIIASAIAASVPDASVFKSGRQFAAWLGLVPRQNSTGGKERLGGITKAGDRYLRRLLVIGATGLIRYRRKNIPGGAEWVNGLLARKPVRLVTVALANKMARIAWAILSRGEIYREAAAARAV

SEQ ID NO: 443685 - protein, 342 aa, unidentified
MFYAALDVSLRSVAICIIDQDGKVRFERSVPSDVPDLVHCLHEFGEPIHQVGLEAGTLTQHLTYGLKEAGFDVVCMEARQVNAALSAMRNKTDKHDARGIAQILRSGWYSQVHVKSVESHYIRALLTSRKVMQRKCIDLENEIRGLLKVFGVKLPMRLSRGAFDAAVGDTIGNDPALSHALLPMLQARQMLLETFLELDRRVRRAAREDAICMRFMGIPGVGEITALSFKAAVDDPTRFKSSRTVGAHFGLTPRRFQSGEKDNPGRISHAGDTDVRATLYAAANAMLMRSIAWNSLKAWGVRLMKTKGRRRAIVAVARKIAVVLHRMWIDGTEFRFGSEASV

SEQ ID NO: 443686 - protein, 344 aa, unidentified
MVGIDIGKNSFHVVGLDRRGAIVLRQRWSRGQVEERFANMPRCLIGMEACVGAHHLARRLRALGHDARLMPPKYVRPYSKGQKNDFRDAEAIAEAVQRPTMRFVVTKTPDQLDLQSLHRVRERLVSQRTGVTNQIRAFLLDRGVAARQGLRFLRCQLPIILATRSDVLSPRMMRVIEELAGDWRRLDERIDGLSQEIEALARQDPACERLMTVPGIGPIISSAVVAAIGNGAVFTKGRDFGAWLGLVPKQISTGDRTILGAISRHGNRYLRALFVQAAWVVLVRIKDWDRYGLKAWIDAAKKRLHHNVLAIALANKLARIAWAVLNKERVFECVRTRATTSQPA

SEQ ID NO: 443687 - protein, 351 aa, unidentified
MKKTKTAANRKDLYAAVDLHGNNGFYCVIDEKDQAVFNKRLPNDLKTVTDALEPFRERLVKGIAVESTFNWYWLVDGLQDKGYTMQLVNTTKVQIYSGLKQSDDQSDAFHLAHLQRLNLLPTGYIFPRALRGARDMLRRRMLLVQQRTAQVLSFKSLVERDTGEGISTDRIKALDAEAVDQVLDSPESVLMGQANVRMIDSFGEEIGKLEKAAKARLKLLPDYERLKEIPGVGEILNLVIMLETGPIERFASAGNYTSYCRAVKSIKTSNDKKKGENNRKCGNKYLAWAWVEAANFAIRHDPKIKAWHQRKLHRCGGKPAVAIKALAAKLSKAAYYMLKNKETFKTEKLFG

SEQ ID NO: 443688 - protein, 385 aa, unidentified
MKKSTTAKMSRESKNQVKNNQVHELAAEQRLTIGIDLGDRTSRYCILDERGEIVSEERLATSKEGFNSLLEKMPRSRVALEAGTHSPWVSAQIASLGHEVIVANPHKLKLITQSAKKNDRIDAERLARLARVDAKLLSPIRHRGAEAQADLAVIRARAELMETRTALINSARGLAKPMGERLGKCEADQVKESLASGMRDEVREVIGPLLKSVEAISRQIAEYDKKIEKITGRYPETELLRQVHGVGPLIALTFILTLEDAQRFQQSRDVGPYLGLTPKQHDSGDSAPELRISKAGDGLLRSLLVQGAHCILRRNAPDSDLKAWGLGKQDNGGKKGGKTRKKKAVVAVARKLAVLLHRLWVTGEVYDPLYNRKSVQTARAQGKAA

SEQ ID NO: 443689 - protein, 397 aa, unidentified
MVHPDAAGIDIGNESHFVAVAPGRDTQPVREFGSWTSDLNCMAEWLKSCGIRTVAMQLTGLHWFAVYDVLEQHGLEVFLVNAHHTKNLPGRKTDVQESQWLLKLHTCGLLRNSFRPLEQIRKLRTIWRLRDRHVKEASRSIQHMQKALTSMNVHWQEDLLLELEQAVAAYDFVQKQLEECDRRLQTYLTAMPSRVMAENNGGDKPATPPAGERGTGGKKKKRIPSRNAPKSFNLAAELKRICGVDATRIEGVDVMTVQTIVAELGADLQSYWPSENHFASWLKLSPQRDISGGKVIRHTRETSRNRVAAMLRMAATTLLRSDSYLGARYRALRTKLGAAKAVKAMARHLACLIYRLFTKGQEWVDRGSQNFERKCEEREKAALQRKAAALGLKLVAA

SEQ ID NO: 443690 - protein, 357 aa, unidentified
MGQSNRISFKGQNIYVGIDVHLRSWSVTILSETSVLKRMSQGADPDALPRFLASHYPEAEYHSVYEAGFCGFWIHDRLTELGIHNIVVNPADVPTMGSEKLRKTDAVDSKKLAVSLRARQLKGICTPDSEALGIRSLIRLKNSITKDTTRQKNRIKSQLRYLGIEIPAEYLEPHSNWSKRFLNWLKEVDMRTPSGRHSLDILIMQFEALRKQKAEMTRKLRELSHTERFEETLKLLMSVPGIGQTTGLALISEIVDITRFANAEQLAAYVGMIPMCHSSGDHEGVGDITLRKHAILRSNIIEAAWVAIRKDEAMQLCYLNNCKRMVPSKAIVKVARKLVNRIYFVLKRRQPYVNAVA

SEQ ID NO: 443691 - protein, 307 aa, unidentified
MDVASDHLDVAVHGQPTVRRFANTIQGIAQLLRMVPPSSVLGLESTGRYHTQLAMAAHAAGLCVHVLNPLDARRYAQSVGQRGKTDRMDALVLARYICHEHAHLQQWQPPTACQAALRELLAHRATLVRQRSALAQAGCHNKALARLDEPVLAAMQQAIAQIDEQLASTVQADPASQEAFEYITSVPGLGLVCGSLLVMLFGRMQTRSADAVIAFTGLDPRPNDSGKKTGQRRLSKRGWPEIRRLMYTAAMSAARTKTWNSFYRAQRDKGLSTTAALVVLARKLLRVAFSLFKKRVKFDATLVAASA

SEQ ID NO: 443692 - protein, 400 aa, unidentified
MTIAVGIDVAKEVHWVTAVDEDGSTLVDRRVENEPAELERLLADLRALDGPRRIGVDLLGGVATLLCAMLLDAGETLVHVPGLAVNRAREGTAGGQSKSDPRDARVIADQVRTRSDLRAVELEAPALVQLQLLVARRRDLVAEQTRRLARLHELLASIHPGLERRLDLTIRAALELVRRYASPTELRAAGLATVRRQLRTVTKQSLADRLAQEALEAATAQHLAVPGEVHIAAMCHVLASEALDARTRIDALEAELADAVAQHPQGTLIRSLPGMGVTMTAEFLAEVGSLRRFRSPDALASAAGLAPVLRQSGRLRFLRRAARGDKVLKRVFYQSAFCSLRHATSRAFYERKRSEGKRHHQAVLALARRRVDVLWAMLRDERPFTLTPGASAQDSTCATH

SEQ ID NO: 443693 - protein, 323 aa, unidentified
MIGFIGIDLSKDWMDAQLAAGTERGVALDRLARDKKACKEMLKRAKELGITELHVAMEATGSYWQEIADHFFEAGVSVYVVNPARIKAQRRVTGKRTKTDRIDAGVILSFVRTHFHDLFRWSPPSEAVRRLQDLVRYREQVVKHRTAAKSLKKSKPLPELQSRIKKKIKDLNKEVAELEELIAFTIDSDEVLKRQFARADSVPGIGIVNGAILLSECRAFAEIRDPRQATAFAGLDVRQDSSGKYTGKSHISKQGSPLLRRAMVNAAASASQRANVFREFYLRRCKTLLKPQALTATARKLLEVTVAVVLSDVDFDKERNLAA

SEQ ID NO: 443694 - protein, 342 aa, unidentified
MEYYAGIDVSLECSSVCVVDGSGKIIREAVVATEPEALIGWFGSLGLELTRIGLEAGPQSQWLYTAMKRAGLAVELLETRHVRDAFKAMPVKSDRNDARGIAQLMRLGWFRPVHCKSIGAQEMRAVLTARKLIQSKLLDVENSLRGILRGFGLKVGKTTARSFAGRIQELVSGQPNLETIAEALLSVRAVLLREFNGFEKRVRAMARSDARTRLLMSTPAVGPIVALTYAAAIDDPARFKSSKQAGPHFGLTPRRYQSGETDYSGRISKIGDAAVREALYQAAHVMLTKPVKGCSQLKGWAMRIARRAGGSKAKVALARKLAVILHRMLANGTPFNPAAAAA

SEQ ID NO: 443695 - protein, 356 aa, unidentified
MSYDVKYIGMDVHQEAIVIAVLNDSGKLVMETILETKASSILQFIHGLRGELHVTWEEGTWAAWLYDLLQPQVQEVVVCNPRRNALLKEGSKCDKVDARKLAELLRTGMLRPVYHGENGLRTLRELGRSYQTLSKDLTRVMNRLKALYRGWGIPCAGTQVYAPRYREEWLSKIVQAGVRRRAELLYQQLDGLQALRRNLRPEFLAESRKHKAAKLLRQIPCIGPIRAARLIALMQTPHRFRSKRQLWTYSGLGIETHDSAQFRFVRGQLQRSKKPQQLRGLNRNHNHEMKEIFKSTATRASCGMGPFHDFYAALLAKGMKPEMARLTLARKIAAITLTLWKKGGRFDAEQLKTQAA

SEQ ID NO: 443696 - protein, 412 aa, unidentified
MQTLVERGCGLDVHQATVVACLLTVQSDGRVQKQIRTFGTTTRELVDLRDWLLAGGCTHLAMESTGVYWKPVYAVLEGELEIVVANAQHVKKVPGRKTDVKDAEWLADLLCHGLLRPSFVPPKAIRELRDLTRYRRKLVQSQAAERNRLLKLLESANIKLASVATDVFGVSGRLMLRALIEGKASPREVAELAKRKLRSKIPELELALEGRLEEHHRFLLKLQLDRLELVEKDLEVLEQRIQQKLEPYAAQLALLDEIPGVDWTLAAVLIAELGVDMSVFHNVSQMASWAGVCPGNNESAGKRKSSRIPKGNVYLKTALVEAAHSAAKAKGTYLRDKFYRLKARRGYKRAAVAIAHKILVAIYHMLSQQVSYNDLGDLYLDKLNKHHLTRNLVHRLERLGYTVTLSLQEEAA

SEQ ID NO: 443697 - protein, 365 aa, unidentified
MDKVIREGVVRVGVDLAKRVIQVHAVDAGGRVVTARALARDKFMAWCAQLTPGCVVAMEACSGAHHWARRLMAMGLQARLIAGHFVGPYRMEGRRGKNDANDAAAVCEAASRPSMRFVPVKTAEQQGILAVHRLREGYKEERTACINRIRGLLAEFGLVFAQSPEALRLALPDVLEDASTEMTWLARVALQRAQLQWVELDCHVAWCDERIAVHAKTDEQAKTAVQLCGIGPVTASALAASVGDFKQFKTGAQFGAWLGLVPSQNSSGGKASLGRITKRGDEYLRTLLIQGAKSAVMTAHKRRDRISQWLVQLTARVGWQKAAVALANKNARILWAVLARGRRFDPDHISVKPEGPAMAVPALAG

SEQ ID NO: 443698 - protein, 353 aa, unidentified
MAQSKEGREVILGVDTHLDAHVGVVIDGVGKVLGTLIAPAGLHGYQQLLQWSLSFGACTRAGVEGTGTYGTGLARVLRDAGIEVLEVNRADRSKRRLRGKSDPTDAENAARAVLSGEAKAIPKLQSGVVEAMRAITVARRSAVKAKTQAINQLRALLVTAPDPVRSKLMKSKPEHCVQACIQMRPLGTTPLPEALTRTLRILAKRWTVLAAELRELDAMLEALAGRAAHRLLERFGVGPYTAATLMVVAGDNPERLRNDAALAALCGASPLPASSGKTQRHRLNRGGSREANNALWTIAMVRMRSDARTRAYVVRRTAEGLSSKEIQRCLKRYIVRELYPLILADLRDSVATS

SEQ ID NO: 443699 - protein, 418 aa, unidentified
MNTGYALLVGLDWADQKHALCWRIAGAGKPRSTMLEHTPERINEWVSEQLAKQPGGRIAVCLEQKNGPVVHALMGYAEVDLYPVNPVTLAKYREAFCPSGAKDDPSDAALLLDLLERHREKLSVWRPDTEETRLLQRLCQDRRKAVDMRTKVCNSLRSKLKEYFPQALQLVGDDLTTEMCCAFLCKWPCFETVAKAQPNTLRKFYHRHNARNEAKIDERLKMIAGGRPLTTDRAVVESGIRWTRTLIPQIRTLNRAVEEYDQRIRQIFKDHPDAPIFNSLPGAGPQLAPRLLTTFGTDRDRFKTAGDIATLNGVAPVIERSGKQTWTHWRWHCPKFMRQSLVEFAGHSIGYSAWAKAYYDEQIGRGKKHNAAVRALAFKWVRIIFRCWQTQTTYDEAAYLNALKLHGSWIPETLRKTA

SEQ ID NO: 443700 - protein, 430 aa, unidentified
MSVDRSGGHEPLFAAFVGIDWADQKHVWSLQTADSQKRESGELEHAPEAVEVWVTQICQRFAQGPIAVALEQSRGALVFMLSKYERLHLFPVPSTMAGNMREALYPSGAKDDPRDADLLLDLLLKHRDKLRRLSPDTEATRRVQNLVEERRKLVDEKTEQINRLTSHLKIYFPQMLDWFDRLDREAACALLERWPTLEELQKVPPVKVRAFLCKHHCRDQGVIERRIVGIRQAVPAIRDRAVIEAKSAVVQVIAQLIRILVQGIGKLDRKIEEETAAHPDFFIFDSLPGAGPALAPRLLSAFGSQRARYGSAQEVQAYSGIAPVIERSGKKKWVHFRWAAPKFLRQSFHEWAGRSIAQSQWARAYYEQQRQRGKGHHAAVRALAFKWIRVAFRCWKNRVAYDESMYLATLARRASLQSGSTIPLSAAKTL

SEQ ID NO: 443701 - protein, 290 aa, unidentified
MFQNTPPGFQLFLEWLREITNNPWVCLEATGYYSEALAEFMCKQQIKVSIINPMRIKNFAKAILARNKNDPLDSRTILQYARVSTDLREYKPRPQAEKALKEIVKLIDLLTSQQSQLKNQLETIQSKLVKVELTRAIKVIHLRIERLEKQLRVLIEQDDHLKVRKNQYKSIQGVGEKTAYRLLAHLPDLSLYQSAKQLAAYAGLSPRQCQSGAYIGITKLSKFGSIQLRNCLYMSAVVAKNHNPHFREFCLRLEKNGLKPKQIVCAIMRKLLHVIFGMHKSGQVFDPKLV

SEQ ID NO: 443702 - protein, 368 aa, unidentified
MQMLAEIVDAVIGGDTHRDTHTLEICGPSGVPIATTTIRNDERGFARGLAWIADRAPGSRFVVALEGTRSYGLGLNRAAQAAGLTVIEVERPRRAGRRRGKSDPIDAHLAALYALRLPADRLPVPRAHGDREALRILLGARRELVTARTRQVNRLRALLLGGDETDRDLARGTLTDRRLSVLVRRRGRDRETREQAVRRAELRRLAIAIRLAVQELAANKDQLLSVVSVMAPRLLDLVGIGPVSAAQAIVSWSHEGRCRNDAAFAALAGACPLPASSGRVVRHRLNRGGDRQLNRALHDVILTRGRVCPRTHDYVQLRRAQGKSDNEIRRTPGLLTWEPAGVGIWASDVHFGVSNRRPSTLARAIIDA

SEQ ID NO: 443703 - protein, 323 aa, unidentified
MDTLGIDISKRDFHAALLHDDHIIAKKSFPNSDRGFAQLDAWLRNRQAGKISACMEATGAYYSALATHLFRAGHDVAVVNPKRIKAFAESELLRTKTDAVDAALIARFAATQPLVPWKPLPPEILELQGLARHLEFLKRSRVQHTLRSQTPGLPASVLRSTKKIIKEFDAQIAALKRQIKDHINRHPGLKAQSDLLDSIPGIGLTTAAGILAEAPNITEFRSGQAVAAYAGLSPQLHQSGTSVHRKTRLSKIGNARLRKVMYMPAVVAKKHNPTIKALSQRLAANGKVPMVIIGAIMRKLLVIAYGVLKSGKPYDPAFGLQIA

SEQ ID NO: 443704 - protein, 349 aa, unidentified
MKVTTFGLDLAKSVFQLHWVDTATGEVCRRRLRREQVLPFFANREPAVVAMEACGSAHYWGRQVRALGHEVKLIAAQLVRPFVPTNKTDAADARAIWEAVQRPQMRFVALKDEGQQSVLALHRMREQLVKARTMQSNQLRGLLYEFGVVLPVGRERALLVLPDKLEQLASRLPAMLLTMLERQQARLAELTKDIVAIELRLKGWAKTNAASRRLQDIPGVGLLTATAAVAMIGEAKHFRSGREFAACLGLVPRQSGTGGRVKLLGISKRGDVYLRTLLIHGARAVLNRRREPEPWLQKLLARRPPNVVAVALANKMARRIWALLAHGRTYEPGYVSTRPVRGQPVPQGH

SEQ ID NO: 443705 - protein, 428 aa, unidentified
MSSKQDRFRIAVLDDYQHAALSLDQMFARDWGDPSHSMQVFEGCAGWPVSSLMHRETGHGPAYHLRWLDVHKDTIAVAVAEAGKRRDVREYGRIANTPAALKTLAAKLAHGGRDLRFCYEAGPCGYGIQRQLSTAGHECVVVAPSLIPRKPGDRIKTDRRDSINLAKLHRAGELTPVWVPDQAHEAIRDLVRARLAAVRTLRTARQQLSGFLLRHGHHYNRPAWTLMHRRWLAGLRFEQAVHHIVLEDCLAAVEAATERRDRLEAHIVAALPDWSLAPVVRALQALRGMAMVAAATLVAELGDITRFDNPRQLMAYLGLVPSEHSSGKTRRLGGITKAGNGAARRMLIEAAWSYRFPARISRAQLLRQEDLAKPIRETAWKAQERLCRRYRKLVRAGKPPTLVTAAIGRELAGFVWAIAKLAQPTITR

SEQ ID NO: 443706 - protein, 341 aa, unidentified
MSKGLERSQATVFTGIDVSAATLAVAVQQAGRDGFRQKEFANSACGHKRLIAWLLECGGRVRVSLEATGTYSLDVALALDAAEGIEVAVLNPKTANQFAQTLRRSKTDAADAVALAEYSRRMEFVPWQRPSRGGLELRTLSRHIATLTEDHTRWGNRLHAVEASKTTPRCVLDDMKRARAAIAKRILKLRKEAVAMVGRDAQLMRKFEQLKSIKGIAETSAVQLLGELAGLDPEMTVRQWVAYSGLDPVHQVSGSSVHKPSRISRHGNSHLRRALYIPALAGVRHDPHMRVFYELLQSRHKTKLQALVAVARKLLHAIFGIFKTGTDYNGAKLFPYLIPTS

SEQ ID NO: 443707 - protein, 413 aa, unidentified
MEHKTITAVGIDVSKGKSTVAVRRPGGEVVLTPFQVEHDAAGLSGLVRTLQNLDGDIRIVMEHTGMYWRPIALALKEAGFFVSVVNAILIHDFSDNSLRKVKTDKADSMKIANYALSFWAELRDYSPEDETRQMLKMQNRLYLRTKKSSVVLRNGLISLLDQTFPGVNTLFDSQPKRSNGHFKWVDFVKRFWHKDCVAGVSLAAFLDAYRKWCTRSGYRFSQSDAERLHATARNSVATFPKNDSTKLLITQAVDSLNAVYDALYILRGEMLRLASLLPEFDVVMAMQGAGEVTGPQLMAEIGDVRRFTHKGALVAFAGMDAPPFQSGTFDSKSRRISKRGSPHLRKTLFMVASTILQHSDPANPIFQFMDKKRAEGKHFYVYTVAGAAKFLRIYYAKVKAHLMALDAGTSTAA

SEQ ID NO: 443708 - protein, 348 aa, unidentified
MEHVAIDLGSRESQVCVRAADGQILEERRVGTRSLGKYLAKRPKSRVVLEACAEAFPVADVSLAAGHETVVVPATLAPSLGVGDRGVKTDVRDARNLSEASCRMSKLPAVHVPTKVSRDRKALCGLREGMVQARTKLINTVRGWTRPQGLGVIRSGASTSFPLRAREHVKAHGGTMPSYVESVLKAIDELSLRIEEAEQVLKETAASDPTCKLLMTAPGVGPTTAVRFVAAIDNVSRFPNSHRLESYLGLTPGERSSSERKRRTALTKAGPSKLRWVLVQAALTARRCRKDHPMVLWSREVEKRRGKQVAVMALARKLAGVLFAMWRDGTPYDENHQNHSTCAPDVAA

SEQ ID NO: 443709 - protein, 426 aa, unidentified
MSIAQNMKICQVTEEKIIVGVDIASETHFARAFDWRGIELAKVFKFDSNAEGFARFDDWLQRLCAENQKTAVIVGAEPTGHYWFTFGEHLKKQKIKFVFVNPMHVKRTKEIDDNRAGKSDRKDPKTIAGLVIGGKYLEPYIPEDIYAELRVMNDNRVRITSELVAIENRVKRWFSIYFPEHKQVFGSWDCESSVIVLTVAPLPKDIIELEAEGVNALWRERKLRAVGMKRAKSLFETAKISVGVTSGENAARHTIAILLEDYLRKKEQLDHVLEILETLCIQIPFAEKLLNIKGIGLLTVATFFAEVGDIKRFKSPKQIQKLAGLAIAENSSGKYRGKTGISKRGRKRLRWALYQAIMSLLIHQPDFNALHKYYMHRTDDPLKSKQSKVALCCKLIRIFYAIANKGTDFDSKKMMDDIAKNLPLAA

SEQ ID NO: 443710 - protein, 326 aa, unidentified
MKTNLVVAFDVAKSKLDFAEIADSLKQQGCINNKISCIKKHLSQYDKDSVRIVFEPTGTYSDKLEHTLIEMGFVYNRINPTQSHHFACSIGVLNKTDRQAAFTLAQMGKALDLPIYQPASQSVKKRKGLLKALSNLETEQERYKNRLHAEVQLVQPDKDLISMYQDLIKIYKDKITELQKKLVDQEDAEFQATKKLGMTVCGIGEVNAVWLLTFTNGLENFDVDKRVVKFLGLAPGSHRSGSSINKKSGINKGCAGKIRGNLFMGAKSAIRYNPACKDLYHRLRGRGKNYYQAMVAVMAKMVKQFFAVIKSGIPFDKEYHLKYQKI

SEQ ID NO: 443711 - protein, 321 aa, unidentified
MTKSRNYIGIDISKLTFDVAILNEKEKYNHHKFSNDEDGFEKLIQFLNRESDVCVMEASGPYYLKLATYLSDNKISVSVVNPLVIRRFSQMRMSRTKTDKKDAKIIADYGRAETPDLWKPEEDYILELRQMQAYTEQLNKSRTGFLRQQEAFKQNPINAVAMNESLQNMIDTLERELAIIEFKMIELVSQHHQKLFEQLTSIPGIGRKTAMQLIVISGGFTKFENAKQLCSYIGLSPRIFESGTSVKGKSRICKMGMSRIRAMLYVCSWTAKKNNKACKELYDRLVERGKPKKLALIAVVNKLLKQAFTIATKNEYYLEIN

SEQ ID NO: 443712 - protein, 311 aa, unidentified
MPDDTIGIDISKATLDIHRLSDGKMMSFSNCPAGFKALSKFCAKTSVTRVVYEATGAYHSRLERALGAHLPLVKVNPLQARRFAQAQGMRAKTDAVDAKMLAVMGDAFVLKPDEPATKIQHDLRELRAFRSGLVKDRTRIMSRLKTQTLPITCRQSKTRLAQVDKNIAEVDTEVDRLINSNDTLANSMKILRSIPGIGAVCASTILIEMPEIGSMDRKQVACLTGVAPMTRQSGQWRGKSFIQGGRKVVRDALYMPALVAMRFNPDLKAKYQAMIKAGKPPKVALTALMRKLIELANALIKANRNWVKKAT

SEQ ID NO: 443713 - protein, 300 aa, unidentified
MVIAIRPSGERWTLANDGAGIQTLVQRVRGHAPTLIVLEATGGYERAAVAALAAAQLPVVVAPRQVRDFARATGQLAKTDRIDAAILALFAERVRPAPRALPDDAAQALDALLTRRRQVLEMLIAERNRLEHAVPAVRRGITQHIRWLERQLADVDRDLDDTIQASPVWRAKEDLLRSTPGVGPILSRTLIGELPELGTLPRKQIAALVGVAPLARDSGTLKHKRLVWGGRAPVRAALFMAALVGTRCNPVLRAFYRRLLAAGKPKKVALTACMRKLLTILNAMMRTNTTWRHVDPSRTT

SEQ ID NO: 443714 - protein, 383 aa, unidentified
MTIQVPRFIPRDYDVFGGLDVDKKSMSVVFTDHAGSQRALRMAHQVTPLVNYVRKHFAGQRVAFAYEAGPTGFGLHDELVRRAYTCVVVAPSKVPRAAGERVKTNRLDSRKLAESLRGGQLHSIHVPSAVYRNLRHLVQMRDTHVRQLTSSKLRIKSLLLYEGIAFPEEHEKWTARAMRELQTLPCSETVRFKLDDLLDTLHFHFQAAARATKQIRQYCLDDPELQQSIDLLLSLPGIGWIVGSHLVARLGNPQEIKNGRQIAGFLGIVSSEHSTGDKQNRGEITRSGDSRLRNKLIQSAWTAIKRDPELRAFYRRIYQRHPKKVAARKAIVAVARKLTNRIYVVLKEQRPYVIRPDSSIAPLTTEETVGPRERLDAAQNDQS

SEQ ID NO: 443715 - protein, 322 aa, unidentified
MIEEAVYVGVDVAKSVLDVAVTDSGETRQFVNDDEGISQAVHHIASVKPAGIILEATGNLEMSLAVALQAGRLPVAVINPRQVRDFARATGALAKTDTIDARILALFGARVKPEIRPLPNQKVREMRNLLTRRRQLIEMLTAEHNRVSQAGDGIRSCIETHIKWLETALSDINDVLDNQIRSSPSWLEKDNLLKSVPGVGKVVSSSLLIELPELGKLNRRKIAALVGVAPFNRDSGTMRGRRTVWGGRAKLRAVLYMAALVASQRNPIIAAFYQRLLNAGKAKKVALVACMRKLLTILNAMMRTMTVWQPEIILKRASVEAS

SEQ ID NO: 443716 - protein, 420 aa, unidentified
MQKNSLSRELSAGYSEGKLPRERVTGVLIMEKAWLGVDAGKESHWAHMLDASGTVLLSRKVENDEAQISKLIDDALLLAEEVVWAVDQPGGSVALLLALLWERNQRVLYVPGLTVDRARDAYRGESKTDARDARVIADQARMRSELSELRVGEQELAELQLLLARRRDLITDQSRTITRLREALLSLFPALERALDLNSKGPLTLLTHYQTPTHLRRAGHKRIATYLRNRNVKGSEKVAHKALSAARSQSVSLPAQEVASRIVAELAAQVLYLKERIESIDEEIGQRFFARPEARILISLPGMGPILGAEFLVAVGEISAFESADRLAAYAGLVPAANDSGKRVGNHKRMRGGNKTLKRVFYQSAFASLRGCAESRAFYDRKRSEGKRHTQALIALARRRVNVVWAMLRDGTTFEDRSTA

SEQ ID NO: 443717 - protein, 367 aa, unidentified
MKKVNTAAAKQSKNLSQQKLTIGLDLGDRNSWYCVVDEAGQIQLEQRVRTTAKALQEVFGTMPRSRIALEIGTHSPWISRLLSELGHEVIVANARKVRLIGESRKKDDRLDAQTLARLARIDPELLYPVKHRSAQAQADLTVIRARAGLVRARTALVNTARGLAKSYGERLRGCNVRNMNPEKAESSSPELQAALEPLLNAIESLSERIVEYNERIENLAQQSYPQVALLKQIKGVGTLIALTYMLTLEDPHRFQKSRDVGCYLGLQPGRRNSGRSEPQLHISKEGDPYLRTLMVQGAQHILGPFGIDCDLRRWGLRLAERGGKSGKKRAIVATARKLAVLLHHLWVSGEVYEPLHNSSRTIVAAAA

SEQ ID NO: 443718 - protein, 423 aa, unidentified
MEIMHERVAGLDVHKATIVACVRVGTGRKVTRECRTFDTTTDGLLALLAWLVECRCSHVAMEATGVYWMPVWKILSEGDFTLIVANAAHIKNVPGRKTDLNDAMWIADLLACGLIKASFVPEEDIQELRSLLRTRKQLVREQTRHVQRIQKTLAEANIKLDSVLSDIMGASGRRIIEAVIAGVRNPRQLAALASAQIKATPKQLYDALHGRLTDHHRFLLKLHLHQWDSLDATIREIDLEVEARIARMDKEVKAGEAPFCDLIGLLCTIPGVSTLSARTILSEIGRDMSRFPTAGHLVAWAGLCPGQNESAGKRKPARLRKGAPWLKTMLVQCAWAAKRKKDSYYKAQFFRLQSRRGPQKAICAVAASILTAIYHILKDGTEHHDLGADHFNRRSTEGQTKRLVAQLTKLGFEVQLQRTAQAA

SEQ ID NO: 443719 - protein, 403 aa, unidentified
MIFVGDDWAEEHHDVYLMGESGERLVSRRLPEGLTGIRQLHELIAAHAQEPTDVVVGTETDRGLWVGALTAAGYQVYAVNPLAAARYRDRHHVSGAKSDASDAKLLADLVRTDRHNHRPIAGDSADAEAIKVLARAHQSLIWSPTRHTNALRNALREYYPAALVAFDDLAHGDALGVLDRAPTPEQGAHLSRSAIHSALKRGGRQRNIDARAREVQAALGTDQLSASAPVATAFAATTRATVAIIAELNRQISELETGLAAHFETHPDADIYLSLPGLGVVLGARVLGEFGDDPNRYITAKSRKNYAGTSPLTVASGRKRAALARHVRNRRLYDAIDNWAFCALSVSPGARLFYDQHRAGGDLHHQALRALGNRLIGILHGCLHHHVPYNEHTAWAHRTPAAA

SEQ ID NO: 443720 - protein, 411 aa, unidentified
MLKIVYPICCGIDVHKTFVVACIASTNGKGVTTYQSKRFSTYTKNLRELSDWLSANNCMDVCMESTGKYWHPVWNVLELTCRPVLAHPKYLKAIRGKKTDKKDAKWIADVFKHDLVSGSFIPPNIIRQLRDLMRYRSKLTNYTTGEKNRAQNCLTTSNIQLDHAFSDVFGKSATAILNYLLKHPGENFDVAPFVDRRCKTPIEEIQLSIDGNISHEQAEKLKIIRSHMTSLDLCKQNLESAILTLAEPLLPQIELVSSVPGIKDFSAIAVIAEIGIDMSVFPTAKHLCSWAGLAPQCNESGGKKKSSRVSRAGVYIKPLLVQCTNAVVKSNKHPEIRNRYLSIKKRRGHKKAIIAIARMLLTAIFHILKKKEPYNPELYRQSDILPIDPVEQAVKILEKRGFVVSHTLDNP

SEQ ID NO: 443721 - protein, 359 aa, unidentified
MLAELVDAVVGIDTHRDTHQVEIALPTGAPIATCSITNDTRGYAQLLAFIVDHTPGPRLAVSIEGTRSYGVGVTRALGAAGLPIIEAEQPARKTRRGRGKSDPIDAHLAVQFALRLDADRLPTPRADGDRDALRILLGARHDLTMASTAQTNRLRALLRDGDGDRADTDRELARGALPEDTLTALARRRLPHDATRAQAVRHGEIRRLAIALRAAARALKANRAQLQSIVDELAPGLTDRHGIGPVSAAQAIVSFSHPGRCRNDAAFAALAGASPLEASSGRTVRHRLNRGGDRALNRALHTIALTRMASCPRTRAYVARRTAEGKTPREIRRCLKRYIARELYRTLTATMISTAEIGA

SEQ ID NO: 443722 - protein, 274 aa, unidentified
MIMSWVGIDVSKDRLDVHVAPVGEAWAVGRDDSGLAELVERLLGLEVVCIGIEATGGYETIVAAALGAAGLPVAVINPARIRHFAQAIGRRAKTDPIDAAVIARFVETLQPPVRALADEATLMLADLVARRRQIIAMIVAERQRLARASAQRLRKSIERLLAALQKELSDLDLAIGDAVKDSPLWHEHEQLLSSIPGIGPATARTLITELPELGQLDRHRIAALVGLAPWTRQSGQWQGKAMIGGGRASVRAALYMAALVANAIVRSKRPWQNT

SEQ ID NO: 443723 - protein, 343 aa, unidentified
MQVSTIGVDLAKNVFQVHGVDSAGKVVITRQLRRKQVIDFFSKIPPCLVGMEACGTAHHWAREVSKLGHTVRLMPPSYVRGYVKRSKNDAADAAAICEAVTRPSMRFVPIKSADQQALLMLHRTRDLLIRQRTQLTNALRAHLAEFGLVAETGREGLAQLAAIITDESNREALPSAMKQALQAIVDQLAALELQIGTLDRAIHAHHRANDMSCRLETVPGIGVIGATAIASTVTDPSDFKSGRDFAAWIGLVPRQHSTGGKERLGGISKQGDRYLRRLLVIGATAVVRHARQHPQKHPWVMRLLAKKPAKLVAVAVANKMARIAWAIMAKGGYYRAPELAAAA

SEQ ID NO: 443724 - protein, 265 aa, unidentified
MNTKTKQNINVGVDTGKYQLDIYIRPLDIYFTVPNDDKGIKEAVKTIKKYKPERIVIEATGRLEMPFISACANANLPFTIANPIHVKRFAGAIGQRAKTDKLDAQLIAHYSEAIKPKLSQLKPDTMQAMSDLVTRRNQLLTMQTMEKNRLQIMPKALAMTIKPVLTLFNNQIKKIEEKIVKLIESCPEYQAKNTILQSMTGIGKIAAASIISNLPELGYINSKQASSLIGVAPMNRESGRYKGHRKIQGGRPQVRTVLYLSLIHI

SEQ ID NO: 443725 - protein, 408 aa, unidentified
MKTLHKRCAGLDVHKAEVVACLRVVTNRKVGREVRRFPTTTQGLLALAEWLENAGCTHVAMEATGVYWKPVWHILEGHFVLILANAAHVKNVPGRKSDVNDATWLGDLLAHGLIRSSFVPPPEIQELRDLTRTRRQLTREIVQHVQRIQAVLEEANIKLCSVITDIMGASGRRMLKAMIAGETDAEKLAALGHERLGCTRAELVEVLTGCVREHHRFLLGQHLRTIEQLEDSIAAFDARIEGALSPFHDIVERLKEVPGLAATATETVIAEIGTNMSPFPTAGHLLSWAGFVPRLDESAGKRRSTRIRKGAPWLKPVLVQAAWGAARKKNSYFQAQFLRLKARHGAKKAAIAVAASILTTVYHMLRDGTCYQDLGPEYFTRRNPAKAAARLANRIRNLGYHVEIRAAA

SEQ ID NO: 443726 - protein, 344 aa, unidentified
MKLHTIGIDLGKTVFHLVGLDLRGEVVVRKKFSRTQLLRFTANVHVGLIGMEACGGSHFLGRALREQRHEVRLIPAQYVKPYVKTNKSDYIDAEAIAEAVARPTMRFVPIKTDDQLDMQSLHRVRERWVMRRTAVINQIRGLLLERGITLRKGRHHVDAALPLILEDADANLSGAVRLLLTQLKLDLDQLSVRIDEADAVIQKTAHENEACRRLVAIPGIGPVTATALIAAIGNGGAFHKGREFAAWMGVVPREHSTGGQQKLLGISKRGNSYLRRLFVQGARAVLQQRTKQSSGLSGLAQLTSRTHRNVAAVALANKLARIAWAVLAKNEQYRPSVVADVAAA

SEQ ID NO: 443727 - protein, 411 aa, unidentified
MLWGKRRDSCKIVASINLQLTELRMQKPHDNSKASPAAFVQDNTLIAVIELSLSNWLVAGLIPGVSREPLKKLEPNPEDLLKLLHGWRDEAIKAGRPITRIAVAYETGRDSFWLARWLRERGIDAHVIHATSVTVSREHRRAKTDRLDTARLKRGFLGWLRGERGHCTVAIVPTMEEEDAKRPHREREGLVHEQTRAVNRMKSALIQYGVRNFNPKLRKASVKLETVRTPEGKSLPPNTIAALRRDMERLKIIKEQIKAIEQARLQQFEQKPEALVNRMVYLLVRIYGLGLETADLLAHELLSRKLRDRKAVARYAGLTGSPDESGSKRREKGLSRSGNARVRKIMIQLAWRMVKFQPDSALVQWFKQRTESAKGSRKPMIVALARKLIIALWRYANDGVIPEGFRLHSAA

SEQ ID NO: 443728 - protein, 312 aa, unidentified
METKFVGIDVSKLTLDFDCLPVSVAQQFANDAVGIAALVALLQDSGVERIVIEATGGHETAVASALAIASLPVVVVNPKQVRDFAKAMGHFAKTDRLDAKVLALFGERIKPALRTIPDEAQRALADVLGRRTQLVVMRAQEKARLATVAAVARKNVEQHIAWLDKCIAKLDADLGNRLRKSPVWCNKATLLDSVPGVGEVTTFSLLAKLPELGTLNRQKISALVGLAPFSDDSGKRRGARYIRGGRAEVRCVLYMATLTAIQHNPPIKAMYERLTKAGKPFKLAMTACMRKLLTILNAMLKKNQTWKIQPSS

SEQ ID NO: 443729 - protein, 335 aa, unidentified
MEFEFFIGIDVSKNELDFAVMQGKSLLFHREMGNAPAAINDFLKELGKQPGFKMSSTVFCMEHTGIYSNHLLNCLHKKKARICLEAATQIRNSLGNIRGKNDKIDAIRIAWYAYKNREGLRLWEPKREAVRQLAHFTALRSRLVEAKKMLKTPLRETGPFLSKAIAKKNTMLCSSTLKAIDSDLKKTEKTIDTLIQADDELKRLFALVTSVSGIGKVTAAQIIMATNEFKDISSPKKFACYSGVAPFTKESGLFKGKARVSHMANKKVKTLLHLSAIAAIQHNTDLKLYYQRMVNQEKKNKMSIINAVRNKLILRIFACVNQNRIYENNYQKAVA

SEQ ID NO: 443730 - protein, 367 aa, unidentified
MGFDTSKLRNAVAIADAGRDGEVRFFGEIENTAEATAKLVRKLAGKYERLTFCYEAGPTGYGLYRQITGLGHGCNVVAPSLVPKKPGDRVKTNRRDAMSLAKLLRAGELTAVWVPDEGHEAMRDLTRARETAVNDLRAKRQQVLALLLRLGRHYPHKRKTWTKAHLNWLASQKFEYPQQRFVFEEMMLAVRQAQERLTRLEDAIRGAVPEWSLAEVATALMAMRGIDLISAATLLAEIGDLSRFRTPHELMAYLGLVPSEDSTGDTVRRGSITKAGNGRARRMLVECSWSYQHPPRVGAHKQHKVDAAPPAVREIAWKAQCRLHKRYRALIRRGKLKTVAITAVARELAGFIWAINREITTACGAAR

SEQ ID NO: 443731 - protein, 313 aa, unidentified
MDVPATVPTHFIGCDVGKSEIVVFDSRTERITRVRNDNAALVDFAAAIGPDALVICEATGGYEAALLDALVTAGRTVHRADARKVKAFIRSFGILGKSDTIDARALAQYGRERHDRLSRWQPRERQREQLHRLVSTRQELVHQRVACRNRLQAPGMADVQPRLKRILTALDAEIAGLEADIQALVDASDTLRKTIKILSGISGIGAITAAQLTALMPELGTLGRRQAAALAGLAPHPKQSGNNDGYRRTRGGRSDVKQALFMAALAATQHNPELRAFYQRLIANRKKPIVAIVAVMRKLIVIANAKLRDAAFI

SEQ ID NO: 443732 - protein, 315 aa, unidentified
MSQATFVGIDVSKGALEVHILPSGEHFSVNYDEAGLTTLIQKLKTLHQLQVILMEATGGYEKLLAAELCAAGLNKVCISNPRFIRDFARSTGKLAKTDKIDADMIARFAQVFNLEPQTIPSQAEEQLKALVSRRQQLNKIRAGENNRLKKANTTRVISSLKKIIKLLDRELEDLEQDIEQTIRQNPAWSAKEKSLRKIKGVGPVTACQLLATLPELGKLNRRQIASLAGLAPINRDSGQFRGIRMICGGRSAVRKALYMATLVATIYNPTIRKFYIRLLDKGKPKKLALTACMRKLLIILDSICKNDPVSICIQS

SEQ ID NO: 443733 - protein, 411 aa, unidentified
METIFPRCAGLDVHKAQVTACVRVSDAAGGREQQLAEFPTTVRGLVALRDWLEAHRVRQVAMEATGVYWKPVWAILEDAFELTLCNARHVKQVPGRKTDVSDAAWLCQLMEAGLLRASFVPPKPIRQLRTLTRYRKTQIAERQRGANRLHKTLEDTGIKLDCVATDILGVSGRAMLEALCRGTTDPSVLADLARGRLRAKLPQLREALEGRFDAHHALVVGAILAHLDFLDEQIERLSDAIGEALGPFAPAVELLCSIPGVQRRTAEVIVAEVGTDMSRFPTARHLASWAGQCPGNDQSAGKPRSGRTRKGSKWLGAALEEAALAATRTRTSSYLAAQYQRPRPRRGHGRAVGAVKHTIIVACWHMLTTGELYRDLGPDYFTRRDPDRQIRRLLAQLERLGQRVTSETATL

SEQ ID NO: 443734 - protein, 324 aa, unidentified
MIDGILGIDVCKNTLDVSISSYAKVRTKSFTNSPDGWRHLLDWLIAQKIQRVHACLESTGRYSLGIACALYEADHVVSIINPAQIRDFVRTKLGRNKTDGVDASHIREYCELFKPSPWAPPSEAHRRLGELQTIRSGIIAGLTEWKNRKNSGIVDAEAQALADATISHFTSQLGAVDKAIALTIDNDCDLQSKRDLLLSISGVGETLAGVVLAELPGPDVLRSSAEVVAYAGLNPRQHQSGTSIDRATRISKIGNAVLRAALYMPALSAMRYNSAIVALVTRLKSRGRLKPKQIVVAAMRKLLVLCFGVLKTGRPFDAAIAMGG

SEQ ID NO: 443735 - protein, 342 aa, unidentified
MKITTIGIDLAKTVFQIHGVDDHGKPVLRKKLDRSKMLVFFVKLQPCLIGMEACGSAHYWARKLVEMGHTVKLMAPQFVKPYVKTNKNDAADAEAICEAVTRSNMRFVPIKTDEQQAVLSLHRVRQSFVKVRTAQANQIRGLLSEFGVIIPQGRAHIAKRLPEIMEKSDLPGSFRELLQRLYDHLKELDKQVDEMDAKIQQWHRTSETSRKLAEIPGIGPITATALVASIGDAKSFKNGRQLAAWLGLVPRQHSSGGKSVLLGISKRGDTYLRTLLIHGARAVIRFAENKPANNWLNKLLDRRNKNVATVALANKNARIVWALLTRDEQRFRADYAPAVAGA

SEQ ID NO: 443736 - protein, 364 aa, unidentified
MKKVSRSSRATELKAKPSITVGLDLGDRRSHYCLLNEDGEVVEEGRIATTEAGIRQQFEGEPTQRVAMECGTHSPWISRLLKHLGHQVIVANARKLRAISQNESKNDRADAEMLARLAHSDPRLLAPLQHRSVERQRDLNLMRTRDTLVRARTMLVNAVRGLAKSAGGRLPACSTGYFIEHARPALPAELKKATAPLLNQITSLTRQIRRLDAEIEKLAEQYPEIALLRTTPGVGPLVAAAYVLTLDRADAVSTSRAVGAFLGLRPRQSQSGDSDPEHRISKTGNIYLRKLLVQSAHYILGRFGPDSALRRWGLCLAGAGGKRAKKRAVVAVARKLAVILNCMWRRGQPYQPFPEQKPAALAAA

SEQ ID NO: 443737 - protein, 421 aa, unidentified
MSNRTLSKKLASVKPGTLFVGVDLGLDRNVAVVLSEHARQLSRFRFPNDRDGYDYFYRRLETIQEQQQSPGVLVGMEPTNYIWKLLAADMEQQRPEYDYRLVNPYTVKKHREGDQLDRSKDDNRDAFTVGDLVSTGKYTETQLLHGSYAELRQCVTLYTRLGRSVRREKNHISNVVGQLFPELRRVFKDLGGQTALALLCNHAAAVTVRKISEETFIAGVRADFHGQRLQVAKLRRAHTLAKRSVGLSDGAKALQLALQLHVETLRVLQQQLERATKVMVDTFLALPESKYLLSVPGIGVVTAAIILSEIGDPGNYTRVRQLVKLAGTQPVPNISGRKTYSQTPMSRKGRPRLRTALFFAVLSLVRVDDAFAREYKHLQKREKNPLTKMQALGVLMNKLLRILWALMRNRTFYVSGFQGTA

SEQ ID NO: 443738 - protein, 353 aa, unidentified
MSNVTSLAVDLAKNCFQLHGTDSKGKAILKKKISREKFLEFIMQLNPCNIHMEACGTANYWGRKFKEHGHKVKLINPVYVKPYVKRNKNDANDAAGIAAAARDPDMRFCEVKTEAQQDMQSVHRIRSLLVQQRTALANQIRGLLAEYGIAIPQGTSQIRNKLPEILGMNPNDMGGLILGCLMELHERFIFLDQKIAYYDKKIEALFKNNEACQRLEKIPGIGILGATMLASILGNGAAFKNGRHFAAFLGLTPKQHSSGGKECILGISKGGDIYVRTLLIHGARSVLLYVNKKDDKQSRWLKNLMTRAGYNKTAVALANKMARISWAIIKEGCNYNVNHKPTFLKTACEFVDN

SEQ ID NO: 443739 - protein, 356 aa, unidentified
MTTQITKPDFTGQHLFIGIDVSKNSWKVCILTQHLEHKTFTQPPNPEVLVSYLQRHFPGATCHCAYEAGYCGFWIHDHLKALGVDCIVVNPADVPTIHKERTFKTDRIDARKLARALRNGELTPIYVPHRAALEDRSLVRTRYSLVRKQTRCKNQIKGLLSFYGVSLPQEPSTVNWSKRFIVWLEQLTMQSPNGTLALKALIQELKYLRQMIAESTKQIRTLANEPPYRSYTVFLITIPGLSTLAAMILLTELITLSRFRTLDQLSNYVGLAPGEYPGGEREITTGTSQRRNPVLRDLIIECAWVVVGKDPASVLAFNKLCTRMPKHEAIIRIPHKLLNRIRFVLKNQTPYVPAVV

SEQ ID NO: 443740 - protein, 321 aa, unidentified
MQSYHLGIDVAKAKLDCALRLADGKFKHKVVENNQKGFALLSDWLSKHDASGAHVCMEATGVYWEAVAEYLANRGMTVSVINPAQIKAFGTSRLVRTKTDKVDAKLIADFCFERHPAPWQAPSPSEQALRALVLRLDSLQTMKTQERNRLEVARDIVKADIVSHIAWLDKEIESLIKKIHDHLNNDPDMRNKQELLDSIPGLGERTIALLLAFSMHPGRFANARQAAAFAGLDPRQHESGSSVKGKPRMSKVGHSILRKALYMPAMVTLYKTAWGRAFRERLAASGKPPKLIICAMMRKLVQVAYGVLKSGNSFNPALQNA

SEQ ID NO: 443741 - protein, 356 aa, unidentified
MPTQVTKKIDFTGKQLFIGLDVHKKSWSVTILVDGTEHRTFTQPPDPDSLNSYLQRMFPGGAYNSAYEAGFCGYGIHRRLNQLGINNIVINAADIPTSQKDKLQKRDPVDSRKIARSLEKGSLHGIHIFDRELEELRSLNRTRFYLMRDLRRSKTRIKSFLQYYGELIPVEFDNNQWTLKFVSWLKQVKMQTKSGQDAFSNLISSYEYHRSQLLTLSRQIRERIREYDRELYTLLKSVSGIGPLTASALITELGNINRFKNIDQLGSYVGLIPRIRESGETTHTGGITFRCNSFLRTLLIESSWQAIRMDPALMQYYHAHLINNKGHKVVIKVARKLLNRIRYVMKNRQPYITGVA

SEQ ID NO: 443742 - protein, 347 aa, unidentified
MRDRNAAYVGCDVGDKFTQLCAVDRTGAVIQARRVRTEKTALLQALGKFRRARVVLEAGTHSRWVEEALSGAGHEVVVANPRQIQLIWGRRKKTDRSDAMLLARLGRVDLSLVAPVHQRSRAAQTDLAVLRSRDLLVSVRTKLINHVRGLLKQFGIRVESCSTAAFARRADESISADLRPALEPVLEALRTVTDKIALHDQQVERLFDASPPARRLMEIDGVGPITSLAYTLTIEDPAKFKKSRVVASFLGLVPAKDQSGESDPQKHISKAGNPFLRRLLVQCAQRVMGAFGPDCDLRRWGLGLCARGGSAAKKRAIVAVARKLAVIMHRVWVTGRPYDPNFCLQPA

SEQ ID NO: 443743 - protein, 335 aa, unidentified
MKNPTYYIGLDVHKKMTQSCVINEAGEVLLEKRFPTGKTGIDHLVKHLPEGDWKTALEASSCVYPTIDTLRDRGINVFMTHPTAVKWITNSMKKTDQQDAHKLAELLRLGALPQAYAPPREVRDLRNLARERIWYTNERTKFSNQILWRMNLLGVSIGHKIRSQKGTRELEQTNEGFLIRGSKVMTAINDSIKQVDKEIHEVFQNNPQAQKLATKPGIGEYSATLIVAEIGDINRFTHSKKLSAYAGLAPTVRQSGENTYIGHTRRRCNTQLKWIMIQCAHRAIQYDPKIREVYQRLAPRIGGKKAVVAVARKMLTHIYWMLKTQQPTVANVSSQ

SEQ ID NO: 443744 - protein, 336 aa, unidentified
MAKWKYFIGIDVASRSFTATIGGSPWQVLAKPEEFENTLDGFRAFLDWLTEQRVDQRRAVVCLEATGVYGEALAHFLVAEKLAVAIEPPLKVKRAFETSGPKTDAVDSMQIAEYAYRFADELRLWQPRGEILEQIQVLLAAREQFVRQRSMHKNALTALKRKVVQTPAANQAHQQSIEFLTKEIKSLESELRKLIDQDPDLRQRLMLLLSVPGVGLLLGAHLLLLTQHSQNPRKLAAHLGKAPHPHRSGTSVHGKTQSRHYGPSTPRKLLYLAACSLRQHHPMFEEYYLRKIAQGKAPRLVLNNIENRLLRIACAVLRDQRPFIPGYRPLSPLTGS

SEQ ID NO: 443745 - protein, 351 aa, unidentified
MKTNTLIETETQVRSRQLKLGVDWHADHFRVVRMCDGQSPQPAQRFTPASFLAFVQKQLTLAEQVFVIYEAGPGGYHLHRQLTALGVTTYVVHPVRLDPQHKGVVTDKTDARELALKLDRYLGGNRKAMSVVRVPTEAEEQRRALSRQREQLRRERQRLAAQGRSLGLTQGIRLQGEWWAQTLTLPAWLIPRLDVWRKLIAAVEEQLEALTKQVEALAPKVRPKGLGPLTLGTLLAEFCDWSRFKNRKQIGSYTGLCGGVSSSGQSHCDLSITKAGNARVRWTLIELAWRMVLYQPQSQAVQRWQHILLNPKAAARQKKRALVALARQLAVDLWRWQTGKVTPEQLGWVMV

SEQ ID NO: 443746 - protein, 471 aa, unidentified
MAIRVGIDVACRTAHRAACADASGQLLWRNVRFQTNAEDLELLWRRLPEGEKDITVVMEPTRNAWVPLAAWFRRHGATVIMVPPEQSADLRAYYNKHAKTDRLDAELLARLPALHPEGLHAEEGLGCAEPLRRAVKIRSNLVRRRVTCTQRLDALLELLGPEWIAALGTVMTATVLLFLSRWSDPHQVLRLGQRRLTDWLIRQSRGHWREAKAENILNAAKATLSLWGDDGMDFAALGADIATEAELALDLDRQIKALDQRIARHYDQADPQLIALSAPGVGPVLAAQIIGRLGDPQRFTSLAAVRSYSGLVPRQNSSGVVNAVGGPTKQGDACLREALFLAADQARRTDPTLAARYHRLMVENGKHHTSAVCSVAAVLLTRMAACLRKGEPYALHDVDGTAITAQQGRALVKARWCVPEEVRKARRSVQRSSPRGQLKAPKGGKRRGGSTESGVDTRSKMSTTPTPSCTN

SEQ ID NO: 443747 - protein, 349 aa, unidentified
MPKSNTAVATIGIDPGKNTLHLVGLDARGGIVLREKVARARIVSRLANVPPCLIGIEAGMGTHYVTRELLALGHDVRQVPPVYAKPFRQTHKNDFRDALAVAEAVQRPTTRCVPPKTDEQLDLQALHRVRHRLVGQRTAIINQIRCFLLEHGLTVRQRLHWLRHALPDILAQRTDVLSPRMVRILEDLAQDWRHLDDRIETVSGEIEELSKNTEPCRHLMTIPGIGPIISSAVVAAIGNGAAFTRGRDFAAWLGLVPKQISTGDRTILGRITKRGNRYLRMLFMQAARVVLLRPRNWMKNGYGPWLAAAALRLHHNVLATTLANKLARIAWSVLAQHRVYEARLSPAAV

SEQ ID NO: 443748 - protein, 474 aa, unidentified
MSSRRLVGIDLGIASAHTVRVLDEQGKTLAKRKAWPTEVSLSDVEKTALAGAPQGTVLEVVMEPTGPAWLPLAVFFSARGHRVYRVSSAKAADLRRFLSRHTKTNGIDADTLARLPIFDPEGLQPLVLPGVEQAALDRRVRATDRLTRAGAEHKRRIKDLVRQLLPMTPLTGDLGVADLAVLERYADPNALLRAGVKRLTSLIEKASYRHQGAERAQQWLEAARLSIELYAGHPAVAFADLAAEVATEVRLLRAIQAELATHAAAREEAYRWVDPLELARSLPGVAEIGGPALVAAIGDPTRFRTGKAFRSYTGLVPKASETGETDRKGQPMSKAGSSLLRTTLIRAADNARHVDPQLARIYYVQMVERGKDHLGALCVVAANLAERFWTVMNRQMPYVICDTNGHSVTAAEAKTIITENWTVPPEVRARRRSRKTTKAGKAPQTVPAGQPTRGDLPRPRSSTRPSASVNRRTA

SEQ ID NO: 443749 - protein, 320 aa, unidentified
MNHETLSVGIDVSRDDLVIAYADGLRPIEHIANTAAAIQRWLKSLPAGARIGLEATGAHHRLAAELAVAAGHVVYVLNPREVAHYLHSLRSRGKTDVLDACGIARFVLNEAGPCHPYVPPTALQRDITTLVQRRHQVMKNRTALRLSFSGISDCTKAVSQLLAAFDRLLADIDTRLQALVRQDEHLAAGRARLATISGIGPLVSTALAVRLSRINYATSDALVAALGLDPRPKESGQFKGRRHLSKRGNPEERRLICMAAICACRSAVWRPILEKLLAKGHPKTAAYCIIARKLLRIALAVWKSGKPYQPQLVGQAGLRL

SEQ ID NO: 443750 - protein, 319 aa, unidentified
MDVHKNSFSLCAYDGYTGEIVSESTFASDVKLVIKFIEKLKSRYENDVEIKCGYEAGCLGYSLYKSLTSRGVDCVILAPTTMQVSAKNKMVKNDRMDALNIAKNLASGSYKAVYVPDEEDVEIKEYIRMIHDFKKELKRVKQEIYAFVLRHGYQYDGKSKWTIRYMNWIRELEMSEIQRETLDEYLAEMDNLNDKIERFMNRIDEMYQSDRYNEKVSELRCFKGIDTFAAMTIQVETADFERFPNAKAYASYTGLTTGEHSSGDKNNRIGITKQGNTVIRKTLVECAQSLVKGNVYTPKSKRPKSRQKRYGCKYYCICG

SEQ ID NO: 443751 - protein, 341 aa, unidentified
MKNLFIGVDFSKEKVDVAIIFADGLTETAARVFNEFKTTVSGYKQLVKWVEQNSYGIDSSLWLFCGENTGDYSKGLCNFLYGKGYDMWLENAKSIKDSSGLRRLKSDRADASMIAEYAMRNYDRAIMYEPLSESLAQLRELFLYRQMVIRHRCSFQVRRGEKRLTMEKSPVKTMISQSGRHIVSELNKEVEKIDKRIAELIKSDEELTEVFTIVTSVPGIGTQNAVCLMVYTDNFRRFNYDSRKIACYYGIAPFGKDSGTSVHSDPRVHYMANRQIKAMLTQAALVAVNFNPVIARYYMRLVERGKKKQVALNNAKNKLVHLITAMVRNRQTFTPNYKISA

SEQ ID NO: 443752 - protein, 313 aa, unidentified
MSQNNLPILYVGLDIAKLSLELHLAGKSHPLSNDAKGHARLLKLLPADAMAHVVCEATGGYEQPIVRVLHTAGIAVSILEAGRVRHFASAQGKRAKTDPIDAAVLADYGRTFHPAAAVAPSAQQQQLADLGQRRRQLMQLLISERNHTEHYTDAFRLRQAKHLAKTLEKQIAQCDVAIAALIAQAPQLTHKANRLKAIPGVGPVVAATMLAEMPELGRLTSQTAAALAGVAPYNRDSGGQKGVRRIGGGRSAVRNALYMATLTAMRYDRILKEFYQRLRAAGKKPLVAMTACMRKLIILMNRLLKNDDFQLAN

SEQ ID NO: 443753 - protein, 366 aa, unidentified
MDAIYIGVDFHARQQTTCYLKTETGELVISELKHQDKEQVRAFYQQFPSPVIVGLEASGYSPWFEALLEQLGCEVWLGHATEIRRRARWRQKNDRRDAELIWDLMVHDEFPRLHRPAATSREVLRMLRYRQKLIKLRTMAKNSLQAIALQAGLAKGKQLFTAAGQEEFKRAALSPVLQWQREHWFALLRPLNQQLLETMVWFKAQSKDDLRIQRLRTHPGIGLLTALCLLHTLQPVERFRNPRKVAAYAGFDPVERSSAERQHFLGISKAGSRLLRYLLVEAVQTAVRYDEDLKRFYKRVAERRGRPKAKVAAARKLLIRAYIMMRDEIDYAEFRRRAVAVRLARGGQGPSNVPAVLIGQPASPGA

SEQ ID NO: 443754 - protein, 343 aa, unidentified
MQLFCLILKTKIMKFKEVIGIDVGKLSNEVIIHSNQRGNKFGNSTIGYKAMLKWVLQHVSCTKEELLFAFEHTGLYSFPLSVFLTENRISFVIIPGLEIKRSVGIQRGKNDKVDAKRIALYTYRRITEIKLYKLPSNTLIKIRRLLSLRDRLVIQRAGYIKNHKENTKFLEKSDNKLFFEVHEKMLEVLSSEISKLDNELDKLINEDTSLIKLFNLITSIKGVGKQTALFMLAFTNGFTLFDNWRKFASYAGTAPFPYQSGISINGRTKVNHLANKKFKALLNMCATSSIVCNPEMKAYFERRKAEGKNGMSTINIIRNKILARIFAVVNRGTPYVNTCKYAA

SEQ ID NO: 443755 - protein, 397 aa, unidentified
MYIVGIDIAKRKHEAAVIDGEGAVIIKPFSFTNNCSGYNRLLAMLTKAKLPLDEVSFAMEATGHYWLALFTRLQKEGFRVQVINPVQTNSIRSFYIRQAKTDPRDALLIAEVIRFGHFSESTLHPENIYELRELCRGRHAIVSMQADVKRKVVALLDQVFPEYETAFTNMFGDTSMAILQTCPTPKELSEMPLEELCHLIEVSSHKRFRMAKAQELQALARNSFGFAMAGDVFSTMIRLYAKHLDFLKQQVREMDCKIAEIMDTLDTPITTITGIGPTLGAYILSEIGDISRFSSAAKLAAYAGIDPTMRQSGEYNGVRNRMSKRGSPYLRHAIWLAASSAVLHDPALKLYFQKKRDEGKPYMASVGHACRKMVSIIYAVMRDNKAYTPCIPNEISA

SEQ ID NO: 443756 - protein, 368 aa, unidentified
MKQQTSATTETKIKGRNIIDFSGKTIWVGIDVHEKDLQVAKVLDGICLGNHRMAADSQALIGHLNSRYPGATFKGVYESCAWGFTLQRELSAAGMECIVVHAADVSSSDKEKKRKTDKVDALKLARNLANGDLTAIYVPDEDLQKERNLIRFRKKLVGDLNRSKNRLKSLLKYQGIKIPERLGKKNNWSYNFMNWVEEEANKDVLLKDTLLLMLDQIKSLRQLLFKTERALRKLMQTRYNEKAKLLMTAPGIGRTTAMLFLLEIGDIKRFGSFDALNDLVGFCPDTDSSGDTERDRGITSRRHKQLRSALIEAAWTAIRIDPALMDAYQKLLKRMKGHYAIVRIARKLLRRMRAMLLTGQSYQKGVIA

SEQ ID NO: 443757 - protein, 416 aa, unidentified
MNAAGIDVSSRKSTVAVLRPFGEVVKLPFDVRHNAGDLAALAKQLKSIEGETRVVMEHTGRYYESIAKVLHEAGLYVSAVNPLLIKEYGNNSLRKVKTDKADAMKIAKYALDNWTELRDYTPMDTIRYDLKTLNRQFQLASKQKTATANNLVALQEQSFPGIRKLFDSPVRSDGTQKWVDFTHDFWHVDCVRSCCQNAFTERYRKWCKRNRYQFSMEKAAEVYALAKSAVVLVQKTSITKTLVQEAASQLTAISRSVETYRSEMNKLASQLPEYPVVMEMFGVGESLGPQLMAEIGDVRRFERKQSLVAFAGIDPAPSESGDYCSRSNRTTKRGSPYLRKTLFNIMTVHLQRAPADEPVFQFLDKKRAEGKPYYVYMTAAGNKFLRRYYGKVMAYFSTLEGLPPVDMDSTGLHHAE

SEQ ID NO: 443758 - protein, 455 aa, unidentified
MAKKGKKNTPSPENMPILHPHAAGIDVGAEEHWVCVPADRDAQPVQKFSAFTCDLHRLADWLTACRITTVVMESTGVYWIPLFQILEARGFEVALVNARHVKNVPGRPKTDRFDCRWLQKLHTYGLLAPSFRPPADICQLRSLLRHRDNLLRMTVKHIQHMQKSLDQMNLHLHHVISDVTGVTGMRILRAIVAGERDPQTLAQYRDYRIQSSEDTIAKALEGDYRAEHVFTLTQSLALYDFTQQHIAACDQEIERVLATFDSLVDPEEHPLPPPTTAHRRPQRNEPAFDLPTHLYRITGVDLTQVPGLQAPTIHIVLAEVGLNMHKWPTDKHFASWLGLCPDNQISGGKVLSTGSRRVQNRASRALRMAAQSLRTSPSYLGAFHRRMRSKLGPAKATTATAHKLAKIIYHMLKEKAPYRARSAEDYLHKDHERQLRQLRKQAKYLGFDVVPQTNH

SEQ ID NO: 443759 - protein, 387 aa, unidentified
MPQPNDLSRSLFALEQDATLIAVIEMGQASWLVAGIVPGIERQPLKKLAADQEGLLQLLHRWRKEAVKAGRTIKRIVVAFEAGRDGFWLARWLRAHEIEAHVIHPSSVPVSREHRRAKTDRLDTELLKRAFLGWLRGEPNHCTMAAIPTIEDEDARRPSRERESFVRECTRIVNRVRANLARLGIRGFRPTLAHASERLETLRTPEGTAVPPNTLAELRRDMAHLRFVRQQIKEIEVARAERLERKPEEGRNPMVRLLARVVGVGIETADMLVQEVFSRKLRDRKAVARYGGLTGAPAESGKKRREQGLAKAGNARVRRGMIQLAWGHLLHQKDSVLAEWYRKRTADARGGTRKTMIVALARKLLIALWRLVTTGEVRAGLLLRPAT

SEQ ID NO: 443760 - protein, 377 aa, unidentified
MKRIKFVGLDVHAETIAAAIAEQDGEVRSLGVIANREESIRKLVKKLGPVEQLRFCYEAGPTGYVVYWQLTAMGAKCEVVAPTLVPVKSGERVKTDRRDALKLARNYRAGELTPVWVPDAAHEALRDLVRAREAAKKDQLRAKHRLGKFLLRHGRRPPTGVKPWSLNYLSWVKHEVHFEQLAQEATLLDYLHEVEHAEARIARLDRAIEEAVKLTPAKMRAVIEALQALRGVAQVTAVTIVAELGEVSRFTRARQLMGYSGIVAREHSSGESTRRGSITKTGNAHLRRVVVEAAWAYRHRPNVGETLRKRQEVVSEEVREIAWKAQHRLHMRYRKLTARGKNNGKVVTAIGRELLGFIWTIGVKAEAAQKESERRAA

SEQ ID NO: 443761 - protein, 347 aa, unidentified
MLHAGLDLSRRKLDVCLLSEEGVHLDQLAVAPDADSLRTLAGRIGEVHGEPVCAVIESMTGARIVHDTLEQEGWGVEIADAQKVKGLAPLACKTDKIDSKVLATLSHRDLVPAIWLPDPRVREERELARFRMHLVKHKSALKNRIHSTLINFGVPCPVTDLFGLEGRRLLERLQVPEPWRGNISASTALIDELEDQIEAINRRLRDGHADHPYIPLLMSAPGIGWVLAFTIAAEIGEIDRFASSTKLVGYTGLCPRVNQSGERDHRGPLTKHGPTYLRWAMLEATMHALRHPAYAARYERNKRRLGEQRGAKVAQIDIARKLTAAIWHMLNRNEEFAPRGADFRLAA

SEQ ID NO: 443762 - protein, 400 aa, unidentified
MKLIGIDIGKNKHFFCVMDQQTGEIISQPVSFSNDKEGFDFLVQKIKSYPKDSILIGMEDTGHYHFALLKYLLDLQYTVALINPKTTDFNRKIQGGITKNDKLDTINICDVLDTPERKKQYRITKVNSFDLYEQKQLTRHHHNLKEEENVYKNRLQKCIDIVFPEFNKLFNSKYGIVYMNILKMFGSAENIANTDIRTIRKCFEIEGRGNRISLTPERLKECARSSIGISSSAEVIQIKHLTAQIELIEEQLTEIDKKIEEFSIQNNSPILSIPGISHFSGTSILAELGDISNYSKPSQIIKFAGVAPLHYESSQFNAQHTAITKKGSKYLRKTLYQIILPVIRHNPVFNKYYQLKISQGKGHRCAQGHCVRKLIRIIYHLLKTNQQFLSLIHISEPTRP

SEQ ID NO: 443763 - protein, 372 aa, unidentified
MTSIIYVGMDVHTTNYTLCCYSMEDDRFFAEVQVEPDAKNILKYLARIEKQQSRDCRIVCGYEAGCLGYSLYHQLHAHGIDCVILAPTTMMTKPGKHIKTDRRDARLISKCLAFHTYSSVYIPTEVDNAVKEYIRMRDDANSALARVKQQIIAFCIRHGKIHDGKSYWTNKHLEWLSSLDLGNKILSEVLQEYLIRYYQLREQVDMYDMRINELAQAEPYRQKVEKLGCFRGIAAHTALSFCVEVGDFRRFATAQQFASYLGLVPGECSSGDKQQYTGITKAGNSHLRKLLVETAQVFGRSATKSGKSVALKERQAKCDSLTVAYADKANARLKKKYFKIAMRSKVNIAKTAVAREMACFIWGMMTDNISCA

SEQ ID NO: 443764 - protein, 315 aa, unidentified
MGTPVFVGIDISKKNLDIFLTPPDTSFTVPNTEAGVLKLVARLRRVTPQIILLEATGGYEFRVVAALREAELPACCINPRQVRDFARSLGILAKTDRIDARVLAHFAEKLRPEPRPLPEAQQQELKHLMARRRQLLEMILMEQNRLQISPFPRVQQSIQAALQALKEQLQQLDRDIDDFFRRYPVWLDQDQLLRSVPGIGPQTSLSIMAWLPELGHLNRREIAALVGVAPFNRDSGAWRGKRSIRGGRPQIRRSLYMATLAALRFNAVIRTFYQRLLLNGKAKKLALTAYMRKLLTILNAIMKNHQPWLPQEQTP

SEQ ID NO: 443765 - protein, 372 aa, unidentified
MNLMIYVGLDVHNESIAVSIASNDSTEVRRWGLLGGTHAHVQRLIKQLQSAHPGATLKFCYEAGPRGYPLGRFLRGLGQECIIVCPSRVPRRPGDRVKTDRRDADQLARLYRAGELVGIHVPEPEDEAMRDLLRSRYQVVRAQHRARQQLKMFLLRHNFRYSGKSSWTPAHLRYLARIKMPFPAQQFALQELMNGITEAGARLERYETQIAREVAGWRWEPAVRALMSLRGVALINAATLIAELGDLHRFTRPQELMSYLGLVPSEHSSGGDRQQGGITKMGNGYARRALVEAAHHYRAPARLTPHLQKRQEGLPKGVTDAAWEAQRRLHHRYRQLQAARKKAPVIITALARELSGFVWAIARQMKPHARKG

SEQ ID NO: 443766 - protein, 342 aa, unidentified
MKNMIIGVDLAKAVFQLHGAAPDGKPVFRKKLSRNQFLRFMSQYPDAVVAMEACGSAHYWARELVQLGHEVLLIPPQYVRPFVKRQKNDAADAEAIVIAARQPEMRFVLPKTEEQQSRAALFRARERLVHQRTELVNALRALLYEFGHVLPAGIRQLSRIDALLDSEDGALPLLVRDECRDLLEQIAEKTVRIDARTQKAQWLAERTGPAKRLQTMPGVGPITALAFEAFAPDMTSFRRGRDFAAWLGLVPRQHSSGGKERLGRITKAGQADIRRLLIIGAMSQLNRLGRSCIQKGSWLERMLAKKPRMLVAIALANKMARAIWAMMTKQEDYRIPTPTVAA

SEQ ID NO: 443767 - protein, 342 aa, unidentified
MNYKLISIDLAKNVFQVALLNQQNKLVSNKKVARKNLLHTLRQYQPTLVVMEACYSSNHWGRAIEKMGHTVKLIPARLVKAFLIGNKNDANDALAIAEAAQRPKIHFVRVKSIEQQDIQSLQRVRELLVKQRTANANQLRGLLAEYGVVMGKTKSDLMNSIPLALEDAQNELSSVARSFIQRLYFRQKQLEDEIKIITQQMVSCASQHEDYQLLSGIPGVGPIVASSIMGSINSISEFKNGRQLSAWLGLTPSQYSSGDNNRLGKITKRGNQTLRKLLIQGARAVINWCDKKDDPLSKWLQELKKRTHNCKLTVALANKLARIIWAVLTKGSPYSAELACAR

SEQ ID NO: 443768 - protein, 351 aa, unidentified
MWIIGVDYHPSVQQIAFVNTDTGECGERRLSHSDREAEKFYRGLKAEGCKVRVGMEATGYARWFERLLAELGFELWIGDPAKIKAKRVRKQKTDRLDAELLLQLLLEDRFPRVWVPSPENRDLRQLLWHRHRLVQMRTRITNQLQAVAMNEGVRRKKALWSKPGRAQLESLPLAPWAARRRQDLLELLDRLNPTIEELSAAVEQQVKHRPEVLRLMTHPGVGPITALAFVLIIDSAERFACGKQIASYVGLIPGEDSSSDRRRLGHITKQGNSLLRFLLVEAAQAVVRRDPDWRRRYTHLAMRRDKRIAKVAMARKLAVRLYWMMRKEWNYEQLKKFGSYAGESEHVHGVQ

SEQ ID NO: 443769 - protein, 346 aa, unidentified
MMIIGCDYHPSWQQICWVDTATGETEEKKLEHASGEAERFYRQLAAPALIGMESTGNCQWFVEMAAALGHEVWIGDAAKIRASEVRQQKHDRRDAALILKLLLEGRFPRIWTPSGQEKDLRQLLIHRHKLVRFRVQVKNELQHLAMNQGVTKKRKLWSAAGQKVLRELPLKPWASQRRKDLFRLMGMLDEPIVRLDEAVTQAAEQNPQARLLMTQPGVGPVTSLAYVLTMGDVSRFPRGKQVASYLGLIPREYSSGGHQRFGSISKQGNRFLRMLLVEAAQVAVRCDPQLRSEYLHRCHRKAKGVAKVAAARKLAIRLYWMLRTKKPYPEIVRIESSSRVPLVSAS

SEQ ID NO: 443770 - protein, 409 aa, unidentified
MRLLVGDDWAEDHHDVEVLDAAGRRLARARLPEGVAGIARLHAIIGELAGQDVEDEHVEVLVGIETDRGPWVAALVAAGYQVFAVNPLQAARYRERHTVSGAKSDTGDAHVLADMVRTDAHQLRPVAGDSAQAEAVKVVARTHKTLIWERTRHTQRLRHALREYFPAAVQAFEDLDAPDALELLAKAPDPASAARLTRAQIRAALKRARRRDIGAKTERIWAVLHAEHLGQPEVVTGADAASVRSLVAVLGALDQQIATLQRQVVAHFGRHPDAEILASQPGLGQILGARVLAEFGDDPTRYATAKARKNYAGTSPITRRSGKTKLVAARYIHNDRLIDALMTQAFAALSASPGARAYYDQLRARGAGHNAALRQLANRLVGILHGCLKTHTRYDEATAWSHHSKTLAA

SEQ ID NO: 443771 - protein, 357 aa, unidentified
MKRPKDKLFAGLDLHSNNVMIGIINQDGKRVAHRKLDCDLKQVTGFLEPLKPQLNSMAVESTFNWYWLVDGLREQKYSIDLANPAKIEQYSGLKHVDDEDDAFHLAELQRLKILPKAHVYDPKLRPVRDLLRRRSGLVHQRTGLLLSFKSLYARTTGQALDLSDAKKMEPKAAPKLYEHPANQLIAQVQAEHIQGLGKSISRIEKAVLASAREIPLYARLLSLPGIGRILGMTITMEVGDIRRFKTDGDLASYCRMVDARRLSNGKCKAENNQKCGNKYLSWAFVEAANFARRYDENCRRWYDRKAAKTSKVLATKALGCKLAKAAWHVMAKQCDYDAKRMFPELANKSVKKPMKKS

SEQ ID NO: 443772 - protein, 408 aa, unidentified
MNPLFVGIDVSSRNNVAYLMKPDGSKHSSFSVQNNLGGAKILSERIVSALESVPLSDLVIGLEATSIYGDSLVYALREDGSLGRFQRKIHVLNPKQVRKFKEAYPDLPKNDWVDAFVIADHLRFGRIAKEVYMDDYRYQALRTLTRSRFDIIQNLTREKQRFANYLFLKCSGIAQAKDIQNTSATTIALMERFETVDDLANADLDELTAFIAETGRGRFADPDAAAKAVQAAARGSYRLPKTVNDTVNQAMAVSIASMRALKEQVKVLDKAIEQQFEIIPNTLTSIPGIGKVYSAGIIAEIGDIHRFDSQASVAKFAGLVWTQHQSGEFEAEHSRMIKSGNRYLRYYLLEAANSVRRCDSEFRRYYDLKFKEVNKYQHKRALALTARKLVRLVFRLLKDNRLYIPPED

SEQ ID NO: 443773 - protein, 435 aa, unidentified
MMEAKVEILHERVAGLDVHKDSVVACVREMKSGRAAHECRSFDTTTAGLEALREWLVYSRCEVAAMEATGVYWMPIFKILGEAEFALIVANAAHVKGVKGRKTDINDATWIADLAAVGMIKASFVPDEPLHELRTLMRTRKQLVREHSGHVLRIQKTLTEANIRLDSVISDIMGVNGRRLIEAMIDGQRDPQKLVALTDRRLKASPKALYDALHGRLTDHHRFLLKLHLQQIDALTATIAGVDREAEARLKRLDEQIKPEPDEERPVNRGLSPLIDLLVTIPGVSNLSALTILSEIGPDMSRFATAGDLVAWAGLCPTQNESAGKRRRGRLRKGAPWLKTMLIQCAWAAKRAKNSYYRALFFRLSARRGPQKAICAVAASILTAIYHMILKGVPHVDLGVAYFDNRAPQAKANRLVKQLKSLGFEVQLQPIQKAA

SEQ ID NO: 443774 - protein, 342 aa, unidentified
MTAIGVDTHKATLAACAIDELGRVVGEATFGNDPAGHLAFIAWARSIEPEATIGIEGSSSFGAPLARAIHTTGLCVREVPPHLSRFERRRTRRPGKSDPGDALAIARVTAREPNLPPIRLPDRTSEIRLLLEAREDLIGETTRARNRLHAHLRVLLPGYGGKVANLVAARHRTMVRGLLRGNATVQGELARSLLDRLLRYERECGALTHRIEALVAGHPLLGLPGAGPITVARLVAEAGDMRRFRTPDAFAALAGVAPIPASSGQVQRMRLNRGGNRQLNRAMHVIAVTQSRFHPPAKAYVTRRIEADGKTWREAIRALKRQLVRPVFRLLVEGSEVRLEVA

SEQ ID NO: 443775 - protein, 354 aa, unidentified
MGIKYIGMDVHQATIVIAVLNETGKCVMETIIETKTSTIVDFISGLRGMLYVTLEEGTYAAWLHDVLSPRVEKVVVCDPRKNKLLPSGHKSDKVDARKLAEWLRSGQLSPVYQGRQSLRTLKELARSYRCLVEDSTRVMNRLKALFRGRGIACSGPAVYQARQREQWLQQLTQPGARRRADWLYQQLDQLQPLRKAAHQALLAESRRQAGQPILCQIPGLGPTRAALIQAIVETPHRFRSKRQFWTYVGLAVVTHSSAEYRMVEGQVRRSNKLVATRGLNRNHNRVLKEVFKSATTGAIQRDPVFKLLYFRLTEGGVAPEMARLTLTRKLAALTLALWKKGAHYDPEQLKAQAA

SEQ ID NO: 443776 - protein, 481 aa, unidentified
MSNRKMSTFERLQNGGPLNRQERRELQAKLNASDPGLQIVHPDAAGIDVGNASHFVAVPAGRDPQPVQEFGSWTADLQRMAAWLKSCGIRTVAMQSTGVYWIAVQEILEQAGFEVYLVNARGTKNLPGRKSDVQECQWLMKLHTYGLLRNSFRPPEEIRSVRTVWRLRDRLVKDAGRAIQQIQKALTVMNIRLAVAISDVSGVTGMAIVRAILKGQRDPHELAKLRDPRIRATEKEVASSLEGNWREDVLFELQQVVEGYDFLQRQIATCDERLQQYMAVLPARPMESEEVVEEPAKGSQQRRQSKPRSKNQPRFDLGSELRRVFGVDLTRIDGIKVMTAQVILAELGPDLSAFPSEGQFASWLELVPRRDISAGRVIKHLSRESKNRVADAFRMAAQSLSRSDSYLGARYRQLRGRLGGEKGVKAMAHYLARLTHRLLTKGQAYVDRGAAYFEKQRAERELTRLQRKAAELGMQLIPANA

SEQ ID NO: 443777 - protein, 370 aa, unidentified
MLDTTTFVGLDVHARSIKAVSLDVMTGEARCATFGYDAGAVAEWVRSVDPGARCVYESGVTGFDLQKRLSGLGVDCVVGAVSKMIKPSADRGRKNDRNDAEFLARMLSVGNVVEVWVPDDECEAARDLTRALEDARDDLSRSKQRLSKFLLRHGLVFDERTPTGRRKGNWTRAHWSWIESIRFAEGADNDVLAYYVDAVRRAAEEKARLEGLVEAEARKPRWRKRVDSLRCLKGVDTASAADLVFEAGEFSRFRNARSFAAWVGLTPSEHSSGESDRRGAITKAGNKHLRKTLVEAAWHYLTCSGRPKDLAKGQAPDRGARRHAAKGVRRLAERREALLARGVHGNKANVATARELACWVWAVGLMAEEA

SEQ ID NO: 443778 - protein, 387 aa, unidentified
MTVRTVTNLPAVTHGETVRCLFAIELSTMSWVVAFNTPLSEKISRHALTGCKWKRLLELIEEVRARVSREMGRAVEVVSCYEAGYDGFWLHRKLEAHGIRNYVIDPASLQVDRRARRVKTDRSDTDRLLRSLMAYLRGEPKVWSVVRVPSVAEEDARRLHRERDRLVSERVQHVNRIKGLCALQGIYDYNPLRPQAMARLEQLRTAQGGAFPPRLKSEIMRGLQRLEMVVEMIATLEAERNAIVENEASTHLNAKKIQTLHKLKAIGPEFAAVLVGEIFHRDFNNRRQVASYVGLAPSPFQSGNVAHDQGISKAGNRKGRTTGIELAWMWLRYQPESDLSVWYRARVGATKGRIRRIAIVALARKLLVALWRYLETGLVPRGAVLKG

SEQ ID NO: 443779 - protein, 347 aa, unidentified
MRFYTKQHRHYCGIDLHARSMYLCILDQDGTVLLHRNLHAKPDAFLKAVAPYREDLVAAVECIFTWYWLADLCRNQGIHFVLGHALYMKAIHGGKAKNDRIDALKIATLLRGGMIPQAYVYPPEMRSTRDLLRRRLHFRRKRSELLTHIQNTNSQYNLDQFEKKITYRSNRTGVSERFNDPHVHKSIEIDLELIAHYDDLLRKLEYFILRTAKQHDPNTIYRLRTVPGIGKILSLVILYEIHDINRFQRPQELASYARLVKCAKESAGKLHGTSGKKIGNVHLKWAFSEAAVGFLRYNPDGKKYYARLERKHGKGKALTVLAHKLARAVYYIWKRDEVFDQQKFMMT

SEQ ID NO: 443780 - protein, 328 aa, unidentified
MKNYQEVIGIDVSKNKLDAYAYNRCSHHEFSNDGKGYKALLKWANGKDQKVFFCFENTGHYSLKLALYLSSKKQVYVQENPVVIKRSSGMIREKNDVVDAMMIARYGWLHREELSASELKDNELLEVGRLLALRDQLVRSRTGLKNTLSELKKLLSSSSTDTCCKTLVGSISHLTSQINKIEKQLKTVVKTSERLSQNYKLITSLKGVGLIVGAQLLYHTNNFERFDNWRQFSSYCGTAPFGHSSGSSIHKKRKCHPMGDRQMKSLLSMAACTAIQYDSELRQYYKKKREEGKLKMIALNNVRNKLLSRVFAVVKRGTPYVELQKFAA

SEQ ID NO: 443781 - protein, 419 aa, unidentified
MTECNITASTPVLVAIDISKGRHEVLIEVPDKKRRRRVSVLNTLDEFERLINLLRSFQRPVRVAFEATGNYHRALAFQLGTAGFNIKLISSVALARTRDALHNSWDKNDPKDAQVILHMMTIGAEQFYHDPLLQGTNDIQELSKTHDMISRAKTELWHRILTHYLPLYFPEADRFHRSSRSDWFFAFLELFPSPHFIAALSKEAFIAAAWDVVGRKVGKERLLSDIYATSIRSIGLPVAPESDAIVMFRMVLAEGRSLIAQRNLIEARAVEMLKDNSDYKLLTTIPGIGPINALTILAEAGDLRRFNHHRQFLKFCGMDLATIQSGMFRGQTKLSKYGNARLRRTLWMAAQVAILQRPNSFHDKFERYITKDRHNTHLRRKALTAIAAKMARTVHAVIKSGETYRPFYEGAIHSGRTFL

SEQ ID NO: 443782 - protein, 417 aa, unidentified
MARISREEEEITMKVYIGIDWSENKHDICFLNETGEVLLVQEIAHTITGFRQLDQAREALGVGRQEVIIGLETAHNLLVDYLWEQGYEQIYVLPPAAVKSAQKRYRQSGAKDDAWDAHLIANLLRTDQRCYTVWQPDQPITRQIRAEVRFAQQLGQEVVRDGNRLRSLVLRYYPAALDAFPHLDSVVFLAFLQTYPTLSQAQALSFEQLQVFLRTHHHTQVRSWPTIYAGLHSNLPVSNPDLDAAYAPLAVAQARILETLIRSRNACLARLDKLFLLHPDYEIYDSLPKAGTLLAPALLAKLGDDRARYPTPAVLQAVAGTCPLTKRSGKHSYVLFRKACDRDFRHIVQQWAHLTLDVSPWAATYYRTVRPHCQTDNDAVRRLANRWLEILWRVWVDRKPYDEALHLKQHTLRNRTY

SEQ ID NO: 443783 - protein, 400 aa, unidentified
MNEFKPEASRIDTVAARLELPGQECYAAYVGLDVHKETIAVAVAEPGRQEPSSEGEIANRPKSVEKLVRRLSERFGGGVLQFVYEAGPCGYGLYHQLAGTGHICEVVAPSRIPKAPAERIKTDRRDALKLARLARSGDLTPVWVPGPEQEAMRDLTRARGDMKAQERKARQQLSAFVLRHGHAWPAGKKRWTQAHYTWLESLTFSHDWQQIVLQEYVDAVKAATRRVADLRAQMERALARWSLAPVVEALVALRGVDTLAAMVLLAELGDISRFDSPRQLMAFLGLVPSEHSSGGRRRQGGITLTGNGHARRMLVESAWSYRFPARQTKHLKRKAAPASEAAKGIAWQAQKRLCGRYRDLIQAGKNSKLVCVAIARELAGFIWAIVREEMPKVRGAANAV

SEQ ID NO: 443784 - protein, 407 aa, unidentified
MPYTVGLDWAQDDHAVCVIDEQAQVHLRCTVVHSASGLADLIQQLRRVAGPAALPIAVERPSGLLIDTLVEAGFPVVPIHPNALKASRPRYSAAQGKSDPGDAFILADLLRTDGHRFRPLHPLSDDTRALRALARSRDDLVVQRVALANQLRALLESFWPGAAAIFADVDSPIALAFLARYPTPASAAHLGEKRLAAFLARHAYCGRRPAAELLDRLRAAPAGLAGPAECEAKGELVRTLAAVLEPLVTQLQQLTASLEHAVAQHPDGPIIMSFPRAGRVNAAQILAELGDDRARFTHPDQLAAEAGVAPVTYESGKHRGVGYRWACNKRLRRAVTCFADNSRHASPWSAQVYRRARDRGCDHPHAVRILGRAWLRVLWRCWQDRKPYDPAAHRRARPLLLAADHAA

SEQ ID NO: 443785 - protein, 416 aa, unidentified
MNAAGIDVSSRKSTVAILRPFGEVVKLPFDVRHNTEDLAALAAQLKSIDGETRVVMEHTGRYYESIAKVLHEAGLYVSAVNPLLIKAYGNNSLRKVKTDKADAMKIAKYALDNWGELRDYTPMDTIRYNLKTLNRQFQLASKQKTATANNLIALQEQSFPGIRKLFDSPVRSDGTQKWVDFTHDFWHVDCVSNGSQNAFTERYRKWCKRNRYQFSMEKAAEVYALAKSAVVLGQKTSVTKTLVQEAANQLTAISRSVETYRSEMNKLASQLPEYPVVMEMYGVGESLGPQLMAEIGDVRRFERKQSLVAFAGIDPAPSESGDYCSRSNRTTKRGSPYLRRTLFNIMTVHLQRAPADEPVFQFMDKKRSEGKPYYVYMTAAGNKFLRCYYGKVMAYFSTLEGLSPVDMDSTGLHHAE

SEQ ID NO: 443786 - protein, 321 aa, unidentified
MNKNTIFVGIDISKDVFDVYSPEEGHRQFTNNAFGFKSFVKTLTPSHWCIMEATACYHYQLSLYIFEKGHRVSVMNPLIIKRYIQMKLNQVKTDKSDAKMICQYGQEQSLGLWHPDPEYVEECKMLQTVTQLYFKQTTAIKNKLHSLGSKGHTKGLMVRSLKRQLKQLQKEINLLETQMELLIKTHEPELFTIIKSIPGIGKKTAMLLIITTNSFKDFESCKQISSFLGLAPNERSSGSSVRGRSRISKTGNPIVRNHLFLCSFTASVHNPQCKALYERIVAKGKSKKLALIAVCNKLIKQAYGISKSRMPYDKNYVSKLN

SEQ ID NO: 443787 - protein, 442 aa, unidentified
MDLLHTHGAGLDVHKNSVVAHARITDAKGRVTRHTRTFGTLTADLLNLAAWLLSLEITHVAMESTGEYWKPIYNILEGSFTLLVVNAQHIKNVPGRKTDVKDAEWIADLLCHGLVRGSFIPPQPQRDLRDLTRQRTNLVRDRATVVNRLQKVLEWANIKLASVVSDVVGLSAREMLAAIVDGVSDVTALAELARGRMREKRAVLEQALAGRVRDHHRFVLASHLEQIDFLDAQIASFDAKIVESVAEQAPPSPPAATTDTPPVPESWSADDADQLSWEAAIQIWDSVPGIGRRLAEQLVAEIGPQMRQFPSAEHLASWAKVAPGNRESAGKRLSGKTGKGNRWLRTSLVQAAHSAVKAKSSALALYYRRLAKRMSGKKAMLAVAHKILTIGYTLLSKGEMYSEPDLSARSVRQTEQLAAQMQRRLERLGYTVRLEPPAAVAA

SEQ ID NO: 443788 - protein, 453 aa, unidentified
MNRKPSPALAQLPVLNLNAAGLDIGSAEIWAAVPPDRDPQPVRVFGTFTPDLLALADWLKACRIETVVMESTGVYWIPIFEILEARGFQVQVVNARHVKNVPGRKSDEKDCQWLQRLHTYGLLSGSFRPDGEMCALRAYLRHRASLLEHRAAHIQHMQKALLQMNVQLTQVLSDITGETGLAIIRRIVSGDRDPVHLAQLRDPRCQHREDEIAKALTGNYRPEHVFALKQALELYDAYTDQVRECDRELEQQFSGLKPRHDQAALPPLDLSDKRDSHSKNAPDYDARTLLYRWVGVDLCAIPGMNESTVQQALTETGSDMSPWRTDKHFCAWLRLAPANDISGGRVLRSRTLKTHNRATQAFRLAAQAASRSRHSAFGTYYRRMRARLGPEKAMTALAHKIARTYYHMLKHRVPFREVSAEEDEKKASERELAHLQKKAARLGLTLVPRAVEA

SEQ ID NO: 443789 - protein, 349 aa, unidentified
MTTVPSRPVAVIGGVDTHADIHVAAACDHLGTVLGTESFPTTPLGYRRLLAFLVSFGPLESVGVEGTGSYGSGLARHLAEAGVAVIEVNRPNRQVRRRHGKSDTVDAIAAARAVISGQATTAPKAHDGAVEALRALQIVHRSARKSRTQALNQLHALIVTAPEPIRAQLRGLPRPQLLATCQAYRPGTGDDLVSVTKYALRRLAIRILELTAESAEVSKRRRRLLAQHAPELMAIIGVGPDTATALMLVAGDNPDRLSSPAAFAALLGASPIQASSGKTRRMRLNRGGDRQGNSALWHIVISRMASQPATKAYVERRTHEGLTKPEIIRCLKRYVAREVFNALPREALA

SEQ ID NO: 443790 - protein, 338 aa, unidentified
MAILFVGIDLAKNVFAIHGVDEHGKAVLVRPSVPRARLHQLVAALPPCTIGMEACSGAHHWARLFVQHGHTVRLMAPKFVAPYRMSGKRGKTDAADAQAICEAVQRPNMRFVPVKSQDEQARLCIHRVRQGFVEQRTATINRLRGLLSEFGIVLAQKAATVRREAAAHLEDLPGWANIAVGDCLSEVHRLDERLAEYDRHVSQMAGEDERSARLMQLQGVGCTTASAIVSTIGDARDFKNGRQLAAWLGLVPGQYSSGGKTRLGRITKAGDAYLRSLLVMGARALLNAAPGKLDSVSRWAVQLAERRGYWRAVVAIAAKNARMAWAALSKGEHFVMPA

SEQ ID NO: 443791 - protein, 420 aa, unidentified
MPNIEIGVDFMVKENFIYVGIDLHKETHTAVMIDCYNQKLGEITFPNRPADFPKLVTKVKKCNTDAKEVVYGLENAYGYGRPLAVWLIDKGYFVKDVNTAISHRQAKHRGAMYRKSDSDDAEAIALATLNMLDKLPDACPNDAYWSLGQLVHRRDNIMKQRTRLVNQLHEQLCIAYPSYKQFFNDISRPTALYFWEHYPSRKYLKGKSVEDLRTELVPVSHNRCSTKNCEKILDAVASDKVKNNAYQDARDMVTLSIVSDLQHYDSQLAEVDKMLEQMYKMLGCTLTTIPGVNVITAVKILAEIGDIKRFSNANKLAQFAGIAPLHLSSSGKGKDVATKQGNRRLQATIYFLAIQMVQVSSKGTPRNSVVRAYYEKRKAEGKTSQQALICISRRLISIIYGMLKHGTEYRMPVVESAGEK

SEQ ID NO: 443792 - protein, 323 aa, unidentified
MAMRIGVGLDVSKDKVDVAFSNGDVKRTIENSEAGMRQLLRALDGQPIERVVVEATGGYERLVLRSVFNAGHPIIRIQPTQFKHFARMSLQRAKTDTIDAELLAQMGLIGLKTPLWEAPPEHVEELRDLVRRRGQMVRMIDDERRREKQAEPGFVQETIRRHIAWMKKEKQAVEAEIDALVKKTEDLKEVVDTLEDVKGVGTVTATTLACRLPELGTLGRAQIAALVGVAPMNSDSGRKSNPRAIKGGRSDVRKVLYMAALSATRHNPHIREYYLRLLHRGKLKKVALVAVMRKLLTHLNSLMSAFYLEKAQGTRPAAAAAAR

SEQ ID NO: 443793 - protein, 347 aa, unidentified
MKKVVAGMDLHSNNVVIGVMDLDGQRVATGKVPCELPAVEKFLAPFKVRLEQVAVESTYNWYWLVDGLQARKYTVALANPAAMDQYSGLKHADDTSDAFFLAELLRLKILPTGHIYDAQLRPVRDLLRRRLTLVHQRTALMLSFKSLYTRTTGGELTLSELKALAVKEAQALYKHPANQLIAGMQIQHMEQLNASIAKLEKAVLDSARELPYYAKLATLPGVGKILGMTITMEVGDIQRFAGPGNFASYCRTVAAERISNRKPKGENNVKCGNKYLAWAFVEAANFARRYDEQCRKWYDRKEAKTSKVIATKALACKLAKAAWHLMAEGVDYDPKRVFGPPATPLKT

SEQ ID NO: 443794 - protein, 387 aa, unidentified
MTVCTVNHLPAATHGETARCLFAIELSKQSWVIGFITPLSAKINRRILSGGDWRGLLELIEEMRARVSRETGRAVEVISCYEAGYDGFWLHRQLEAHGIRNYVIDPASLQVDRRVRRVKTDRIDTERLLRSLMAYLRGEPKVWSVVRVPSVAEEDARRLHRERDRLVSERVQHVNRIKGLCALQGICDYHPLRPQAMARLEQLRTAQGVALPPRLKSEIKRELHRLELVVEMIASLEAERDIIAEDKASTHVNAEKIQALHKLKAIGPEFAAVLVGEIFHRDFNNRRQLASYVGYAPSPFQSGNVAHDQGISKAGNRKGRTTGIELAWLWLRYQPDSDLSVWFRARVGTVKGRIRRIAIVALARKLLVALWRYLETGLVPRGAVLKG

SEQ ID NO: 443795 - protein, 409 aa, unidentified
MDVIVERPAALDVHKEQVTACVRIPGLGGARSEEVAQFRTTVQGLLTLHDWLAAHGVTQVAMEATGVFWKPVWAILEDDFELLLVNARHVKQVPGRKTDVSDAAWLCQLLEAGLLRPSFVPPKPIRALRNFTRYRKAQIAERQREANRLHKALEDTGIKLDCVASDILGVSGRAMLDALCRGTTDPELLAELARGRLRQKLPALREALEGRFDALHAVLIGAILAHLDFLDEQIERLSEAIEEQLRPFQPAVELLRSIPGVETRTAQVIIAEIGVDMSVFPSERQLASWAGQCPGNNQSAGKRRSGRTRKGSKWLDQALKDAAMAAIRTNDSYLQAQYRRLRPRVGHGRAIGAVKHTIICACWHMLTTGELYRDLGGDYFRRRDPERQARRLIKQLQALGHTVTLQEAA

SEQ ID NO: 443796 - protein, 388 aa, unidentified
MYRIIKIGMDVHSKNYTLCAMEPTIGAEDRIFGEVQVAPDYKEVICFIESLKMKLGFYDEYSIECGYEAGCLGYTLYHQLTGAGIKCVILAPTTMLTQQGKRIKTDKRDARLIAQCLCYGGYHPVYIPTGEDDAVKEYLRMRDDHKLALKKLKQQIHAFVLRHGYQYSGTKWTIKHVTWLKKLELDPMYRETLNEYLASYEEQEAKIERYDKRIEEIASEGRYQENTKKLGCFLGIRTHTALSLIVETGDFKRFAKGNTYAAFLGLAPGERSSSDNVNRLGISKAGNTHLRCLLIEAAKGICKGAIGHKSKELRARQSGQPAEVIAYADKANTRLRSKYYKMIRHGKKKNVAVAAVARELACFVWGMMTGNISIRPAAGTSMPAVRQG

SEQ ID NO: 443797 - protein, 401 aa, unidentified
MQALQNRDLLSSDTNAMDQLHAFLRQRRVVMKWTRPLCGSAAMSQNDFKTSEIIEPQEASPMKKLSVVGIDIAKQVFHLVGMDEHGTILVRKRLYRAQVMAFIAQLPPTLIGMEACGGAHYWARCFREHGHEVKLMAPQFVKPYVKANKNDMRDAEAIAEAVTRPTMRFVPTKDVGQQDLQALHRVRERLMGERTALVNEVHGLMHEYGIVIPKGVAKFRQAVVEKLESEQDKLTPLSQEMFWKLVEEFVALEKQLAYYQEKLEALATTHPECQRLMTIPGIGPLSATALVAAVSDASAFKNGRQFAAWLGLVPGQHSTGGKERLLGISKRGDSYVRKLLIHGARVTLRWVGLKTDRRSQWMRQLLERRGKNRTAVAVANKNARIVWALLTSHQDYQPVQG

SEQ ID NO: 443798 - protein, 330 aa, unidentified
MKFNEFIGIDVSKDTLDIYNLSSGSYNRYSNTVGGFNRLQRWMKRTFGTFEEVLICIEYTGMYSNGIMGYLDEEGINFTMVSGLEVKRSMGIQRGKNDKIDARRLAEYIYLRRDQVKLYKLPSKKLMNLKALLSFRTRLVRQRAGYIASKKEYSRFMPIKDAQCLIKCQEELIDELSLKIKEIDKELKQIIKSDEVIGQQYKLATSVRGVGILIALTMIAYTNCFTSFKNWRKFASYAGTAPFENSSGTSIKGKTKVSHLANKRVKSLLHLAAMSAIRHNAELKSYYERRIAAGKNKMSTLNIIRNKLISRKFATVTRQTPYVDVFKFAA

SEQ ID NO: 443799 - protein, 424 aa, unidentified
MSYRIAGIDVHKKVLAVVVADVEVEGEYQFERRQFGSNPEQLRLLSEWLLEQQVEEAVMESTAQYWRPVWEALERYWQPICQKREGGGPMSGALHLAQALSNRGRRGRKRDFPDAERLVKRLVAQELTLSFVPNAEQRLWRTVMRRKYQLTRNRVQLQNRLEALLEEAHIKLSSLVSDLLGASARRMLKALADGETSPVALAALADQRLRATPTQLCDALGACTELNPVYRRLKMMLEELQFLEQQIGKLDQEMASLLRQHQDAVERLAEVPGLGADSAQQIIAEVGAKAATFPSAKNLSSWVGACPGDDESAGVSRSHRSPKGNRHMRRILNQAANAAVKHKGSIFEIVYRRLVPRLGHNQSIGAISNRLCRLIWLILHQGVRYDERGPAVSRNSRQRRTARMIRELRLLGYRIEPTVQLSPA

SEQ ID NO: 443800 - protein, 451 aa, unidentified
MKKSVSMEIVNPHAAGIDVGSRSHFVAIGQELGDVREFGVYNEDLQSIVQWLRENEIATVAMESTGTYWQALFAVLQESGFQVILCNGKYTKNINGRKTDVQDGRWIQKLHTIGLLSGSFLPDDATEQLRTYCRHRTNLIEQSADTTRKMQKYLRLLNLRLDVVVNDITGLTGLSIIDSVCKGETNPQKLASLRNGNCKKSEEEIAKALQSNGRKDYLFGLTQEYQMYQYLQEQMKQCDKEIERMLNEQINSDDNKREHYIDKKPYKRVNKNTPKNIDLNLMSYQYFEGIDLLAIEGFSHSTVLTLISEVGLQGIKKFSSAKQFSSWLRLSPNNKISGGKVLSSRIPKGSNRLKIALRNAANAVGNLKDTPLSNFFRRISFRKGRSAAISATARKLAVIIWNMVVKNQPYKNDYGYEFLDQIRKRKVREAKKLIQKFSINVDELALCVNTI

SEQ ID NO: 443801 - protein, 341 aa, unidentified
MPIVTIGIDLAKNVLAIHGVDEAGKAMLIKPRVPRDQLVTLIAQLPACLIGMEACSGAHHWARVFQQHGHTVKLMAPNLVAPYRMSGKRGKNDAADAAAICEAVTRPSMRFVPLKDEHQQATLCLHRTRQGFVEERTATYNRLRGLLSEFGVVLPQSPEKLRRHITEHLDTLPGWAKHSISDLLDHAGNIEDRLIEYDRAIAGIAREDARSRRLMQLRGIGPTTASALLASIGAGHDFRNGRQVAAWIGLTPGQYSSGGKARLGSITKAGDAYLRGLLVNGARAVIASLGEKQDRFSRWVRTLIERRGYWRAAIAIAAKNARLAWASLKYGDDFKLEPVAD

SEQ ID NO: 443802 - protein, 396 aa, unidentified
MYSFFVGIDVSKDSFSVCGLDRKEEVIFSLVAAMDRIGLSECIKAISSHSEDPSRVVVAMESTGSYHVNLFSFLTSQGIRTIVVNPLLIKNFSKLSLRKTKTDKKDAHTIARFLFGQRGSLDTFFTHQHKDLKDIARERESILKLIGSTKNDIKRMLKSTFPEVERICNVFGDVMLLFLKKYPSARCIRDANPENVIQAFQHKDKRLRITTPKEEIVKAAQNSIASLHPAIEQILPGKIETLLFPNDRLDEVTNMLVVWCESVMKEDLAILMSIDGINTKTAAPFLAEMGDHRNYETYKSFIAFSGPDPSIHESGAFTGMSKLSKRGNRHLRRIIYLMTFCVIRIKGPFKSYFLKRRNEGLPFKKALFATAHKLIRVIFAMLTKRTHYVSGEMITG

SEQ ID NO: 443803 - protein, 312 aa, unidentified
MIEQCFVGIDVSQDRLDVLLLPQATGFSVANNEAGWNALIARLRDLPVAAIGLEPSGGYERGVIRALLTASLSVRRINPNRLRQFARARGALAKNDRLDARLIAEYVATMPTHVVRHDPAAARIAEIVTVRRQLCDEHVAVENQAAQLEDAMLRRLAKRRLARIETDIRLLDKRLAEMIAADPDLARRYARLTSMPGVGPVLAFTLIALLPELGRMSRKKIAALVGLAPYDFDSGKLRGHRSIYGGRMPVRNVLYMAALSACRYNPALKTFHKRLAASGKKPKVIIVAVMRKMITTLNAMLRDGVSWQPQAA

SEQ ID NO: 443804 - protein, 423 aa, unidentified
MKNSAAQKHKQVPAGYLVVGVDPHKKKHAAVLMTQDFMVCSKLKFDNSREGFEKVLERVRSEMLKTECRGVIFAIETGAHHWRNLAYFLDEKGIPLRLINQFTLKRRREGKDLNHRKNDYRDSEVAAQLLCTGEFNAARLSQGVYAELRAAYGSYRRLVKERTRIVNLIKSLLDGLFPEFTQVFKNPCGQTAASVLCTCATPGAIVGMTEAKFVDAIKAACQGRIMRGKLRALHHVALTSIGIEAGARSVSSEIAFLIEKFRLIEQQLGQINEALTRLVDETREGKYLLSIVGLSYVSVAGIIAELGSFSSYQNAKQLIKMAGSNPTESESGGKRRSHTPISKQGRPVLRHCAWTAVIPMLRFNQDFRDWAKKLRERPAGANPLSGREVMVAAINKLLRLAFALVKKQTFYRIPEPQPVETIS

SEQ ID NO: 443805 - protein, 339 aa, unidentified
MKLTPVGVDIAKNVFQVHWVDPDSGEVISKRVKRAKFLEHFANREPCLIGMEACGGAHHWARQLTKMGHEVKLMAARFVKAFNIGNKNDPADARAIWLAVQQPGKAVAVKTEGQQAVLALHRMRQQLIKFRTMQINCLRGLLTEYGEVMGKGRTALDKALPAVLATIAERLPAVLIDTLREQWNGLNKLDQQIAVIERRLRDWMKQDKGCNSIAAVPGIGLLTATAAVATMGDPKAFRSGREFAAWIGLVPRQTGSGGKVVLLGISKRGDTYLRTLLIHGARGVLYNAKDPGPWVERIGKRRPPNVVLVALANKMARTIWAILAHDRPYEKNFVSTKPE

SEQ ID NO: 443806 - protein, 424 aa, unidentified
MKPRPDLEFAAFVGIDWADAKHDICLQAATGEEREWTVVPHRPAAIDAWASALRQRFAGGPVAVCLELAKGPLVYALQKYDFLVLFPVHPATLAKYRQAFTPSHAKADPTDAELALELLRRYRAKLKPLTPQSGPMRMLLRLVEQRRRLVGDQNRVSSRLIDALKQYFPDVLGWFQDRDTLLFCDFLSRWPTLKQLKRARRATLLSFFHDHHVRSQARIDERLHAIKNATPLTDDPAVIRPNQLLVLALVEQLRATLDAIDSFDAEIATVSQTLPDYTLFSALPGAGATLAPRLLVAFGEQRERYRSAAEVQRYAGIAPVTESSGKKHWVHWRLQCPTFLRQTFVEWAGATIPRSFWAAAYYRQQRDKGSSHQAAVRALAFKWIRILYRCWQTRTPYDESTYLNALKRRGSPLLTSIAAPTKNT

SEQ ID NO: 443807 - protein, 370 aa, unidentified
MGKYSEVFVGIDTAKSKHAVAIADTGRDGETRYLGEIDSAPATIERVIKKLAGKYEKVRVCYEAGPTGYGLYRQIVTLGHECAVVAPSLIPKKAGDRIKTNRRDAVTLARLFRAGELTAVWVPDAVHEAVRDLVRARETAAADVRKKRQQLLSFLLRHGRIYSGSKHWSKAHARWLAAQAFEHPAQQIVFQDAIDAIEDCASRLQRLEEQLHAIIPNWSMAPVVDAYQAMRGVSFMVAVTFVAEIGDVRRFENPSQLMAFLGLVPSERSTGDSVRRAGLTLAGNRRARRALVEGAWTYRYQARVSARLQKRLEGIPKPVRDIAWKAQVRLCGRFRRLTAIGKKRPVIVAAIAREMAAFLWAIGQHIAPAY

SEQ ID NO: 443808 - protein, 416 aa, unidentified
MKVEYGNVAEDAVWAGVDTHAATNWLSVVDARGSELFSGEFATDPEGYRKLCDEIRRLGSPVAAGVECTGAYGAGLVRAMAAYGIACYEVITPGRPRRGPGCDKDDALRAAKQALSGENLAVPKSQDGWVEEVRNMTVAREELVKQCTSLANLALATVRKGPDEIRARLERLGTAKMMGVLAGWDEAEADPICDAVMFSLAALGRVWAEARRSARLLEERIERTLKAGNPALASMYGCGPISAAMLAIAAGDNPERMGSEASFAALCGVSPIRASSGKVERHRLNRGGNRNANKALHIIAMHRMRTDPRTTEYVERRRAEGLSDREIRRCVKRYIAREAYRLIMHPYDVPIEGKGPEMRAERIASGVSQKDAAIALGVTASTLCDLELGHHQFRELALRYRQWIDDGFPLEAGIAS

SEQ ID NO: 443809 - protein, 316 aa, unidentified
MNETIVEKFVGIDVSKSTLDVCIEPEVLTLHVDYDDTGINEIVVRLKEVNPTLIVVEATGGLEVRIATELASLGLPVAVINPRQARDFAKATGQLAKTDQVDAAVLAAFAKAIRPQVRPLKDEDTLALDGMVSRRRQLINMRVQETLRLGTAASKPLQQSLTKHIVWLDKQIAGIDSDLTKRLRGSEAWRTKDDLLRGIPGVGAVTTLTLLAKCPELGTLNRREIAALTGVAPLAKDSGKHRGKRFIWGGRADVRAVLYMAAISAMRCNDTIKEFAERLRNAGKPPKVVIVACMRKLLTIMNSMLKNNTPWDAKCA

SEQ ID NO: 443810 - protein, 335 aa, unidentified
MNGNTEHWVGIDVAKSKLDVALLDERGKIKSHVFSNDVKGHAALIAWLRDRISALGVRVCMEATGPYGEAPATALADAGFVVSVVNPARIKGFAQSELVRNKTDLADAALLARFGQTMQPEPWVAPPLEVRELRALVDRLQSLKEMHQQEANRLEAAMNQAGMRASIESHMQWLGVSIKELERQIDDHIDKHPSLHDDLKLITSIPGVGNTTAAKVLAYLGDVRRFKNGKALAAFIGVTPRLKLSGSSVRGRSAISRSGHAGMRHCLYMPAMVALKHNPLVSVFGVRLKAAGLAPKAVIAACMHKLVLLIYGILKSGAPFNPQFGSQQLDFQDGI

SEQ ID NO: 443811 - protein, 433 aa, unidentified
MRPNAGGIDIGATEIFVAVPADRDTGSVRSFPTFTEDLHALADWLQQCRVDTVAMESTGVYWIPLFQILEARNIEVHLVNAQHVHHVPGRKSDVLDCQWLQYLHSVGLLRASFRPEQAVCEIRSLMRHRENLVQMACVHVQHMHKSLDQMNLQIHHVISDITGVTGLAIVAAIVAGITDPKELAKLRDHRIKASIATVKKSLVGDYRPEHIFTLKQSVTAYRQYQQLIADCDREIQQRVQTFETKDDHPSPANDSSSATTPPPSSFDLRNHLKRIFGVDLTLIPGFDSLRVETIFSETGADLSSKFPSDDRFCSWVNLCPKDGTSAGRRIRGPKMKTKNRVNQEFRMAAQCLHNNKSYLGDYYRSQRARYGALKAIKNTAHKLARIFYHVVTTRQPYDETVFAKLEARNQKRRLHNLQTRARQMGYTLVEAHA

SEQ ID NO: 443812 - protein, 384 aa, unidentified
MESMVYVGMDVHKESYSLCCFSLGEGSFFGETKIDGRPELVKKYLDEMSKSLGDGGKEAKFICAYEAGCLGFSLQKALSKLGIECRVIAPTTLAREAGSSAKKTDRKDAKMLARNLAYGTCSFVHIPDEEDQETREYIRMRCAHKRELKRMKQCILSFCLRNGHKYEGRTYWTGSHISWMKGLPFGETLKDILLEYLDTFEKPADKLERLDGELLKISDKPRYKASTDKLACLKGTAKQSALTIAGEIGDFRRFGTPSELCSYLGLVPGESSSGEKTAGLGTAKQGNSIVRTQLAESSQSIVRGMRGYKSKRLKSRQMGQKADVISYADRGTERLMLKYDSLVARLVPHNKAIAAVARELACFIWGIMTGSMEGRPQAKKGRAA

SEQ ID NO: 443813 - protein, 354 aa, unidentified
MRFYQQPPDQQPHRFYCGVDLHARCMYLCILDATGQTVLHRDYPADRGAFLNAIAPYRDGLAVAVECMFAWYWLADLCAEHGIPFVLGHALYMKAIHQGKSKNDRLDAAKIAGLLRGGLLPQAYVYPKAMRATRDLLRRRSFLVRRRADLLAHLVNTNSQYNLPALNKKLVYPSNRGELNLPERFTEPSARKMVECDLTLIDALDAQIHELERHLVCTAKVHDAQAYARLQSIPGIGKVLGLVLLYEIHDVRRFPEAGHFLSYARLVRPRQESAGKASGFGNKKIGNAHLRWALGEAACLYLRASARAKRWQARQAKQHGPAKTLGILAAKLGRTVYHLLRTRQVFDEARFFAS

SEQ ID NO: 443814 - protein, 323 aa, unidentified
MPSVIGIDIAKRTFDIATQQPNGKYRTKAKLPNEVAGFEALQQWLLKHANAQAWIVMEATGAYHEALATWFHDKGYQVCVLNPAQVAYYARSQLQRVKTDKVDAKLIAEYGERHQSDLRAWQPEPPAVRRLKALVRRLEDLQEIQQMERNRLDLADANVQASIYSVLHHVERQIGETLRAIRDHIDDDPDLRNKRDLLTSIDGIGERSAALLLAELGDPLRFASSRAITAYAGLNPRLQESGSYKGQTRISRTGSSRLRAGLYMPAVCSLTHNPAISALRERLSAKGKSGKQIVCAAMRKLLHIAYGVLKSGQRFDPQLALAR

SEQ ID NO: 443815 - protein, 387 aa, unidentified
MARKRILSTLDTSIAYEAVGLDLAKTDVALAAFDSDHKEPYFIDRIPYDKLYELLANMAPTLVAMEPCSGAHQIAEQIQALGHEVMMISGRHVQAWVKDHCNGQKTDLNDAFAILNLAYDRWLTPIRGKTREECRLLALQASYRQLKGQRTKTMVHVKATLHAWGFPIRTGSFNQKALRELIDANREAFGGEMAETLHLMIDRVRGLDHDIATVLKLLTEATKRDPRASLLRSIPGFGVLTTSRWCAVMGDIARFDSPKQTMAFIGLVPNNRITGHHTETSSGREARGQGRMSKRGDKMLRSLCILGAASLCMLVRKDRLPDCPFVASIKARLASPRPWFKVLVYVAAKLVRIATALLKYGETFSFEKAGISKAVLKQWELEQAKAA

SEQ ID NO: 443816 - protein, 352 aa, unidentified
MHSPERDRISRHKLDGGDHAGLLTLIDSARTRAGRKLGSMPAVVSCYEAGYDGFWLHRLLTQAGITNLVFDPASIAVEQRARRAKTDRIDGELLLRTLMAHWRGEPRVVRIVRVPSVAQEDARRDSRERHRLITEQTAHTNRLKALLRLVGLAVGNPRRRDWLSWVERQRDWRGQPMPPRLLAEVEREHARLMLVREQLAALEQAPAAADASAAIAQMTERRDLLLRLKGLGPVFAATLAHEVFYKDFRNRREVAGYCGLAPSPWRSGGTDREQGISKSGNPRARHKAVELAWLWLRHQPDSGLTQWFRARTLNASKRIKRIAIIALARKLIVALWRYLTTGLVPDRAVIEA

SEQ ID NO: 443817 - protein, 366 aa, unidentified
MQKSSTMRRTASKIFKRRQLTIGVDLGDRWSFYCVLDESGKVILEEKIAMTPEAMKQTFARIPRSRVALETGTHSPWASRLLTQLGHEVIVANAQKVDLITKSTRKDDRHDANTLARLARIDPELLGPVRHRSAKAQIHLTVIRARAELVSARTALINSARGLTKSHGERLPKCGSQQISREFGTGLSTGLREVLEPLFREIESLNERIKEYDQRIEKIAKETYPETELLKQVKGVGELIALTYVLTIEDPHRFPKSREVGCFLGLRPGRRNSGESEPQMHISKQGDEYLRTLLVQGAHYILGPFGEDSDLRRWGGKLAERGGKNAKKRAVVAVARKLAVLLHRLWVSGEVYEPLRNSQKVMRAAA

SEQ ID NO: 443818 - protein, 354 aa, unidentified
MKVLKQVLGVDVAQNELVVALGQLKEDLTTETRDYQIFSNNEKGFKKLIKWVYEKKSTDADLVFVMESTGVYHERFAYFLYDKGEKVVIVLPNKISNFMRTLDIKTITDKSCSIAIAQFGLSRKLEQWHPSDKVYKELQQLSREKNQVISERVVCMNQLHAEKTEAMPNAKTIKRLKARISLLKKQEKEISSDMHKEVRNSTEATDGVAFLSSIPGVGKATAIAVLAETNGFELMRNKKQLTSYAGLDIREKQSGTSVKGKPRISKKGNKNLRKTLHFPAMTAVRLNKEHRELFYRIVNKTGIKMKGLVAVQRKLLELMYILFKNKTFYESNFEENRAKNQKDFHPTQADSWSL

SEQ ID NO: 443819 - protein, 346 aa, unidentified
MTNNIQFSSVCGIDIAKSVMQVYKVTSDGVVSNKAVKRADFLNEFRNIPPALIGMEACGGSQHWARELQSLGHTVRLMPPKLVKPYVTGLKNDKNDARGIYTALVMGVREVPVKSAAIQDLALLQTMRTKRQREKVAKINHIRGILTEYGLIMGKSVNAFLAKTGSLIVELKERADVSPFIVSELNALFQKVKEAMAKIKELETNIESIAKTLKHYDLFQSAPGVGPITAATMLVLLCNPEVFKNGREFAAYIGLAPKSSGSGGKNFVTHIPKKYECNNEVRTLLVQCAHAICRSKHKSDWVSSILARKPKKVVIIAVANKLARQLWIMAKKGEKFERRFILAAAQ

SEQ ID NO: 443820 - protein, 422 aa, unidentified
MPDKTKINMEDKMIYVGIDVSSKTSDYTIIDQNKKVIRAVKKKNDLEGLKSIDKYLNKFDKNEIKIGLETTGIFWNPIHNFFFKNRYDISLLNAYQTSKFANLIYSKTKTDKLDSYIIAVMMTTDYYKECIVPEDSQANLKELVKSSNKLQVKLYNQKRRISTQIKKVFFEYDSLFKNIFSISSLLILKTYTDFKKIAELKPDELVRLFRGIKGNNLSIEKANVIINTAKESITSEIGLEAASFVLLQDIQLYESLVKLKDKIDEKIDLYMKEYEFTEDKNEEINSLNPINAVLSIPGVGKKTISTLIAFCGDLSNFDNLSKFKGYIGIYPQISQSGTMNYSNAHKKGIPILKKQLYLASISSIRHNMELRQIYLNALSKKKSKAQAIAKVRNKLISIIWHLYNHKITYDASKVMVNQAAWY

SEQ ID NO: 443821 - protein, 294 aa, unidentified
MPKTAITQIAVIGIDIGKNSFHVVGLDRRGAIVLRQKWSRSQVGERLANMPPCLIGMEACVGAHHLSRKLNVLGHDARLMPAKYVRPYSKGQKNDFRDAEAIAEAVQRPTMKFVPTKTVAQLDLQAMHRVRERLVSQRTGVINQIRAFLLERGIAVRQGRQFLRTELPTVLAARSDVLSTRMLHMIEGLARDWRQMDERIDKLSSEIEMLAHEDAGAERLMSVPGIGPIISSAMVAAIGTGATFSKGRDFAAWLGLVPKQISTGDRTILGPISRRGNRYLRALSYRQPGSCSSG

SEQ ID NO: 443822 - protein, 347 aa, unidentified
MNFYTQQHKHYCGIDLHAKAMYVCLLDQKGTKLVHKNLPTTPDAFLRLIAPYREDLVVAVECIFTWYWLADLCQKEGIVFVLGHALYMKAIHGGKAKNDKIDAHKIAVLLRGGMIPQAYVYPAEMRATRDLLRRRCHLVRKRAELLAHMQNTNSQYNLPEIGKKLAYKANREGVEEHFPDPSVRKTIEMDVSLIDHYDQLLGEVELYLTRSAKAHDSQTYARLQSVPGIGTILALVILYEIQDIARFPRVQDFVSYCRLVKCAKESNGKRLGTSGKKIGNVHLRWAFAEAAILFLRQNHPGKEYFTKLEHKHGKAKALTVLGHKLARAVYYMLTREQPFDLQRFVSA

SEQ ID NO: 443823 - protein, 345 aa, unidentified
MPNIEIGVDSMVKENFIYVGIDLHKETHTAVMIDCYNQKLGEITFPNRPADFPKLVTKVKKCNTDGKEVVYGLENAYGYGRALAVWLIDKGYLVKDVNTAISHQQAKHRGAMYRKSDSDDAKAIALATLNMLDKLPDACPNDAYWSLGQLVHRRDNIMKQRTRLVNQLHEQLCIAYPSYKQFFNDISRPTALYFWEHYPSRKYLKGKSVEDLRAELVPVSHNKCSTKTCEKILDAVASDKVKNNAYQDARDMVTLSIVSDLQHYDSQLAEVDKMLEQMYKMLGCTLTTIPGVNVITAVKILAEIGDIKRFSNANKLAQFAGIAPLHLSSSGKGKDVATKQGNRRL

SEQ ID NO: 443824 - protein, 320 aa, unidentified
MLSFCGIDVSKDRLDVMVLPDEYSSSVPNDPAGWAILVEQLRGFSIAAIGIEASGGYERGAVRSLQAAGMPVRQVNPFKLRQFAKASGVLAKNDPLDARMIASFVGIMPTRPAQRTTPAAEQLVEMLAVRRQLSAEKTAAENASRLLEDLMLQRLSRRRIARLAADIELLDKRLVEIVATDATLAHRYRLLTSMPGVGPVLACTLIALLPELGGMSRKQVAALVGVAPYAFESGTLKGRRCVWGGRANVRQVLYMAAMSAGNWNPALKLFHDRLKGAGKFPKVVIVAVMRKMITTLNAMVRDDIAWADRLSGRHSVTTAR

SEQ ID NO: 443825 - protein, 382 aa, unidentified
MNAPGARIGDCRVQANHEDEGGEEVEMAVYVGIDVHKKYCQAALMNDNGHIVKELRFDNTSQGASSLITLARSVGSQVQAVIEPSANFWIRIYDKLEDEGVNVKLTNPLRKKAIAEARIKTDRIDAKTLAYLLRGDLVAESYVPSRKNRERRALIRHRASLIRMRVEIKNRIHALLDKHELTYTYTDLFGKQGLEWLSSLQLPTPDQEILQSSLQVAETLTEQIRSFDIQIAKDATSEEKAKLLMTMPGVDYYAAMVLLSEIGDVHRFSSDEKLVSWVGIAPQVHQSGGSTWTGHITRKGNSRARWILGQCAQSARQHDPRMREFYERIERKHGPQKAIVAVARKMLAIMYVMLIRNEPYRGENPELTERKHKRLDELANSA

SEQ ID NO: 443826 - protein, 339 aa, unidentified
MFYVGLDVSVARTSVCIMDALGQIVREQSVASTPEAIAGAIRAAGTNVERVGLEAGINSGWIARGLLDAKLPVIVIDATHAAGALKTGFRNKTDKNDARGIADLMRVNKFRAVWVKSPGAQRDRAMLTVREQLRRQSLDTRNTIWSILQIEGLKPPKLANPAFDALVARSLEDEVLAPLLRPLVAVVEHVDRQVAELDKLIAARAKASAVCKLLMKVPGVGPLVAMTYTAGVDDPARFGNSRSVGAHFGLTPRRFQSGEMDWSGGISRAGDASVRRALYQAANVLIHHSGGWCALKSWAVRLAKRRGLGKAKVALARKLAVVLHRIWLTGKDYRLTAAV

SEQ ID NO: 443827 - protein, 407 aa, unidentified
MRRYIGLDLHKAYVHGYVWQEGTDNKGRHLRFPSDRDGWAKFIKAHVDRDTWIAIEATGSAFHVHDILAPYAGKVVVVNSHQLKRYGDGRHSDKLDAERLAHMLALGTVKPVWVPPEEVRALRSLLYYRQRLVGERTRTINRARAILREAGFNIPRSLDPWRVVREKNLELSRTQLVILHSLGRQREHLENEIDNVTGMVYWSLADNNTARRLISLPGVGPIVAAALIAHIGDAKRFKRAKQVVRYAGLDASIHQSGEQDRRGRISKNGPPLLRSLLVQAAFQIVRTGNGPLAAFYQRKVKQIGTKRAIVALARKLLVAAWRLMQSERLAHEVNLSAYRRALRELERVPSSKEVLMEAALSPRKRTQPGSTNPVQNTRAQRVGLPCKTVALFPTNNQRRSRLDFHHR

SEQ ID NO: 443828 - protein, 402 aa, unidentified
MKNNTEVLYVGIDVSKDKCDVCIKNQGGNDLVKRFQITNTKADMNMLYETIEKIKSKNPQNNDVVFGLEATGIYYLPLYSALRRDGHKIRLYNPIQTNGFRKMNIRKTKTDPIDSAIIADMLRFSEPPLAKGIQDLNIYQLRELVRVRHRLIDKRSICKIQLVRNLDIIWPGYKTIMPTVFGKTSIMILKKYTAPSKLLMKSFEDFYEQVQKVSRSQIPRNKAEEIYAHAGNILTMPELESIISIEIKTLIAQIELYDEQNEIIEKKIENVMKSFDSKIMSVPGISGILGPIILGEIANVDRFTSVKKLIAFAGLDPVVSQSGRFENKTGPISKRGSPLLRQALFLAANVARMNDENLKRFYDKKIGEGKHHYSALNATAAKLLRIVFWVLKNNKEYQIRPN

SEQ ID NO: 443829 - protein, 354 aa, unidentified
MRCTTKYVALDVHQATTAASVRDEAGRVLARSIVPTEEAALVEFFRGMRGAVHVVFEEGTQAQWLYDLLAPLVDRVLVCDLRGQARHGNKGDRVDADQLSDLLRRGGVRAVYHGSAHRAALKEFTRTYRNLVEDSTRVMLRLKALFRARAIPTPGTKVYQAGERAQWLERLGEAGARYRAEVLCAELDVLRALRPKAKAAMVAEARRDAAWPVLLAIPFLGPVRVAQLLATMQTPWRFRTKRNLWAYCGLAVVTRSSDDYALVAGQPVRRRRPPLTRGLNRNHNRVLKDVFKGAATAATARPGPLQDFYHGLIARGMREELARVTLTRKLAALTLRLWKRGERYDPTKLTMQAR

SEQ ID NO: 443830 - protein, 334 aa, unidentified
MNFKNFIGIDVSKGTIDIALLRESTDNSIASAKYGNDFKGLVSLEEFIKKQGLNMDETLICMEHTGIYCRLLSHYLVENKYHVWLEMPVQIIRSLGIQRGKNDRVDAMRIAEYACLKKDKAVLWQPPREIVIRINDLLTLRDRLVESRKSLKQPIKEFIDAGFKDTAILIENMCSNTLKALDKEIKQVEKELDKLINKDSNLKKLFNLATSVSGIGKITAFALLYFTNEFKLYAGANQLACYCGVAPFEHISGTSVKGKPRVSSFANKRLKKLIHMVAMSTISCDKQLSIYYHRKVSEGKNKMLVINAVRNKILHRLCAVIKRGTPYQVEYQMA

SEQ ID NO: 443831 - protein, 412 aa, unidentified
MEVVYTHCAGLDVHKKTVTACVITPKEKGGCRRETRTFETHTNSLLNMLDWLVSLGCTHVAMESTGEYWRPVFNILETSLEVMLVNARHVKNVPGRKTDVKDSQWLAELLQHGLLSPSFIPPKPQRDLRDLIRHRQNFVRERSNLVNRIQKVLEAANIKLASVATDIMGVSGRAMLKAIIAGNTNPEQIAQLARGQLRSKQEQLTQALIGRVQPHHRFILAQLLSQVESLDAVIQQFDSQIEEYCRPFEQVVELLDSIPGVARKAAEVIVCEIGTDMSRFKSAAHLAAWAGLAPGNCESAGKRLSSFSRQGNRSLKTILVQAAWAASRTKTYLAAQFRRLSARRGAKRAAVAVAHSILVIAYHLILRNTPYSELGADYFECHEKPQLKKKRLIKQLEKLGYQVNLTEIAIAS

SEQ ID NO: 443832 - protein, 422 aa, unidentified
MEDERNWFVGVDWASETHHVRVSDARGRKLGARAFAHSGEGLAAMAAWILEVTGAPPEAVFVAIEVPYGPVVESLMERGFRVHAINPKQLDRFRDRFSPAGAKDDTRDAEVLGDALRTDPRCFRALQPLDPVVVELREASRMAEDLKQERNRLGNRVRELLWRFYPQMLGLTDDVAAPWFLDLWRLIPIPEKATRVREVTVDRLLKRHRIRRLSAADVLEALRRPAILLAPGTVSAAVSHREAIAKRLDLVNRQMLAVDERLDRLTQSLAGAQERAGGQRPEPCDVTILRSLPGVGRIVLATLLAEAVEALQRRDDRALRCLAGVAPVTKRSGKSRIVLMRQAAHVRLRNAVYHWARVAVQHDPRSQAKYAALRARGHGHGRALRSVADRLIGVACAMLKAKTIFDPNLASQRAPNLGKPTC

SEQ ID NO: 443833 - protein, 422 aa, unidentified
MLGIGIDWAEEFHDVAFGTPEKGVVEQFRISHGPDGVGALIDRALRLEPDPAEVRVVLETRHGLLVEALIDAGFTVLPVNPDLVARRRGPARKKDDAEDARICCLLALDRHAGLKALVPHGEFGGELRAIARDDERAARDQRRLLNRLRADLQTTYPAALTLAGADLGAPTVLRLLQRWPTQPELAQASRDDLISFARAGRHGWPDRFADQVAAALATPSLPTRDYLVRAKAAGIRLAAVQLLALHEARRGWEQRMAELLLGGRRTGRDHTVTDPDPGNAFPGGAIYLSMAGLGDRLAARVAGEIGEHIEQFTSPNGLQCYAGQAPVTRRSGKSDLVVARRLAHNRYLGDAVHQWAFCSLRQSGWAREFYDQKIAAGKSHHNALRALGNRWLEILWHCLTKGVLYDEAVHVVNRNRALGRAA

SEQ ID NO: 443834 - protein, 387 aa, unidentified
MSQASDLTRCFAPYDQATTLIAVIELSLSSWLIAGMVPGLARQPLKKMAPDEAGLLRLLERWREEAVKAGSAINRMSVAFEAGRDGFWLARWLRTRGIDAHVIHSSSVAVSREHRRAKTDRLDTALLMRVFIGWLRGERGHCSMVAVPSIEEEDAKRPNRERENLVGERTRIINRMKSALARLGIRGFKPELRKAPQRLDTLSTPEGMPIPINTLDEFRRDLVRLALVREQIDAIERTRIAQLEAAPKTGPHAMVRLLAKILGLGIETADMLVNEVLSRNLRDRRAVARYAGLTGSPDESGKKRRERGLAKAGNARVRRGLVQLAWRFLLFQKESALVLWFRARTESAAGVRKTKMIVALARKLLIALWRMVTTGEVPAGVVLRPSP

SEQ ID NO: 443835 - protein, 428 aa, unidentified
MKKSQRIVGFDCGEDGHSAVLLDAAGEFEKRYGVDNERGQIQELLAELILAVGREAQLLVVVESKRSHGRIVADVALELGCDLRQVNTVALNHFRDLEGQPRKDDEWDAYLGARMVFLKMKGSRKAIETTEDERGLSRLTRTYSRLVEDRKRHVARLRAVFLELAPEMLHSSWEGPQPGSKAMLYLLERWPGFEGLERAQLRSIEKILRRCRYGSRTTHVAKLIRKMARGVSVAREERSALTLELDLLAQQIRFCNESADQVYAKIADRVEHHPLGKKLLEMHGNGPVITGVLVSELLPVARTSTEPKSATYAGVTPLSRKSGKSLDNDRLTQGANKRVLHALYTSSVVAVNNSAVDRAYYNKKLRDYAGHPKPHVAAFIALSRQRHKLIHKLMTTNARYDKEILIATHLARLEQDRIADAQGGRLCL

SEQ ID NO: 443836 - protein, 330 aa, unidentified
MKFKGFIGIDVSKSDIDVFIHCKKLHTKFNNNETGYKEMVKWIKANVECGLGDILFAFEHTGLYSLNLSLFLDEGQHKFTIIPGLELKRSQGISRGKSDRSDARRIAGYAYEKREKIKLYQMPSKTIQKIKRLSSYRESLVKERAAVKGRLREYETFLDQGENNVLFESHQKLKAFLDEEIKKIEDEMNRLVMEDEELKKQFDLINSIKCVGPQTALMMIVLTNGFTTFEKWRKFASYAGIAPFPNESGTFKGRTKTSHLANKRMKALLSNCATSAIQFNAEMKLYHMRRVAEGKNEMSTINIVRNKLLSRIFAVVQRGTPYVDTYGFAA

SEQ ID NO: 443837 - protein, 360 aa, unidentified
MSTRKRIDVSIAEGARHGEVRHYGVIASDLEPLDKVVRGLRAPGRTLHFVYEAGPCGFGIYRQLTGRGEDCVIVSPSMIPKRSGDRVKTDRRDSQMLARLHRAGELRPIYVPDDADEAMRDLVRAREDAVGVGTQAKYRLKAFLLRQGRRYPGREGWTLPYRRWLTDLSFPSAAQHIALQEYRDAIAETEQRIDRLTEQLRQLAPTWRWAPVVAALQALRGVSFLTAVALVAELGDLTRFRHPRELMAYLGLVPSEHSSGPRVRRGAITKAGNPHVRRLLAESAWAYQGIPRIGRQHAYRQEALPKVVCDIAWKAQLRLTTRFRRLVARGKAKPKVATAIARELSGFIWAIAREVSPTPR

SEQ ID NO: 443838 - protein, 403 aa, unidentified
MSINGAPVMAATVVAVDVGKNKAALSVTDAARHRLLGPAEFAMTAPALAAVVERVWAVLPDAAVKVGVEAAGHYHRPLLGSGVWPAGWELLELSPARVSEQRRVQGRRRVKTDAIDLEAITELVLAGHGVPVTARAAAVIELSGWAMHRSRRVQTRTATKNQFLAQLDRCFPGLTLALPDVLGTKVGRLVAAEFADPHRLATLGVTRFIRFAANRGLRVRRSAADRLVPAARTALPAAEAVVARQVMADDFVLLACLDAQIVAAEAKMARLLPDTPFAPLTTVPGWGTVRAANYGAAVGDPRRWPGARQLYRASGLSPAQYESAGKRRDGSISREGNVALRRALIDLGIGLWRADPAARRYGQQLRARGKNGGVIGCAMAHRANKIAYALVRDQSGYDPDRWA

SEQ ID NO: 443839 - protein, 427 aa, unidentified
MGAREIFVAVPPDRDTESVRSFPTFTQDLHALADWLQRCHVDTVAMESTGVYWIPLFQILEARGIEVHLVNAQHVHHVPGRKSDVLDCQWLQYLHSVGLLRASFRPEHAVCEIRSLMRHRENLVQMACVHVQHMHKALDQMNLQIHHVISDITGVTGLAIVDAIVAGKTNPQELAKLRDHRIKASIETVTKSLVGDYRAEHIFTLKQSLTAYRHYQQLIADCDQEVQQRVQAFDTQNTKDDGPTATATDESSSTTTSTSSFDLHSHLERIFGTDLTLIPGFECLRIQTIFSELGADLSKFPADDSFCSWLNLCPKDGTSAGRRIHGPKIQTKNRVANAFRLAAQSLHNNKSYLGDYYRSQRARHGALKAIKNAAHKLARIFYHLVTTRQAYDETVFAKLETRNHKRRLNKLQSLARQMGYSLVEVPA

SEQ ID NO: 443840 - protein, 470 aa, unidentified
MIRHRSDSVLLGPLASVRKPVSQPVIAAVRFMQVELPLHVRLIPQEIESAMRNAGIHADSLLEVRRMYNAVGIDVSKGKSTIAVLQPGGTVIRKPFDVSHTSQSLIELAHYLGSLEGSTKIVMECTGRYHEPMLKALYEAGLFVSVVNPHLIKNFGNNSLRRVKSDPADARRIARYTLDNWAELRQYSGMDNTRTQLKTLNSQFSFFMKQKVAAKANLIALLDNTYPGVNKLFDSPPREDGSEKWVDYAYSFWHVDCVRRIGLKTFTERYRAFCRKHHYIFQPDKPEKLFHASKELVAVFPKEKTYKLLIQQSIQQLNLASGHVERLRQEMNALASTLPEYSTVMGIYGVGKTYGPQLIAEIGDVSRFTHREALTAFAGVDPGVDESGQHKSKSNRASKVGSARLRKTLFQIMTTLLQNAPEDDPVYRFLDKKRAQGKPYYVYMTAGANKFLRIYYGKVKECLRNLEQAE

SEQ ID NO: 443841 - protein, 417 aa, unidentified
MEQEDVIYRRCAGIDVHKRMIAVCLRIGRKTELRAFGTLTSELREMTAWLKANGCEMAAMESTGSYWKPLYNIFEMEELPAMVVNAQHMKALPGRKTDMKDAEWIAKLLSQGLLRASFIPDREQREQRDLTRFRKSQIEERARNLNRLQKLLEGANIKLASFVSDIEGKSATELLELVIGKPDFTVDDVAERRYGTLKASAEELFQSLEGVISPMQRELFRHVMQVIREQTAQIERTDAMIEAYMSDAYRKAAKALTAIPGIGMVSAQQIVAEIGHDMSRFPSAGHLCKWAGVCPGNNESAGKRKSGKTGKANKTLKSTLVQCAQAGKKNKKSYFCAQYQRLVVRRGKNRANLAVAHSMLIAIYHVLQGAQFRDLGADYYTQFNREKKINSHLKQLQKLGVSIPDDVLRAAIAEGVA

SEQ ID NO: 443842 - protein, 394 aa, unidentified
MRFYTNQHPFYCGIDLHARSMYVCILSQEGEILLHRNMNAAPEAFLKAVAPYREGLVVAVECIFTWSWLADLCAQAGIPFVLGHALYMKAIHGGKVKNDKIDAQKIAALLRGGMLPKAYVYPAQRRATRDVLRRRTHLMRTRAELLGHVHNTNSQYNLPEIAKKIAYKANRDGVAERFEDASVQKTIEVALALITYDDELLKELELCILKTARHHDPQTLYLLQTVPGIGKILSLVLLYEIHRIDRFPSVQEFASYCRLVKGSKESGGKRLGTSGKQIGNAHLTWAFSEAATLFLRNNPQGQKLLARLEKKHDKGKALSPLAPKLGRAVYFMLKRTVAFDMNLFLQSSGSRAAEPGASLDAYGRSLKRACCPYFFTASWNAKARRGHCSLSLMR

SEQ ID NO: 443843 - protein, 401 aa, unidentified
MKYVLVLDVAKSKSMFMLSSDVGEVLLEPTEYIHNKSDFERIDSYISKLNIKDNLTVIMEATSIYHKAPERFFKENNYHVIVFNHLIGKEITNTIRKTKTDKQDCIKLTNLFWKGSIPDRNYTEDEIYTKLNELSRQYYHLDEGLTRHKNRYKELLHLCFPEFELCFKDGKIYDLTALNFIKEFPHAYIIKDKRVDALAYNMANTNDRHLNYYKRKANIIKEYAINSYPGVSENSKDVDNLKQLANIIIEIAKQKEIIKEQMIELAKQTKNFECINSLFGIGELSASLIIAELKDITRFNNIKQINASCGLDPTIVQSGKSIDYHGPISKRGNRYARKILFNCSRNIVTLSAKCDKENPIYVYYQKKKQEGKHYYACLTACSTKLIRIIYALCMNNSTQQN

SEQ ID NO: 443844 - protein, 343 aa, unidentified
MQTITTIGLDLAKSVFQVHGVDAGGQVIVRRQLKRRYVLTFFQKLSPCLVGIEACGSAHHWSRELQALGHTVRLMPPAYVKPYVKRQKNDATDAEAICEAVTRANMRFVPTKTSGQQSGLLVHRARHLFIRQQTSVINAIRAHLAEFGIVAPVGRHGVEELLNVVADSNDKRVPEIARACLSAFGAQLRMIKEQILEFDRLIRVWHRSNELSMRLDEAPGVGPVLATALVAAVADPTSFRSGRNFSAWIGLVPKQHSSGGKNRLGNISKQGDRYLRGLFVAGALAVIRYAKIHGTTHRPWLTALLARRPTKVAAIALANKIARMVWAMMARGERYKEPFALAR

SEQ ID NO: 443845 - protein, 376 aa, unidentified
MKRIVYIGMDVHSTNFTFCSLEPKLGGEDKVFGCMQSEADVKNVLKYIEGLKKELGGDVEFLCGYEAGCLGFSLYQQLKKQGVECVILAPSTMMASKGKRIKTDARDAKRIAQCLAYGTYSSVHIPSSDDDAVKEYIRMRDDHKIALKKLKQQINALCLRNGRQYTRTKWTLAHLRWLREMDWQEAVLKETLQEYLMTFEQMTNKLESLDRRIEELAQGEKYREKVKKLVCLLGVKTRTALASIVEVGDFCRFEKGSTYAAYLGLTAGESSSRDTVRRGGLSKAGNAHLRTLYIEAAQGICKGRIGHKSKELKARQAGSSQEVIAYADQANERLRRKYYRLTHREKKRNVAVAAIARELACFIWGLMTNHTERRVA

SEQ ID NO: 443846 - protein, 313 aa, unidentified
MSELYVGVDVSKEHLDVASSDGTSWRVGNDEAGHQELVTRFSAAPPALVLMEATGGLERALAVQLSAAGVALRIVNARHVRHFAKATGLLAKTDRLDAQALVHFAQTLKPEPRAIQAEQTLALQALIVRRRQLVEMLTMERNRLRTAHRGVRKDLQSSIRWLEKRLAGVDDDIDGALRECGVWREKVELLESVPGIARVISVSLLASLPELGQLNRHQISALAGVAPFNRDSGRWQGRRSIYGGRPLVRSALYMAALVGARHNPVLRAFYQRLRAAGKPAKVALTACMRKLLVVLNTMLKNGQRWGDHVQSQA

SEQ ID NO: 443847 - protein, 425 aa, unidentified
MSYKIAGIDIHKRMVAVVVADVAGEGEYQFERHKFGSGGEQLRLLAEWLVANQIEEVVMESTAQYWKPVWGALERDWQPVSRARGAGAKSGSLLLAQAKSNRAPRGRKNDFADAERLLKRLVANELVLSFVPDTEQRLWRTVSRQKLQLTRARVRLQNQLEALLEQGHLKLSSLVSDLLGVSARRMLQALADGEIDAGRLAALAHCRLRATSEQLCDALGAATKLSPVYRRLLQMLLDELKLQERHMEQLDQELSVLLTAHHSAIQRLAEVPGLGVDSAQQILAEVGANAAVFPSAKNLASWVGVCPGEEQSAEVSKSARSPKGNRNLRRLLNQAAHAAVKTKGSVFEWVFGRLRTRLAYQEAIWAIAHRLCRLIWKILHQGVHYEEHGPAVSIKSKRNRTTRMIRELRKLGYRVEPVGAFATHM

SEQ ID NO: 443848 - protein, 355 aa, unidentified
MTVTIVEETRPVTCPTAITGGVDTHADTHVGAALDPVGGLLGVAEFPATAAGYARLLGWLGGFGTVALVGIEGTGSYGAGLARHVTAAGIRVVEVDRSDRQDRRRQGKSDPLDAVSAARAAQSGRARGAPKGRDGAVEAIRALMVARRSAAGERTRTINQARALLLTGPDDLRARFTRHTPAALVTGIASLRPRPGDVAGYAVRVALRELGRRAQFLDGQLERLDELIVPLVTARAPGLLTVYGLGPRTAALLLIAAGDHPGRLRSEAAWAHLCGVAPIPASSGKVTRHRLNPGGDRQANHALWRIVFTRLGSHPATRAYAERRTAEGKSKAEIIRCLKRYVAREVYPHLRPAAG

SEQ ID NO: 443849 - protein, 412 aa, unidentified
MKDLLEISCGLDVHKEKIVACILTGPLGKPTRSEIREFSTLIPDMIALRNWIVSKNCHHVAMESTGIYWMPIYEILEDAFSGDITLLVVNARHMKNVPGKKTDMRDSEWISTLLRAGLLNGSFIPEKKIREFRDLNRYRKSVIRDITSQKNRIEKFLQSSGFRLSSFISDIFGASGRNIILHLIEHGQIDKTALDSCLKTKTRNRIDEILMSVNGTLSEHQKAFLRILMTHYDSLKKHLAEIETSLEEDMAPFALQVEQLNSIYGISTTASCAIIAEIGIDMKPFKTAEHICSWAGLCPGNNESAGKRKSTSVTKGNPYIKSMLCEIAWVIAGKRNTYLSAWYWRIKQKKGAKKAIVALARKLLVIIYTMLKQGTIFDESCFETRRKHCEQKQLSRYIRELEKHGYHVEAQS

SEQ ID NO: 443850 - protein, 410 aa, unidentified
MLFVGDDWSEAHHDVEVQDETGRRLGRARLAEGIAGIARLHELIAQQLGEDAGPEQVVVGIETDRGPWVAALIAAGYQVYAINPLQVARYRERHSVSGAKSDTADAHTLADMVRTDAHQLRPVAGDTDQAEAIKVVARAHQALIWERTRHVLRLRSTLREFFPAALLAFADDLASADALELLGAAPDPTSAARLSIQQISAALQRARRRQVADKAAVIAAALRTEQLRQPDVLTAAYAATVRAQTAILTTLQEQIKTMQGQVEAHFGRHPDAEIYLSQPGLGSILSARVLGEFGDDPTRYAGARARKNYAGTSPITRQSGKKKTVHARHVHNDRLLDALSCQAQSALNASPGARAYYDQQRHRGASHSAALRQLANRLVGILHGCLKTRTHYDEATAWPTTADEDQKLAA

SEQ ID NO: 443851 - protein, 281 aa, unidentified
MVNNIKFMFNIKNYKVMKNFKLFIGIDISKKTIDVSLLTSEKIKGLPYKRFDNNTKGYKAMMKWINSMYKFSKNEMLFCMEHTGIYSLNICCYLNENDISFWLENPLQIKRSFGIKRGKNDKLDSKDIANYAYIHKHNAKLYKMPDKTLLTLKNLIAYRERLIKTKVSFKISSDELKLCDKGIRASICSESDTIVKSFNKKIEKIEKQMEELIRLDEKLSHLYQLTTSVKGIGLIIAVHMLVHTNAFTAFNNARQFACYCGIAPFEYTSGISIKGKPKLVI

SEQ ID NO: 443852 - protein, 420 aa, unidentified
METLKKERIDIYQKRNTCFIGIDMHKDMHCAVIIDCWMNKLGEVSFENRPSKFPAFVEDVRKICSNMEFIFGLEDTRGFGRNLAAYLVGRKFDVKHVNPAYTSAVRLASPIIHKDDSYDAYCVARVLRDMVDTLPDAKHEDIFWTIRQLVKRRDMIVKNNVMNKNQLHSQISYSYPSYRKFFSVIDGKSALCFWENYHSPEYIWSSTPEEIYQTIKPVHQALKIERIHEIIAMIEKDGDTRKDYQLERDFIVRNIVKDIRHNKELIAEIDEELRKLIPLTGYKLQTMPGIDLVTEAQLISEIGDINRFPDSDKLARFMGLAPVQFSSAGKGKDQRCRNGNRALNAIFHFLAIQMVAISPSGKPRHPVFREYFEQKVKEGKNKPQALVCVARRLVRIIYGMMKTKTEYRPYEKVVDKSQFR

SEQ ID NO: 443853 - protein, 475 aa, unidentified
MNVKGNKRKNQEAILNIIDQQKALEKVEEIKKNLKASTWRELETHGKFDKNDKLSFIQDNMLIVGCDIGSETHYIRAIDTRGRELSKSAFSFNNDLEGFEKALDWMLKIAADNEKNQIVLGLEPTGHYWHCLATWMITQRISVVQVNPYAVKQTKEVEDNSQRKDDTKDPKLIANLVKDGNYGMPYLPEKVYADLRRLSMFRDQLNEDRIRNKNRLHRELKMNFPEYKEALGKIDGVFTLELLRKAPFPDDLIKLGSEGIRQIWHDAKLRGRGYSRAEEILEYAKKSVGLKEGNESSREAVRWFAEQIIDLEQELEEIEAKLNSKCQEIPHAEKLLDISGLGENTLSGILAEMGDIERFDDVREIQKLSGLGLVACSSGKHKGETKISHRGRKKLRYWLFQAAKSVVAHSDEYKKLHVYYTTRDKNPLKKMQSLIVIACKLLRVIFTILKKGTDYDPVKLLTDIKRTTNQTTVAA

SEQ ID NO: 443854 - protein, 310 aa, unidentified
MGEGFVGIDVSKDRLDVAFRPGGEHLQVGNDPCGMARLVRMLERLQPQLVVLEASGGYEAALFERLSAKQLPVALLNPRHVRQFARASGRLAKTDAIDAKVLAHFAEAMKPEPRRMADAETRKLRVLVARRYQLIQMMTAELHRQSHSLASLREGFVATIRCFKKQIASIDKQLATLIQETPALREKAELLRTTPGIGVVASATLLARLPELGTLDRKKIAALVGVAPFNRDSGKLKGKRAIWGGRSDVRGVLYMSALVAVRRNPPLRDFYRRLRQAGKTPKMALTACMRKLIVILNALVKHRTPWALAA

SEQ ID NO: 443855 - protein, 378 aa, unidentified
MTFRAAEARRDRCERVAALSTVARVGSGTRGPFEGSCDSWIGPRLFLWPERIPGGEPRMTSRGAEKMQNDTIGVDVSKDHLDVHRLYDGASRRFANDKRGHKALIKWLAETPVSRVVFEPTGPYHRAFERALGAAGVPFVKVNPRQARRFAEATGKLAKTDRLDAAMLARMGAMLELEARPARNETLLELKELYMAREALMKDRTAAKNRGKVLMLSLLKRQNAQRLEQIERQIMTIEAAIFQIVEADVGLADRLAILTSIPGVSNITAFALLIEMPELGVLEAGQAASLVGLAPIARQSGRWTGRAFIRGGRASARRALYMPALVATRFNPDLKAKYRQLVEAGKPAKVALIAIMRKLIVLANALLKANRKWAPKSA

SEQ ID NO: 443856 - protein, 400 aa, unidentified
MISVGIDVSKEKSTICILKPYGEIVSRPFEVCHTEKELSELTSMLLRLNDDVRVVMEATGIYHLPVLCYLKEKGLFVAVINPFEMKEYRCQGLRCVKTDKQDAVTISNYGIDHWYRLREYEAEESIYAELKLLGRQYRHYMRMRVESVLELTHLLDYTMPGIKTLLKGWNETNGKDKLGDFAEEYWHYDNITKKSEEQFIESYLKWAKEKGYHQSQDKAVKIYALAKEGIPTVSSDTPSTKMLVQEAVRVLREVDNTLMTILTQMQALAKSLPEYPVVRAMGGVGNVLAPKLIAEIGDVRRFHSGKALIAHAGIDAPPYQSGQFIGTERKISKRGSSSLRKIGYEVMRCLKTHKEPEDAAVYKFILKKEKEGKSKRAAKIAGLNKFLRIYYARVMEVYQK

SEQ ID NO: 443857 - protein, 398 aa, unidentified
MKKNHILGMDIAQHSAVAQLDRVDGTRCWRETLTTDQAGWQQLEKLLVAHGASWAGTDVLLEATGVYHLPWAERLRRAGAEVYVLNPLLAARLHSVANALRGHKSDHVDVHKLCESGRLYGDKLARFLYQSEATRQGLKQLTSARARLRTTLTNLKKSLHSHLELVFPALLAAKLDPASARVVAILAAAPTAGAWRALSATQRRQLAGDHGSKLDQTCLVTLADETLAQACAPAMHALLAAQQALLTQLDACDEQIITLLPPERVALIKSLPGFGDRTAAVLAAYLPASLEGWGNGKKVTARLQAYVGMDPRLRTSGNWTGQIKISKRGIVPARTALYQAAFCSLKQDPENYAYYRSLRARGKKHKTAMVDLMRKQLRRLVSVLLSNQPYVPKIPIPA

SEQ ID NO: 443858 - protein, 315 aa, unidentified
MDDKRVVAGIDVSKAQLDVALLPGAERVQLANDAPGIAELIKRLKSAGVELAVMEATGGYETAAATAIAGAGLRLAVVNPRQVRDFARATGRLAKTDRIDAQMIGAFAQAIEPQVTTLPEEDARELEALLVRRAQLIAMRTQESNRLALTTGAMRKQIKTHIAWLEQAIDRLDTDLTARLRNSPAWRAKDDLLRSMKGVGPITSGTLMSALPELGQLDRRAIAALVGVAPFNRDSGTLRGRRSIWGGRARVRTVLYMAATSAVRSNPVMRAFYGRLLERGKPHKVAMVACMRKMLTILNAMARTNTPWTPNFQEK

SEQ ID NO: 443859 - protein, 413 aa, unidentified
MDVLHPRCCGLDVHKNSISACILVQEAGRVQKHQRRFGAMTQDLQELANWLRQFEVAQVAMESSGVYWKPVWNILEGQFTVVLANAQHIKNVPGRKTDQKDAEWIAQLLQHGLLRPSYVPCEVIRDLRDLTRMRASLSQEASRISSRVQKVLEDANVKLASVATNTLGKSGRAMLEEIIAGQNDPEYLASLALGHLRAKTPQLRLALEGKIRPHHRFLLRRLLDQLCFVEHEIVLLDERLEDIGRERPELSQAVARWDTIPGIDRVAGWTLLAEVGHTMAQFPTAEQLASWACLCPGNHESAGKRLGGTTRKGSPWLRRMACQCAWAAARTKNTYLSAQFRRVAARRGSKRAIIAVAHSLIIIGYYLQKSQRNYEDLGGDYFDRIDSDGLKRYFIRRLEKLGHKVTLVPIKAA

SEQ ID NO: 443860 - protein, 339 aa, unidentified
MGEVTTIGLDLAKNVFQVHGVDAAGAVAVRRALRRGQVLGCFAKLPPCLVGMEACATAHYWGRELARLGHRIRLIPPAYAKAYVRWNKNDAADAAAICEAVSRPSMRFVAIKTAEQQAAAGPHKVRELLVKQRTMLINALRGLMAEFGLVAAAGPQHVDELVRMLNEPAGAVIPEPLHGGLMQLVHSLRLVQREVETIEKEIVRWGRDNRTCRHLDTIPGYGPILASAMAAMVVEPGAFKSGRHFAASLGLVPRQDGTGGKVKLGPISKRGNGYLRRLLVNGAMSVLRGKRARHDPWLAKLLAERKRMVVACALANKMTRIGWAVMVRQAEFRARPAAT

SEQ ID NO: 443861 - protein, 366 aa, unidentified
MKKTSTVRVNGNMIFKGHKLTIGLDLGDRWSFYCVLDEAGEVLLEQKVPTTPEAMKQTFSRIPQSRIALETGTHSPWVSRLLTELGHEVIVAHAQKVQLITKSNRKDDRHDARTLARLARIDPELLGPVRHRSVQAQIHLTVIRARAELVSARTALVNAARGLVKSYGQRLPKCGTQQVSRELAAELSTELREVLEPLLQEVESLNERIKEYDERMEKIAKQVYPEVSLLKQVKGVGTQIALTYVLTLEDPHRFPKSREVGCFLGLRPGRRNSGESEPEKRISKEGDRYLRTMMVQGAHYILGPFGQDSDLRRWGLKLAERGGKNAKKRAVVAVARKLAVLLHRLWVSGEVYEPLRNSHKAMRAVA

SEQ ID NO: 443862 - protein, 321 aa, unidentified
MTYVGIDVSKVTFVVAYSSVKTNKTRTFKNTVNGVHEFVQTISASEHNCVLEATGNYSALLVYLLSEAGITISLENPLKIKNFARVMLTVTKTDEIDARLIALYGEKMQPAPYKLRSDAILVLKQKRTVLRQLKKQLVATRNLKGSMEVLPFFDPKCKKTIEKTITFLEKQIKEMEEELASLAQGEYKKQMDLLTSIKGIGVTLAAALIVATGRFSYFDNAKQLTRYLGLSPIYQQFGTSVNVKGHINRNGDSSLRSQLYVAAFSSLRCNTECKACFDRLRSNGKPGKVVVIAVANKLVRQAFAVVTQGKPYVDGFKSEKP

SEQ ID NO: 443863 - protein, 384 aa, unidentified
MRSVCGLDVHKDSVYLCILSEDGELIEKVFGVLTFQLHQMRDLLLAHHVEKVSMESTSVYWIPIWRILAPHFHLQLVNPYFIKQLPGHKSDVADAQWIAECTMKNLISSSFVPPEDIQQLRQYDRRIFDLDEEIVRKLSKLDAVMQRCNIRLSNYVSNVDCKSYKDVVRKISEGVTDPEILIEEIHGRIIKHHGRETILASLTGVVSQAEVDVLRQLREELDLAEEHKQECLERMLEICQEKYPDELERLQTIPGVKERTATSLIAEIGTDMSKFETANHLTAWSGLRPRNDESNRKFKSRRITHGNVYLRKNIIQCAWGASRTKNCFFSRFSYHQTQVRKKNKMKVIVAVARKLLVAAWHVIHDKTDYVDFQKQDRQSPASNG

SEQ ID NO: 443864 - protein, 378 aa, unidentified
MPHKLNSGIAVIGIDIGKNSFHVVGHDKRGAIVLRQKWSRGQVETRLANLRPCLIGMEACVGAHHLRRKLQMLGHDARLMPAKYVRPYSKGQKNDFRDAEAIAEAVQRPTMKFVATKTAEQLDLQAMHRVRERLVSQRTGIINQIRAFLLERGVAVRQGLRFLRTELPRILAAPCDALSPRMLRVIEDLAGDWRRLDERIEGLSSEIEVLARRDVGCERLMTVPGIGPIISSAMVAAVGTGDAFTKGRDFAAWLGLVPKQISTGDRTILGKISKRGNRYLRVLFVQAAWVVLIKPKSWDRHGLKPWLETAKKRLHHNVLAIALANKLARIAWSVLAHGRAGEQAASWVISHRHVLPAEVCERTKTRWRIGLPGACEHW

SEQ ID NO: 443865 - protein, 370 aa, unidentified
MSSVSHRGFTHLGLDVSKDSIAVAVLAPDRDRATVQKIFHDEFSVRRLMGRFDDRSKLWACYEAGPTGYDLYRLLIRMGVRCDVIAPSLIPKRRGDHVKTDKRDAQQLAGLHRAGQLTPIGVPSPAQEAVRDLCRTRGDMVEDLTRARNRLTKFLLRHSVVWRDGSNWTFKHRCWLAGVHFDDRALATTFAHYRATVELRDNSLAAIEEDLAPYCDRAPFGDQVHHLAAYRGVTRMGGLCTAAEVFDWRRFPTARSFMSFTGLVPSENSTGLSEHRGNITHAGNRHLRAQLVEAAWAYQHRPHVGIGIAARHDGLPPEVIARAWAAQVRLSSRFRKLAARKNVRSVVAAAIARELAGFLWAEMTSDSIAA

SEQ ID NO: 443866 - protein, 363 aa, unidentified
MSTIVAHQYPYVIGVDTHAATHTYAVLTNTGVHIDTQTFPTSEPGLRRALSWAGRRTGGDLGGLWVIEGIGSYGAELTRTVQDTGYEVVEAARMSSKTRRGIGKTDPIDAFRIASTVLSMSTDRLRRPRRHDDIQATLQILLTARHELARERTRAVNALTALLRTIDLGIDARRALGMRTINQIAAWRTRQESLKQATARTEAIRLAQRVRQTHTEIAQNDKQLSHLVAQSPAAGLTSETGIGPVTAATVLAAWAYPGRLRNEAAFAALAGASPLPASSGNTVRYRLNRGGYRQLNRALNVIAMHRTIHDPETQAYVEKRRAQGKTDREIRRCLKHYLARQIYRHLNQAANSAQRGLTSIEAS

SEQ ID NO: 443867 - protein, 343 aa, unidentified
MLTFFFSNLKGMRFEYFIGIDIAKKSLDVILLKEAKKVWYKRICNDPRELDSLKNELQQVEGFSFQNALFCMEHTGVYSNFILSFLDDHKANAWVVHGMHIKQSMGMVRGKSDKVDACRIASFAFKNQFEAKLWKPERLVITQLKQLVALRERFINNKNALTVHINENGPFMQKNIVAKIKKLSQSSINPLQKAIKKVELDIKALVKTDPVLNELFNIVTSVPGVGQVTASKVIAVTNEFTNITEAKKFACYAGVAPFEHTSGTSIRGKSRVSHKACKPAKHALHMAALTVLRYDYELGKYYKRKVEEGKPKMSVLNAVRNKIILRIFACVRDQRKYDFSYNT

SEQ ID NO: 443868 - protein, 316 aa, unidentified
MDVAKATLQVHLNGHQFEFPNDPTGHAQLSRKLAKLTRPHVVCEATGGYERPVVAACHKAKILVSVLNPAHTLAASQAQGKRAKTDPCDAAALTDYGQRFHPEPTVAVPPATREIKELTLWLKQLIDNLAVVKAQAEQQANTFVAQQHQALLDHYAFQIKTVEQKIKILVQAQPPFQQRVECLDQIKGVGFRTALLTLVFLPELGSMNRGGTAALAGLAPWTRDSGKMKGKRCIGGGRAQVRPVLYMAALSASRCNPVLAPFCKGLKKRGKPSKVALTAVMRKLLIHMNSELKKLAAKPTDAKPEKTNKTKKSLAK

SEQ ID NO: 443869 - protein, 394 aa, unidentified
MKIFVGLDVANEVHWACAVDGNAKPLLSCSVANQPDQIAALIEDIGALDADEVTVAIDILGGMATLLCAMIVEAGFRLVHVPGLSVNRARQGMRGGENKSDPRDAATIAELARTRSDLRPVDTEREIDVNIRLLVGRRSEIVRDQTRRLARLRDLLSSVFPALERRIDVNTKTGLAFLSLFAAPHELRAARPASAARRIMRLAPLSRGVAQLSEEAITLAKAQTVDVPGAVTRARLVKELATEALRAREMRDQIDRDIAELLACHPDAALIQSLPGMGVVMTAELIANIGDIRRFRSADGLAAAAGLTPVLRQSGKSYAIRRANGGDKALKRVFFQSAFVALSHPESKAFYDRKRAEGKRHNQAVIALARRRINVIWAILNTRQPFVENFKSAA

SEQ ID NO: 443870 - protein, 361 aa, unidentified
MNRNTGMNAGQIIGTMNGQQVIGLDIAKLVFQLHSVDMSTGEIMNVQIKRAKVLDYFVNKPQSLIAMEACGGAHHWARELTALGHTVRLLHAKIVGPFVSGNKTDATDARAIWIAVQQPGVKFVGVKTAAQQATLTLHRQRELLMKMRTMQTNALRGLLYEFGATFAQGRKALFKDVEQTLEDLAGQLPQMVRDSLREQVARIKEMSQAMLAIEKRLHLQLKADPHMQRIAQIPGVGLLTATAAIATMGDARAFKSGREFCAWLGLVPKQTGTGGKVRLGGISKRGDTYVRTLLIHGARSVLAHAKEPGPWLEQIKARRPANVAIVAQAAKMARAIWAVTAKEQSYQKGFQSVRPNATAAA

SEQ ID NO: 443871 - protein, 423 aa, unidentified
MNPRVEIACGLDVHRSKIVGSIVHSDGGKETRTFTTGIDDAIALKNWILGNRCERVAMEATGIYWYPIYDLLEDHVTLQVVNPYFIKVMPGRKTDQMDAEWIAELCLNGMVKSSYVPSPQLRTRRDMIRTLDRLIRTRTRHKNRIHKIMIRSGIRIASHLSSLFGPSGLRILYGLLEGQSIDTILDEINNAKISRKRDELKGSICGNLDGNAVYLIRLELKAIRSLNNLIDDLKKRISVLMEPYTDDIEILMSIPGIGYDSAVNILSEIGDIHQFPSGKHLVSWAGLAPGMNESAGKRIPGHITKKGSKFLRTFLIEPSHSIAGMKRDNQLKRFFQKMRSKIGYKPAIIALARKLLMLVHHLLIHREMYHEEDFPMKKIRLPEAIAPETLNPHDILNLVSDAVSSLNEPDRDHFIRNLNRITG

SEQ ID NO: 443872 - protein, 348 aa, unidentified
MTVFIGLDISLDETHICVVDEEGKTLKESKVMTEPEAIAPVLRRFEGRIKRVGFEASSLSPWLSNELIKLGFPAIIVETRHMASALGAMRNKTDRNDARGLAQMMRTGWYRSVHVKSDDSHRLRILLTNRRILKRKFLDIENAIRGTLKVFGIKMTRTTRGRFEQDLMVKLAEADPMLREMTQSMLEARRTLLEQHSRCHKLVLQVVRGDDVCRRFMTVPGVGPITALAFKTTIDNPTRFKKSKTVGAHLGLTPKRYQSGTVDYEGRISKCGDPEMRTLLYEAASSLLTRVQSWSVLKAWGMSLQKRAGKRRATVAVARKLSVILHRMWVDGSEFIASRDDLNAAKVA

SEQ ID NO: 443873 - protein, 433 aa, unidentified
MNPNRLQVGIDFSQKRADFCLLFADGQPLISHQAFANTRLGYQKAQQVLLDSLQAYAFDGLDVSGEATSYYWFPFFWQMAHDAELGACDLSLFLLNPRQVHWFKKSLPPDDKTDNTDPFYIAERTRTRRPKAPWDPQDEWLPLRFYTRLRFHLAQALTREKNYYLVHLFLLHNTYRRNQPFSDPFGVTSQKVLGGEQSLAELGNLPLEALAELLDAWCAGKLDDPLETAHKLQQVARESFPLEEPLLTPVQRILDLTLEHIRFLEAQMQQVDGWIATEVQAHHPEALFLATVPGVGLVLAAGIVAEIGDLDRFFQTPKWDKKGKRYRTKTLREVEDSVAKLAGLWWPRADSGDFVAEDRHLAKTGNRYLRYYFVQAAYGMHRHIPAYARFYNLKFREATRHKHKRALVLSARKSVGLFVGLLHRKEAYRSQEE

SEQ ID NO: 443874 - protein, 418 aa, unidentified
MKSIKAEKIKTINEKTLVVTLDIGKKVHYGYFRTPKNQDVKPFPFYNSGRSFNKFWEKLCRFKEKHMLDEVVIGFESTGPYTEPIANYLRKKPVKLVQVNPMHTKRIKELTGNSPNKTDKKDPRVIADVISLGHSLTVVVPEGAAAQLRRLTHARERAMERRTAMNNQLQDLVFVIFPELGDIIKPSTKTGMYLIKNYPAPERIVSIGNETLCNIVRKISRGKFGIERAEKLYNAAKESVGITEGKESILLETSHLVSNIETENRYIKSLEEQMIVYLDQIPYSHSILSVKGIGNITVAGLIGEVGDFKKFKTISEVMKLAGLDLFEVSSGMHKGKHRISKRGRALMRKLLFFAAINAVKSHGIMHARYQKMLNNGTPKIKALIAVSRKLLRIIFAIARDNAQYEENYNRKHDYKLAA

SEQ ID NO: 443875 - protein, 328 aa, unidentified
MFYLGIDVAKAKLDCCLLLDSDSTKRKSKSVANTKTGFITLLEWLERKGFSLPQLHAIMEGTGVYHEQAALALVDAGVTVSIVNPAQVKDFGRGLAVRTKTDGIDSFVLARYGALVKPGAWQPPPQEVRVLRALLARREAIAQDLQRELNRLEKADATNTPTLIRQSINDSISFLRKQIAKLREDIDTHIDCHPNLKRDMDLLASIPAVGRQTGCNLLAIIHSYHFTSAEQLAAYLGLVPIERQSGSSIMGRARLSKAGPPRIRAVLYMAAIVATKYNPHVKMVYDRLVARGKAKMAALGAAMRKLVHLCFGVIKTRMRYQANYVKNG

SEQ ID NO: 443876 - protein, 348 aa, unidentified
MEMQAIGIDLGKMVFHLVGVDANGSVVVRKRCSRAQLLAYTANAHVRVIGMEACSGSHFLGRALREQGHDVRLMPAQYVKPYVKTNKSDFIDAEAIAEAVQRPTMRFVPIKTEQQLDLQAVHRVRERWVMRRTAVVNQLRGLLLERGLTVPKGRRHLEELLPEISADAADELSDSFRMLLAQLNRELDELAARIGEMDSVIAQTAREHEACRRLTTIPGIGPVTATALVAAIGNGAAFRKGRDLAAWVGMVPREHSTGGRQKLLGISKRGNSYLRRLFVQGARSVLQHRDKQNAILRNWLTQLTARSHQNVVIVALANKLLRTAWAVLCKSETYRIPVLAAGPEPAAE

SEQ ID NO: 443877 - protein, 321 aa, unidentified
MSSALGIDIAKKKFDVALLRDGKFKTKVFDNSPAGFAALKDWLRFHGADQVHACMEATGILFEGLATFLADAGHEVSVTNPLQIKAFGESLLSRTKTDKADARLIARFCDTMKPTLWQPDAPEIRQLKALGRRREALIAMRTQELNRDISANSRVQESIRTVISVLDQEIDDISRQIRDHIDNHPDLKNKSDLLRSIPGVGDVSIEAILSETNGFANFSKVEQVVAYMGLSPKEKSSGSSVRGTANVCKTGNRRLRKVLYMPALVAMQHNPMIKELAQRLKQKAKHGRVIACACMKKLIHIMFGVIKNNQPFNPAYNLKFG

SEQ ID NO: 443878 - protein, 354 aa, unidentified
MRDMTALFPNVTVGLDLGDKLSTICEVDLAGTVVRRTSIATTPAGIRQHFEGRERCRVVLEVGTHSPWVSRQLQALGHEVIVANPSLMYGRGHRRKRNDRLDGEFLARQGRADPKLLFPLQHRGEEAQQHLAILRARDQLVAVRRKLINHVRGAVKSLGGRVRRCGADAFAQRAPADLPDSLRPALGPLIETIARLTQQIRGFDKDLERLVQERYPEAQHLQQIAGVGVLISLGFVLLVEDPHRFTRSRDVGAFFGLVPRLDESSADKPQLRITKAGDELGRRLLVNAAHYILGRFGPECDLRRHGEAIARRGGKNAKKRAAVAVARKLAVLLHRLWVTEALYDPDYSQRRRAA

SEQ ID NO: 443879 - protein, 468 aa, unidentified
MADRREAEKRRALEGLPVVRADVAGMDLGSERHWVCARTADGAGREIADFGATTPELLRMAQWLKDRHVQSVAMESTGVYWIAPHEVLEAAGLEILLVDTRQLARVPGRDKKTDPTDCQWIQRLHSCGLLRGSFRPREAVCMLRTLVRDKSNLVAESGDWVRRMQKSLDQMNVRVHRAVSDLDGVTGMAILRAIAEGERDARELAKLRDRRCRNSEEEIAEQLSGHWREDHLFSLQQALQMYDAIQQRIADYNREILRKLGAMQREEFGEQPAPQVKNPHKAKAIRKRGEEPIREALYRMSGVDLTSIDAIGVETVQVVLSEYGPDLSRFPTEKEFVSHVTLAPRRPMSGGKPVRRKKRNTASTRVAAALRMAALSLRNSGTALGAYYRKIARRIGGDVAVFATARKLATLIYRLLRWGQPYVDEGAEAFETRYQEMRITVLKAKAKQLGYELVQNHPAPSTEEEVTD

SEQ ID NO: 443880 - protein, 316 aa, unidentified
MEKPYIGIDISKDSLDVAIHASSKQWHFTNDPAGISRVCELLAKLEPALVVFEATGGYEIPLYVSLGESGLPVAPVNPRQVRDFAKASGKLAKTDTLDAKAIAHFGAALKPEPRAFPESQELKEIVARRNQLVQMITAEKNRFRSARQGIKARIQAHIKWLEEELENIDLELRQSIKKNPAWKEKDTLLQSVPGVGPVLSTTLLAGLPELGKLDGRQIAALVGVAPLNRDSGTLRGKRSIWGGRARVRGALYMAALVATRFNPVIRDFYGRLCAEGKCKKVAITACMRKLLTILNAIAKHRTPWQYPVSQTYGPCH

SEQ ID NO: 443881 - protein, 350 aa, unidentified
MLIIGCDYHPGFQQIAFADPETGECGERRLAHREEGEQFYRELKQRSLSVRVGMEASGHARWFERLLADLQFELWIGDAAEIRTKGVRKQKTDRQDAQLLLKLMIEDRFPRIWAADAENRDLRQLLWHRHRLVQMRTRVKNQLHVVALNEGLRRKKALWRPAGRSELESLVLARWASRRRQDLLDVLDQLTPKIQELTRALEEEVEKRSVTRRVMTHPGVGPLTALAFELVIGTPARFHCGKQIASYVGLVPSEDSSGDRRRLGHISKQGNSLLRFLLVEAAQVTVRSQAQWRSKFFHLAMRRGRKIAKVAMARKLAVHLYWMWRQGWDYGQFAKFGSHAGEPGNRHGVQ

SEQ ID NO: 443882 - protein, 409 aa, unidentified
MRIIGLDIHRAFAEAVAWDDGKLKRLGRVDMRRHLLEAFAKKLSKEDVVVVEATGNASSVAAVIAPHVKRVVIANPKQVRIIAHAKIKTDTIDASVLAQLYASGFLPEVWIPDEPTQALRRQVTRRNQIVRQRSRLKNIIQSILHSHLIPSCPHADLCGASGRAWLFHQVLPEDERLAVERHLREFDRLGEDLKVIERDLARSALADEGVKRLMTIPGIDMIVALAIVAAIGNVGRFEQSQKLVSYLGLNPSVRQSGPGPAYHGRITKQGRGHARGMLVEAAWASARAPGPLRAFFLRVRARRGQHVAAVATARKLAVIIWHLLRKGESYAWARPALHAKKLRDLELKAGYKAERGQKGAAYVYNIKSHRDQERRWVEQAETAYARFVAGWNPRGPKRARTGAANEERQ

SEQ ID NO: 443883 - protein, 371 aa, unidentified
MADIDGVAGIDAHKHVFTVAVLDARGGRCGIESFPTSPDGLAEVLALLDSLEFTIGRIGVEGSAGLGRHVAAFLVAAGYDVREVQANRTAERRRRRRRHKTDREDAEAIARETLADPDLPPAGKQRRPDPCWDELVAVRNRRKSLIGQRVRLLNEAEAVLTGLPLTIRAALPQTSRVRPRLRALDRGAASSVQVAAADRVNLAWLVEAAGDIARLDARVTELDKQIPALLGRLGCTLTEEYGIAAVGAMDLLVEVGDPTRFATEAQFARWCGVAPVAVSSGEGDQAPTHHRLDLAGNRQVNSTLHVMHVTQVRGYPPARDYIAKKRAEHKTKREARRAHKRHLANIVIRRMWADHAQRFETPANLAIPAAA

SEQ ID NO: 443884 - protein, 352 aa, unidentified
MRYLGMDVHAKSTVWCLLDAQGEVVSEGHTPTTAALLAALVRELAQEDTVLAGQEVGTLTYLVHDAVTAAGTTLLSFNAQSLRMIAASRKKTDRRDAYWLAKALQSGMYPHPVYVPTGEIRELRARLSQRRVLHTDYNRWRYRARTYLRAGGYPVAPGVTALRAALAPGNAGTRGAPTSLTDALGLCQRQEAALRAELAQVDATLRGRTQAVAAIQRLMTVPGIGPLTATTIYAWVGDVRRFPHAKQLAAYAGLVPAVRQSGGTVHVGGITKQGAPALRATLVQAAHVLLSRCRGADARPLQAIGLRIRGTRGRRKIAVVAVARHLLRIAYYILRDGTTYDAHRLGTMTDAA

SEQ ID NO: 443885 - protein, 371 aa, unidentified
MNYNIKYVGLDVSKEKIAVAVADEGRSKARYIGMINYTVEAIKKLIKKLGEPEQLEVCYEAGPTGYGLYRLLKSMDIHCEVIAPSLIPQKPGSRVKTDKRDAINLATLYRAGELTPVYVPTEDDEALRDLVRAREDVKEDELRAKHRLTKFLLRNEIRQPKGIRKWTAKYWEWLRQLKFQRSASKVVFQEYVQQLIEYQQRIKILEEEIKEQAENGVHAPLIQKLMTLRGVAIITATSLAAEVASFARFARPNGFMAFTGLVPSEFSSGDARKVGAITKTGNRHIRKLLIEAAWSYRHKPAVGRDLQKRQQGQPTNILSISWKAQQRLHKKYYRLMARGKESGKVVTAVARELAGFIWAIANEPDDASEMA

SEQ ID NO: 443886 - protein, 412 aa, unidentified
MEVVHPRCAGMDISKRDAKVCLRHAGAGRRKTVETVTTWGSMTSQILALREHLAAEQVTCVVMEATGDYWKPFYYLLEDLPGVEVMLVNARHVKTLPGRKTDVADATWLAQLGAHGLVRGSFVPPEPIRQLRDLTRARTAITRERGREVQRLEKLLEDAGIKLSAVASDIMGVSGRAMLEALIAGDREPAGLADLAKRRLRSKIPELTEALQGRFNEHHAFLARTHLDLIDQHTTAIDKVTARIEVMMEPFQGFHDLICTIPGISTITADIIVAETGADMTRFPTAKHLASWAGTTPGNNESAGKVKSSKTRPGNPYLQGALGAAAMVCASHPQTYLGAKYRRIASRRGPMKANVAIQHAMLTAIWHMGTTGTLYDDPGADYFTTLHPERAKKRAIHQLEAMGYSVTLDNAS

SEQ ID NO: 443887 - protein, 337 aa, unidentified
MAKEKAVRWVGVDVSARWVDGSRAAADEPVSARQFANTPAGHGELASWLTQGGRRARVVLEATGLYSLDLALRLQRTARIEVMVINPRASKEFAGAWGQRARTDASAAQGLREYAARMPFTPWTPPGPQALALRTIMRRVVALIEARVQERNRLHALSATEAVPAVVRTDIRQHIRTLERRIARLEHEARALVEPAPALHAGFRHLCSVKGIGRRSALMILAEVAVLPGELTARQWVAHAGLDPRPIRSGTSVHPPVRMSKHGNVYMRRSLFMPALVAVRRNPAVQRFATELTARGKAPLQVLVAVMRKLLHAIYGMLKTDTDFDGEKFRRSAHAEG

SEQ ID NO: 443888 - protein, 351 aa, unidentified
MEMSVKESSLAVKGKVVNIGVDVHRRSWRVTARVEGVIVLSGSSPPSYQAFKTLLRRFDGATVRVAYEAGPAGFALYDRLTQDGVECIVTPPGLIPTESGNRVKTDKIDSYKLARLLEGNLLKRVWVLSAEQRAQRQLVRTRRQISDHRADVMRQLKSLLLFHGIQTPVEGSPQWTPAYLNGLRTIDLGEIYLNLSLRALLDLFDSLSQQKKQLAQSQTYANRVRLLTSIPGVGPLSAMEILVELQDVDRFVRADQLAAYLGLTPSQYSSGERIRMGHITHTGNSRVRTTLIECCWFLIARDPWMLHKYQSIKIRRGAKRAIVAVARLLSLRIRRMLLDGVPYRVAPAAAS

SEQ ID NO: 443889 - protein, 463 aa, unidentified
MAKKTTTSRKGKSKAGKNVLERINLNAAGIDIGANFHLVAIPEDRAEENVRKFGPFTSDLHQLADWLTEHHIETVVMESTGVYWIPVFQILEQRGFEVKLVNAAHVKNLPGRKSDVSDCQWLQQLHTYGLLNGSFRPKDEVCVLRSFLRLRDTLVKDSSSHVLRMQKALTEMNIQIHRVLSDITGYSGMAMIRAILAGERDALKLAQMKHPLVKASTQQIVKALEGDYRAEHLFALQTALELYDAYQLKITECENKIEQQLERFDSKLDFEQVLEQSGALKTRSAQVRRQLQRQAHLSSVCGVDLTRLPGLSTLAVEVIISETGLDMSCWKSEKHFCSWLKLCPDNRISGGKVLSSRPRKTKNRAAAMFRLAAQGAMQSKTAIGAFIRRLKARLGAPTAINAGAHKLARLFYRMLKFGATYVEQGQAYYEHKYKDRLLRNLSKRAKEFGFQLTPLEPATDLVS

SEQ ID NO: 443890 - protein, 343 aa, unidentified
MQTITTIGLDIAKSVFQVHGVDAAGQVVIRRQLKRRYVLAFFQKLPPCLIGIEACASSHHWSRELQALGHTVRLMPPAYVKPYVKRQKNDATDAEAICEAVTRANMRFVPTKTPEQQSCLMLHRTRHLFIRQQTAVINAIRAHLAEFGIVAPVGRKGVTELLHVVADPSDGRVPEVARACLAALGTQLLGLKEQIVEFDRLIMAWHRSNETSKRLHYIPGVGPLLATALAASVADPQTFRSGRNFSAWIGLVPKQHSSGGKDRLGSISKQGDRYLRSLFVAGALSVIRYAKIHGTKHRPWLTALLARRPTKVAAIALANKLARMAWAMMARGERYRQPVALAA

SEQ ID NO: 443891 - protein, 309 aa, unidentified
MEHFVGIDVAKDRLDVHVRPSGESFAVARDGETLAGLVERLAALAPSLIVIEATGGYETVVASAIGAAQLPLAVVNPRQIRDFARATGKLAKTDRLDAAAIAHFAEAIRPPVRPIADAEAQALGELVARRRQVIEMIVAEGNRRRRATQRRVIRAIERHLAVLQAELSELDGDIDSAIRDTPAWQADADLLKSVPGIGPATLRTLIAELPELGHLTRRQIAALVGVAPINRDSGTLRGRRTIAGGRSAVRTALYMAALVASRANPVIAAHYQKLRAAGKNGKQALIACIRKLLVILNAILRDRKPWQPA

SEQ ID NO: 443892 - protein, 349 aa, unidentified
MNIDEVILGVDTHLNLHVGALISNSGKCLGTLSVTTDAAGYLKLIAWARSFGPLHRAGVEGTGTYGAGLARSLRENEVQVLEVNRPDRATRRSRGKSDPTDAENAARAVLSGIATAVPKEQSGAAEAMRSVSVTRRSAVKAKTQAINQLRALLISAPQDIRQRLLKDNTSDCVTGCSRLRSLGSTPLLQTLTATLVLLAKRWLALEEEIKTLDAMLDSLTTQYAPRLRGRFGVGPQTAAILVAVAGDNPERLKSEASLAALCGVSPLQASSGKIVRHRLNRGGDRSANNALWTIALVRMRSEPRTRAYVDRRTREGMSRKEIHRCLKRYLVREVYPLILEDLAASAQHS

SEQ ID NO: 443893 - protein, 401 aa, unidentified
MKQLYAGIDWASRTHAVGVVDDHGGIRARFQVPNTGKGFGGLIRRLTKLQVAGVAIERPDGPLVEAMLDAGLRVVVITPRQVKALGSRYRATGAKSDTAAALLLADVLRTDRHRLQPLIPDRDATIVLRALGRTRKDLQKARVALCNQLTAQLERCFPGAVGLFADLHSATAIAFLRRYPTSQAAATLTQATLTAFLPRIHYSGHTPVAVLLARLKTAPLAATSPDQATGRAVCVQALLDAIQACHSRERELEAEIIERLEVHADQQIFTSLPKAGHGVRAAALLSEIGDVRARFPDEEALAALAGVAPVTRASGKARSVDFRWACDKTLPNPIIDFADDSRHASPWAASIYAQALQRTRRHPQAVRILARAWIRVIWRIWQDHTTYDPTKHGRAVRLLTA

SEQ ID NO: 443894 - protein, 445 aa, unidentified
MSDATLSTKIAEPEWAALVAIDWADQKHFWRLALTDSGQQEQGELENTPEAVDTWAAELNIRFGGRPIAVCLEQSRGSLVYMLAKYPHLVLFPVHPKTAAQYRETFCPSGAKSDPSDTASLLDLLQRHRERLRQLQPDTSETRLLQLLVETRRCWVNEKTRQKNRLTACLKRYFPQVLQWFDKVDSALVGALLQRWPNLTELQRAHPGTLKKFFHEHNCRDEERIQERIAGIQAATPATVDAAILEGEAFNARGLVGVMATLRSHIDELDQRIAQLVAEHPEGSLFGSLPGAGAALVPRLIVAFGTRRERYDSAYQIQCYSGIAPVTEASGKSQWVHFRRACPRFLRQTFHEFASHSIRSSEWARAFYDSQIDKKKSHHAAVRALGYRWIRIIFRCWKDGKPYDEQTYQRSLQRRGSPLIGSFAPATGAGWKTVAGFQKLSQENS

SEQ ID NO: 443895 - protein, 366 aa, unidentified
MQKSSTMQRKRSKIFKEHQLTIGLDLGDRWSFYCVLDESGRVILEEKLATTPQAMKQTFARIARSRMALETGTHSPWVSRLLMQLGHEVIVAHAQKVDLITKSTRKDDRHDAKTLARLARIDPELLGPVRHRSAKAQIHLMVIRARAELVRARTALVNATRGSVKSYGERLPKCGTQQISGEFGAGLSLELREVLEPLFREIESLNERIKEYDRRIEKIVKETYPETALLKQVKGVGDLIALTYVLTIEDPHRFRKSREVGCFLGLRPGRRNSGESEPEMHISKQGDEYLRTLLVQGAHYILGPFGEDSDLRRWGRKLAERGGKNAKKRAVVAVARKLAVLLHRLWVSGEVYEPLRNSQKAMRAAA

SEQ ID NO: 443896 - protein, 474 aa, unidentified
MVQPKTKKKKNRQPPCKDRRPCEAPAEDMPLVQPNAAGIDIGSRSHWVAVPADRDAESVREFSSFTGDLHRLADWLASCGITTVAMESTGVYWIPVFEILEERGFEVLLVNAAHLRNVPGRRKSDVLDCRWIQRLHSFGLLRGSVRPDEPIVELRAYVRQRARIVQDAGRHIQHMEKALLEMNIQIQHVVSDITGVTGMRILKAILAGERDGNKLAALRDPRCRQPRERIAAALQGNYKREHLFVLGQALTAYDLHQSLLAQCDQRIEALLAELPARSEVPEEPCPPRRHGTPTHNQPRFEIQSPLHRLCGNVDLTQIPGLAPATALTVVSEIGTDVSRWPTEKHFTSWLNLAPGTKITGGKSLSARRAPSKNRAGQALRQAAVSVGRTQTALGGFYRRIALHRGAAKAAVATARKLGVLVYRALKYGMSFVESGLAAYEREQNARLIQHLQKRAAALGYQLLQAPAEAPAGAG

SEQ ID NO: 443897 - protein, 369 aa, unidentified
MNERTRFVGLDVHKATIAVAVADAFGDPEDHSQIANDPSAVRRLMQRLGGPDLHLEVAYEAGPTGYALHRQLTAMGIACVVVAPSLIPVRPGDRIKTDQRDAAKLARLLRSGDLTPVWVPDEAHEALRDLVRARNDAKVDLLRAKHRLGKFLLRRAIVPPVGVRAWSRAHDAWLGRLTFEHAADGVVLEHYHAVVREAAERVRRLETALAQCAAASPHAELLAALQAIRGIGFLTAVTIVAEAGDLRRFPTARQFMAYVGLVPSEHSSGDSRHRGHITKTGNRLIRHVLGQAAHNARYRPNVSTSLRARQRRVPPAVIEIDRRAQARLHARYRHLAGRIGTNKAIIAVARELAGFVWATGQLVPTALAA

SEQ ID NO: 443898 - protein, 347 aa, unidentified
MESTLIAVDTAKLVFEVAEADAAGKVRRRLRLNRPQFAEYLATREKAAFVLEACGGAHHWARVMERIGHSVRLLPVPYVCAYRRRNKTDRADCLAMLEAAKNPEILPVPVKTTEHQAIQGLHRCRSAWMETRTARINTLRGLLREFGLILPVGAAAALKQIPDALGDEALPPMLRPALQTLLDEIHELEQRIVAVERQLETISRQNPVIEHLRDISGIGLLTATALYASANDAKHFRDGRHLASWLGLTPREHSSGNIRKLGGISKRGDRYVRMLLTHGARAVLLRAGQMQRAGQPLNALQRWALSLKERTNHNKATCALANKIARIAWATWRHGTVFDPNQAAAAA

SEQ ID NO: 443899 - protein, 402 aa, unidentified
MNSVGIDISKGRSTVAVMRPFGEVVISPFEVRHTDSELSELARQLKSLDGETRVVMEATGNYHAPVAKLLHDAGLYVSVVNAKLVHGYGNNDLRRVKTDRKDAVKLANYGLDRWLTLPRYVPEENTRLLLKNCYRQYRQYSKVQTVLKNNLISLLDMTFPNANRLFVSPARADGSEKWVDFVAEFWHCECVSERPLKSFVNKYWRWCRKHGYNFSEEKAHAIYDEASGHIGVMPKSETTKLLVEQAVSQLSATSAALAALKQEMQSLSSQLPEYPVVMGMFGVGPILGPQLIAEIGDVRRFYSKKALVAYAGIDAPPNDSGDVIGRHKSMSKVGASSLRRTLFLIMSAYLQNSPPNEPVYQFMDRKRSEGKPYRVYMMASANKFLRIYYATVKAYLETLEQF

SEQ ID NO: 443900 - protein, 392 aa, unidentified
MLYIGIDVASRKHDCCIIAGDGAVLRENIIIKNNLEGFESLLSQIRSCPHKNNFSDVKIGLEATGHYNKNITEFLRKHNLNVTVLNPLQVNLLQKADSLRKTRTDKSAAIFIAQMMFSRQQPLKLPVSNEIDELRELVRHRSRLVEMSAKLKVSVCRLISIVFPELPETVWSIHQKSAYAMLLEYPTAQAVAQSHMTKLCNLLHDNSKGRYGKQQAENIRDLARSSIGSSNPSYAFELQQTIRLIQTLQSESDLLDLRIKVIMDTLNSPIMTIPGISYRLGSVILAEIGNIHNFSNPNKLLKFAGLEPSVHESGTYKSTNEKMVKRGSKYLRWALLTASRLVAMRDPTFKAYSAKKKAEGKSFWVSYSHIARKLVRVIFHLLKNNINFAPQT

SEQ ID NO: 443901 - protein, 354 aa, unidentified
MKRTTKYVALDVHQATTVASVREDSGRVIARSVLPTDGGAIREFVRGMRGAVHVTFEEGTQAQWLHDLLAPLVDRVVVCDRRGVPRHGNKGDHVDADQLAELLRRGGLRAVYHGSAHRAGLKELTRTYQNLVEDSTRVMLRLKALFRARGIPTAGTAVYHRHQRARWLARLPDGGARFRADALYAELDVLRQLRPKAKAAMVTEARQDPAWPVLRTIPFLGPVRVALLLATMQTPWRFRTKRNLWAYAGLAVVTRSSADYALVAGQPVRRRRAPMTRGLNRNHNRVLKDVFKGAATAATARPGPLQDVYHNVIARGTREELARLTLTRKLAALTLRLWKKGERYDPTKLTTPAR

SEQ ID NO: 443902 - protein, 408 aa, unidentified
MTVVGIDVSKGKSMVAAMKPGGELVAAPYEVRHSDIELSHLALDVLCMEPDTRVVMEATGRYHEPVAALLHSEGIFVSILNPLLIKQSGAGSLRKVKSDPKDALKIAKYGLDNWSTLREYTPMEAIRQQLKLCARQCDLYNKNIVMLTNNLISLSDKTFPGVNELFSSPEKADGHLKWVDFYRSFWHCDCINRMSPDAFEERYKKWCKRKGYHFSTDAADALYAASCGSYTTLPRDNNAKLLVTVAADQLIALRENQSKLEAETLNLCKQLPEYETVMAMYGVGKSTGPHLMAELGDVRRFPHRSSIVAFAGVDPGVVGSGKMQLSSVTTSKRGSPQLRKALFQVVSTYVKCKPENEAVYQFYAKKRDEGKPFFVCTTAAANKFLRIYYARVKECLNAAESATQVEEG

SEQ ID NO: 443903 - protein, 320 aa, unidentified
MRNAVGLDISKLTFDATAIVGNAEYSAKFDNDSKGLNQFSDRLKSLGCQNLHICMEATGSYYEEVADYFAQYYSVYVVNPLKISKYAESRFKRTKTDKQDAKLIAQYCRSAQESELVKRQKPTDEQYRLSRMTAAYAQIKSECAAMKNRHHAAKDEEAAKAYAEIIKAMNEQLEVLKEKIKEQTEKPNCKEGVKRLETIPAIGRMTAAVLFHHLTSSKFETSNKFAAFAGLSPQQKESGTSVRGKGKLTKFGNRKLRAVLFMPAMVAYRIRAFPDFIKRLEEKKKPKKVIIAALMRKLAVIAYHVHKKGGDYDPSRYKSA

SEQ ID NO: 443904 - protein, 292 aa, unidentified
MKQYVGLDVSDEEASVCVIDEDGVIVAEGKVSGEPGAIAAFLGREAPHAVKVGFETGPLSTWHWHELTDLGVPAVCIDARHAKGALSCRINKTDRNDAVGIAHIIRMGWYREVKVKSYASRHVRSSLRARALLIKTRGDYENQIRGFLKTFGFRVGKTGTAGFAKRVHELIEDHEDLRKLILPLLEVREAIRREIARMDKVLGEVVKGSETLRRLMTVPGVGPITALSFASAVDDPSRFRKASSVGAYLGLTPRRYQSGETDRPGRISKAGDGMVRKYLFEAAVVLVTRGSA

SEQ ID NO: 443905 - protein, 327 aa, unidentified
MSISEEVNVLGIDISKSKFDVALLKGNNKIKSKVFANNPEGFAELQEWLTSQSVANLHSCMEATSIYGNALARFLFSAGHKVSIVNPSRPKAFGRSELSRTKTDRADAKVIARFCAALHPAPWTPPAVEVEQLQALVHRLDNLTAMQQQEQNRLESADQILVEAILAHIDFLKEQITKTKNLIRDHFNQYPHLKAQRDLLTSIPGIAELTATVILAEIRDVSAFDTADQLAAFAGLTPREFSSGSSVHGKPRLSKIGNSRLRKALFMPAIVARRYNPPILAFCDRLTAKGKSKMSVIGAVMHKLLRQVFGVLKSQKPFDPNFLPLTP

SEQ ID NO: 443906 - protein, 428 aa, unidentified
MTQVSSTTSSTVWVAIDIAKVHSQVLVELPDGRRRHLRMVNTLENFTKLATFLAGSGCTCRIAFEATGDYHRPLAHFLRAQGFTLCLVSSIAVARTRDALYNSWDKNDPKDAQVILHLLKAGTTQVYYDPLENHFNDLQELANTYQQISLWKVRLYHSIVTHYLPLYFPEAERYLHSTRAEWWTQLLLLVPCPAAVLTYSLEEFLQAARRLPGQKIDKTRWLTDFYEAARTSIGLPVAEPSDAIRMFRVVLNEYLHLCRLRRELEEQVVARLSDHSDFRRLQTIPGIGPILALFILAEVGDLRRFSHYQKFLKYCGLNLSTEQSGQFRGTTRLSKRGNARLRYAFWMAGTIAVRARQNSFCQKFQDYIRRDPLNPDLRRKAYTAVAAKMARVVYAVIKTGTDYRRFPEATMPGGRIPSLRAVEAISTS

SEQ ID NO: 443907 - protein, 332 aa, unidentified
MKTQIEIQVKNQNSETYIGVDVAKATLDAYRTHDHATRQFPNSKEGFKQFLKWSKEMPPTLVLCEATGGYEKNFVIALANAEVPFRVANPARVRDFAKSHGILAKTDKLDAKVLAKFAAERSLEPQKLQVETQRRLKELIGWRRQLIKARTMHRNQLEHAADKMVVKETKWLIKQLNKQIEKVEAELDQLIDNDPQLSNFNDILQSIPGFGPEMARTLIVELPDLGKGDPAKLCRLAGVVPLNGDSGKFRGKRRIYGGRGTMRTVLYMAALSAVKCVKADNVFRQLYLRITATRPHKVGMVAVMHKMLIIAHALVKNNEKWQNKMVKKITEN

SEQ ID NO: 443908 - protein, 322 aa, unidentified
MKTPSLGIDIAQPSFVAALWLEQRSLGQRQFENHSGGFRKLRRWLQSHGVGSVTVGLESTNTYAEALAHWLHAEGHRVYLLNPERTACYARCRGQRNKTDPVDAVTIAAFVAEHAGTPWQPPSPEQKTLRSLTRTRAQLVEYGKKLRNQLKTADPLAQTHLKTVLQAVNRQLLALARDLAQHLRAHPVLGEKVRRLMTVKGVGLITAAITLAELPPITPQSDPRALSAWAGLTPRRHQSGKTELPAHLSRKGNAHLRHALFMPALVAKKHNPLLRDFALHLAAKGKRPGAILGAVAHKLLRILVGLLRSNSDFDPNWSFKKI

SEQ ID NO: 443909 - protein, 349 aa, unidentified
MSAKFNSEIAVIGIDIGKNSFHVVGLDRRGAIVLRQKWSRGQVEIRLANLPPCLIGMEAGVGAHHLSRKLTSLGHDARLMPAKYVRPYSRGQKNDFRDAEAIAEAVQRPTMKFVATKTAKQLDLQALHRVRERLVSQRTGIINQIRAFLLERGIAVRQGLRFLRAELPRILATPRDVLSPRIVHVIEDLAGDWRRLDERIEGLSSEIEVLARRDVSCERLMSVPGIGPIISSAMVAAIGAGDAFSKGRDFAAWLGLVPKQISTGDRTILGKISKRGNRYLRVLFVQAAWVVLIRPKSWDRHGLKPWLEAAKKRLHHNVLAIALANKLARIAWSVLAHGRAFEAIRIQAA

SEQ ID NO: 443910 - protein, 351 aa, unidentified
MEQITEKCLYVGIDVHKRQWSVSIFTSTIHHKTFSQPPEPAALQSYIDKFFKGRRVTCAYEACKFGFWIYRELTSFGYECLVVNPADIPTTNKESSEKTDPVDSRKIARALQGGMLRGIYVPDECTLGHRQLFRYRKKLWADLVRVKNRIKDKLLFNGIAIPKEFDNPYWSKAFLKWLATVEFKSLHTRTTLDHLLEQYEMVYRHFLKVSIEVRALHKLPRYKEDAKRLRQIPGIGPLTSVLLLIEIEDINRFKNFKHFNGYLGLKPMVHSSGDKDRKGYMTYRSNHALRSSLVECAWTAVQRDPVMLNCYEELITRHTKKRAIVKIARKLASRIYRVLKEKEDYEVGVVQ

SEQ ID NO: 443911 - protein, 344 aa, unidentified
MSEAYEGRQIVGMDLHRRRSVLVRMTESGEQLETVRISNDPEYLRQVMARAGEAPEVVLEATYGWYWAADTLAELGAQVHLAHPLGVKMFSLRRVKNDQRDAADLADLLRMGRLPEAWIAPPATRELRGWVRHRAKLVGIRSNLKCQLHAVLAGAGVAVPMSDLFSPGGHKLLTATALAVESRARVDSLLRLITALDFEIDTYAKLVAGRLRTDPGYAAIQQIPGVGPLLGAVFVAEIGEISRFARPAQLASWAGLTPTHRESDTTVRRGRITKQGSRLVRWAAVEAVQRVPAHTRLGQRRDRVAERRGRNIGVVAAARDLVTLVFYGLRDHHIRCLHPAAGAA

SEQ ID NO: 443912 - protein, 415 aa, unidentified
MHTFEQLTHFAGFDWAKDHHDAVILDRHGATVQSVTFAHTAEGWAQWREMIKAYPALGVAIETNQGAAVEQLLQSQVTVYPMQPKAAERYRDRHVPSGSKTDRTDAWCFGDALRVDGQHWRPLAPEDPLTEELRLLCRDEVELITQRTALVNQLQQALYEYYPAALEAFNDWTAPSAWEFVLAYPTAEQLVKAGKRKWEKFLHTHKLWRPDTAPKRLEIFGRADRFCGSEAVTRAKSRLAVSAAQVLRTLQKQLEEYRSAIEKLFAQHPDHDLFGSLPGAGVKLAPRLLSEIGSDREQYPDAQGLQCVAGTAPVSFESGKIRRAKIRWHCNRHLRHAVHLWADCSRKFCAWAGTYYQAQRDEGKSHACALRCLGQRWLKILWKIWQSRQPYDETIHALNQQKHGSWLLQFKPKTT

SEQ ID NO: 443913 - protein, 533 aa, unidentified
MRRRKKARRRGKGLSFKQPRHSLAERVEKVGAGKFGILAVDCAKARFQVMLTNFYGRVLMEPVEVENTAPALDALVTTVRRECEVHGLKDLVVGLERTGRYHRPIRNVLRPHWSVKIVHPLATKRLRVPADPGNKTDATDLLAIMRAIIAGYGTPEQELCETWAEWRSVSRAREEMVSIRAFLRVRIQERIEELMPGYAALFADLWRVPGAQLLAERYGSAAALREAGQEALVEGLRAAGLRMQCTTVARILAWAHIAPPPEAGADALRKLLAGQLEFMHKAEAQILDYERDLALYVADSPFVLLLGMRGINAVSASSYGAELGPIEHYANSRKITGRAGLYPSRYQSDETDLADGPLVAHRNARLRGALLEIAHNLLRHNPHFKGWAALRRAKGRKAKELHVAVASRFARISYVMLTGQRAYRHPADSGRDAILAKLTRFALDHDMGPEHTRDLLCRAVRQIPPEIRHEEAQAIEAIRPRRPRRDSRWARGAGPELLRNILPAVLDELTAGRPIKPERSPHKPKPDSGRTSH

SEQ ID NO: 443914 - protein, 342 aa, unidentified
MEDYIGIDVSMKETALSIRRGGQRVWRGKCVSDPKRIAQIVRKHAPSATRIVFETGPLSVWFYHALRAEGLPAICIDARHAKAALNMAANKTDANDADGLAHLAEVGFYREVRVKGFDSMLARTLVAARTKLVRIATDLSNQIRGLMKTFGLIIPAGKGRNFEKNVRNLLTDQSDLAGILLPMLDAWRSIRARATELTKILLANARQSHDCRLLMTIPGVGAITATAFATAIEDPENFKNSRAVGAWLGLTTRRYQSGEVDYGGRISRRGDRHVRGLLYEAALVILTRGSAESDLRNWGLKLRERLGFKRAAVAVARKLAVTMHAMLKTGEAFNRNTEVKAV

SEQ ID NO: 443915 - protein, 400 aa, unidentified
MSVVGWDWASQAHDVTVLDDAGAVLDRWAFPHTEAGWVMALARLRCHGEPGDLPVIIEKTSGLVVDRLLAAGHPVVPVHPNSFHAARPRWGASGAKSDPGDSYKLADYLRTDGHRLRRLEPADPGLRELQALVRLREDQVRARTAATNQLWAMLGNYWPGPRDLFYCLASAIALAFLTAYPTPASAARLGEARMAAFLRRNSYRGGTSPALLLARLRAAPQAPLALPAATLTAMVRAHVQQLRSLQAAITGIEHLIAVRVAAYPRTRLLAPLPGAGTINLAQLLAEVGPILDRATSAEHAATECGTAPVTHTSGKTTGVYFRWAASTRARKAITAFAHNARMQSPWAAKLYADARARGKRNPHATRIVARAWIRVIWACWHTGTPYDPATHRAVRQPLTG

SEQ ID NO: 443916 - protein, 309 aa, unidentified
MSAYAGIDVSKATLQVALYPEVSELCVTNDAAGLEAITLYLKDHAVERVLVEATGGYERLSVRLLAKAGLKVQRINPVRARQFALAMGKRAKTDPIDARMLALFASALEDKHFVVPDVAREELTELVNQRDSLVQQRDDNRRRMKQATLPVVLEHYTTLESTLRVLIKACDKQIAEQSRRVDADLLKRLSEIKGVGSVTIASLFCYLPELGDLNRSQVAALAGVAPYNNDSGTKIGKRHIYGGRAKLRRAAYMCALVMTRVNPDFKARCARLRASGKPAKVALVACMRVLLVRLNAMVRDGEPWRDQPI

SEQ ID NO: 443917 - protein, 345 aa, unidentified
MTVYIGVDFHARAQTISYLTTEDGEIRRAQLDHGQPQEVRKFYEQFAGQQVIVGFESSGYAAWFEEMLEELGCEIWIGHATAIRLFARRRQKNDRRDADLILDLLWRGDFPRIHRYSPESRAVLQQLRYRQRLVKMRTMIVNSLVFMASSRGVSLRTQLKSRQGIERLRQIALPQPLIEQRDEMCQLLQELKTKIDRVESWLAAKAETNVSVQQLRTHYGIGPLTGLCLVHTLECVERFANPRKVTAYVGFDPVEDSSGERRRIGSISKQGSRLLRFLLVEAGQIAIRKDQDLARVYHRVLVRRGHAKAKVAIGRRLLVRAFIMLRDEIDYAEFQRRGVAARSSR

SEQ ID NO: 443918 - protein, 416 aa, unidentified
MWLATKIQLTRISAGVDVSKNRSTVCIIDQDGKVIMRPFLVCHSTEELDFLADTLKRLNGEVRVIMESTSIYQYPIALHLKEKGIFISIVNACKVKKFANTDFRGGKTDKKDSRTIASYGISYWDKLVEWQIPKDTYFNLDLLNRTYMNAKKHRQIILQELQHYIDCAMPGMDKELHSLNLNTKKDFMLDFVEKFWHRDKIVNMTEAEFTEVFTAWAKEKGYRPGKGKAAKIYAIAKSCIPYYPANPTVKTILQCIVDKLSGVNRTLVTIVTQMIEEAKKLPEYQIVREMPGVGDPLAARFFGSAGDIRRFKNSKALVAYAGIDSPPDESGDFSSTHRHITKKGSKVFRDTGYEIMMALRAQKRTWEKVRKNPEVYDYMLRKEKLINKITKVLKLEDRYKDLVVYADKYMKEVIKC

SEQ ID NO: 443919 - protein, 320 aa, unidentified
MTYIGIDVSKDSFVAAYPAKSGYTTKTFPNTTSGVRRFIQSLPTESHCVMEATGNYSMLLLYLIQEANIPVSMENPQKIKHFAQAMLSTTKTDEIDAKLIAMYGEKMEPAPYKIPSESIIMLKQKRTVLRQFKKQLTMMVNLQHSLSVLPKQDPTAKVVTEQTIKHLRKQISKMEEEITNLSNKEFKRQMDLLTSIKGIGENIASALIMATGGFTYFSSAKQISRFLGLCPTYQQSGTSVNVKGHINRNGDAHLRSQLYVIAFSSIRFNSACRETYERLRARGKSGKVAIVAVANKLIRQAFAVVTNNRPYIDGYVSTLA

SEQ ID NO: 443920 - protein, 338 aa, unidentified
MKKFLFIGIDFSKSKFDVTVLKSIDQQDFAHAIFLNEKKGFNDFLKWVSKQSNVPKQDWLFCGEHTGLYSRELTNFLIKKNLFIWLENPLQIKCSWGIKRAKTDKIDSLEIARYAFRFEDKAVACKPANKDIESLRLLFAYRGRLVKNKVSLEVSAKETRRVITRDTTSRFIFENSQHDIDRIKKEIEVIETKMHDIIVSGKLKYLLVVSIKGVAMITAIALIIHTNNFETFKTARQLACYCGVVPFEKSSGTSINKGKHISQLANMEIKALLTQCARCAVQYDKELAAYYTRKIAQGKKYRVVINNVRNKLIHRIFAVVNNRIPYRENYLNPFLDCA

SEQ ID NO: 443921 - protein, 348 aa, unidentified
MILVGCDLHTRKQQVALLNTETGELWDQELSHDGDAIERFYAALPPPVTVGIESTGYSLWFHALLQRLGHTLLVGEAAKIRAMVVRKIKTDRRDARHLRDLLKDDRFPVVWIPDPATRDLRALIKHRLRFVRIRTMVKNGLHAIALNQRLALGPSLWSRAGLAQLHALVLPPHTRRRRDDSLELLQWLNGHIDELDLHVATAAAADPDARRLMTHPGVGPLTALATVLVLGPVGRFPGSKHVVSYIGLAPAVSASADKYRLGHISKQGSALLRWVLGQAAPLATRGDAALKRIYFAVLRRRGRPKAKVALARRLLIRLYVMLRDQIDYDEFCRRGRTQRPGLEARIPV

SEQ ID NO: 443922 - protein, 316 aa, unidentified
MSIGIGIDISKDKVDVASSDGRWSAVFPQTGAGLQELAQTVAAMGPHRVVLEASGGYEREVLVALSLEKLPVVLVQPIRAKHFIKGMGRRAKTDAIDARSLAQMAMVGVDDAPLWQPLDRDVAELRALVQRRQQLVLHQDNEKKRRRGATAAVLESIERAVQFVKEELHAIEKQINALVSCVPALETAVATLETVRGVGRVTATSLVVFVPELGRVDRAAIASLVGVAPMNNESGQWKGQRVIQGGRPDARKVLYMAALAAVSHNETLKTFYAGLRAKGKPGKVALVACMRKLLVHLNSKMRAHLTAGTAVEIALG

SEQ ID NO: 443923 - protein, 349 aa, unidentified
MNESKTIAVDLAKDVFELVAADAQWRIVERQRLTRTQLSRYFQNRMPVDVVMESCGTAHYWARTFEALGHTVRLLPSQYVRAYRRRNKTDRSDATAILEAARSPEIKPVAVKNVEQQTIQGLHRVRSQWMTTRTARINVIRGLLRELGYPLPVGSHIVRRKAPEVLEQLPAPLRAAIEELLEEIRSLEQRIHAIEDELERFARQNEAVETLREVPGIGLLTATALWAAAGSAAVFKSGRHLAAWLGVTPREYSSGNQRHLGRISKRGDVYVRMLITHGARSVLARAKQLHRSNKSLTRVQRWAVQLEQRIGHNKATCALANKLARIAWALWRHHGSYDGAHVSQRAVTI

SEQ ID NO: 443924 - protein, 329 aa, unidentified
MLDGSGEVIEAFRVRTTQSALSSRLSSYPPSRVVLEVGTHSPWVSRTVTAQGHEAIVANPRRVRLIAENDSKSDGVDAELLARLGRVDVSLLRPVVHRGAQAQRDRILIQTRDGFVRARTQLVNQVRGFAKALGTRLPASSTEAFPKRVRRATSMDLFPGLETLLGTIEQLTRTIREMDAEIERLCEERYPETALLRQVPGVGAITALYYVLTIEDPARFAKSRSVGAYVGLRPKQRDSGEQSPQLRITKAGDRLLRSLLVRCAHYILGPFGPDTDLRRAGLRMCERGGGAGKKRAIVSTARRLAVLLHRLWVTGEVYERLRAEASRAA

SEQ ID NO: 443925 - protein, 347 aa, unidentified
MNFYNDQHKHYCGIDLHARSLYVCILSLAGEILVHKEISAKSERLAELIAPFLDDLVIGVECMHCWYWVADYCEEQGIDFILGHALYMRAIHGGKTKNDRIDSLKIAQLMRGGNFPLAYVYPREMRSTRDLLRRRTHLVRHGANLKAHVANTTSQYNLPPNRVNLKNVSAREQLRHTFPDEAVQHMIDLDMAVLECYHRELSQTEWYLEQQAKKHQPVYLNLLKTLPGIGRILALTILYEIGDIDRFETVQKFASYSRLVKCKAESAGKSYGTQGNKIGNAHLKWAFSEAAVLYLRGNDKAQRYLKKLQKRMSKAKALSALAHKLGRAVYFMLKNKTVFNEKRFLTG

SEQ ID NO: 443926 - protein, 449 aa, unidentified
MREPQEIEEREYEIAVARVAAVDVAKASGVVCTRVPREGGGSRFVTKVWPVDATTGAILELADHLVALQVEKVVLESTSDYWRPFFYLLEAAGLNAELVNPRDVKNAPGRPKTDKLDAVWLAKLAGWGMLRPSFVPPPEIRQLRDYTRLRTDLTRERARHWQRMEKLLEDALIKVTTVASRIDTMSVRDMLEAMIAGQRDPQKLADLARGKMKAKRAALVEALTGRFDDHHAELAAILLSQIDSLTAQIDALTARIGELITAIPAAQGVDADGSTGPAAGQGPQAPVPPAITRLAEVPGISQHAAQVIIAEIGLDMTRFPTAGHLVSWAKLCPRTLQSGARTRPGRTAKGNPYLKGVLGDAAAAAGKTDTFLGERYRRLVKRRGKLKALVATARTLLVIIWHLLADRDTRYHDLGAAYHASRLDTGRRARNHVRQLQALGFTVTLTPAA

SEQ ID NO: 443927 - protein, 349 aa, unidentified
MHTYLSLTEAGMKKYSGIDLHSNNSVVVVSDEADRVVYRRRLPNELGKILEALEPHREELAGVAVESTYNWYWLVDGLQAAGYAVQLAHTAAMKRYEGLKHSGDDTDAAQLAHLLRLGILPSGYIYPVAERGLRDLGRRRLQLVRHRTMHVLAVENVQARQTGARMTGDRVKRLSAQELQALGLPEDVTLGLQANVAMIGALNEEIAKIEKHLAQRLRPRPEYTLLNTAPGIGRILAPIILLETGSIERFAAVGNYASYARCVDSVRLSNGKKKGEGNVRNGNKYLAWAFIEAANMARRWCPEARRFHDRKRAKTNAIVATKALAHKLARACYHMLRTGEPFDMKRCFG

SEQ ID NO: 443928 - protein, 414 aa, unidentified
MEIVHSRCAGMDVSKRDAKVCVRVAGRGRRKTAETVTTWASTTNAILALREQLIAEQVSLVVMEATGDYWKPFYYLLEDAGFEVLLVNARQVKNLPGRKSDVSDATWLAQLGAHGLVRGSFVPPPPIRELRDLTRARAMMTRERGREIQRLEKLLEDAGIKLSSVASDITGVSGRLMLQALIEGQRDPAVLADLAKRRLRAKIPALTEALTGRFTEHHGFLARMYLDTIDQRTRQIEQLNTRIETAMEPFRGFCALIGTIPGIGPRCAEVIVAETGADMDIFPTAAHLASWAGTCPGSNESAGRIKSTATRPGNPYLKAALGAAALSVAHTHSTYLSAKYQRIAARRGPKKALVAVEHAILTAVWTMAHTGALYNDPGADYLTRRDPERLKARALSQLQRLGYQVTLGPITTSA

SEQ ID NO: 443929 - protein, 332 aa, unidentified
MNYNTVYVGMDVHKESFSLCAYTIEAEKASHYQRTEADYKKVLNYLEFLRTIYGDDANFICGYEAGCLGYTLYHQLTANNVKCIILAPTTMLEQRSKKRIRTDKRDAEIIAKCLAQHNYSPVHIPTAKDEETKEFLRMGDDHKLALKKVKQQILAFCLRHNYRYDGNSHWTAAHLKWLKALTPEALYKEILDEYLLTYQALSDKLERLDKRIEELSTQDEYKEAVKKLCCFIGVKTHTALSVLVEVGDFKRFASAQHFASYIGLVPGEDSSGDDQNRLGITKAGNRHVRLLLTEASQCYARGQVGFKSKELKARQSGNTPAVREYAGSHRLC

SEQ ID NO: 443930 - protein, 458 aa, unidentified
MRRQNRRPLRAAVAPKLGRHNPAAAGLDIGAEEIWACVPAARDTPPVRAFGTFTPDLHALADWLAHCEVTTVAMESTGVYWIPIYEVLEARGFEVALVNARHLKHVPGRKSDVQDCQWLQQLHSYGLLTASFRPAEDMRVLRAYLRQRAMLVEHRAGHIQHMQKALQQMNVQLTQVLSDITGTTGLQIIRAIVAGERDPQVLARLRHGRCQRSEAEIAKALSGHYRPEHVFALKQALALYDFYTAQVQECDTYIEQHYAAIKPVYDEQTPPPPLGPDPKPNSHAKNAPAFDVRACLYRILGLDLTATEGLEASSAQVLLSEIGTDLSKWPTEKHFASWLGLAPHNDISGGKVLRSKPLKGNRRAAQTLRLAAQTLGRTQTALGSYYRRLRARKGPTQAITATAHKLARILYHILTHRTPYHSQSQETYEQYLRQRAMRHLKRTATRLGFTLLPQPVAA

SEQ ID NO: 443931 - protein, 334 aa, unidentified
MEQITTVGIDLAKSVFSLHGVDGAGRVGFRRTVRRDQLLEVVAGLSPCLIGMEACSGSHEWGRRFQEHGHTVRLMAPKFVAPYRKSGKNDGNDAEAICEAVTRPSMRFVPVKSAEQQALLTLHRVRQGFVVERTATINRLRGLLSEFGVVLALRSVTVRRQAAAAAEGLPELARRAIGDLLDQLRVLDERIGGYDREIEAQARLCEPAQRLMKIRGIGPTTALAIVATVGNAREFKNGRQFAAWIGLTPSQYSTGGKARLGHISKRGDAYLRNLLVQGARSVLNSAGMHQDRMSRWILELQPRRGYYRTLVAIANKNARIAWALLAKNESLRTA

SEQ ID NO: 443932 - protein, 315 aa, unidentified
MVTGIDCSKDYFDIVVLKEGKVGFKSRFTNDIKGFIDMLPHILDTHLAMEATGPYYFQLARFVHHSGILVSVANPLVIRRFAQMRMSRAKTNQKDAMVIAEFAKMTVPKLWEPPTVEIQAIRNLESYLEGLKQRRQMLSNQLHAFEAAGTIDELLYNEIKEEVESHDKRIKNKEHQIAELIQQNYAEMAANLKSIPGIGPRSTSMLIIATDGFGMFENYKQVISYFGLAPRIYESGTSVKGKGHICKMGMGQMRKVLYMAATSAIRCNKACKELYERLMAKGKPYKVALIAAVNKLIKQAFAIAKSVKSYTVQLI

SEQ ID NO: 443933 - protein, 457 aa, unidentified
MNPKRSKPKSDRTMPMIHPNAAAIDIGATMHAAAVRADRTPEPIRSFGTFTTDLHRLVDWFTECGVETVVMESTSVYWIPIFELLDARGFAVFVVNARDAKHVPGRKTDVSDAQWLQRLHSYGLLRASFRPKGQIAELRAYVRQRERLLEYAASHIQHMQKALTEMNLQLHHVVADVTGATGLRIIRAILAGERDSKVLACLRDYRCHSSAEAIEKALTGNYRAEHLFALEQALALYNVYQDNASACDARIEAVLTELSISRGRDAGPLPSPRRRLHGKANGPDFDVRAALFKLLGKDLTQIDGLGSYLSLRLIAECGDDLSAWPSAKHFTSWLCLAPSNKISGGKVLSSRTRRSGSRASALLRLAAVTVGRTDTALGAFYRRLSARIGKAKAITATARKIAVLFYNAVRHGMEYVDPGSSYYETRYRTRVVENLHRRAKAFGFVLLPLESKAGAVS

SEQ ID NO: 443934 - protein, 429 aa, unidentified
MQVVYERCCGLDVHKRTVVACVLVTQPDGTAQRDVRTFGTMTADLLALSDWLTARGIPVLAMESTGVYWRPVYNLLEEGRQILLVNPQHLKTVPGRKTDVKDSEWLADLLRHGLLRASFIPPQPVRDLRELTRYRTTWVQERAQEVNRVQKVLESANVKLAAVATDVLGVSGRAMLEALLGGEQDPAALAELARGRLRAKLPELRLALEGRVRPVHRVQWRVLLAHIAFLEGALAELHGAIERLLGPFAEAVALAQTLPGVGETAAVALIAELGTEMDRFPTHRHLASWAGVCPGNRQSGGKRLSGATTQGNSWLQAILGEVAWAIAHTSGNYLSAQFHRLARRRGKQKAVVAVSHSVLVILYHMLRDHKPYTDLGADYFDRLDIARLQRHHVRRLEQLGYTVTLTPASAPEGAVRENFREKRPLYRDK

SEQ ID NO: 443935 - protein, 319 aa, unidentified
MNTSVGIDVGKRELVASIRDTDGNSAIAAPFPNTSIGLRKLIVHIKKEGIGVDDPILLESTGPYHWQAARTLADRGYFVKVANPLHTKQIARLSIRKRKTDKVDAAQLAFLASQGYGYRFTETKEGAQGKALVRHFWKLRKVATNLLIHERYLKEYRDISRTSASALLVKQCEKLKKEIVKKWSKGNDVKYLDSIPGIMPFLAAVILAELLPLERFERIEQIVAFAGLDPSVKQTGGRKGSHGPISKRGSPTLRNALFLAAFGSFQREPMRSLYLKHRARGLHHNAILCVLGRKILRIAVALLKKRRVFDAKYLSTEEN

SEQ ID NO: 443936 - protein, 411 aa, unidentified
MAAVACGIDWAEGHHDVAVVDETGVVIAAERISNDGAGLSRLLGLLADHDRGGQKLPVAIETSAGLLVAGLRAAGWQVFAINPLAVSRYRDRYRASGGKSDAFDAMVLANVLRTDRPAHRPLPGDSPAVQALRVLTRAQQDAAWERAELGNRVRSLLKAFFPAALAAFERGGKHQLHSPACRTILSLAPAPEAAASLSAARLAAALRRAGRTRGIAAEASLLKDLLRTGQMRQLPAVEEAMGLQLRGLIRQLDAVCVTLAELEAAVEEAFAAHPDAPVVASFPGLGTQLAARMLAEIGDDKTRFADSRALKAFAGAAPVTRASGKSRYVHARRAKNDRLAAAGYLWALAAVRHDPLWEARYRARRAAGDRHATALRKMFNTMLGKLHHCLVTDQPYQPELAFPTDTQRTAA

SEQ ID NO: 443937 - protein, 321 aa, unidentified
MSAPCAVTVGIDVAKAHVDVSVLGANLDIRRFNNDAEGHSALAVALQPLNVQLVVMEATGGCETELACALQGAGLPVAVVNPRQARDFARSMGRLAKTDAIDARMLAELASVLLRRDDLSRLLRPVPDERQQWLAALVTPRRQLLTMLLSERQRLQITPVGLHPSLLAIIAAIQAQLDDIDAQMVAHVRQHFGELDRLLQSTHGIGPVSSACLIAELPELGRLNRRQIAALVGVAPIACDSGLRNGRRRVQGGRFAIRRVLYMATLTATRYNPAIRAFYQRLKAAGKLSKVALVACMRKLLTMLNARVKTNTPWDDSLHRA

SEQ ID NO: 443938 - protein, 422 aa, unidentified
MSFVQPTESLAVLVAIDIAKLRHDVLIEAPGWKSRKRMILPNTAAEFRLFADYLHGLKHPVRVVFEATGNYHRPLAHFLKTEGFHLELIASLAVARTREAMHNSWDKNDPKDAQVLLHLLKTGVTQHYHDPLANQIHDFQELSLTYAQISLEKTRTQHRLLTHYLPLYFPEIERYYHASRSEWLLSFLHVFPTPAMIARLSMQDFVQQAWPVVGRKVSKQRLLEDIYRTAQASIGIPVDEDSEAVAMFRVVLSEMIRLCQLRDQLEQRSALHLKDNADFRRLQQIPGIGPILALTILAEAGDLRRFNHHRQFLKFCGLDLSTQQSGQFRGSTKLSKYGNARLRCAFWMAATVAVRQTENSFRDKFERYLRRDPSSADRKRMAYVAVAAKMARVVYGIIKSGTEYRCFHEAAAPSGRAVSVGP

SEQ ID NO: 443939 - protein, 362 aa, unidentified
MLEDRRAVTVGLDVHKLSVRLAAVRAGELIAEQTLVHDHEVVVEALERWPRARVCQEAGPTGFGLHRALVAAGIESVVVAPGLVPSRPGDRVKTDRRDARRLAGLHAALLLTEVFIPTVEQEALRDLVRAREDARLDRMRARHRLGKFLLRHDRRMPTQCWGPTRRAWLGRQAFERVGEQHAFDDYLLAVDQVDRRIEQLERAIGQLASDGPHAGQIARLRCMRGIDTLTAVGLVCEAGDFIRFKTAEQFMSFCGLVPSERSSGESRRQGAITKAGSAHARRLLIEAAWNSRRRPTVGYELQRRQQGQDPLAVERAWRCQQRLHHRWQRMGGRGKPHPKIVVACARELAGFVWAIATEQPMR

SEQ ID NO: 443940 - protein, 311 aa, unidentified
MTISPGYVGIDISKRTLDVFDAALGRGERIENASAAIAVLVQRWRGKDMLIVFEATGSYDRLLQAALHAAGVAFARVNPGRARDFARAAGFLAKTDKVDARMLAMMAERMRPRPEPAQLAERERLKMLHRRRDQLVQSRKQERTRLSEALDEEERTDITHHITWLSANILDLERRIRHLIASAEALRLATARLRQAPGIGPVAAATLLALLPELGSRSPKAIAALAGLAPLNRDSGAVRGKRTIAGGRKRVRDALYMAALTAVRAHPYFQHFYQRLLAAGKAKKLALIAVARKLLIALNAMIRDGNAFRPV

SEQ ID NO: 443941 - protein, 413 aa, unidentified
MEQLIQRCAGIDVGQAESVVCVRVPDTVTGAPAELIATYGTTTPDLLELVDWLRGLGVTHVAMESTGVFWKPIYYLLEDDFTVLLVNAAHIKHVPGRKTDTIDSAWIAQLLAHGLLTASFVPPPPVRELRDLTRYRKALVNEKTAQVNRIHKVLQDSGIKLTTYATDVMGVSGRAMMRALIAGQSDSAALADLAKGRMRTKIPDLRKALTGRFREHHGFLLKQMLDHVQAQESEIAALDERIEAAMAPFVPQVELLTTIPGVDHRSAQVILAEIGPDMSVFPTAGHLASWAGMCPGQRDSAGKHGSGKTRKGSKWLRGALVQSARSASRSKGTYLSERYRQIMRRRGDAKAIVALGHEILLAAYRVLATGQPYTDPGPTAFSRLTAQRLTRQAVRRLQDLGYQVTIEPRTDAA

SEQ ID NO: 443942 - protein, 368 aa, unidentified
MITERTSLGLDVHARSVSAAAIDTLTGEVIQRRLDGEYSHTIDLASRLAAEHGPLLITYEAGPTGFGLARELTAAGHRVQVAAPSKLARPAGQRVKTDRTDAMFLAECALNGTITPVRIPTLAQEGARDLVRSRDDARTDLMAARHRLSKMLLRRGWVYPGKTTWGPAHDAWLRALRREDVPALGAGATAAFDDAYDTVTHTLARRDRLDTAIAALAADSEFTPVTARLSCLRGISTLTGFALAVEIGDWHRFTGATIASYLGLVPCEHSSGQTRTQGGITKTGNTHARRLLTEAAWQHKSPYRPGPALRAAWAKVPGDVATRADTGNRRLNRRWQTLASHHKRHTIANTAIARELAAWCWSLAVMDH

SEQ ID NO: 443943 - protein, 362 aa, unidentified
MAEYSRKMAERTMGLDLGDKNSHYCVLDREGEEIETGRVATRAGALEAKFRSMGPTRVVMETGTHSPWVSRLAEGCGHEVIVANARKVQLISQNRKKRDKVDAELLARLGRSEPELLYRVRHRGEEAQRGLVLLKSREALVKARTELITHLRGAVKSLGSRLEPCSPECFHRRMVGKLPRGLAGLEGWMLEMIGKLTEQIRQLDRAVERLGEEKYPETELLRQVKGVGPLTSLAYVLVLEDTERFERARAVGSYLGLCPALDESGEQSPQLRISKEGDQMLRRLLVSCAQYILGPKGQDSDLRRWGKKLEGRGGKHAKKRAVVAVARKLAVLLYVLWSRGEVYEPLRGSWMKSLEAAPAGTV

SEQ ID NO: 443944 - protein, 353 aa, unidentified
MIWVGLDLHKRYITACALDDGGAVVAEHRRLPTAAEALVAWLQELGGPVTVAMEATLYWAWLHDRLSAAGIAAVAAHPYQVKLIWQARCKTDPIDARKLADLARTNLLPAIWVATPTVRARRTLLRGRAYLVRMRTSVKNRIHGLLLAENQWVDVSDLYGRAGRAWLQAVPLSPMARVQVDLLLDMVDGLDERVVRLDKRVQRVVKDDPAAQWLQTWPGIGTFGAALLLAEIGTIERFTTSHELAAYAGLIPSTQSSGGKTTHGGVGRAGSPWLKWILIEIVQSLKLAPGPIGRHYQKLLRAKGKQKATVAAARKLCCYLYWCLKEGWSYDEWLRQHEESREVRPRQALGSAA

SEQ ID NO: 443945 - protein, 421 aa, unidentified
MENTAARKRKQVPEGYLIIGIDPHKKRHAAVAITQDFTIRDKFKFDNTREGLETMLRRTRTEMVKADCRGVMFAIETGGHYWRNIAYFLDEQGIPFRFINQYTLKRRREGKDINHKKNDYRDSEVAAQLLCTGEFTDSIVPQGVYAELRTAHNAYRRLVKERTRITNLVKGLLDGLFPEFTLVFKDPCGLTALSVLSTCAIPGVIVGMTEDEFVAAIEATHQGRLMRKKLRELHYVARTSIGIAAGARSVSSEISFLVEKYELIRGHICIIERTLVSLVDEAEEGKYLLSIRGLNYIAVAGLLAELGCFKLYRSAKQMIKMAGSNPTESESAGKRGSHTPMSKQGRPVLRYCAWTSVIPMLRFNSDFRAWAKQRRERPAHANPLNGREVVGAALNRLFRLAFAMVKNQTYYLSPHLVQVTG

SEQ ID NO: 443946 - protein, 315 aa, unidentified
MVDVPCFVGIDVAKAQLDIALRPTGERWAVPNDPHGCGTLVEQLQAVHPALIVLEATGGLERPVTAALAAAGFPVVVVNPRQARDFARATGQLAKTDALDARALAHFADVIRPTPRPLPDAQTQELRARLGRRQQLVGMRTAEQNRLAGTSGRLQTDIAAHIAWLNERLATLDDDIETLLRASPLWRENDDLLQSAPGIGPVCARTLVLELPELGTLNRQQIAALVGVAPLNCDSGTLRGRRTIWGGRAHVRTVLYMGTLVATRYNPRIKAFYERLLAAGKVKKVALTACMHKFLTILNAMLKHRTPWQAQAVQG

SEQ ID NO: 443947 - protein, 347 aa, unidentified
MTVYIGVDFHARKQTVSYLTTEDGEIQQVELEHEKDYVRTFYEQFRGQKVIVGFESSGYAAWFEELMEELEYETWIGHAAAIRQFARRRQKNDRRDADLILELMVRGDFPRLHRYSRESREILQQLRYRQRLVKMRTMVINSLRFMVGSRGVTLGGRLQSRSGQARLRQVALPGPLDQQRDELLRLLIEIQQKVETVEEWLKQKAEADPRVQRLRTHPGIGLLSGLGLVATLESIERFSHSRKVTAYVGLDPVEDSSGERRRMGSISKQGSRLLRLLLVEAGQVAARRDPELGNVYRRVTLRRGHATAKVAVARRLLVRAFIMLRDEIDYAEFCRRGVAARSSRGNA

SEQ ID NO: 443948 - protein, 382 aa, unidentified
MQTIAPVNPTILLAIELSTSTWLVAARLPGLDKPRLSRIDGGDTAALLALISSLRARAACGLDATMGVVCCFEAGRDGFWLHRLLTAHGVVSYVLEPTSILVNRRARRAKTDRLDAEGMLRVLAAYLRGDHQACSMVRVPTPDQEDAKRTHREREHLVQERLRIENRIETLLFTQGIRKRPSLRSWERDLTVLRTGDGRKIPRHLRAELDRLRRRLVLTLELIREVEVERDQVTKTKPQDQAHHKITALCRIRGIGENFAAVLTREVFYRSFDNRRQIASYVGITPMPYQSGGMDRDRRIGRAGNPRARTTMIQLAWLWLRYQPDSELAEWFRERVGTLAGRTRRIAIVAMARKLLIALWRYVETGVIPTGAEIRAETTVAA

SEQ ID NO: 443949 - protein, 318 aa, unidentified
MEKMTANIAPTAGIDISEDRLDIALHPSGETRQFANDRRGHGKMLRWLAKQAVAYVVFEATGCYGRELERRLEKSAVSFARVNPRHARRFAEATGRPAKTDRVDAVMLARFGAVMEPECRPLRSETLDQLAELVAARRALVRDRTATLNRQKTLRVPLLLRQASRRLIQIDAQINAIDETARAPTKVDPDVDRRRVILESIRGFGETTAIALLADMPEFGTLDEQQAAALADSAPMTRQSGNWKGKSKVQGGRRQVRQTLFMPALVAARYNADMKARLDSLTNAGKPAKVAITAVMRKLIILANALLRDDRLWTPKHG

SEQ ID NO: 443950 - protein, 334 aa, unidentified
MSLDLLAIDLGKRSFHIHGIDGDGVIVSRKVSRAKLCETIVSLAPMTVAMEACASAHYWGRRFLAEGHAVRLINPRFVKPFVKGSKNDATDAEAIYEAAIRPTMRFVPVKSVDQQDLQSLHRVRDRINNTRTSLINHMRGLLAEYGVVLSQGPWRLVAQAPAALAAAELSDLARDLFNDLLDQLADLERRLKKIDGQLLSICRSNAACRRLAELPGVGPVIATALVSAVDNGRHFRSGRELAAWIGLIPRQYTTGGKPRLGGIGRRANHYLRRQMIHGARSVMFRLAKHDDRRSLWLKALAARRGFNRALVALANKTARIAWALLAREEEYAAA

SEQ ID NO: 443951 - protein, 370 aa, unidentified
MKKNSTRPQSPRGAAARSKGPITIGLDLGDKTSRYCVVGDNGEVMSEGSVATTRKAVAQKFTGMGRCRIAMEVGTHSPWLSRMLTALGFEVIVANARQVQLISASSRKNDRMDAHLLARLARVDPELLRPIRHRSEQAQADLMTIRIRAALVEARTSLVNAARGFTKAMGERLPACDTDSLGVEKLEALPAALRSRLQPLLEQIEALTAQIKKLESNIEQIARIEYPETRLLTQVSGVGTLIALTFVLTLEDRERFQKSRDVGCYVGLRPKQSQSGQSQPQLRITKEGDRYLRTLLVQAAHLILNRRAPDTDLKRWGLKLAQRGGKNAKKRAIVAVARKLAVLLHRLWVCGEVYEPLRNSRPTPASKQAA

SEQ ID NO: 443952 - protein, 343 aa, unidentified
MQAITTIGLDLAKSVFQVHGVDAAGNVVVRRRLKRRYVLPFFQKLPPCLIGMEACASSHHWSRELGALGHTVRLMPPAYVKPYVKRHKNDVADAEAICEAVTRANMRFVPTKTPEQQSCLVLHRTRHLFIRQQTAVINAIRAHLTEFGIVAPVGRRGVEQLLDVVADTNDRRLPEVARACVAALGAQLRMLKARILEFDRLIMAWHRSNQTSKRLDEIPGVGPALATALVASVADPKAFRSGRDFSAWIGLVPKQHSSGGKEKLGHISKRGDRYLRSLFAAGALAVIRYAKIHGTKHRPWLTALLARRPTRVAALALANKIARMAWAMMAKGERYKEPVALAA

SEQ ID NO: 443953 - protein, 414 aa, unidentified
MDIVHTHCAGLDVHKKTVVAAIIVPDPAGGLYKETRTFGTMTADLLALSDWLLAHGVTHVALESTGEYWKPVFNILENEFAVLLVNAQHVKAVPGRKTDVKDAEWLAELLRHGLLKASFVPPLGQRELRELTRYRSTFVKERATLVNRVHKVLESANIKLASVATDVTGVSGRAMLQALLEGHTTPEVMAELAKGRMREKRAQLAKALEGCVKPHHRFVLTELLCQIDSLDETIGRFDEQIVAYCRPFEEAVTLLDTIPGIARETAEIIIAEIGTDMSRFPSADHLAAWAGVAPGNNESAGKRRSGQTTKGNHALGVALNHAANAASHTKDTYLAAQYHRLATRRGKKKAIVALEHSILIMAYHIIQRKEPYHELGGDYFDKRRPEATAQRLVKRLEHLGFQVSLQPTQVPVAA

SEQ ID NO: 443954 - protein, 424 aa, unidentified
MKNCNKQNEKIELVDEKTLVIGVDIGSYDEYARAFTCRKQELSKKPLHFHNTAEGFKTFKDWAVNIMKANGLEKIIVGMEPTSIYWEALATYCKDNGMILVHVNPAAVHKSKELDDNDPSKNDRKDPKVIAGLVADGRYQFPYMPEEEYAELRELSNLRIRTQESLTQCKNRLARWYSRYFPEFKGAYKNVVSKTAMMILDLYPLPEDIVTLGVEGILQIWRSKKVRGAGERKARKLYEAARNSIGRKEAASIARIEFKSIKEDLDRYQERLDEIEKKADEILPKIKNADKLFEIKGVGKATVLTFLSEIGEISRFENPKEIQKLAGYAIVTNESCKHQGEKRISYRGRKRLRWVLYQTALSVIAKNAEFRQIHAYYTTRTNNPLKGIQSVVAVACKMIRIFYKILTDGVSYDGTKMTQDIVRV

SEQ ID NO: 443955 - protein, 416 aa, unidentified
MTNPLLVGVDVHRQSNTIALMNSQGVEVAPRFRVPNNLPGTEEFVRQVTALMTTGDFDALDIAVEATGWYWFLFFQTLSQDPALQPWPLTLYPFNPRVTEGFKRAYVDLDKTDPDDAAVIADRLRFGRDLPAPWQLDATYLPLRFLTRYRYHLIHQLAREKAYCLAILYLKASEYNLPQEDRRPFSNIFGAASRAVLQEFASLEEIAALPFDELVEFIDRHGKRRFADPAMNARKLLRVVAESYRLPEVLQQPIQAILGWSLQHISFLERQVKRLDTAIAARMATIPQTLETIPGIGPVFAGGILAEIGGVARFHYQEHKVAKFAGFKWRKTKSADFEADDTRLTRTGNRYLRYYFCEAANAVRMRDREYAAYYDRKYHEVHTHQHKRAIVLTARKLVRLVVALLNTNQPYRARRN

SEQ ID NO: 443956 - protein, 350 aa, unidentified
MKHYAGIDVSLEQSSVCVVDDGGRIVREAKVASEPEALVAWLVGLGLQMERIGLEAGPLSQWLHAHMAAAGLTVELLETRHVRTAFKIMPVKTDKTDARGIAQLMRLGWYRPVHCKSAGAQEVRAVLTARKLLLAKHHDIETSLRGILRGFGLKVGRTTPKTYPARVRELVEGHEALEAIATALLAAREELGRQLAAMERRARSLARADERVRRLMTTPSVGVVVALTFVSAIDEAGRFSSSRAVGPHFGLTPKKHQSGEKDYTGRISKIGDAGVRTALFEAAHIMLTRCGKGSDLKDWAMALASRTDMRKAKVALARKLAVVLHRMLQDGTEFVARRNAKPAQPAVAAA

SEQ ID NO: 443957 - protein, 362 aa, unidentified
MTVIGIDAHKNWHTLVAVDEVGRRIDVLTVEARAAGHQKIMTWLEQFEEVIIAIENCRHLTRRLEADLLDAGHKVVRVHTRLMAGMRRSGREPGKSDPIDAEAVARVALRESDLPTAELPGPAREIKLLSDHRRSLVARRTALQSKVRWFLHEIDPDLQIPSRALRRYHLLDELITHLDGLTGVVPEIARDILEDIRSLTRRINEIESRLSKLARANHQHLLEVPGLGVLGAAMIIGETAGVRRFKSKDAFARFNGTAPIPVWSGNKVRVRLSRGGNRRINTALHMAAVTQLRLGGEGTDYYDKLIAAGKTRTEALRLLRRRISDRVFAAMRADEARPVAEATSPPPTAAPRTPIPALQAAA

SEQ ID NO: 443958 - protein, 407 aa, unidentified
MLFVGVDWAEAHHDVCVLDSEGRVLGRRKVADTLAGVGDLHALVVRSLGDEDAVPEVIVGIEKDRGLIVTALVASGYQVFAINPKAAARYRERHHVSGAKSDSGDAKMLADLVRTDRQNHRGVAGDSTLAEAIKVLARAHQNAIWSRQRQVNALRSAFKDYYPGALEAFDTDLADRDAVSVLALAPTPALGRLLSRSKIISALRRGGRQRNIEATAEKIQEALRRPQLSQPAVLENAYGITTTATLGVIVQMNATIKELETALADHFEQHPDAKIIRSLPGMGMVLGARVLGEFGDDPNRYADLKSRRNYAGTSPITRASGKSKVILARHTRNKRLIDALDRWAFSSTNWSPGARAYYDQLRGRDKNHYKAIRQLSNRWVGILHTCLERGCLYDEAIAWPTRDELAA

SEQ ID NO: 443959 - protein, 342 aa, unidentified
METKRHIGIDLHRNCFTVCVRLENGRKYLSEWKLEDLPRFTKKLRAGDEIAVEMTGNTRYFHEAVAPHVARVVTVDPNQFKVISQSVKKTDPNDARNLALYLAKDLLPEVRMKEKTEAQIASLTQTRDTLVKLRTALKNKINNILAAHGINLAKEALSSEKALAGVLEMRFDEMVELELQVIVEQIRGLNQSIAKLEQTIKDRGQKLKGHRNLTSIKGIGNLGASILLSVIGDIDDFADEGKLAAYFGIVPRVQNSNETQRSGRITKRGTKLGRTTLVQCALVAKRYSPYLARYYDKIKSRRGGGKAIIALARKFLGIIYRTLKNNWVFEDFSNFVLAEITS

SEQ ID NO: 443960 - protein, 318 aa, unidentified
MNTKINQSINVGVDTGKTQLDIHIRPLDLFFSVENNDKGIKKALKTIKSHSPERIVIEATGRLEMPFVLACAEAQLPIVRANPVHIKRFAGAIGRRAKNDRLDAELIAHYGEVIKPALTVIKPKNIRLMSDLVIRRNQLLSIQTMEKNRIQILPASLHPTIKPMLTTIKNQITKLEEKLVKLIEDSPEYQAKNKILQSVPGIGNIAAASIISNVPELGYITNKQAASLIGVAPITRESGRYKGKRVIQGGRAQVRTVLYMAMMSAMQCNPVFKATYARLVAAGKPKKVAIIACVRKMVVTLNSMLRDGAMWDENTAKN

SEQ ID NO: 443961 - protein, 352 aa, unidentified
MIIGSDFHPSFQQISYVDQETGEYGERRLNHREEAVGFYGSLAGRNVVVGLEATGNDRWFRKLVMESGHELLVGDASAIHASAPREQRTDKRDARHILRLLLENRFPSVWQPSAGNEAQRQLLMHRCRLVRMRTRLKNQLDSIAKSEGLTGSRSWSRQRRGQIEALPLGGWYAQRRADLLQLLDGLELRIKPLDAAVETAASQDAEARLLMTHPGVGPVISLAYVLVVGDWRRFPRGKHVGSYLGLIPSEASSGKRQQQMGHITKQGNTLLRWLLVEAATTAQRHDPSWHRQYVRLSMAKHHGVAKVAIAHKLAVRLYWMLRSGQDYGQMMERGLHARQSECPVGRSKRPIE

SEQ ID NO: 443962 - protein, 390 aa, unidentified
MIYVGIDVASQKHDFFIMNDLGETYTTHSITIPNSNEGYKKLHNSIQEFCGATNDFKVRIGLESTGFYHKNIVSYLLSLDYEIMVINPILTNMYKKSKKVHIQKNDNIDSIYICMYLGDTRTVFKPYTIVSYHSDALKALSRDRFSLVEELRLAKIGIYRLLVHVFPEYLKLFSNIYQGSALSILERYNNPDRLSKAHISTISSLIHGKCRVSAIDIINAAKNSIGIKDDCLYFELERAIIRLKYINSQIEEYNKEIKRYIELLNSPILSIPGISYITAGIILGEIGDISNFKNAESLISYSGLDVIIYESGKYKRTNLSISKKGSIYLRYALYQAARVCWISDPMFHNFYLKKQNENKHFYVILGHIEKKLVKVIYSVLKNNKPYSPHL

SEQ ID NO: 443963 - protein, 411 aa, unidentified
MVKENFIYVGIDLHKETHTAVMIDCYNQKLGEITFPNRPADFPKLVTKVKKCNTDGKEVVYGLENAYGYGRALAVWLIDKGYLVKDVNTAISHRQAKHRGAMYRKSDSDDAEAIALATLNMLDKLPDACPNDAYWSLGQLVHRRDNIMKQRTRLVNQLHEQLCIAYPSYKSFFNDISRPTALYFWEHYPSKKYLRGKSVEDLRKELVPVSHNRCSTKNCEKILDAVASDKVKNNAYQDARDMVTLSIVSDLQHYDSQLAEVDKMLEQMYKMLGCTLTTIPGVNVITAVKILSEIGDIERFANANKLAQFAGIAPLHLSSSGKGKDVATKQGNRRLQATIYFLAIQMVQVSSKGTPRNPVVRAYYEKRKAEGKTSQQALICISRRLISIIYGMLKYGTEYRMPVVENAGENR

SEQ ID NO: 443964 - protein, 330 aa, unidentified
MKTILVGIDVASKTLAIALEHPGRSSKGFEVPNTPGGHRRLIRRITARKIPARVCMEATGVYGFELAWTLHRTPGIEVQVANPRAVRDFARAWLQRSKTDAIDAQVLLEFARRMPFAPWRPPSLRILEIRAITRRIEVLTRARTREKNRLHMVDRCREISAVVRQDILQHIEQLNRSLRHLQQVASSLVRKDPVLARRFEFLQSVRGIAETSALHILAELATLPEDMSPRQWVAHAGLDPRQYESGSSVSRPARISRVGNSHLRRALFFPAMVSARTEPHVRAYYEHLLARGKKPLQANVAVMRKLLHSIHGMFSSQSAFRGEKFYAISA

SEQ ID NO: 443965 - protein, 429 aa, unidentified
MNSTQNKKIEQVKETTMIVGIDVGNEKHYFRVFNLRGIKLTRKPVAFSNSMEGFSSFYNTIVELMQKSELEEALVGIEPTGHYWFDLGQFMGEKDIKFVMVNPHHVHKTKELDDNSPSKNDRKDPRVIAGLVRDGRYFYSYMPTGAYAELRNASNRRFVLVEEQTRAKNRLQKWIAVYFPEYKGIYTHIDAKGGMLVLKKAPTPEEIVRLGVEGIIKIWKDAKLRGNGHKKAMLILAAAMRSIGLKAGLTEARMEIQDLIEDYELQTKRLERVNDLIKGLCQQVRYADKLLEIKGIGITTVAGFIAEVGDITRFDSTKELQKLAGLELVADSSGKHNGKTKISKRGRKRLRYLLFEAAISVVGKNEEFKEIHRYYTTREKNPLKKMQSLIVVACKLIRVFHAILTKGIRYDASKMLKDIRHPGEQLKAA

SEQ ID NO: 443966 - protein, 461 aa, unidentified
MSPSRPTPKTLQMEGLPTIHPCAAGMDIGAEEIVVAVPPDRDPEPVRLFRTFTPDLRALVDWLVACGIDTVAMESTGIYWIPIYELLEAQQIVPFLVNARHAKTVPERKSDWNDAQWLQKLHALGLLRASFRPDAEICALRTLVRYRAELIQHRSPHALHMQSALKVMNIQLGEVLTDVMGTTGMAILRAIAAGERDPQVLAQHRTVSCRASVEVIAKALTGTWKDEQIFVLQQALILYDAYTAQIRACDVQIEAMLTALESRAAPDTPLPELPPAKPNSNSKNAPCFNARAHYARLLRVDLVAVTGLSATTVQTIISEIGTDMSRFPTVKQFCSWLGLVPRNDISGGKVLRSRVGKVVSRANQAFRMAAQAVSRTDTLFGAYYRSMRARKGPQQAIVATAHKIARTVYHLLKYGEAFEEERAEAYEQKRREQEVRRLARRAEKLGFTLTQLAPPPAVAAD

SEQ ID NO: 443967 - protein, 379 aa, unidentified
MDDTIRFVGLDVHKRRTVVAIADSGRDGEVRQYGAVETERSAIAKLAGKLARGGKTLRFCYEAGPCGYSMHRWLTGLGHECEVVAPSLIPRRPGERVRTDRRDAVKLARLHRAGELTAVWVPDPAHEAMRDVVRARAVAVSAVRRARQQLSGFLLRHDRIYSRKAWTGAHRRWLAELKFEHAAQRVVLEDYIDAVGAAERRRDGLTEQIRELLPRWSLAPIVEAVQALRGVAAIAAIIIVAELGDPRRFDNPRQLMAYLGLVPSEASSGEKVYRGGITKAGNRTARRALVEAAWTYRFPARRSRHLLARCQAASPAIQAIAWKAQLRLSSKYRKLVGRGKLATVAVTAVARELIGFIWAIARELPAIPPEPVPSLSSQR

SEQ ID NO: 443968 - protein, 344 aa, unidentified
MEHYAGLDVSVKETSVCIVDGAGKVIREVKIATEPEAIRAVLVDETFTIERIGLEAGPLSQWLYSGLAEAELPIICVETRHMKAALSAQLNKSDRNDARGIAHMMRVGLYRPVHVKTLASQKRRMLLTSRQLLQAKAIDIENDLRGTLRNFGLKVGTVGAGKFEARICELVADHPDLAAIVEPLLIARRVLREQLGVLHRRLLTIAREDDVCRRLMSVPGVGPMVALAFRATLDVPARFKNSKAVGAVFGLTPRRHQSGEIDRIGGISKCGDAMMRRLLFDAAHVMMTRTIRWSWLKAWGMKIARHRGMKRAVVAVARRMAVIMHRMWADGTEFRWANTTAAVA

SEQ ID NO: 443969 - protein, 368 aa, unidentified
MSALMIKDISSKGISVPSLVNCLNRVLHLGLDMHYRQVTAAMQENGGRIKAAGKMSHVDFLNWVRKKLAEGWEIHSCYEAGACGYWLHRELVKLGVKNLVVVPKAMGQGGKKQKTDKRDAGELCDCLDRYLRGQDKALSVVAVPTEEQEEKRALIRYHRQIMADRGRCEARGKGLLCAQGIEVQGRWWHGDTWLEVQSDPRLKDWMKEQLIGWRNKILSTEEEQGALRERIAALAPAILPKGVGAYSAAVLHYEMRGFERFTNRRQVGSMTGLCPGIHQSDGRGKEGSINRCGIGIVRWTLVEMVWRLRIWQPQYPPVRRLATGLVKGKRARKRLVVQAARRLAIDLWRLSTGQTTPEKLGLIMHSAK

SEQ ID NO: 443970 - protein, 413 aa, unidentified
MQAIYKSCCGLDVHKRSIAAGVRRLLENGSVHQETRTFGTMTRDLLELSDWLAAEVVNHVALESTGSYWKPVYNILEGRFKLVLVNARHFKHVPGRKTDVQDCQWLAQLLQAGLLQGSFIPERPQREFRDLTRHRSQLVAEKNRAANRIQKILEDANIKLASVASDILGASGRDMLRALIRGETDSTKVADLARRQLRAKIPQLRPALDGKVTEHHRFMLCELLDHLEYLENRIEEFSRRIEEVSRPFAPAITKVATLPGFDQRSAQNVVAEIGPVMEVFPSAQHLASWAGVCPGNHESAGKRKSGKTTKGNRWLRSALSQSAWSAARKKDCYFQAQYRRLAGRRGKKRAIVAVAHSLLTIIYHMLKNASDYRELGCDYLDKLNAHRLLPHLLKRIKDMGYQVTLQEIAQEAA

SEQ ID NO: 443971 - protein, 312 aa, unidentified
MIRTYCGGDVSKEWLDARVEPGGAEGRFRNDAAGIAGFADFCRAHGVELVVMEASGGYERLAFLLLWELGMACAIVNARSVRRFAEAMGVLEKTDRIDAAMIARYAAVKRVQPTPPPGAAEQRLKALVARLSQVSGDLAVQKQRRSAAFDAETVASLDEVIALFRRQQRALEGEIASLIDDDPLWARLDEAFRSLKGVASRTVARLLAEVPEIGILSNKAVTKLVGLAPIASDSGKRSGRRPVRGGRAGPRSILFLIGRLVAKYDPHFAAFHQRLQEAGKEKMVIRIALARKLIVTLNAKACDARIELANAT

SEQ ID NO: 443972 - protein, 353 aa, unidentified
MITIGVDAHKGIHMAVAVDEAGREVAHWRGPNSAAGWHEVATWGATLGVSRRWGIEGAWNYGRGLAQYLVATDAEVHEVNPRWTAGGRQRARRRDKNDRLDARAVALLVWREGAALPRVTADDDTVALALLVAERADLVAETTRLYNQVHQVLLQLDPEYATRVPTLQTQAGLRALEGYEAADARAVAQHRAAAVRRLAQRLHLALAQTKALTAQIRALAAPRFAPLTQICGISLLTAGTLAAILGPGRRFATDAQLAAYAGVAPLEASSAERVRHRLTRGGNRHLNAILYRIALTQSRCSPAAQAYLARRISEGKTRREAIRALKRHLIRAIWRKWEECQLQPVAAAAAIAA

SEQ ID NO: 443973 - protein, 321 aa, unidentified
MTYIGIDVSKDTFVVAYSPNKNSKTKLFKNTTRGIHEFIRTISKEDHHCVMEATGNYSALLVYLLSEAGITTSLENPLKVKNFARAMLSTVKTDEIDARLIALYGEKMQPAPYKLRSDAILTLKQKRTVIRQLKKQLIATRNLKGSMEALPFFDAKCRKSVEKTIAFLEKQVKDLEEDLASLAKSEYKKQMDLLTSVKGIGITLAAALIMATGGFTYFDNAKQLTRHLGLSPTYQQSGTSVNFKGHINRNGDSSLRSQLYVAAFSSIRCNTECRACYDRLRSKGKPGKVAVIAVANKLIRQAFAVVTQEKPYVDGYISSKK

SEQ ID NO: 443974 - protein, 404 aa, unidentified
MKGPIVSIDVSKGKSDYQAFKDLNVKYTGSRSIKHNKEGFDEIVNLVREMEKKLETEVCVVYEATGVYHRVLKKVLEDNNIKQFIINPLLSAKTRKNDSLRSPKTDKLDPKSIAKTYYSHSLHNSHKQETIYHELRELSRYYEDILVHIRKDKVAFRAQLDIVFPGYDTLYDDLYGPVALAIIEKYPHLEMLQKKKINTVSKVIQNKTCHRQAVSDTMADKAIEYSKTIYSGCDKDDIEVLILQRFIKKLNEDMAEAERTIGEMIKLAQELPDFNIIKSIPGIGDNLAARIIAELGDMTRFKKKNELVAFSGLDPRISESGQNDGDHMHITKKGNKRLRCLLYLAVTCSIRLKRDDNSIKDFYIKKKQQSNPMCSKAAKTACASKLVRIIYSMCKTGELYQYNK

SEQ ID NO: 443975 - protein, 358 aa, unidentified
MDKSNNLDFSGSTIYCGLDVHLKNWRVNIRDEEMELKDFSQNPDPIALHTFLTRNYPNARYKVGYEAGFCGFGIQRRLAELQIECVVLNAADIPKGDKDKRQKNDKRDARSISEEIKNNKMVGIHIPQAAMEYARSLVRQRQRLVVDSTRQKCRIWHCLYFHGLELPQKADVGHYWSNKFIKQIESNTCNGDPWLKMNLQLMIRDHQQKRALILETTRSIRNLCRQEPFKKLIELITGIPGIGEVNAAIILFELEDIGRFKSHDHLYSYAGLVPDTDDSGDVKKSKGITHRSNSRLRNAIVESSWIIIRKDPAMLMLYKKYCKNMHKNKAIIRIAKHLLSRIRYVLKEQKPYVEAVLK

SEQ ID NO: 443976 - protein, 323 aa, unidentified
MTQTAQHILGIDISKKSFDVALLLPNGKRKNKKFCNDPEGFKALHDWLRELDVHSLHACMEATNVYGNPLAEFLFDLGYTISVVNPARIKGFAQSELSRTKNDKQDASLIARFCIAMSPPPWQPDPLSIRQLKAMVRRIDALMDMKRQEANRLGVAETLVRPEIQSHINDLDHRIKKLRQDIQNHIDDDPDLKQQKDLLLSIPGVGEKTIATLLSHFSTINRFDTAKKLASFCGVAPREFQSGSSVKGRGCMSKMGSAQIRKALFLPSMVALRYNPTLIKLKERLAIQGKAKMVIIGAAMRKLIHIIFGVLKNNTPFNENLVV

SEQ ID NO: 443977 - protein, 415 aa, unidentified
MNQLNYKFFVGIDLGQWLHIASVTDANGEFLEERGFAHSHKGLSETVDWLLQLASQDSERIAVAIEKPHGAVVEILLDSAIAVFSINPKQVDRFRDRHSMSGAKDDRRDAFVLADALRTDGHRFQRLQLPPPEIIAMRGLLSTRDQLIKNHIALSSQIRDLVARCWPHLVSLAPKDKALDSFFCELLQLFLDAHNPADIGREAIQQLVKKHHIRRAHTDQILDILPQPPLRVASATNKATSMHLKMLLPQLLLVRQHRRDSDQLLERWFKQQRTTEDDGVTDSAILASFPGVGAFVLASVLSYAHDPVRLRNLEAFRSLGGIAPVTKQSGKRRQVLLRRARSLPLNNALYHWARIAVLRDSHSKEHYDRLRAAGHTHARALRGVMDRILPIAMATLRDQTLYDRSRRSTTKAKSR

SEQ ID NO: 443978 - protein, 323 aa, unidentified
MLDSAGNVRLSRKLKAQPQPFLEALAPFRPDVLIGCECVHTWYWLADTCRDHNLRFELGHAWAMKAIHKSKTKSDAHDAEIIARLLRGGNFPLAYAYPRERRGLRDLLRTRWRLVRQRAELYGHIHTVRRQLNLDSIGRDVKYKSKRDTATTGITDEHTRRGIQARLNLLVPLDTEIRRLERDIEVAAQEHFPTELLVLQTIPGVGPIISMTILLEIDTISRFESRQQFCSYARLIAPRQESDGKVVGVVNARAGNAWLKWAFSEAAVLSVQKDEAMKRYLDKLQSKHGVGKGLSILAHKLGRVVYHLLRSGKVFDVDRFVRH

SEQ ID NO: 443979 - protein, 375 aa, unidentified
MNKICYIGLDVHKKNIVMGESIEAGKGNMTGEFLNTDSGVNKLLKKLKQISSEHDVKICYEAGPCGFTLKRILEKYGFTCDVAAPSLIPQKSGDKIKTDKRDAIKLARLYRAGELTFISVPDEEKEAVRDLVRCRDDIMTDLKRAKQRLNHFFLRHGYCYPGSNWTEGHYKWISQIDIKNNILNITLAHYFNEIEFLNMQLKNMDKEIETIASTEPYREKVKALCAFRGVATLTAMIIISEIIDFSRFSNPKELMAYLGIVPSEYSSGGSVKKGSITKCGNKRVRRALVEAAHHYRHKPIITVKMKKDVESTKEELRIAPVKALHRLHKKYYHLIFKGKPTQVAVTAVARELSGFIWYNMVLIEKGGERLSGINI

SEQ ID NO: 443980 - protein, 372 aa, unidentified
MDESSKILYVGLDVHKDSIAVAYAPDDRGAEVVSLGAIGPRQCDIDKLIRKLQSKGATTLVFVYEAGPCGYGLYRYLTGKGFACHVVAPSLIPRKPGDRVKTDRRDAMALARLMRSGDLSSIYVPGVEDEALRDLSRGRDDAMQDLKRSKRRLKSFLLRQDIRYEGRATWNAAHLRWLSEVVCPTPPQQIVFQEYLRAVNEQEERRQRVERELHEAVKSWRLYPVVEAIQALRGVELTGAVILMTELGDITRFDSPRQLMSYLGLTPSEYSSGERRRQGGITKAGNSHARRALVEGAWAYRYPAKVSRHLQLRLEKLPAEVQAISWKAQVRLCKRYRQLTARGKHVNQVVVAIAREMAAFAWAIARLVPLAS

SEQ ID NO: 443981 - protein, 369 aa, unidentified
MGEYSEIFVAFDVAKRKHAVAVAESGRKGEVRFLGEIENSEAVIERTLKKLSSRHGRLHVCFEAGPTGYGLYRQVQALGHACTVVAPALVPRRAGERVKTNRRDAVTLVRLHRAGELTGVWVPDAVHEAVRDLVRAREAAADELRRKRQQLLSFLLRHARIYSGSGHWTLAHRRWLAQQSFEHPAQQIVFQEGIDAIEDAAQRLRRLETQLATIVPSWSMAPVVAAYQAMRGASFLVAVTFAAEIGDVRRFNTPRQLMSFLGLVPAESSTGDTVRRKGLTLAGNRRARRALVEAAWTYRFPARVSETLRARLDGLPKAVRDIAWKAQVRLCARYRRLSAGGKKLPVVVAAIAREIAAFLWAIGREVAPV

SEQ ID NO: 443982 - protein, 355 aa, unidentified
MQKKFIIGTDVSKCTLDIHCFGKPGCLTISNNARGFKELLKWIKKQVSKDFTSLMLVMEYTGIYTYNFEIFLHEQKIDYVKRPALDIKRSAGIKRGKTDKADAVMISKYGWQRREELQPMKPLTQAQLELQQLMSYRDKLVADKASYQCRIKELKEQMNDKLSTHIIQSTESIMHLLKEQIEQTEAAIKMLISNNNELNINYELLQSVKGIGFATAVHMLITTENFSRFDARKFACYSGIAPFKHQSGSSIRGRTTTSHLANRKIKSLLTMAAISAINHDPQLKEKYKQKLQQGKPKMVVINIIRFKLIERIFSVIKRQITLNFKYSCLNFIWLYLRIHNRDATTYKSRLHKISY

SEQ ID NO: 443983 - protein, 347 aa, unidentified
MAAVMIGVDPHKGSHTAVAISPAEEPLGELRVRASAGQAEQLLAWAVAWPQRTWAIEGAGGLGHLLAQQLLAAGEQVLDVQPKLGARVRLLATGAVNKNDPNDARSVAVAALRSPSRRPVQPDDHAAVLKVWAKRHRDLGRTRTQVVCRLHAVLCELVPGGVPKAITANHATRLLSSITPARAVQAARCELAAEFLDDLRRIDAQLLEAHKKLTTAVRASGTTLTAVFGVGPVVAATLIGAVHDVSRFPGPDHFAAYNGTAPIEVSSGPRKIYRLSRRGNRRLNHVIHMAAVTQIRYRHSPGRAYYDRKLAEGKTGKEALRSLKRQISDAIFTRLLADARRAATGPR

SEQ ID NO: 443984 - protein, 345 aa, unidentified
MEYGAIDVHLRHSQIRILNDDESVVFEARIETTRAGLTWAFEGRAPLRILLESGTDSEWVAQHLEGLGHEVIVADPNYAAMYGARSRRVKTDKRDVAALALACRRGIYRRAHRVPARTRALRQTLRIRRQLVQVRTGLISVLRAVLRQEGWRLRSGSADRVVTRLDALELSADLQARLAPVRASVLAITEQLVALGEALSERATVDPIAQRLMSAPGVGDILALTFQSVVDDPARFGGDAGRLSAYLGLVPREQSSGERQHRGHITKAGSGEMRSLLVQASWVIWRGQGKAGLELRRWVHALAARRGRRVAIVALARRLARILYAMWRDATEFRVRREPLAEATR

SEQ ID NO: 443985 - protein, 365 aa, unidentified
MASVTSAAGRIQLGMDTSKNTIVVAVLRPGEEVPVLDRIWNEEGSVRHLVGRLGEAGALRACYEAGPCGFELHRLLSSRGVACDVVAPSLIPRRAGDRVKTDRRGASRLARLHRAGELTAIRVPAEAEEAVWDLVRARAALMADRRRARQRITAMLLRHGRAWRGTSWTEAQERWIAGQRFGEPALALALAHYRAALDTRRAELGAVEAELAAWAGKPPLGAAVARLGCYRGIAELNGLTLAAEVAGWRRFPLARAFMCFTGLVPAEYSSGERTRRGSITKVGAAPVRTALIEAAWSYRFRPAIGVTLRRRQHGAAPDTLARSWQAQRRLHARYKTMTARGKPAGVAVTAMARELAGFVWAEMTS

SEQ ID NO: 443986 - protein, 491 aa, unidentified
MTEDIEWFVGFDWASQTHVVCLLDRNGRTIGERKVVHGGAELGEFCDWLIAKTGAPPARIGVAIETPHGPIVEMLLERGLAVFAINPKQLDRFRDRFTAAGAKDDRRDAQVLGDSLRTDRRAFRLLAVDDPTVIELREWSRIADDLTQERTRLANRIRQQLWRYYPQMLQVADDLTAENFLALWECAPTPARAAEIDEARLAKVLKAHRVRRIGAAEALGVLRQKPLQVAAGATEAANIRVAAERVRLVNRQIKEADRKLEALCARLEHPGKTPGESEPGQSSEQRDVTILRSLPGVGRTGLATRLVEATEPLRRRDYQVLRVLSGVAPVTRRSGEARLVTRRMACNERLRQAVYHWARVAMQIDQACKSRYAALRKRGHSHGRALRTIGDRLLAVACAMLKSQTPFDPATRPQSALSPDHPLVRQLRPSLRPDLPPGRAPRAAEVTPKGAQRSGAPRSCAVDGASTALSSCAEDEAKIAPERASRPAHDT

SEQ ID NO: 443987 - protein, 386 aa, unidentified
MNLKYSVGLDVSSKKINACISVIDEKQKVSVKSSCVISNTINGFKSLQDWISKHKKEDLPVVTCMEATGIYHENCAYYLFEKGFDVSIILPNKSKKYLEAIGLKSKNDSIDAKGLAQMGAEQCLETWQPMGTFFYQLRLLTRQHQNVTELKTVLKNQLDALGFAMHQSEPVINQLKQTIILFETQIKELDKAIKNHIKSDKKVEKKVNNILLMKGLGVLTIATILSETNGFELFTNYKQVVSYAGYDVVEAQSGTRVGKTKISKRGNSRIRRAMHMPSLVVIQCQVKPFKDLWNRTYEKHGIKMKSYVAVQKKLLVMIYHLWNKNEPYDTNYQIEIQEGEQKLFSRESVFEENKIKKNSPNLKVGTTQGKHPVNNRKKLPLGITNI

SEQ ID NO: 443988 - protein, 427 aa, unidentified
MNDSKYRPTLCVGADVHLDEIVLRAVDKARGHEVLERFRVTNNLPGAHVAATTIAKTAMDLGYARIQIGWESTGMLWIPFHRYLSTEPLLQPFELELVCFNPKLVAKFKDGLVLRSPKNDDRDAFDVAARLRFGELPVSYVPSDFWQGLRRLTRYRYRLSKAVSQEKNRFQSYAYLKCSDWKRVKAFSNIFGATSMALLTEFTVAEVQEMTHDQLVDLISRRGRGRFDDPTATARAVRQTLRTSYSVDPQMDEMVTLALAAGWDHIRYLKRSMKHLDHLIARYIDLVPNPIITIKGLGAVITAGILAEVVDVLRFPEEKHLAQFMGLTWRKRSSGRFVSQNTRLTKVGNVYLRYYFILGANLLRQHNLEYKAYYWRKYQEVSKYQHKRALVLTARKLVRLVHALLTKNQSYVRPRTTDRDHEDDGLQ

SEQ ID NO: 443989 - protein, 345 aa, unidentified
MTSVATIGLDIAKSVFQVHGVDAAGQVVVRQRLARRRVLVFFEKLAPCLVGIEACSSSHYWARELIARGHEVRLMPAQYVKAYVKRGKNDAADAEAICEAVMRPTMRFVPVKTPEQQSVMMLHRVRLMLNRQRTQLSNAIRAHLSEFGIVAPIGRRGLDQLLAIIADAEDTRVPADARLCLRMLAAQLAVVKEQILENDRRVRANARATELGRRLMEVPGVGPLLASALTATISDPAAFKTGRDLAAWIGLVPKQNSSGGKERLGSISKAGNRYLRQMLVVGSMAVIRYAERHGTRRPWLIQLMQRRSTKVAAVALANKTARIIWALMTSGERYREPTVAGALAA

SEQ ID NO: 443990 - protein, 413 aa, unidentified
MEGLTPLYRQVAGIDVHRMLHVVTVIIEHADGTIEHTSREFGGFRRDCRSLATWLVEQNIELVVMESTGIYWKGLYAHLERAGINAWVVNAHFVKHVPGRKTDMNDSQWLAVLARFGLVRGSFIPPQDLRELRLLSRYRRKLVAMRASEINRLHKILDDGGIKLGGVVSDINGLSARDMVTGLIDGKPINELLDMARGRLKLKREDLQAALDGDLTVRHKFVLKHIHAHIDILDRDLAELDAYLLGAMAPYQWAHRLLQTIPGIDQIASALILIEIGDDMTRFGSPDRLAAWAALCPGNNESAGKRKSGKIGKGSSIIRYIMCECANSAWKTKSSLATKYKSLMVRKTHKKAIVALAHKIIRLVYLLLTRKVAYHDPQIDYEAMSAKKNAPRWIRQLKSIGKWPDTVQASAST

SEQ ID NO: 443991 - protein, 346 aa, unidentified
MPSAKRYQVHELLLEKTKSVRRGGKRIWRGKCKSDPDSIITLLHKHAPDARRVVFETGPLSIWVYHALIDAGVPAICIEARHAKAALDMAANKTDANDADGLAHLAEVGFYREVRVKGYDSMLTRTLVAARTRLVTICTELSNQIRGFMQTFGLVVPSGKGATFGNNVRMLLDGHQSLSQIILPLLKAWYGMREQAAELSKQLIAIARVSQSCRLLMSVPGVGVVTATSFMTAIEDPENFKKSRSVGAWLGLTTRRYQSGEVDYDGHISRRGDAHLRGLLFEAATVILTRSSADSGPRSWGLKLRERLGFKRAAVAVARRLSVTMHAMLKTGQLFDREVGMDAAAG

SEQ ID NO: 443992 - protein, 362 aa, unidentified
MSNVAPKSKKIYVGFDVSEKSIETFAVCGTETSKGCCKIDNDPNAIKKFLSMFSKPRQVCIVMETGTHSLWMSELIRGLGFEVIVAHARDLALIYGGDKKNDQLDAEKLARLAQADRKLLHPITHMTMERQADLMVMKARDLVVRQRTQIISTIRGLLRAGGYKLIEAEYTVDTIKKCCSELPQHIKSVILPLVQQIKFLESTIKDYDRQVKKLCKKYPATNILRQITGVGELTALAVVLIVGDPARFKNSARLCAYLGVVPKQDQSGNTDKQLGITKKGSKLARKLLIQAAHYILGPFGPDCELRSFGMRIQARGGKIAKKKSFVAVARKLVTVMFALWQNPETAYSPNFKKERKSVILGA

SEQ ID NO: 443993 - protein, 412 aa, unidentified
MTGETKRWFAGVDWGSEKHQVCLLDDSGAVVGERAFRHDGAGLAALCDWLISVADNADAVAVAIEVPHGPVVDALLDRGFAVHAINPKQLDRLRDRISVAGAKDDRRDARVAAAGLRTDPHLFRQVTAGDPRVVELREWSRLAEELQQERVRLANRVRQQLWRYYPQLLELNEDVTVEWILALWTMAPTPAKAARLRETTVARLLGRHRIRRLDAASVLDVLRQPAITVAAGVTEAAVLHLRSLVARLRLANTEFHQAEQKLDELCAGLSQDAAAAMHDPCDAAILRSLPGVGTIVLATLLTEAGDPLARRDHAALRTLSGVAPVTKRSGKTCIVVMRYAAQVRLRQAVFHWARVSIVHDPKSRSRYEALRARGHSYGRALRGVADRLLGVACVLLRRQVRFDPDHGNPAAA

SEQ ID NO: 443994 - protein, 356 aa, unidentified
MSKCITAKGPLTIGLDLGDRHTEACVVDGSGEVVESFRVRTTQLGLERALSRFEASRVVLEVGTHSPWVSRRVTALGHEVVVANPRRVRLIAESDAKSDRFDAELLARLGRLDPSLLSPIVHRGEQAQRDLVLIRARDGLVRARSQLINQVRGFAKSLGRRCPASSAEAFAKRVRAALPEDCFPGLETMLGMVEQLTVEIRSMDREVERLCSERYPETAVLRQVKGVGPITALCFVLTLEDPQRFAKSRSVGAYLGLRSRQRDSGQQRPQLRITKAGDALLRRLLVTAAHYILGPFGPDTELRRFGLRLAERGGKAAKKRAVVAVARRLAVLLHRLWSTGEVYQPLDYDGSLAQAA

SEQ ID NO: 443995 - protein, 421 aa, unidentified
MNRLSEESYTAYIGIDWASTKHDICLQVAGSDERSFERIKHTPEAIEEWAQALHQSVGGPVAVALELSEGPIVSALEKYDFLVLFPIDPKRLAKYREAFVPSGAKDDPTDAEFAMDYLMRHPEQLKALKLESAAMRKLRYLVEARDRIRGDQSRCVNRLIQALKQYYPQAVDWFNDHNTLVFCDFLKQWPTLATVQRARKARLERFFKEHNVRFAHIIEGRIQAIKAATPLTRDEAVIEAHRLQVEILLEQLRLTIKAMKCFDEEIATIAAQFPDYGLLYTALPGAGKVIAPRLLAAFGEDRDRYNCAAQLQKRSGIAPVTKRSGNSTWVHWRFQCPKFLRQTFIDFAAQTINKSAWAGAYYRQQRTKGATHNMAVRALAYKWIRVLYRCWQERTPYDESKYLETLRRRGSPLLKQLAEAA

SEQ ID NO: 443996 - protein, 346 aa, unidentified
MHHSTTVGVDLAKNVIQVSVVSARGKELTNRSFTRRKFAEFLGKQKPALVAFEACATAHHWARTAKRHGHTARIIPAKAVAPFRQGHKTDSNDALAVAEAARRPNIKEAPMKTVEQQGLQAVQRSRDLLVQERTALSNHMRGLLMEFGVVIPQGFASLRRMLPEILEDGDNEVPDMYRPTLHRLYVRFLELHEAIESMNVEIKELVKQHPGCCRLTALEGVGPISAVLLYASLGTGEAFSGSREFAAYLGLTPRQLSSGGKTNIVGLSKKIGNCRLRSVLIQGARAYVHKLKEPKTSKDRWLMALIERAGHGKAAVALANKNVRTAWAMLTQGTEYQRRGQLKVAA

SEQ ID NO: 443997 - protein, 414 aa, unidentified
MGGFPVFSLLPFQGGVALSVLYIGIDVSKDFSAAQAIDGKGDKCFYLELAMTADGFDKLLKAIKAHGKDISQVTVAMESTGCYHINLFSFLTHKGIRCIIVNPLLTANFARLSLRKTKTDKKDAFTIAQFLLVHKDSLLKTDLSPDRQDLKDLAREHESLTNLIAGMKNDIRRMLQITFPELESVCNIFSETILDLLRQFPSARLIKIAKPNTIAKALLHEDKRKKISVSAEDIIKAAKASVASHGAAKEIILPEKISTLQYLIEKKVRMKKALVEACEGMMVEDIEIITSIGGISNITASRLLAEIGDYRTFFTYKHLIAFAGLDPSVHQSGKFEGISRISKRGNRHLRYIIYLMTTCVVRGDNIFRTYYQKRRAEGQPFKKAIMATAHKLIRVLFTMLSKRTTYQSKEVNAI

SEQ ID NO: 443998 - protein, 334 aa, unidentified
MDNIALIGIDLGKNSFHIHCQDHRGKAVYRKKFTRPKLIEFLATCPATTIAMEACGGSHFMARKLEELGHFPKLISPQFVRPFVKSNKNDFVDAEAICEAASRPSMRFVQPRTESQQAMRALHRVRESLVQDKVKTTNQMHAFLLEFGISVPRGAAVISRLSTLLEDSSLPLYLSQLLLKLQQHYHYLVEQIKDLESQLKRKLDEDEVGQRLLSIPCVGTLTASTISTEIGDGKQYASSRDFAAATGLVPRQYSTGGRTTLLGISKRGNKKIRTLLVQCARVFIQKLEHQSGKLADWVRELLCRKSNFVVTCALANKLARIAWALTARQQTYEA

SEQ ID NO: 443999 - protein, 422 aa, unidentified
MLEETQETEEIIQRVAALDIGKAELTCCVRVPSPDAPGKRLQEVKTYQTMTRWLLVMTDRLAELGVTRVVMEATSDYWKGVYYLLEAHGFETWLVNARDVKHLPGRPKTDTLDAVWLCKLAERQLLRPSFVPPPAIRQLRDVARYRADLVAVRTAEKQRVEKLLEDAQIKLSVVASDIFGVSGRAMLAALVAGERDPKVLAQLARTRLRAKLGPLAEAFSGFFTDQHAFLLAKMLARVDQLDADLAELDAKLGELIAGFAGAVDRLDEIPGVGQVAARLLLAELGTDMTRFPTAGHLVSWAKFAPGVKESAGKRKGSGSTGHGNPYLARVLGEAAVAASKTDTFLGERYRRIARRRGKRRAIVAVGRSILVIVWHLLSDPTARFQDLGASFYDTRINADRAKRNHIRQLEALGYRVTLQPAA

SEQ ID NO: 444000 - protein, 362 aa, unidentified
MMIIGCDFHPSGQQVFGIESASGEVMVERWLAHGGEEVDQFYRRLPAGTVVGVESSGNMLWFERKLAAYGHRLRIGDAVKIAAQDERKQKHDRRSAELIARLLVEDRFPDLRWVPSLAERDLRQLLLHRDKLVRMRAQVKNQLQHIALNQGQQKKRQLWSKAGRELLEKLPLEPWTARRRADLLRWLDQLNQECKSLDEAVEQAAEANPEARRLMTHPGIGPVISLGFVLTIGPIERFDKSREVVSYLGLNPSEHSSGERRRLGGISKQGSVFLRRLLIQGAQTAVRGDAELARQYRRLAAKKHRAVAKVMVARKLAVRMFWMRKTQQTYPELVRMRGSSSHPGVAKTDRLSERPASPQAPA

SEQ ID NO: 444001 - protein, 434 aa, unidentified
MPSDSTTLYVVLDIGKNVHWLGAYAGFDLHPVIAPLEIRSDRPGFERVTTLIDGLLAGGAYSRVVLGHEPTGVYHEAWARALMERYAPHRQGSATPRLDYRFLNPLLTKRQREQLAKGRQRKTDASDLQAMAYCLRDDLGQPAFLATDQELRLQLWGNAYRQNQHERRRLILFILSQLDRLWPGMVVNVKRFRKMHPDLEVPVPLALSKPLERQRVRAILTHCPNPHDFLALGQTGIQAFYRAHIGRCGATTARLAYQLVRNALLPPPQVAALLADQLQADFTRYLALEADFLALTQQAEALVPDSPAAALTTMPGVSPLLAARYLAHLGHPRRFTQAAEVWSLAGFDTVTEESGDFRRVGHISRKGHPGLRDTLYLIGLHTAHHIPAITRAKQRALARGMGDVGATLHAAHKANRILHHLLYYQEPFDPNRVR

SEQ ID NO: 444002 - protein, 372 aa, unidentified
MNNTTVYVGMDVHKESFTLADYTIDTEKSSHTRRTSADYKEVMKFLEYLRTIYGNDTSFICGYEAGCLGYTLYHQLSDHNVNCVILAPTTMLEQRSGKRIKTDKRDAELIAKCLAQHNYSPVHIPTAEDEQTKEFLRMRDDHKIALKKIKQQILSFCLRHGYHYEGKTNWTVAHLKWLKALGTEALYKEILDEYLLTYDFLIDKIERLDKRIEELASKEEYRDSVKRLCCFIGVQTHSALSILVEVGDFKRFASAEKFSSYLGLVPGEKTSGDDRNRLGITKAGNRHVRLLLTEAAQCYGRGTAGHKSKALKAKQAGNDPKVIAYADKANERLRRRFYKMVLGKSKQHNVAKTAIARELACFMWGMMTDNIA

SEQ ID NO: 444003 - protein, 414 aa, unidentified
MQSWSEITYYAGFDWATDHHDVVIVNRSGQIVAEFQIEHTAEGWQRWGEQVAVLGPGLAACVETSQGFVVEQLLESGVAVYPISPASAKAYRQRKVPSGNKTDHVDAWSLADALRVDGHGWKALAKEDPLVAELRLLCRDEVALIEERTALINQLQSALREYYPAALEAFEDWTLPSAWAFVEAFPTPQALVSAGKRKWEKFLHTQQLARPQTYQKRMEIFARASEFVSGQALTRAKSRLALARARMLRVLQNQIDSYRAEIEKLFAQHPDHDLFGSLPGAGPKIAPRLLGEIGSDRSRFEDPSALQCLAGTAPVSYQSGQIHKVYLRRHCNKLLRHAVHLWANLSRQSCPWAAVYYQQLRTRGKSHACALRCLGQRWLKILWKMWQTGTRYDAELHARNQLKHGSWVLKIQHA

SEQ ID NO: 444004 - protein, 341 aa, unidentified
MEEYIGLDVSMKETAVSIRQAGQRIWRGKCVSDPSIVAELIRKRAPSVKRVVFETGPLSVWFYHSLRTKGLPAICIDARHAKAALDMATNKTDANDADGLAQLAEVGFFREVRVKGFDSMLTRTLVAARTRLVRITTELSNQIRGVMKTFGLLVPAGKGSTFEKNVRSLLTDQDRLASIVLPMLEAWRGIRVRAAELGRQLVRDARQSRACRILMSIPGIGAITATSFTTAIEEPDNFRKSRSVGAWIGLTTRRYQSGEVDYDGHISRRGDHHLRGLLYEAAAVILTRSSTHSTLRTWGLQLRERIGFKRAAVAVARKLAVIMHTMLKTGELFNPNAGAAA

SEQ ID NO: 444005 - protein, 410 aa, unidentified
MNDQINPVERVIGLDAHPDSFTAAVLRGRTPAEAWTEKVFNKVPLSQLQSWAKKYTTPNDVITLEASGNSFHLVRVLAALGRRALVLESAQLGKLKEAHANNDKLSAVRIAKAYLAGTAREVWVPDPKTQERRDWFHAHQKAVRRSTQMRNRLLSYLSDHGVRLKKGTRLVLDPELSEQQLRQSTDWSPREWQVIQGMLMELRHAEEQRSHWRSLIAQEVVSDPILLSLIRLCGVRELVAFALGAIIGDIQRFAEPRKLVKYVGLNPAFDDSGEGEWKGGIGGHGRKDLRSLLIEAAHAILRCSRTPLAQWGKKLLGRKGSVKLVVAAIARKLTVAIWYLMSGRWTALNEIDKRLSIKVGKIITSVGKASLHCLGTTRKELRESVCDSLKTARTYVLDPTRKFVPRPQKP

SEQ ID NO: 444006 - protein, 376 aa, unidentified
MSKIRFVGLDVHAATVAVAVAEPGGEVRSLGIIPNRLESIRKLIGKLGPVKDLKVCYEAGPTGYVLYWQLTQLGVACEVIAPTLVPTKAGDRIKTDRRDAEKLARCYRAGDLTPVWVPDAAHEALRDVVRAREAAKKDQLRARHRLSKFLLRHGQRAPEGMKAWTKKFLEWIKAHVRFDQPALEATFADHIQEVDHCAERILRLEKAIAKAVEQAPASMRAVIEALQALRGVAQTTAATVVSELGSLSRFESPRQLMGYSGLVSREHSSGAHIQRGAITKTGNAHLRRVVVEASWAYQHRPNVTGFLLRRQKNLALDEETKQIAWKAQHRLHNRYKKLFGRGKNKNQIITALGRELLGFIWAIAVRVEQHHRAQVA

SEQ ID NO: 444007 - protein, 361 aa, unidentified
MQSTPLIAFDQHAATTVAAVLLPGERTPALHTLASDSPTILRFVKRLQRQGPVQCCYEAGPCGFELQRALVGQGIPCDVIAPALIPRRPGDRIKTDRRDAAQLAILFRVGALTAIHIPTEQEEAARDLLRCREDIRADLLRARHRLSKFLLRHGRRFTGTKKAWSKRHDAWLRAQTWPLPALEQTHRAYLRTVDEAVARLRAVEEDLRGLLDLAPLRARVERLRCFRGIDDLTALTIAAELGDARRFATAPSLMAFVGLIPSEHSSGTKQARGAITKTGNAHLRRVLVEAAWHYRHHPFVGDTLRSRQCGAPPTIIAHAWTAQQRLHRRYARLASRGKPKQHVVTAVARELTGFVWAALTQ

SEQ ID NO: 444008 - protein, 320 aa, unidentified
METTLGIDIAKAKFAVALMTADGKVRHKSCANSAAGFADLAAWLQRQRVTTVHACLEATGTYGDALATWLHDAGHLVSMVNPAIIHAYARTQLARTKTDRLDAELIARFTATQQPPAWTPPAPEIRQLQALVRRLDALQGMRTQELNRLEAGVAVAAVRASIDAVLANLDAQIAHVKQLIRDHLDRHPDLRVQRELLTTIPGIGETTAAVLIAELFDKSYTNARQAAAFAGLVPRLIESGTLRGRSRLSKIGPGRLRKALYLPAVAALRWNPTIRAVRARLRAAGKPPMVIIGAAMRKLIHLAYGVLKSGRAYEPTCAHP

SEQ ID NO: 444009 - protein, 415 aa, unidentified
MEGLQPLHRRVAGIDVHRMLHMVTVVIEQPDGSIEETSREFGGFRRDCRALAAWLAELRVELVVMESTGIYWKSVHAHLENAGIAAWVVNAHFIKHVPGRKTDMSDSQWLAVLARFGLVRASFIPPKDLRELRLVSRYRRKLTQMHSAEINRLHKVLDDAGIKLGGVVSDINGVSATAMVKGLIEGQDIASLLDLARGALKLKRDDLQAALDGDLSARHLFVLKHIHAHTESLQRELADIDAYLLAAMQPYALAHGLLQTIPGIDQIAAALILIEIGDDMGRFGCAERLASWAALCPGNNESAGKRKSGRTRHGNGVIRYILCECANAARCTKSTLAAKYRSLMLRMSHKKAIVAVAHKIIRLIYVLLTRKHAYLDQRIDYAAMSAKKNAPRWIKQLKLIGKWPAPKTAPASASA

SEQ ID NO: 444010 - protein, 303 aa, unidentified
MTTFLNESTAAVHIVAGVDTHADNHHVAVLDLSGRRLGDRQIPATAAGYDRLLTYLGSLGNIQLVGIEGTSSYGAGLARHLRERRVDIREIIRPRRSQRRRGKSDPIDAYAAAQQVLADPESLPAAKSGDGLVEQVRVLLTVRRSAVKARVAVIRQIKSLLVTAPEEIRTRWSRVSEHDVIADLAATRPCAPTASVDAATGHALRRLARRHRYLTSEIEELEEDLRELVSTVAPAMIATKGFAVITTATLLVTAGSNPERLRSESSFAALCGASPIPASSGKTNRFRLNLVPATLRSARPDLR

SEQ ID NO: 444011 - protein, 358 aa, unidentified
MKIIGCDLHARQQTIAMLDSDTGELEEKTLEHQGETVRKFYSALSGSILVGIEATGSMQWFLELMEELGIECRVGHPAKIRKAETRKQKHDRRDARLLLTLLAENRFPTIWMPSSEERDLRTLLRHRHQWVRMRSRVQHTLQSMALNHGLRRGRALWSQAGQDELRALPLAPHASERRKALMTLYPRLQESIDELDRQVSEQTQQRTDARRLMTHPGVGPVTALATEVFLGDPKRFSDGKALASYIGMIPSEHSSGRRQRLGAMSKQGNALLRYLWCEAAMHAVERDPELKRFYRRKLVQKGLGKARVAAARKLGIRLWIMMRDEIDYQEFCRRGKARQESGSVRAGMPDRNSGPAEQ

SEQ ID NO: 444012 - protein, 342 aa, unidentified
MDLGKRESQLAILTEDGELINMRIRTERHRLVEMFGRRPKARILMEASTESEWVARCLEDLGHEVIVADPNYAPMYAQRTRRVKTDRRDAHALAHACRAGTYRPAHRTSTERCELRARLAVREAVVRTRAAWITRIQSLVRREGCRLRTGAPETFLTRVEELALPPALTTVIAPLLELLDPINKQIEALDEELERIVAADEVPRHLTTVPGVGPVTATAFVATVDDVTRFRGAHQVEAYLGLIPCEWSSSEVQRRGHITKAGNGRMRWLLVQAAWCILRRRKRPETAALRDWAERIAGRRGRCIAAVALARRLAGILFAIWRDGTVYDATKVRGPLPARRAA

SEQ ID NO: 444013 - protein, 414 aa, unidentified
MDQIYERVAGLDVHRDSVVACFRSLGPRGGVVREKELFTTTTAGLCELEAWLADRQVELVAMEATGVYWKPVLYALEGRFTVWLCNARNVKKVPGRKTDLTDAEWLADVAAHGMVRPSFVPPLPIRELRELTRYRKTQIDARAAEIQRLEKVLQDAGIKLTSVASRVLTQSGRAMIEALIAGERDGARLAELAKGKMRPKIPALTDALTGHFGSHHAVACRRILSHLDFLNESIAALTEQIDARTAAFAPVYTSLLQVPGFDRLTIDVIIAETGADMSRFPSPGDLASWVGVCPGSHESAGRHRRVGTTKGNPWLRRALIESARAAARTKGSYFGAQYRQVARRRGPNKAAVAVAHSLIELVWHLLSTGEVFKDLGDDYFTARQDPERRARRLVAQLEELGFTVTLEAASAIPA

SEQ ID NO: 444014 - protein, 317 aa, unidentified
MKENGPYIGIDVAKAYLDVTAHLSGEPWRVANDEAGISTIVTHLREVGPTLVVVEPTGGLEMPLTAALATAGLPLAVVNPRQVRDFAKATGRLAKTDRLDARVLAHFAHAVRPTPRPLPDAQTLELAALLARRHQLVQMLTAEKNRLAATRPPVRQRVQVHIRWLKQELADSDGLLSNTIQESPLWRVKDDLLQGVEGIGRVVSITLLAELPELGILDRRQIASLVGLAPFNRDSGMLRGKRRIWGGRARVRAALYMATLTATRFNPVIRTFYQRLLAAGKMKKVALTACMHKLLTILNAMVKHNRPWNPQLNLRNP

SEQ ID NO: 444015 - protein, 412 aa, unidentified
MKDLLEISCGLDVHKEKIVACILTGPLGKPTHSEIREFSTLIPDMIALRHWIVSKNCHHVAMESTGIYWMPIYEILEDAFSGDITLLVVNARHMKNVPGKKTDMRDSEWISTLLRAGLLNGSFIPEKRIREFRDLNRYRKSVIRDITSQKNRIEKFLQSSGFRLSSFISDIFGASGRNIILHLIEHGQIDKTALDSCLKTKTRNRIDEILMSVNGTLSEHQKAFLKILMTHYDSLKKHLAEIETSLEEDMAPFALQVEQLNSIYGISTTASCAIIAEIGIDMKPFKTAEHICSWAGLCPGNNESAGKRKSTSVTKGNPYIKSMLCEIAWVIAGKRNTYLSAWYWRIKQKKGAKKAIVALARKLLVIIYTMLKQGTLFDESCFETRRKHCEQKQLSRYIRELEKHGYHVEAQS

SEQ ID NO: 444016 - protein, 313 aa, unidentified
MKTNTNQNINVGVDTGKFQLDIYIRPLDIYFTVKNDEKGIAEAIKKIKVHSPNRIIIEATGRLEMPFIIACAKANLPFVIANPIHIKRFAGAIGQRAKTDKLDAQLIAHYGEAIKPTLSTDIMQTMSDLVARRNQLLAMQTMEKNRLQILPKELISTINPILTAFKNQIEKIENKILKLIESCPEYSAKNTILQSMKGIGKIAAASIISNLPELGYMSNKEAGALVGVAPMNRESGRYKGLRKIQGGRHQVRTVLYMAMMSAIQSNPVFKSTYQRLVAAGKPKKVALIACVRKMIVILNSMLRDGVMWEAPKV

SEQ ID NO: 444017 - protein, 358 aa, unidentified
MNYTQNQKIEQVTESTLVLGVDIGSSEHYVRAFDYRERELTRKVFRFSTDINGFNSFYDWVTQICIKHGKNEAMIGCEPTGHYWYTFYQFVKDYGMKLAFVNPASVKKAKELDDNSPKKTDLKDPKTIAKLVIDGRYSFPYVPEGIYAEIREVTSSRDRIMKELNVASNRIQRWLKIYFPEYLTVYKKFDTTTGMMILEEVPLPTMVTALGVDNIIKIWREHKVRGKGASFNRAKTLVDAAHDSVGKSGGQGAVMEIQMLLEDYKVKKQQLEMVTSVMEELIMQIPNAEKMLSVDGVGLVTVAGFISEVGDISRFKNPKQIQKYAGFELVENSSGKHKGRTTIENMKVPGTLRNQFIK

SEQ ID NO: 444018 - protein, 367 aa, unidentified
MTQMKFIGLDVHKETVAVAIADATRNGEVRFYGTIPNTAESIRRLFDRLHLPEVELHFCYEAGGCGYGIYRQLRQLGASCDVIAPSMMPKKPGDRIKNDRRDAVTLARLLRAGELTAIWVPDESHEAMRDLVRARRQAKGDLVAARQMLLGFLLRHGRKFTGKTNWTRSHWRWMGEQSFGSPQQQFVFGEGVRRIEEAQARCERLDQMLQEAMEGWSMAPLVKSLQALRGVGLVIAATLVTEIGDLTRFQTPKHLMGWLGLVPSEASSGSRTRRGAITKTGNAEARAMLVEAAWSYRLPAREAHRYRMRVEDLPEEIKAIGWKAQARLCQRYRRLSAAGKPQPKIITAIARELAGFVWDVSRHTPFA

SEQ ID NO: 444019 - protein, 376 aa, unidentified
MNRVVYVGMDVHKDTYSLCAFDAQNQCFLVETTVKAEVFHVLKYVKSIENRFKDEDIEVVCGYEAGPTGFSLCRNLQKAHVACVVMAPSSLPKSPDNKRRKTDKIDARDLALHLAHHTYKAVNVLSPELESIKELTRVRASAMRAKKRAKQNLLSFLLRKGMVYPFGGRAKYWTQQFYAWVKTLEFANPLDRYSFEEYLTEVNHQVGRVARLDEKIAEIADNQLIEKDVRKLCCFSGISTYTAVSLISEVGDFRRFEKASHFANYLGLCPGVHSSGLSSQNLGITKAGNGNLRRLLIEASQAQGHSLKCGKKSLRILARQKGMDPSIVAYADRATARVKRKRSTMIIRGVNVNKATTAAAREMACFIWGMMTNNVA

SEQ ID NO: 444020 - protein, 314 aa, unidentified
MRTQVFVGIDVSKAQLDVAFRPEGRVSVPNDEAGCAQVLERLRAVPPTLVVLEATGGLEIPLTGVLAAAGVPVVVVNPRQVRDFAKATGRLAKTDTLDAQTLAHFAQVMRPELRPLPDEQTQALAAILARRRQLVEMLTAEKNRLGSAPKPVRKSLRTHIAWLERELRHTDSNLAHAIRESPVWREKDALLRSTPGVGPVMTTTLLANLPELGTLTGKQIAALAGVAPLNRDSGTWRGKRTVWGGRAQIRATLYMAALVAARFNPVIRAFYQRLCATGKAKKVALTACMRKLLIILNAMLKHRTPWRTELVPCA

SEQ ID NO: 444021 - protein, 353 aa, unidentified
MTGTKYIGMDVHKESISIAVRNDAGKLVMECVIETKANVILDFIHGLRGELHVTFEEGTWATWLYDLLKPHVTKLVVCDPRKNSRQGNKNDRIDARELADRLYMNKLSSVYHGGAGVRTLKELARSYLTISKDLGRVMSRVKAIYRSWGIPCAGKQVYAPRHRAEWLAKITEVGVLRRAEFYYQQLDALRVLRQAVRRDLLTESKKHKATKLLRQIPSIGPIRAALLIALIQTPHRFRTKRPFWKYSGFAIEMHSSADYRSVKGELQKSKKQISVRGLNRDCNHDLKNLFKSAATIASVKPGPFQEFYAALVAKGMRPEMARLTLARKIATIVLIVWKRGVSFDAKYLKSQTA

SEQ ID NO: 444022 - protein, 385 aa, unidentified
MEATRIGIDVAKSWFHLVAMDSRGKVIWRKALARRRVLELLTQLKPAVVTMEACATAHYWAREIQKLGHEVKLIHPAFVVPFRKSGKNDFNDAEALCEASCRPMMRFVEVKSIVQQDIQSLHRVRRLLIKQRTQLANQLRGLLAEYGIALRRSIPALRREAAELAAEPARLTAALQLVVSNSLEQLRLFEQQRAELDREIALMCGIDERSRRLAEVMGVGPLTATAMVAKVGNARQFPNGRALAAYLGLVPRQNSTGGKTVLLGITKKGDRYLRTLLIHGARAALQVAPRHDDRLSQWALNLRRKSGPNVAAVALANKNARLMWKLLTSGEHFHPQPSRKPEIDETGSRKGSQQRKSRNGEAPALPVYPPRAPSPHTAQPTLSES

SEQ ID NO: 444023 - protein, 340 aa, unidentified
MIIGCDFHPRFQQIAFLDTETGECGERRLNHPEEAERFYRSLLGKQVRIGLEATGNFLWFRRLIQGLGFEFLLGDPSAIHAANPRRQKTDKRDAKHILRLLVEDRFPAIWQPPADNEQLRQLLLHRCRLVRVRARLKNLLDSIAKNEGLVGAKGWSGKRRGQIEALPLTGWYKRQREDLLYLLDELDKRIDPLDQFVAQAAEENPQACLLMTHPGVGPVVSLAYVLTIGDWKRFPASSNLSSYLGLIPAEESSADKRRLGHISKQGNSLLRWLLVQAAIKAQACDVSWHRQYLRLSLHKHHGVAKVAIAHKLAVRLYWMLRSGQNYTQVKERGSHAGQSV

SEQ ID NO: 444024 - protein, 310 aa, unidentified
MDAIYVGIDVSKDRLDVHVRPAGETFAVARDGKGLNELIERLRGIAPRLIAIEATGGYETIAAAAIAGAHLPLAVVNPAQVRHFAQAIGKRAKTDPIDAGVIARFAEAVQPEARELPDEAARLLAELVARRVQLIEMIVAERQREKRADAVRVRRSIARHIASLEKELPIIDGDIDTMVRGSPVWREKEDLMVTFPGIGRGIARTMLADVPELGRLTRREIASLVGYAPFTRQSGQWKGKSMIAGGRPAARSAIFMAAMCAIRCNPVLRVFYQRLLARGKAKMVALVGVARKIVVMLNAMLRDKKQWQPA

SEQ ID NO: 444025 - protein, 338 aa, unidentified
MKLYMAIDLHSTNNYLAAVSEDGKPIMNKRLRNDPRDILETLAPYKPEIAGIAVESTYNWYWLVDALMAEGYRVHLANPTAIKKYSGLKYADDKHDARWLAEMLRLGILPEGYIYPKEHRALRDLMRKRQHLVRLRTSLLLSLQNIITRNCGIKVGGNTLKRQAEPVEIHLSSSRELALAGTVSKELIDHLTRQILILESHIERQVKDLVSYRNLMTIPGVGKILALTIVMETGPIHRFAKVGSYASYCRKVISRWVSNEKTKGKGNEKNGNKYLAWAFSEAAEQARRYDPQSRAFYERKKQQKNLMVAHNALAHKLARAAYYILRDNVPFDAARLYA

SEQ ID NO: 444026 - protein, 500 aa, unidentified
MAFLIAMKANANSHQPSVYRNQNTLIRAIFHKASHPRKVLCVALDYAKQKHLALICDGNGDVLKAPFPVDNNSAGIAFLIEQITATAQRRKIPKDQIFLGGEDEASYVANFTAALRKEGYLVLRVNAYEAKESRENLLASTDSLDLLGIAKTLLARRAQNTSTSQTTNPVYAELRELNRTRRSLVRQKTAASNRIHALADQLFPGFLDLSKSSLTPFTNASLFLMKDRFSAPEIARRRPSALTKTLRTHLVHHPEETASQLITLAQKALPPQPHRTPSLQRSLTATVDLYQCLDRNAHELKIQAALTLATTPYALLTSIPGIGFVLASGLAGELGEPSQLRKLDSLCAYAGIVPRTHQSGGPDSAALQSHPSPRCNHILKDWTVQSSQKIQLYGPPELKDRIKQWNANGQHGIFAGARRYLRLVRTLVLNVIPYLSPEGRAQNPDSAQLAASAQQTWTVLQQKWRAIPGHRQLLLDEDHPIGAWRRVLKEVHGIHLPETL

SEQ ID NO: 444027 - protein, 337 aa, unidentified
MGRFIGVDLHKNNFMVCYLDGSHREIRTYKLSELNSFRKSLRKSDIVGVESTGNTRYFVEQIAENVQSVKIINPSQFKVISHSVKKTDRNDVETIVEFLSKDMVPEVRLKDKKTSQIASLCQTRDKLVKLRTALKNKVHNILNTYGIQIKKESLSSEKGLRSVLQMPVDEIALVELDVIVIQIRSLNESIKRLDKKLANRGKDMKGHKNITSIKGIGDKSGTILLSVIGDINDFESEKKLAAYFGIVPRVSASNETVHTGRITKRGSKLGRTTLVQCTLIAIRYSPYLQTFYQRIKARKGSGKAIIATSKKLLGIIYNTLKEDWEFEDFPNFILKST

SEQ ID NO: 444028 - protein, 433 aa, unidentified
MQDVQDEPLFCERVAGLDIAKAEVEVTIRVPSDTTAGRRQQETRTFGTTRRELESLGDWLACWGVTRIGMEATGDYWKPVFFLLESCGFDCHLYNAAQVKALPGRPKTDRADSIWLARITERGSVCSSFVPPEPIRALRTHTRYRRHLTQARTAEKQRVEKLLEDGHLKLSSIISDIHGVSGREMLNAIAAGQRDPRVLAQLARGTMRAKIKRLEEALDCAFFTGEHAAVLAMMLATIDHYTTQIDNLTAKIEVLAEPYLHQIRQLDEIDGVGPVCAQDIIAEIGTDMTVFPTAPHLVSWAKWSPQVKQSAGKRKGSNATGRGNPYLSAALGEVSISAGRTQSFLGAKYRRLARRMPKKKALVATGNSALTIIHALLSDPAARYTDLGPDYYEQRMHARRQARNHVRSLERLGYKVTIQAINPDTGELLAAAG

SEQ ID NO: 444029 - protein, 338 aa, unidentified
MQLKRIAIDLSKHVFTLHGVDEEERPVVRRNLKRADMESFFSKLPGTEVVMEACGGAHHWGRLLTRLGHRVRLIPAQYVKPFVKRGKNDRADAEAINDAASRPGMASVPIKSAERQAALMILRHREMLIGQRTQAVNALRGHATEFGIIAAKGTVNVQPLLERLAKDEAIPLPARTIFARIGQQIARADEQIAALDAELLAQHKANPVSQKLAAVPGIGPVIAITLALGIDIEEFASARHFASWLGLTPKEHSTGGKQRMGRISKAGNKRLRSLFVVGATAVIRHLKQGAPNAPAWLLALVARKPRKLAAVALANKTARILWAMMSRGEAYRRQPVAA

SEQ ID NO: 444030 - protein, 429 aa, unidentified
MNYTQNEKIEQVTDAMLVIGIDIGSQTHYARAFDNRGRELTKRVFSFGNDIEGFNSFHQWAEKLKTENDKSAILIGCEPTGHYWFSFAKYATDHKMILVMVNPFSVKKIKELDDNSPKKTDAKDPKTIAKLVIDGRFSIPYMPEGIYAEIRDLEYSRDRIIKQHNISANRIQRWLAIHFPEYLGIYTRFDATSGLAVLEKAPLPKDIISLGVSGIRKIWHDNRMRGRGVTEDRAMTLVEAAHNSIGLDGGPGTRSELYMLLEEHKLWTSQLETVNKALEEAVLKVKNVEKLLAIKGVGIITIAGFIAEVGDIRRFKSPKQIQKYAGLELVENSSGKHKGRSRISKRGRRKLRKILYQVMIPLLASNKEFRQIYDYFVSRVKNPLKRRQAMMAVSCKLIRVFYAVLTKGVDYDRFKMMSDIHHEGNLIAA

SEQ ID NO: 444031 - protein, 321 aa, unidentified
METWVGIDISKDTFDAAWLLDGKKNHLKLENNVKGYKRLLTEVPMESHFAMEATGEYHLNCARYLSSCGKPVAVLNPFAVKMHMQSDLRRCKNDKADSYSIAKFAAEKKTDYWTCPTDDEIKLKHLDAVVDGLQKQIRQSKNMLHSLTQVSQRDDLAVSIIKKTISSLEALMERAKNKQLEMIESSKKEETALACSIPGIGLETSIKFFTHVGNINRFDSARSLISWIGLTPRNAQSGTSIHKNGSISRMGCTRLRGQFYMCAVVAIKYNPDCRAFYHRLKELGKPSKVALIAVANKLLRQLYAVLTKKEAYVPNFCTKAS

SEQ ID NO: 444032 - protein, 322 aa, unidentified
MSVSNQRCAGIDVSKSSLDIAISNIAQSFTVPNEDGGFNQILKELKRNEIQLILMETTGGLESGVAGYLQSEGFDVVVINPRQARDFARAMGYLAKTDQIDARVLLQMAKVINQHPEREKYIRPLPDAHRQMLAAMVVRRRQLTIMLTAERNRLHPSHPQNHESIRFIISVLKSEMARIEAEMSAYISKNFSELSALLSAVKGVGAATVAVLLAEVPELGTLSRREISALIGVAPVNRDSGTMRGRRTVFGGRASVRTALYMSVLVGTRHNPVIKEFYTRLVAAGKPKKVALTACIRKLLTILNAMLKNNEAWDPLYHQHAS

SEQ ID NO: 444033 - protein, 371 aa, unidentified
MKQQSKSSNITVGLDLGDRRHRYCALDERGEVVEEGSICNERDSLRKLAGRYHGALGVMEAGAHSPWISRFLEALGWRVVVSNPRKVRAIYQHERKSDQRDALMLARIGRMDLALLYPVRHGTAEAQQDLLRIKLRDSLVRAGVAVINSVRFTLKSLGYTVRNPSSARFHKVVMEEVPESVREMITPSVQALAELTARIKMLELEINTLAQMKYPQSAQLQQIPGVGPITALYFVLKIEDPNRFAHVRDVGAYAGLCPRRDQSGESDPQLRISKRGDAYLRRLLVSAAHYILGPFGPQSALRAYGLMLAADGTAQAKKRATVAVARKLAVLLLSLWKSQQPYQPFPGARLNGQQEDRRSGTIALHRMEATD

SEQ ID NO: 444034 - protein, 378 aa, unidentified
MNRIIKIGMDVHTTNYTLCIFEPSFEHDGTVHCITQVKPEVKNIIRVIETFKKKHENEELNIVCGYEAGCLGYSLYHELKEKGIECVILAPTTMKTEKGGRKLKNDYRDAKMIAECLAYGGYSAVHVPTELDNSVKEFIRMRDDIKENLKSIKQQIIAFLTRNGKQFEGKSFWTRKHIDWINTVSFSEPLLQDTLKEYMIEYNHLCDRVETLDKQIEEISLKEEYVEKVQQLQCLIGIKTHTALSLIVETSDFNRFKKGNMYSAYLGLIPGDDSSAGHENKLGITKAGNSHLRKLLVEAAQGYTRGKVGFKSKDLKSRQEKCSSEVVAYADRANERLRRKYYRMTLRGKRYNVAKTAIARELACFVWGIMTDHIDLCN

SEQ ID NO: 444035 - protein, 395 aa, unidentified
MLQENEGTISTQDQPTGSDIFVSVEMSRSKWVVGIHTPLADKIGLHTMACGDVEALLALIDRARVKLVASGSNSPAAMICYEAGYEGFWLYRHFVALGIRVVVINPASLLVDRRAKRAKTDRIDARAMVRALMAWARGERQVLSEVRVPTVEQDDARRGLRERQRLVKERTGHGNRIKGLLKTQGIMDFEPRAADAAERLDAIVTGDGRPLAPYLKREIVRELERLALVMRQIDRVEAERDAVVKACDAGAGTDARAEPEREAAMIGELNRLKGIGMNDATILVREAFWRDFRNRREVGGWSGLAPSPWASGSVLRDQGITKAGPPMLRAQMIQMSWRWLLWQPDSDLAQWFRKRTEGATGRMRRIMVVALARKLLIALWRYATTGMVPHGAIVT

SEQ ID NO: 444036 - protein, 413 aa, unidentified
MVKTARKGGLMDFYVGIDVSKFKHTVAIIDEEGEIRKKSFDISNSREGFDSLLNELGLLGEKEQIKIGMEATGHYMNCLVRCLISNGYQIQIYNPSLISMFRDSESVNLAKTDNLDAMLIAKYVATHPFTSSPQLSYLIGEIRKISRAKYFHFGDKTACYNHLLRYLDEVFPEFVSFFKKNEDGTRKNMGRNLFESPTIRWLLSEYTSPQKMARMRSETGETLRRMSKGSISFNKFNQLRELAKNSIGYSTEVDEQIIRNLVTQVRIIDEEIEMLNELLEPLMEELNSPILTIPGIGVNLAAMIIGEIGDINRFSNPEKLIKFAGLDVKVYQSGTINHKGHIRKRGSPILRYALALSVQKLRIHSPVFSEYYYSKLKQGKATNVAIIATTRKLIRVIWKMMTTNQVFDNVKRD

SEQ ID NO: 444037 - protein, 344 aa, unidentified
MVHVGVDLDKRSSQIAVLTEDGEVAQQRLPNDVARLEKFFAELPPHTPVAIEASGTWWWLVDLLEHLGHDPILSHPKQTKAIAAARLKNDRVDAERLALLLRGDLLPTVWIPSAALREARELVRHRVQLVWLRGIVRNRLHAMLARRNLQPVSTKSWLTQRGQRELQRLPLADTPSRIREDCSALLPLLDAQIRRLDSELGARWGGDPRVQRLTTIPGIGPFIAIVLVLELGDIARFPSAKQVASYVGLTPRIRASAGRIRAGHISKEGNRLLRWVLVLAATQAVRRPGPLRTWFHAVKKRRGKKVARVALARRLAEIVFHVWKHECDYFTVVRHGVVRGELGR

SEQ ID NO: 444038 - protein, 357 aa, unidentified
MVFVGVDVHMSYLEIAEIDKDGKLESRRRIGNTLEAIDAFVESLDSDAKVAMESCSYFYPLYSRLEEAGIEARVAHPLKVRLIAESRIKSDKIDAVVLAQLYRMNYLPTSYVPPKEVRQVRALLRHRTALVRQRTQVKNRIHHLLEKNGVKTKGLGCSDIFGKGGLTRIHRVDLPTIERSILNTDLGLLEYFTKTIDQLGSELARIASENPQARLLMTIPGIDYYAALLLLMEIGDIRRFSDPKKLCCYSGLVPGLHQSGQVARYGHITKQGNKWIRYILVEAVGHTIRHDPDSEIHRMYMRIKARKGHSVAKVACARKLLKVMWFMLTRNEPYRYSDSQLIKRKERRLERKASKCY

SEQ ID NO: 444039 - protein, 343 aa, unidentified
MQISTIGVDLAKNVFQVHGVDSAGKVVITRQLRRKQVIEFFSKIPPCLVGMEACGAAHHWAREVSKLGHTVRLMPPSYVKGYVKRSKNDAADATAICEAVTRPSMRFVAVKSTDQQASLMLHRTRDLLIRQRTQLINALRAHLAEFGLVAETGREGVGQLAALITDESNREALPFAMKQALQAFVDQLAALELQIGTLDRAIHAHHRANDISSRLETVPGIGVIGATAIASTVTDPSNFKSGRDFAAWIGLVPRQHSTGGKERLGGISKQGDRYLRRLLVIGATAVVRHARQHPQKHPWIMRLLARKPAKLVAVAVANKMARIAWAIMAKGGYYRAPELAAAA

SEQ ID NO: 444040 - protein, 332 aa, unidentified
MYYSGIDLHTDNSYITTQDETGSVVQHQRMVNEKVLDYFHSLSGPHVVVVESTSGWYWLNDLLQENGIELVLAHAKYLKAIAYAKVKTDKVDSQTLATLLRQNLIPRAHKISRELRGFRDTMRLRLRLVQQRTACLRRIDRIAVKFNTTAVSDPYRFQLWVLHHTRDSFTSQILALEKSLHPVLIPNDDVQHLLGVPGIGKLTAFTLYLEIDGIERFATDKHFVSYCRLVPAADNSNRHQRHRSSNDGNKYLKIAFTEAVVHAIQYYPEFKSFYHRLARRSGQAVARTVVAKELAKIVYYILKNNVAYRGFKGQPISRQKSMQWPRLPSPNA

SEQ ID NO: 444041 - protein, 394 aa, unidentified
MGKLYVGIDISKDRSSANGIDDRGKSRFEISFDMDGTGVGELLKAIEADSDSHEDVVAAMESTACYHINLYSFLSAKGIEIVVINPLLIANFAKLSLRKTKTDKKDASTIAQFILAHKDSVTQLAVSQDLQDIRDMARERESLCHQISATKVEIRRLLHTTFPELESMCNPFTKVMLHFIQRFPSARLVSVAKANIIAKTLKEKPCSCRIRFTPAELINIARKSIATVSPGKEIILSGKIDTLLHLQKRRDELTKTLTKYCEASIVEDLKIVTSIAGIGNNTATTFLAETGRIDNYASHKNLIAFAGIDPTVYQSGKYEGVSKISKRGNRHLRRVIWIMTVRVINHNPMFRKYFLKKRNEGQPFKKAVFATAHKLVRVIFAMLSHRTYFQEECI

SEQ ID NO: 444042 - protein, 441 aa, unidentified
MENFKKMQILNPNAAGIDVGSRSHFVAIGQEDNEIKEFNVYQSGLKELVEFLKTNGIKTVAMESTGSYWQSLFLLLQDEKFEVLLVQGTQTKNLKAKTDVKDAQWIQKLHSLGLLRGSFLPSQSTMEIRTLHRHGESLVEESVKYVNKMQKALRLMNFRLDVAISDIVGVSGIRIIKAILEGETSGEKLAQYCDNRVKKSKEEIADAMQGKINPELLHELSDCFDIYLFLQEKIKNNSQKINKVLQEQVKEIVLPEDIKLAKKKRSRKKEVQLDVQTHCCKIFGVDLFAIECISEGTVASFLAEVGTDIYKFKTAKQFVSWLRLAPNNKISGGKILSSRTPKGKNKFALTLRNAANSIDRKKDGHLMLFFKRIAYKKGRGAAITATARKIAVIIWNMIVKKTEYIAVNTQEYIQEMKSKKIAQIKKMMKKYEIETISISTV

SEQ ID NO: 444043 - protein, 407 aa, unidentified
MDLLKTVFGIDVSSRKSNVCIMVNGQKVNDYAISNDMVGFNPLLGDLKQVTKPQIIFEATGVYSRRLQAFLDMHELRYVMMNPLEAKRKTKDDLHQNKTDKLDALYLAKLQSEHPQRLAYVQNKEYQELMANNRIYEQASHDLITNKNRLHKAVQLTFPEIEHLLANPRGKNYWSIALRFPHPDIVLETKEADIIDFLKGLSGIGKKRANDITQSLIRLAKVACPAVKKNSAHIRGLKMAINNILSAEEECQTALQEMAKLAPKRDLEILTSIPGIGENTALRIISELGDIRRFNNPSQLNAFVGVDPQVYESGNLTAHLSISKRGTAIGRKVLYLAINQIQSAKKAGKPCHIADYYEKRKRSSETASHKKAAIASIHKLLRTIFALIKNDQLYSYDVAKHNQRLLS

SEQ ID NO: 444044 - protein, 394 aa, unidentified
MKLIGIDIGKNKHFFCVMDQQTGEIISQPVSFSNDKEGFDFLVQKIKSYPKDSILIGMEDTGHYHFALLKYLLDLQYTVALINPKTTDFNRKMQGGITKNDKLDTINICDVLDTPERKKQYRITKVNSFDLYEQKQLTRHHHNLKEEENVYKNRLQKCIDIVFPEFNKLFNSKYGIVYMNILKMFGSAENIANTDIRTIRKCFEIEGRGNRISLTPERLKECARSSIGISSSAEVIQIKHLTAQIELIEEQLTEIDKKIEEFSIQNNSPILSIPGISHFSGTSILAELGDISNYSKPSQIIKFAGVAPLHHESSQFNAQHTAITKKGSKYLRKTLYQIILPVIRHNPVFNKYYQLKISQGKGHRCAQGHCVRKLLRIIYHLLKTNQQFDPQLLR

SEQ ID NO: 444045 - protein, 333 aa, unidentified
MNMHLQGGVANGAQRPNAGVDVCKQHLDVCLGTEDQRVANDAGGWDELIAKFKGAGVDLVVLEATGGYERGLVCALQGAQIAVARVNPRQARDFAKSMGVLAKTDKVDARALRDFADVLARHKDRAKYITPMVDERRLALADLMTRRRQLVDMRVAEGNHLEHAAHKHSVRSIKNVLKTLDKQLEVIDREIDDHFDRHFGDQRTLLDTVKGVGPVTILTLTAALPELGQFGRRQIAKLVGVAPLADDSGQRKGKRHIWGGRADVRAVVYMAALVAIRHNPVIRVFHSRLIAAGKPKKVAIVACMRKLLTILNAMLRDRAAWDASKHALGAVSA

SEQ ID NO: 444046 - protein, 398 aa, unidentified
MDPVIGLDVAKGESQVQAFLARKQPFGKTFKFKHDTNGLRDFYVFYKEIKLNAEADPVVIFESTGHYHEPVLQYLEERRITYYLVNPVISYETKKSSLRKVKSDPADARHLCELYYKEDLETFHRKNVQTMNLRNLSRQHDSLTRNYVQLKLQFQTILDQVFPEYKGVFGDLYSLVSLKTLLLYPTSDVVLKATTDEIARVMHSLGGKRSFAWFLEKANKLKEAAERNPFKKILYQSHLVTLKMYIQMLLQQKEFLSILEQEIDELAMQFEEYEILHSIPGVGCKIAATLISEIGEIKQFSHPKKLVAYAGIDPRIYQSGKFTASINRITKRGSTRLRQALYTAVQCGLTNNRNTKLREFYDKKRSEGKPHKVAIIACANKLLHWIYAILKHKEIFNA

SEQ ID NO: 444047 - protein, 359 aa, unidentified
MDQLTTVCIDLAKDVFAICVLDAAGAVLQRRVLRREAFMRWAEQLSPCRVAMEACGSSHHWGRWFAARGHTARLIPAEFVKPFRPGGKNDAADAEAIAVAARQPTMRFVAIKSVDQQAILAWHSVRNGWHEERTALLNRRRGLLAEFGVVIARSADRFLGALPTLVEDPRLPDPVRAMLLEVREQLAALNLRLARCDQQIATHARSSDVARRAGELLGIGPVTSSALAATVPDAKVFRNGRQFGAWLGLTPRQHSSGGRIRLGHISLRGNVYLRTLLVQGARSTLQSALRADPTHASRLQRWIRQLHERKGYHKTLIAIANKHARMLWAMLAKDERYDADAWQRHPLHPPLPAVPASPD

SEQ ID NO: 444048 - protein, 445 aa, unidentified
MKFSKMQIVNPHAAGIDVGSKSHFVALGQEKEDVFEFGVFTKDHDALIDFLHGHDVDTIAMESTGSYWQTLFFALQAAGFEVLLVSGHQTKNVRAKTDVKDSQWIQKLHSLGLLRGSFLPSKETEKLRILYRHRCFLVEESAKMSNKMNKALRLMNLRLDNVISDITGKSGMAIITAILAGERSGKNLSLLADRRVRKSKKEIADALVGHWKDEYLLELQDCYDMYIFLQQKIKNTDKNIETLLSQFTKKSEFTVNEKTLTVKQRKGKNQPKFDLPYLSYLYYGVDLFAIEGVSSSTVLTLISEIGDGIYKFPSAKEFTSFLRLAPNNRISGGKIISSRTPKGSNKLALALRNAANTIDNCKSGALYHFFKRIAYKKGRSAAITATARKLAVIIWNMIIKKQEYKPLSNDEYLLSIKEKRIKTIQKIMEKSKITISELSTTYEFS

SEQ ID NO: 444049 - protein, 348 aa, unidentified
MLADQLDYMIGVDPHRDSHALAVVHVISGAVVFETSVAADSGGYAAALKLVRQHAPAQRAFAVEGTGSFGAGLTRFLAARGERVLEVGRLRRERRSGGKTDALDAVRAARSALTQERPATPRAGGERQALQALVAAREGAVNAKRAGLCQLRDLVITTPEPLRSELRPLTRARLLQRLAATRPDGRRDPELRGSMLALRSIARRVLQLTTEERELAREIERLTRKLAPQLLDQPGVGPHAAAQLVLSWSHPGRIGSEAAFARLAGAAPIPASSGQTSRCRLDRSGDRKLNRALHMILVTRKRSHPATIAYIQRRMQEGKTRREANRCLKRYLARSLYRLLEHGAPLAT

SEQ ID NO: 444050 - protein, 387 aa, unidentified
MTKNKGRVVGLDVHPDSFAGAVVEGSDPAQARVLSTSTRVQLEQLERWALRHTSTEDRLVLEASGNAFAVAERLRMIGRKVEILDSHCAGKVGKVYCANDRVDAVKIARIYLSALSPIVWQPDAKTLERREVFSAYQAVVKESTRAKQQLRSMLNEHCVRLEKGFRLCHPKAITRLLALREWTPARTMLLQQSHGSLVAARARRTLLRRHMAQEIAADDALMRLSRLCGINLVTLYGVVSAVGDVHRFTHSKKLVAYFGLNPSVSQSGNFEGSGALRRHGRGALRALLIQSGKKLLEVANPLQKWGLAVAARRGRNKAAVAVARKLCVAVWHVLMGHVIGALERLDTLETKLSKFATEIGPAALAALGYNNKADFVQKKLYLLRSYP

SEQ ID NO: 444051 - protein, 401 aa, unidentified
MTSTVFVGLDWAVHTHAVCVIDVTGKVLDRFEVAHNRDGLAELLRRLARFGACLRIAIERPSGLIVDALVDAGHQVFPIHPNAVKASRPRYRSHSGKSDTSDAYLLADLLRTDGHRWAPLSPQSDSIRALRALVRARDDLVANRVALGNQLLSTLEAFWPGAACIFADITSPIALAFLLRYPSPAAATRLNATRLQRFCRLQHYSGRRSAAELLARLHAAAPSLTGPQASEALAQVVASLVHVLQPLIVQISELTRRIEHFVESLPDGQIIMSFPRAGRICAAQILAELGDVRERFSTAEQLAAEAGAVPVTYQSGKARSVTFRWACNHRLRQAIMCMADNSRQASDWARHVYTEARARGCAHPHAVRILARAWLRVLWRAWVDRRPYDPSLHLAAANTGG

SEQ ID NO: 444052 - protein, 418 aa, unidentified
MKQSKTKKLRTVNDKTMIVAVDIGKSIHHGYFRSGNGQDIKVFPFYNSQESYEGFWIKVLQFKQQNGLEEVVVGFESTGPYAEPLMNFLSKKPVKLVQVNPMHTKRLKELTGNSPNKTDHKDPRVIADIISLGHALTVVVPQGPAAELRRLTQARQRASKNRNAMINQLHHLVFVIFPEFTQAIKKITSKSALYILQNHPSPEDIMELGFEQLQTILSKVSSGRLKRDQIQALFEAAGNTAGINDGRRSLLAEIKHLASCIERESEFIDHLEKQMDQYLKQIPYSQNILSIKGIGEVTLAGLIGEVGDFRKFKTIAEIMKLAGLDLYEISSGKHRGQRHISKRGRSYLRKLLFFVAINTIRTKGIMRGHYMKMVDKGMPKVKAVVAVSRKLLRIIFAMVRNHTTYTDNYEQYHDKLAA

SEQ ID NO: 444053 - protein, 359 aa, unidentified
MAIKVKRNKINFKGKMVNIGIDMHKKSWRITALVEGDIVMAVTLARPNYDSFKKLLVQFLGNYVRIVYEAGPGGFDLYDRLTDDGVECIVTPPSLIPTASGSKVKTDKKDSYKLARLLESNMLKQVWVLTPEERAHRQLARTRRQIANHRSDVMRQIKSLLLFHSIEIPFSSRQQWTGPFTKWLHGLDLGDEYLNKSLEALIKLFDYLSIEKKSLTHEVIKLAREEKYASRVKLLKSVPGIGALSAMEILVELQDIARFKTADELAAYLGLTPSQHSSGEHTRMGHITHAGNDRVRTTLVESSWILIGKDPEIKKKYDNIKYRSGGKRAIIAVTRTLSARIRRMLLDQIPYKIDLKKAA

SEQ ID NO: 444054 - protein, 317 aa, unidentified
MNTVSYYAGIDVAKAYLDLRLLPDEHGEHAERFSNDADGHRKLIGVLQKHHVHLIVLEATGGYERAAVSAMVTAGLRVHVAQPQVIRAFAKSLKIRAKNDDIDGGVCARYAQDRVKDLAVIESIDPTRQRLQALLVRRSQLVEMATMEQNRSQQVSDKPSLASIKRSLKFLKKQIRQVEKQMDEIVQNDEKLREKSATLQKTKGVGAQTTRVLLACLPELGNATSRRLNALVGVAPYDNDSGNHKGARYIAGGRKMVRNGLYMACMTAVRTNDVIKPYYQKLVERGLAHKTAMIACIRKLLNYLNEQLRATKPAPTA

SEQ ID NO: 444055 - protein, 343 aa, unidentified
MPHYVGLDVSQKTTAICVVDAQGKRLWRGVCATDPGPISARISQHAGVDAKVGIETGSMTPWLVHGLRAAGLDVACLDARRVKAALQMQLNKTDENDAEGLAQIMRTGWYRAVHVKSLDAHRARALLGARAQLVGMTTRLSNMIRGVLKTFGLLPGAGRGLRFDRKVEALLEGAPEIALVVRPLLATWRQLRQQIAVFDKAVLQQVRADPICRLLMTVPGIGALSSLMYVSTVENPSRFSRSRAVGAHLGLTPRRYQSGETDRSGHISRCGDGLARTLMYEAATVILHRVKRPLHLKDWAEAIERRSGSGKARVALARKLSVILHSVWRSGEPFRWATPAMAA

SEQ ID NO: 444056 - protein, 433 aa, unidentified
MNTSHPYDLIIGLDRSDQKADLHLITTTTGERRSVVIATTPEALWEWLLELRQQQPQARVGLCLEQPAVHLIAFLESYDWITLHPINPITLQKYREAFVTSRAKDDAKDAFYLAELLLHHHDQLQVWAPEDSATRAVQQGVFHRRAVVDERTGLTNRLIALLKQYFPQALVLCGEDLWRPLATRFLLKWSSLQAVQKAKPATLKAFYYLHGSRSAKLLEQRLALVAKAVPVTDETALIASFALRVQLICRQLQLVQQTITDYEKQIASAYAAHPDHALFASLPGAGPVLGPRLLASLGSQRERFGAAADLQQYTGIAPVTKRSGGSCYIHRRYLCPKFHRQSFHEYAKESILWSRWAAAYYLQQRGKGNPHHTAVRALAFKWQRVIWRCWQDRKPYREETYEAALRKNDSPLVALFDKVELGKSPFKNPVKKS

SEQ ID NO: 444057 - protein, 349 aa, unidentified
MKQDNVKKASNDIKVLGIDLAKSSFQLHGVDESGRTVLRKKLSRDKLMAFIANLSPCLIGLEACGGGHYWSRSFTNFGHTVRMIAPQFVKPYVKSNKNDAVDAEAICEAVQRPNMRFVPTKSIEQQDIQSIHRIRSLLVGRRTAQANQIRGLLMEYGIIIPRGIPYIRTRIPVILEDATNPLTSLFRTLLNELYEEMVHLDERIVVLEQKLQAISLQSEDVQRLLTIPGVGLLTATSVVAAINDIAVFKNGRELAAWLGLVPRQHSTGGKTTLLGISKRGDTYLRTLLIHGGRTVVRVAHKYQDKRSRWINKLEERRGANISAVAMANKNARIIWALLSKKENYDAAVA

SEQ ID NO: 444058 - protein, 316 aa, unidentified
MVPSPLFVGIDVAKATLDIAVRPTAETWRVSNDATGIDALVLRLGAWAPTLIVLEATGGSQGPLVAALVAAALPVVVVNPRHIRAFAQAVGILAKTDRIDARVIAHFAEAVKPAPRPLPDAETQELRALLVRRRQLVEMVSAERARLDTVPPRIQDAIQAHIAWLTTQVAGLDDALTRAGQTHPVWQAKDDVLQSIPGVGPVLARTMLGQVPELGTLGPKPLAALIGVAPFNRDRGTLRGRRPVYGGRAEVRAVLYMGALVATRHNPVIKTFYERLLAAGKAKKVALTACMHKLLTIMNAMVRDLKPWQPQEVPSA

SEQ ID NO: 444059 - protein, 313 aa, unidentified
MFNESDLIKRNGGSVKKISRIGIDISRTVFQLHAATASGEVVWRKRISRSEVLDVMRQVPVCEVGIEACSGAHYWGRELEALGHAVKLIPPQYVKPFVKRNKNDAADAEAISEAMSRPTMRVVRVKSVAQQQLGQLHRARELMVKQRTALVNEIKGFMHEHGVLLQCGRGKLRSEYLEKLERHGARLGEATKRLMESLFDQLANATAAIQVHENEIQALHVGNELSVRLTSIPGVGVLTATAVIAAFGDAKQFKDGREFAASLGVVPRQHSSGQTERLQGISKRGDPYIRKLLAQGGQSVVNVQSHVNETENS

SEQ ID NO: 444060 - protein, 409 aa, unidentified
MFYVGIDIAKDFHVVTIIDENEVKVTAKPFRVTNCIDGFSKFITKLEKLSSNTNDFVIGLEATGIYGENLWEFLNSHGYDVKLLNPFQTSRYREQHTMKKVKNDNIDSWIIALFLKDGKFSSGYVTDDEYQSLRTLYRNRASIQSDMKEVKKRILTQVTVTFPELENFIDIFSISGLALLDKYPTAHHYKHSSVDRVMKIFRHIQGNNFSTEKALKVLELAKNSIYSGKAKDARAIAIKSSIRLLRMYQEELSILEDEILALLDKQGISEAKDVPTNSLIENLKTIPGVSSKTIAAVISECGDLSRFSKPTKFIGYLGLFPTENSSGNSKSTGRLSKRGSSLAKHALYLASVSCMIHNPQLKQYYDTKRSQGKSKQEGLIAVSRKLATIIYSIFKYNTPYNPSRVFSKS

SEQ ID NO: 444061 - protein, 360 aa, unidentified
MQGHAGFSGSDLVVVGVDTHKAFHVAAVIDSVGGLLGSTTVPATAAGYARLVAWARSFGRLERAGVEGTGSYGAGLARHIAERGIAVIEVNRPDKSTRRRRGKTDAIDAESAARAVLSGYAHGTAKSADGPVEMLRMFKLAKDSAMKLRTQAINQLRAVLVNTEPSLRESLSGLGTTRLVQRCARLLPGDGGDALAASKYTLRLLARRIQNLTAEIEDLQREIHRVVTAHRPQLLEGYGLGPDTAATLLITAGDNPDRLRSEASFASLCGVCPVEASSGNTSRRRLSRGGDRRANAAIYRIALSRLRWDQRTQSYLQRRIAEGKTKREALRCLKRYIARELYPLLLGQPNTGPERLPEAA

SEQ ID NO: 444062 - protein, 341 aa, unidentified
MNAATHTLGIDIAKRNFEVNLRSLEPGPARHSSGFPNNPKGFGALQRWLIQHGITQAANLHACLESTSRYGDALAAWLRSQDYQVSMVNPRRTRHYADSQLSRTVTDRIDARLIADFCAEQRHKLVLWEPLSSDHRELQDLTRTRTALVEHRDALANLLETATGLVRKAVQRQRANLQREIERFDKEIKKLLDQQPDSKLSTQVALADSVPGVGLLTAATVVAELPCIDKISRASQAIALFGLDPKSKTSGETVKTPARLSKMGSKRGRRALYMPALVALRHNPLIRALGQRLKAKGRSGNYIVVAAMRKLLRQIFGVLKSGQPFDPNWSKSHARQLQEVV

SEQ ID NO: 444063 - protein, 390 aa, unidentified
MARAKRSRPDRDILPTHPNAAAIDIGAKMHVVAVAPDRDAEPVRSFGTFTGDLHRLAKWLERCGVRTVAMESTGVYWIPVFEVLDQRGFDVVLVNARDAKHVPGRKTDVSDAQWLRQLHEYGLLRASFRPKGELATLRAYLRQRERLLDYAASHIQHMQKALMQMNVQLHHVVSDITGATGMRIIRAIVAGERNPDVLATFRDVRCHSSIETIRAALVGNDRDEHIFALTQSLELYDTYQDKMLDCDRKLEFLIAALTDKGAKPVGKLSRPRVKTKQVNTPSFDVRTALYGVLGVDLTEIHGLGPSLALKLIGECGTDLRAWPTAKHFTSWLCLAPGNKISGGKVLSSRTRRSSSRAAALLRLAATTIGRSDTALGAFYRRLSSQVRRRP

SEQ ID NO: 444064 - protein, 344 aa, unidentified
MTMNYIGADVDSKMTELAVRRKGRIVARRRVPTSIKDIRQYLAAVSGQTALAFEEGPMAHWMWRNLKDHVDRIVVCDPRRNKLITHDGDKSDPVDAGKLAELLDGGYLREVYHSDDDGRVLLKEWVSLYHDRVRDAVRQANKIRARCRMYGVRMPGCVLRNPVRRPEWLALVQCPGLVGQLELLWLGFDAVARQTSKARWQLELQSRRYEIIKLWRDIPGIGLIRAATFFAYVDTPWRFKTPKKLWKYCGVGLQRTTSGTGKDGKPRPGYLRLPWAVNRRLKDVAYGAAMSAINGNSNVFRSYYARLLRDGMSLSNARHSVSRKMITVMWGMWKTTRRFDPQLV

SEQ ID NO: 444065 - protein, 401 aa, unidentified
MVKIRERIWVGIDVGKASHHACAVDETGKVVFSQQTANGQAAIQALIARAGKAGGEVCWALDMTSGTAGLLLALLWQTGQPVRYVPGRLVNRMAGAFAGEGKTDAKDAKTIAETARLRTDLVTVTAADPIVADLQVLTAQREDLMGDWVRGVNRLRALLASIFPSLERAFDYSTRSALVLLTGFQTPTSLRDAGRDGVQAYLTEHGAWPRGIPVMADKALDAAGEQTVVLPTEKVTAPLIARLAADLLDLDRRIKDLDKQLTDRFEEHGHAKAITSIPGFGPILGAQFLADTGGDLQRVFGTPGRLAAYAGLAPVPRDSGRVKNNLHRPKRYHRGLRRVFYLAAFSSIRADGPSKTFYQRKRSEGKVHTQALIALARRLVDVIWALIRDDREFQPTVAAAA

SEQ ID NO: 444066 - protein, 343 aa, unidentified
MKHIGLNVHSATTHASILSDRGRKIGNAVIPTRKADLVAFVTNIPGPKQVALEESQLADFVTRILIPHVTTVIRCLPQHNRLISKSEQKYDDADADHIAELLYLDKLKAVHHASWEYRQLREGVRAYWTASRDLARAKSRLKAFCLFNGVHCVGEKVYSRKYRGGVYKEIDNQSGNIELLKQLYANMDSCREAKTAHVKILRELSRVFQKDMVCLKSHPGIGFIGASTLVAYLENGWRLKNKRKLWQYCGIGIRRHESAGTGRRGASRKGNRYLKNALMTATASIAARRNADNALTRIWREKVQDGVPPKRMKRNLARKLAVLAHRSLRFKEEYDDARVMTTH

SEQ ID NO: 444067 - protein, 356 aa, unidentified
MSHDVKYIGMDVHKEAIVIAVLNEGGKLVMESVIETKANSILQFLHGLRGELHVTWEEGTWAAWLYDLLQPQVQHIVVCNPRRNALLKEGSKSDKVDARKLTDLLRTGMLRPVYHGENGLRTLRELGRSYQTISKDLTRVMNRLKALYRGWGIACAGTQVYAARSREEWLSKIPQAGVRRRAELLYQQLDGLQALRRNVRPEFLAESRKHKAAKLLRQIPCIGPIRAARLLALMQTPHRFRSKRQLWTYSGLGIETRDSAQYRFVRGQLQHAKKPQQIRGLNQNHNHEMKEIFKGAATRASCGVGPLHDFYVALVAKGMKPEMARLTLARKIAAIALTLWKKEERFDAEHLKPQAA

SEQ ID NO: 444068 - protein, 482 aa, unidentified
MKKKNIYVNQSQELLTLFEEAGNSAKIMCVPIDYAKKDHVVMFCNGYGDILRKPFSVKNTPEGVSYLTEQVTRSCHNRSINPKYVFFGGEDVGSYAENFASTLRSGGWLVAGVNAHDAKKQRANIQASTDRLDLMGIATMLLNRRCNCSPAQSGIYLNLRTLVRHRRRLVVMTTEVRNRIHAIVDRLFPGFLDEQKSGIAPFSKGSLLLMENRFSAQQIRRRKRSALIEAIRRLGTPKPDCATTKLKEYAARVLNTSDEYVATLQLSLAQHVKHYRCLQENIEQLEKEIAVWLSQTQGAFLTTVRGIGIVLAAGVTAEIGNPNGQKPLNNLVSYAGIIPRIIQTGGPEGEIYTGKVAKRSNRILKDYLVQSASHLGLHGPEDLMSDHKRRDAAGQHADFGIARRYLRMAMALMRSSQIYLPSRLRKKDSKPEERTSYYLMIWPYLRDKWQKLDALKAGFAEDRPLGRWRNMVQGIYDIKLKL

SEQ ID NO: 444069 - protein, 411 aa, unidentified
MLYVGIDWADDHHDICCTDDTATTLVQCQIAHNTEGFATLHAQIAKHQTNPAAVLVALETTRGLLVYDLLRQGYQVYAINPKAVNRYKDRHVLSAAKDDRLDALAMAHLLRTDRHRFKPLAPAPAHYRLLDRLCLDLRKLIDEKTRLSNQIASCLKEYYPQAVGLFRDVASPIALAFLQAFPDPDTVRQTDRSAFAAFFRAQHYTHPQRVDTLYERTHAPTPEADPVVVQAAKMRLAALVAQLAVVRTHQGTYEHTIQTILEEVPEAQPLATLPGIDKRLVPELVAALGPNRPEEPKRFAAASDLVKLSGCAPITRASGKRRTVLRRRACDKRLRRTFYDWAMASLSWSRWARAYYDHHKAQHQAHATILRGLGQKWAKIVYAVWSSGDAYDEARHIEQLKRHEVVWALSL

SEQ ID NO: 444070 - protein, 415 aa, unidentified
MKKHSNSVKKSESRMKRRNPRAEQRRDSSEVMAELVSQLRQQLEEKSVPAAESAVEERDAVGPNLDRLTVGVDLGDQWSNYCILGLGGETLREGQFRTRRQEVEEFFQGLAVSRVVIEVGTHSAWVRELIAGLGHEVLVANAQRMEGRKRRRRKNDRIDAVKLARLGRVDPKALYPIQHRSTEVREDLLVIRVRDSLVESRTKLISTVRGMVKTMGARVQGCSSVSFSAKAAEQIPAEVRETLEPLLRLIQTLSEEIKSYEKRIEKLGSEKYMDTKLLRQVNGVGPVTSLAYVLTLESPQRFKRSRDVGPYLGLVPQQEDSGDSQPQLGISKAGDRMLRKLLVGSAHYILGPFGPDTDLRRFGMKLCERGGKNAKKRASVAVARKLAVLLHRLWSSGEVYEPLGYGKTITESAAA

SEQ ID NO: 444071 - protein, 345 aa, unidentified
MKIVGCDLHTRYQQIAMLDDETGELTERRLEHASGEAKEFYTKLSGAVRVGIEATGHTRWFERLLAELGHELWVGDAARIRAAEVRKQKTDARDAALLLELLRNGRFPRLWRPTGAERDLRHLLWHRQKLVWMRNAVGNQLHALAMGEGLCRKKQLFTKKGRGELQALKLDRWASRRRQELLQMIDPIDASLKQFDEAVNQQAAGTPEAVRLMTHPGVGPVTSLAFVLLVGPVSRFQRSKQLVSYLGLNPREHSSGGRQRLGAISKQGNPMLRGLLVEAGHTAARLDPELRQDYQRLRLRRGGSVAKVAIARKLAVRMYWMLRRQVNYAQLVRMQGSSRATLVQQ

SEQ ID NO: 444072 - protein, 351 aa, unidentified
MKTMTKQLQGEELFVGIDLHKHRWHVTIRTADVEIFSNSIVGRWEDLRRVISRYKDCQIHAVCEAGYFGFWLFDHLTQYGVECIVTPPSLIPQEHGNRVKTDRLDSRKLARLLAKGLLKSIWVPSAKERFHRQVIRRRRQLVGDRVRTQNRIKSELCFYGIDLPAARSKWSQVYFANLQRIKFKNHWMQKSFNQLLEQYEFLSTQINKQTQLLKQLSQLPLYCDRVKILCSIPGIGILTAMEILLELQDFSRFRRAQQLAAYVGLTPSQYSSADKIRMGRITGAGKNSVRSALVESCWHLIRKDKAMRKKYEQIKARAGGKRAIVAVSRKLILCIRRLLLDNRPYVYEPVI

SEQ ID NO: 444073 - protein, 336 aa, unidentified
MTLYCGIDLHSNNHVVVVIDEEDRRIVEKRVSNSLDRTLALLAPYREEIAGIAVESTFNWYWLVDGLMEQGFALHLVNTAAVKQYEGLKHTEDRFDAFHLAHLLRLGILPTGYIYPKERRAVRDLMRRRAGLVRLAARQLISVQSQIWRDTGERVSSNRIRRADFVPPLTEPLSHLPAAAALRVYHTLQTEIDTLEAAAQAAVVLDPRFKILTTIKGVGPILALTIMLETGDITRFPQVGDYASYCRLVKTERLSNGKRKGEGNRKCGNKYLSWAYSEAAHFAVRYEPLAKRFYERKQAKTNGIVAIRATAHKLARAAYYMLREQKPFEASRLFAH

SEQ ID NO: 444074 - protein, 373 aa, unidentified
MDMKVIYVGLDVDDTQYHGSALNKETGEVISFQCRPTLSGLLKQLAKLDQVFPDSTLSLCYEASYIGYTLQRDLAKHGYHCDVVAPSSIPSPRGKQIKTDRIDAAQLAQFYANGLLTIVAIPEPEQEHDRDLLRSRKKLVDQRKELRTHILSLLRRNGRHFQQETPNKANWTMPHQYWLEKVVTTSSGSFAVNLSLLVRQLKAVNGILTEYAQEIHAMAKTERYERSVQALTCYKGIKNLFALTMITEIGDIKRFPHPRQLMSWVGMDIREYSSGGKHNRFGITKQGNRYLRSAFIEANQRGYRTARLSNDLKARRKGAEPDLIAIADRCLRRLNKKGNRLLIGGKHPNKVKVACAREMVGFVWESLNKAAAV

SEQ ID NO: 444075 - protein, 348 aa, unidentified
MLADQLDYVIGVDPHRDSHALAVVHVISGAVVFEATVAASSDGYAQALKLVDQHAPGRRVFAVEGTGSFGAGLTRFLTVRGERVLEVGRLRRERRSGGKTDALDAVRAARSVLTSERPATPRAGGERQALQALVAAREGAVNARRAGLCQLRDLLITTPEPLRSELRPLTRARLLQRLAATRPHSRHDAELRGSMLALRSIARRVLQLTAEERELAREIETITRKLAPQLLDQPGVGPHAAAQLVLSWSHRGRISSEAAFARLAGAAPIPASSGQTIRYRLDRSGDRKLNRALHMILVTRKRSHPATIAYIQRRTQEGKTKREANRCLKRYLARSLYRLLEHGAPLAT

SEQ ID NO: 444076 - protein, 342 aa, unidentified
MSFYCGIDLGARESQICVINKRVKKVLEVKTGNKLEQIKQLLAPYKADLQIVVESTFNWYWLVDGLQAVGFQVVLAHTLGLHMISAAKVKTDRRDAFALAKLLLAGMIPKAYIYPAQTRPVRDLLRRRGRLVQVRAGEYGSLRRLLLRQGILSRQQQEIKQAEETDLEKWFTHPLVRLHASQELERIRLYSQQLAQLEATILARAEKEWGFEQLQQLPGIGPIIALTIFYEMGELGRFATEKDFSSYCRVVPGVAQSGQVTRRGRGSKQGNHYLKWALSQAAVHAVRCYPGVRRYYERQLRRHRGRARQMVVYNIIAHKLAQGVYHVLKERTEYREELLFGR

SEQ ID NO: 444077 - protein, 318 aa, unidentified
MTPPEIYVGIDVAKEQLQVALRPDGETWSVTNDRPGLRDLVKRLAVSKPALVVLEATAGMEMPVVAALAAAGLPVVAVNPRNAREFARATGRLAKTDVIDAHVLAQFGEALKPPLRPLPDAATQELNALVTRRHQLVEMLTAEKNRLGQALAKAVRAGIREHIRWLEKRLADIDRDLADAIGRTPVWREKDELLRSVQGVGPVLSTTLLAGLPELGSLGRKQIAALVGVAPLNRDSGRYRGKRMVWGGRARVREALYMGTLVATRFNPVIRTFYQRLLEAGKPKKVALTACMRKLLTILNAMARHETPYPTLVRQDGC

SEQ ID NO: 444078 - protein, 344 aa, unidentified
MEYYVGLDVSLRSCALCIVDNKGKVYLERELPCEVEDIADCLAAFEHSIKRVGFEAGAMSQHLFFGLQSAGFDVVCMEARQVSAALSAMRNKTDKTDAKGIAQILRTGWFSPVHMKSREAHGMRALLSTRKALLKKTMDLANEVRGLLKIFGVRLPRTVKHGSFDGLVRPMIEMDDVLAHAVIPLLDARVVLFQHYLELDRRVKRAASQDEVCMRMMTVPGVGPIAALTFKAAVDDPSRFRRSRTVAAHFGLTPRRFQSGEHDNPGRISKAGDRDVRATLYAAANALLMRTMAGSQIKSWGMRLMRTKGRRRAVVAVARKLAVLLHRIWIDGSEFRQEQVGGTA

SEQ ID NO: 444079 - protein, 342 aa, unidentified
MGTITTIGLDIAKSVFQVHGIDATGEVVVRRRLSRGRVLAFFEKLPRCLVGMEACNTSHYWARELIALGHDVRLMPAQYVKPYVKRGKNDAADAEAICEAVARPTMRFVAVKTPEQQSTMMLHRVRLMLNRQRTQLSNAMRAHMSEFGVVGPVGRMGLERLMAVIADREDLRIPPDARVCLEMLAAQLAVVKEQILKNDRRIRASARETEVGRRLMEIPGVGPLLASAFVASIADPTVFKSGRDVAAWIGLVPKQNSSGGKERLGSISRAGNRYLRQMLVVGAMAVIRHAERHGTKRRWLIQLLARRAKKVAAVALANKTARTIWALMTNGERYREPTVALP

SEQ ID NO: 444080 - protein, 330 aa, unidentified
MNKLNQLDFTGTNIYCGLDVHLKNWRINIRDDDMELRDFSQNPDPVTLSNFLKKNYPGATYKVGYEAGFCGFYIQRSLTSLGIQCVVLNAADIPKGNKDKRQKNDKRDARNISEEIKKKEAGIYVPSIDWEYGRSLVRTREQQITDSTRMKARIWQFLYFHALAAPQKEDVGKYWSRRFIEKLEAHHCHNNVQLKAALQIMLTDYLQKRKLLLQVIKAIRQLYRQEPYKKNMDLIISIPGIGEINAAVILFELQNINRFKTFDRLCSYVGFIPDTDDSGETKRNKGITHRFNKRLRKALIESSWVVIRQNPAMLMIYKDYCKRMHKTRQL

SEQ ID NO: 444081 - protein, 329 aa, unidentified
MKGVARWKLSITCCCGLDVHKKSITACVLWAEAKGKSRKEKKRFGTFTHDLLQLADWLEQCGVTHVAMESTGVYWKPVWNILAERFEVLLVNAQHIKAVPGRKTDQKDSEWIADLLQHGLLRGSFVPPQPTRELRDLTRYRVSLVQEINRIANRIQKVLEDANIKLASVATDALGASGRAILEAMLAGEQDSARLAEMSKGLLRNKIPELKLALEGRMTEHHRFLLRQLFEHLRFTESKRSEIEQEIDKRMLPFEDKVTRLCTIPGVDRVTAWGMLAEIGLDMNQFPSSGHLASWACLCPGNFESAGKRLSGKMRKGNVSLRRCLSQAA

SEQ ID NO: 444082 - protein, 349 aa, unidentified
MEHYAGIDVSLELSSVCVVDAKGKIVKEAKISSDPVALLTFFRGLGIAIERIGLEAGPLSQWLHAGLTQAGFEVVLLETRHVKAALSAMTVKTDRKDARGIAQLIRMGWFRPVHCKSVGSQEVRALLVGRKLLLGKLLDVEFSIRGILRGFGLKMGIVTRKNFEARVRELCAGHSMLEQIFAAMLVARSALQTEYTKLHKTMLTIVRKDEVCCRLMTTPGVGPLVAITFKTGVDDPSRIGKSKAVGALFGLTPKKYQSGETDLTGGITRVGDEMVRTALYEAANILLSRVTRFSTLKRWGMDVAKRRGAKRAKVALARKIGVILHRMWVDSTNFRWTKEASTAPRRIQA

SEQ ID NO: 444083 - protein, 417 aa, unidentified
MDSDKEIVCGADIHRDFLIATMISRSGLKLQERFNMNQDGLLAFRSWIINHRCQRLAVESTGGFWYPIFIILEGHVEFILANAYQIRNIEHKKTDKLDSERIAIYCLNNLITPSRIYPKDYRDLRSITRAREALVNARSKVKNQIHQSLSTCCIKLSSVISDSFGKSGRYIIDRLLEGKTIDQIISGIPVKRVRKKENELREAIRNGIDPVQVFLIKANLDVIDDISKKIKILEAEIAIKVKPFEEDMKIALSLPGVGFISAATLIAEMGDYRDFSSADKVAKYFGIVPSVYQSAGKLRNGKITKTGSKHMRRILVEVAKAISRTKKNSKLKRFFQRILARCGKRNIAAVALARKVLCILHHLLMNREIYQEPDVKKTKPRIPSSVSPISMMDIDEMIKVISQAGYLVEKDLKEGCG

SEQ ID NO: 444084 - protein, 347 aa, unidentified
MATSVIKQSVGIDVSKKELSVCFSNLEQGQRTRILSTKTFNNTSAGFKKLESWVLKLRQNEVPFCLLMEATGVYYEDAAYFLKAKDWSVSVLLPNKTKAFAKSLDYKSKTDKIDAKILAQMSLERSLPLWEPLSPKMLTIKRLCRERVALQDQKTAAKNQLHAKQHAHETEKNSLKRSEKLIQFLKKQIGQVEKAIGQEVETDAVLKEKIEKVCSIKGVALITAATVIAETNGFALIENKAQLVSYAGYDVVENQSGSSIRGKTKISKKGNSHLRRAMHFPALNAIKYVPELKALYERVFEKTKIKMKGSVAVQRKLLVLIYTLFKKNEAFDPSYPKTPALVTLQTK

SEQ ID NO: 444085 - protein, 341 aa, unidentified
MNVKTIGIDLAKNVFQIHGVDEHGKRLFNKQLRRAQMASFFANIPPCLIGMEACASAHFWANKLISVGHNVKLMAPQFVKPYVKTNKHDAADAEAICEAVTRPNMRFVPVKTAEQQAVLALHRSRQSFIKQRTAQANQIRGLLAEFGIVVPRGIQQLQRRLPELVEDADNPLPVLFRTQLSLLQHHMAYLFDVIATLDKQIEQCYRQNALCQRIGKIPGIGPVTASALIATIGKANNFENGRQLAAWLGLVPRQHSSGGKQVLLGISKRGDTYLRTLLIHGARAVLQSAKHKQDAVSSWANQLMARRNNNIASVALANKNARTVWALLAKEREYCAPIISA

SEQ ID NO: 444086 - protein, 367 aa, unidentified
MMIGRTSLGCLFCDRLPDGQNFYQRRCHMYYMGIDHHKQSSHLTILDEQGDTIKQGHVANKRVELESFLDGFIQDLKAVIEAGRSTYTMVDLLEELGVEVLIAHPYQIKAIACAKIKTDIRMNMIPEVYRRRRENQQAQRILRNRMFYVQIRTKIKNKIRALLAKQGEEIRQLTDVKDTLFGKKGIEVLKQINLSEKDKEILLSLVDTLEHIQEKICYSDKLIKKLYAESPEAQRIFTVPGFGVFLAVLVATEIADIGRFPSLSKLHSYAGVIPSTHSSGGKIYHGHLVNEGNKRLRWGLIEAVWPATMKDISLRIYYQKRKASKGANTAKVATARRLLSIIYSVLKEERSYVSSIGNKRPAAFVLN

SEQ ID NO: 444087 - protein, 358 aa, unidentified
MQRYIGLDAHAASCTLAIISETGKRLRDFPVETNGAALVEAVRAVPGPRHLIFEEGTHSAWLYETLERHVDEIVVTGVSNSRGPKCDARDAYALAEKLRINAVDTSVFKAPKEFAVLRELARVHSMFVRDVVRVQARLKSIYRSRAIPTAGAAVYGPRQRQEWESRLPPAARHATSKLYAHYDWLLELKKQAESELIAESKRHPIARILQTAPGLGPIRVARLLPIVVTPHRFRTKRQFWSYCGLGIVMRSSSDWVRASDGAWQWAQVAKTRGLSKQHNHTLKETFKGAATTVVQQGEKVPIYADYERLVESGTKPNLAKLTLARKIAAIVLRMWKDEEVYRPRTVASTTTQAARSAT

SEQ ID NO: 444088 - protein, 315 aa, unidentified
MDKSIVSFAGIDIAKRTLDLHFRPENRALSTTNDPPGFREILAFLPEPRTCLVVIEATGGYQRSLVDALLEAGHYVAVVNPRQVRDFARGLGILAKTDALDAAVLSRYAEGARPRTLSATPENQAQIAELVTRRRQLINLRTAEKNRLETLRSKSVRKSVEQVLKVLGKQIQTIEKQIAALVESDDDWNDKAQLLQSVPGVGPTTVASLLAGLPELGQLNRQEIAALAGLAPFNRDSGRFRGKRSIWGGRKAVRGVLYMATLSAMRCNHVIKAFAERLKADGKPFKVVITACMRKLLVILNTMVQNHTHWNPQNA

SEQ ID NO: 444089 - protein, 343 aa, unidentified
MKLSRIGIDLAKNVFQLHGVDRHGKSVWKRRLKRDQWLKAVLDQAEPGCEIGMEACGGAHHWARELESRGYTVRLIPPQFVKPYVKSNKNDANDAEAICEAMSRPNMRFVTVKSVAQQDIQATHRIRSELMTQRTAKANQIRGLVAEYGLVAPLTLRALRVAIPDWLEDAENGLTDHFRSLLHGVWSDLISLDDRVQDLDRAINKLANSNEVTLRLQQLRGVGPMVATALVATVGNAEQYAKGRQMAAAIGLTPRQHSSGGKDRLLGISKRGDVYLRTLLVHGARAVVTQAKHKDDRLSQWVTSIATRRHPNVAAVALANKTVRMAWAMLRHDTDYDPDFAVS

SEQ ID NO: 444090 - protein, 356 aa, unidentified
MTKVTASFENNTVYVGLDVHKRSWNAAVYLNDQFVRNIHQPPTPEALHHYLTHNYPGASYVCAYESGKFGYWIQRRFHQFGINCLVVNPADIPSTHKDEVNKTDARDARGIGHALVCNQLKGIYVPTEDQEADRHLVRQRKKIWRDLVRCKNRIKGFLDYTGVIIPSQYDNNNWSKNFINWLAALELEHYSSRVTLNYQVKQLELLRKELLSICNDIRKLMRSKKYNKLYYLLRSVTGIGPLTAAALLTEIGDMNRFSSFYHLNSFIGLMPMEHSSGEKELKGRITVRKHRQLRSDLVECAWTAKRTDPALALYYSEQIKRGKNGKAVIVKVARKLLSRIRYVWLSGQPYQTAVVK

SEQ ID NO: 444091 - protein, 421 aa, unidentified
MNQLMDTVYSAYVGIDWAAAKHDICVQAAEGGAREFACISSQPEGIEAWAQALYRRFGGPIAVALELSKGPIVSALQKYDFFVLYPINPSTLAKYRETFTPSGAKDDPTDAELAVDLMTRHADRFSPLKPQSVGMRKLIGLVEQRDKFVSDQSRVVNRLGHALKQYYPQVLEWFNEHNTVVFCDFLSKWPTLTQVRRARKASLERFFKSHHVHSAELIEKRITAIRAALPLTSDPAVIEPHRLQVEILIEQLRITIKALKRFDDEIEATANKLPDYDLLFSPLPGAAKVLAPRLLAAFGEDRQRYPHADALQKYSGIAPVTKRSGKTTWVHWRWQCPTFVRQTFIDWAAQTVNKSAWAGAYYRQQRAKGCSYQVAVRALAFKWIRILHRCWQDRTPYDESKYLEALRRKGSPLLKYLAETA

SEQ ID NO: 444092 - protein, 369 aa, unidentified
MDYQSVAYIGFDTSKTKHAVAVAEGGREGEVRYLGEIEAAPAAVERLLRKLARQYKSLHVCYEAGPTGYGLYRHIRALGQVCDVIAPSLVPIRPGDRVKTNRRDAVTLARLLRAGELTAVWVPDEVHEAVRDLVRAREAAARDLRHKRQQVLSFLLRHGRIFTGHRHWSRAHLRWLAGQAFRHPAQQVVFQDQVDAVADAQARLERLDRHLAELVPTWSMAPVVAACQAMRGVSFLAAVTFVAEIGDVRRFESPRQLMAFLGLVPSERSTGDTVRRGGLTLAGNRRVRRALVEGAWSYRHPARVTETIRVRLEGLPKAVREIAWKAQVRLSARYRRLVAAGKRAPVAVAAIAREMAAFLWAIGRVVEPA

SEQ ID NO: 444093 - protein, 344 aa, unidentified
MDYFGGIDLGKRKSHITVIKADRTVVESVRIENSPEAFRRVFAKYKRKIDVACEASGNSFWVADVLEPLVRKVHVGDTKKIRWIAEARIKTDKLDAGILAELLRADLFPDICIPPKRIRELRELVRGIVRMQRTSGRLRNQVHALLTRHGLRYDGKDVQGSKLGTFLKECSLASPVRVAAESLCRIGEAAQEQRRLLEIDALQHLKEEEDLRSQMKLLESIPGIGTFSSLLFVVELWDIGRFSDSDHLASYIGLVPSTHQSGDTLWHGRMTKRGNALLRWILVQDAWQAIRHGIYFQKLYQRHASKLGKARAIIPVARALLRTLHQVWTAKTPYEEIFNVSKVG

SEQ ID NO: 444094 - protein, 331 aa, unidentified
MTRQPNRTSDAALTVGIDVAKATVQVGFSDDDSALTLCNDESGHQSVLEHLAALRSKGMTIGLVVLEATGGLEVDVAAALQLAGYPVVIVNPRQARDFARSMGYLAKSDHIDARVLAHMGQTLLQRDDLHKLVKPLPDERQRLLQAMVTRRRQLVDMRIAEQQRAGAPDKRMRRSLNTIMKALDREIARLDQELQTFIGAHHAELAALLDSVKGVGKATITTLLAEVPELGKLKGREISALIGVAPINRDSGAMRGKRTIFGGRSQVRKVLYMAAFVAARFNPVIKAFYERLLAAGKPRKVALTACARKLLIILNAMVRTRQPFDLARHIA

SEQ ID NO: 444095 - protein, 318 aa, unidentified
MMKEQGDFVGIDVSKKKLDVTTLHGGEHRTIHNDAGGIKDVCEQMLVLRPQLIVMEATGGYERELAIALVLAGLRVAVVNPRQVRDFAKAMGKLAKTDKVDAGVLALFGERMLPEARGVPEHEVRELDALITRRGQLVEMLTAEKNRLGMAPRALKPSIQEHVRWMERQVKEIEGELEQVIEASLIWKARDELLTSMPGVGAVLSHTLIAKLPELGQVSAKRAAALVGIAPFARDSGARKGKRSIWGGRADVRSVLYMATLSAIRWNPVIRAHYQQLIARGKLFKVAMVACMRRLLTILDAMVRKNEHWTDVTLAHAP

SEQ ID NO: 444096 - protein, 353 aa, unidentified
MDHFIGLDGHKNSCTFVVLDRKGRRKRQKVVATKTEALVEFVSSVSGRRHLCLEEGAQSQWFFEIFSAHVDDLVVVHGRRNPGNKSDGEDAFNLANRMRIGDLGPRIFKSPTSFVALKELMRSYEMLNQDLARVKNRIKHLYRARGVCFAPQGCPFCKDSTAPRLASCTKPGFHQALARLRAQQESLAPLKAAAKKDMITEAHRYPITRILETAPGIGPVRASELLAIVLTPHRFRTSRQFWCYCGLGIVQRSSSDWVPQPNGKWIRAPVLQSRGLNRNFNRTAKAIFKGAAMSVITCMKEDPLHGDYQRLLEKGTKPNLARLTIARKIAALVLAMWKKQEGYAPEKYRVNTK

SEQ ID NO: 444097 - protein, 356 aa, unidentified
MINSTKYIGMDVHKESISIAVRNAAGKIVIETVIETKSSMILEFVEGLHGNVHVTFEEGTWSAWLYDLLKPRVTRLVVCDPRRNALLQEGNQNDRVDARNLAELLQNNQLRSVYHGDHGLRALKELVRSYLTVTKDLSRVMTRVKAIYRGWAIPCSGKQVYSSRHRGEWLGKIQEPGVRRRAEFYYQQLDALRALRQEVRRDLLAESKKHKIWKQLCQIPSIGPIRAAMLLGILQTAHRFRTKRQLWTYSGLGIEVHSSADHHAVKGQLERKKKHIEIRGLNKNCNHDLKNLFKGAAVVASTKPGPFEKFYAALLAKGMRPEMARLTLARKIATIVLIVWKRGVCFDANHLKPQTA

SEQ ID NO: 444098 - protein, 294 aa, unidentified
MEQVITIGLDLAKNVFQVHGIDAAGKVLVRRQLRRGDVLRFFGGLPRCLVGMEACATAHYWARELTKLGHTVRLMPPAYVKPYVKRGKTDVADAEAIAEAVTRPTMRFVAVKTADQQAALMLHKVRDLLVRQRTMLINALRGHLAEFGIIAARGPGGVTAAIISLHEAQDSLPELARVALHGLIDQLRIVRGEIARVEKRIVAWHRASNASRRLATIPGIGPITASAIAAAVPDATLFQSGRQFAAWLGLTPRAHSSGGKERRVGISKQGDGYIRRLPRHRRGRRDPACTPRQC

SEQ ID NO: 444099 - protein, 343 aa, unidentified
MQTITTIGLDIAKSVFQVHGVDTQGNVVLRRQLKRRYLLVFFQKLPPCLIGIEACASSHHWSRELQALGHTVRLMPPAYVKPYVKRQKNDTTDAEAICEAVSRPNMRFVAIKTPEQQSCLMLHRTRHLFIRQQTAVINAIRGHLAEFGIVAPVGRNGVEQLLGVVADARDKRLPEVARACVAALGAQLQMLKAQILQFDRLIRAWHRSSEASKRLDAIPGIGPTLATALVASVADPKAFRSGRDFSAWIGLVPKQNSSGGKERLGNISKRGDRYLRSLFTVGALAVIRYAKIHGTKHRPWLTALLARRPTKVAAIALANKLARMAWAMLARGERYKEPAALAA

SEQ ID NO: 444100 - protein, 346 aa, unidentified
MTVKCMAGIDLHSNNLFCAIVDLDGKRVFEQKLPCDLESVLRALKPFKKRLVKIAVESTYNWYWLVDGLQDHGYPVVLANPAAMEQYSGLKYADDKSDGFFLAEMARLNILPTGYICDRAIRPVRDLLRRRMGLVHHRTSLMLSLKSLHTRMTGRDLGTGRIKTMGPEEGEKLFAHPADQLITRLDLQLVEQLGRSIQEIETRILSEAKRMPDYQVLQTMPGVGKILGLTIMLETVDPKRFAGPGHYASYCRCVDSRRLSNGKKKGENNSKCGNKYLAWAFVEAAQFARRHDLACRKFHDRKSAQANGIVATKALACKLAKAAWHMMSHHTDYDGGRMFPEVKKNK

SEQ ID NO: 444101 - protein, 458 aa, unidentified
MSRNKSTDRVRRTMAVVHPNAAAIDVGATMHMAAVNADRTPEPVRSFGTFTTDLHRLVDWFAECGVDTVVMESTSVYWIPIFELLDARGFAVFLVNARDAKHVPGRKTDVSDAQWLQRLHSFGLLRASFRPKGQIAELRAYLRQRERLLEYGASHIQHMQKALTEMNVQLHHVVTDITGATGLRIIRAILGGERNPAVLARMRDRRCHATVETIEKALAGNYRAEHLFALEQALALYDTYQQKAYACDARIEAVLKELSARRGREAGPLPSPRQNRSRQQNSLLFDVRTALFALLGKDLTQINGLGPYLALKLIAECGDDLSAWPSAKHFTSWLCLAPSNKISGGKVLSSRTRRSGSRAASLLRLAAATVGRTDTALGAFYRRLSARIGKVKAVTATARKIAVLFYNALRHGMDYVDPGASSYEIRYRARVIANLHRRAKAFGFMLQPMAPTPEMAVS

SEQ ID NO: 444102 - protein, 402 aa, unidentified
MNAVGIDVSKGKSMVAIMRPFGEIVSAPFEIKHTASDINSLVELINSVKGESRIVMEHTGRYYEVLAHQLSEANLFVSAINPKLIKDFDNDSLRKVKSDKADAVKIARYALDKWQNLKQYSVMDKLRNQLKTINRQFGFYMKHKTAMKNNLIGILDQTYPGVNTYFDSPARSDGSQKWVDFASTYWHVDCVRKMSLNAFIDHYQNWCKRKKYNFSQSKAEEIYGKAKELVPVLPKDAITKLIIKQAVDQLNSASTTVESLRTLMNETASKLPEYPVVMAMKGVGTSLGPQLMAEIGDVSRFTHKSAITAFAGVDPGVNESGSYEQKSVPTSKRGSSDLRKTLFQVMDVLIKTHPQDDPVYQFLDKKRAQGKPYYVYMTAGANKFLRIYYGRVKEYLSSLPES

SEQ ID NO: 444103 - protein, 355 aa, unidentified
MAEGGRTGEVRQAGTIANDLQCLEKLLRRIRGNQERRLRVCYEAGPCGFVIARRMEQLGIACTVVAPSLIPKKAGDRIKTDRRDAENLARLLRAGDLSPVYVPDATDEAIRDLCRARTDAVDDRTRARHRLKAFLLRHGFRYTAKSTWTPAHMRYLRELVLPHPAMKVILEDYLCAIDAANERVNRCEEAMEDLLVTWQLRPAVEALMGFKGFRIVAAMITVSELGDIHRFAHPRQLMAYLGLVPSESTSSDKRKQGGITKCGNPHARWLLVECSQHYDTPPKVSKELSTRQGKLDRRAKEVSWRAQNRLHARFKRLRGRRLQRNKAITAVARELTGFIWELLRELPCYTRVANA

SEQ ID NO: 444104 - protein, 342 aa, unidentified
MKKMVKQVVGIDVAQKELVVCLGRMYDDWSPELYSSKNFANNAKGFEALVSWVKKMTDPQVSIRYVMEATGIYHESLCYYLADKGYALSVVLPNKISNYFRTLAVKTITDKTASEAIALFGLERKLDDWKRPEPVYKKLKQLTREREQLVQIRTMAKNQLHAEQSEAEPNKSSIARVQKQIAFLNKQEQEIKAELQELVKQNDQLKSTVKTIGSLPGVGLLTAVTVLAETNGFELIRNKRQLASYAGLDVKEKQSGTSVKGKPRISKKGNRFLRKAMHLPALAAIRHDERFKAIFARLVAKHGIKMKAAVAVQRKLLEMIYTLYKTNKIYDPNYLNIKVESN

SEQ ID NO: 444105 - protein, 386 aa, unidentified
MQKLNDLSRSLTALEPDGTLIAVIEMSLSSWLVAGIVPGIERQPLKKLAVDESALLKLLHRWREEAEKAGRRIERIAVAFEAGRDGFWLARWLKARGIEAYVIHASSVAVSREHRRAKTDRLDTELLKRSFLGWLRGERDHCKMVEIPTMKDEDAKRPNREHDSLIGERSRIVNRMKAALVRLGIRGFNPKLKRASTRLDGLRTPEGEPIPPNALAELRRDMERRRLVNNQIRQIEEERLKRIEQAPCDGPHVMVRLLARVMGVGIETADMLVHEVLSRNMRDRRAVARYAGLTGSPDESGRKRREKGLARSGNARVRRGMIQLAWRFLLHQKNSALTKWFRSRTENARGTRKPMIVALARKLLIALWRLMREGIVPDGVVLRPAQ

SEQ ID NO: 444106 - protein, 349 aa, unidentified
MLADEVDYVVGVDTHRDEHVLAVVVAPSGALVAQRSVRASARGYAQSLRFVEQHCSGRRMWAVEGAGHYGAGLARYLSGRGETVLEIGRGPRDGRRLHGKDDQLDAIRAARTALASQTLSLPRAGQRREALRLLLLARRSAVDVRREALVQLRSVIVTCPDRLREDLRGLPAGRLILRCSRLRRSRPCTPDELASRLVLRSLARRVEAATAEAAELEAEILAHVRGLAPQLLDEPGIGPIVAAQLIVTWSHPGRVRSEAAFARLAGVAPIPASSGQTTRHRLSRGGDRQLNCALHTVILHRRQHDPATKDYIARRVAEGKTTRDAVRSLKRYLARHLYRTLNAETPLMT

SEQ ID NO: 444107 - protein, 420 aa, unidentified
MPNIEIGVDFMVKENFIYVGIDLHKETHTAVMIDCYNQKLGEITFPNRPADFPKLVIKVKKCNTDAKEVVYGLENAYGYGRPLAVWLIDKGYFVKDVNTAISHRQAKHRGAMYRKSDSDDAEAIALATLNMLDKLPDACPNDAYWSLGQLVHRRDNIMKQRTRLVNQLHEQLCIAYPSYKQFFNDISRPTALYFWEHYPSRKYLKGKSVEDLRTELVPVSHNRCSTKNCEKILDAVASDKVKNNAYQDARDMVTLSIVSDLQHYDSQLAEVDKMLEQMYKMLGCTLTTIPGVNVITAVKILAEIGDIKRFGNANKLAQFAGIAPLHLSSSGKGKDVATKQGNRRLQATIYFLAIQMVQVSSKGTPRNSVVRAYYEKRKAEGKTSQQALICISRRLISIIYGMLKHGTEYRMPVVESAGEK

SEQ ID NO: 444108 - protein, 423 aa, unidentified
MEVLHRRVAGLDVHKETVVACVRLMVRRKPTRECRTFATTTEGLSALLGWLTASRCTQVAMEATGVYWTPVWKILSAGDFTLIVANAAHIKQVPGRKTDMNDAMWIADLLACGLIKASFVPEEDIQELRALMRTRKQLVREQTRHVQRLQKTLEEANIKLDSVISDIMGVSGRRMIEAMIAGERDPHRLAALAARGIKASPKALYDALYGRLREHHRFLLKLHLQQWDALDAAIRQIDRQVAGQIARMDEEAADETSPFRELILRLSAIPGVSRLSATAILAEIGRDMSRFPTAGHLVAWAGLCPGQNESAGKRKSARLRKGAPWLKTMLVQCAWAAKRAKDSYYMAQFHRLRSRRGPQKAICAVAASILTAIYHMLKSGTPHRDLGADYFDRRSPEAKAKRLVTQLTKLGFDVKLQPLAVAA

SEQ ID NO: 444109 - protein, 377 aa, unidentified
MSSSAPTIIYLGLDVHKDSVTIAVLPAGAAAPTRIDKYPNDCTKLRRVFERHAKDGELRACYEASGAGYVLQRAMHGWGYHCDVIAPSLIPTKPGVQRKHDKYDAGQLARLYRAGELTVIRIPSEAEERVRDLVRCRETLQREVVKSRHYILKFLARRGFIYRGGVNWRPAHYTWLRQLIGVTSPLASEDRIVFGEYFTLLEYKLSRREALDQHIEEIALRPAYAPAVAALQCFRGLQVHGAMVLATELVDWRRFASPRQLMAYLGFVPRENSSGPRERRGSITKAGNAHCRHVLVQAAWAYRLHPKIGPALTVRQRGQSPSVILHAWKAQQRLYTMYHRISLRRGPQIAVVAVARELVGYLWAVMRDVDPSTAASV

SEQ ID NO: 444110 - protein, 428 aa, unidentified
MEVIHPRCAGVDVSKKDAKVCVRVQGQGRRGTSTTVSTWGSTTAEILALGEHLLAEQVSCVVIESTSDYWKPFYYLLEEQLPVMLVNAKAARNVPGRKTDVSDAAWLADLGAHGLIRASFVPPPPIRVLRDLTRARTTITRARTQEIQRLEKLLEDAGIKLSAVASNIVGVSGRAMLEALIGGQRDPAVLADLAKQRLRHKIPALTEALRGRFSEHHAFMARLYLDRIDAHSADIARLDARIEEAIAPFRAARELLMSIPGWSQIVADVFIAETGADMSVFPTAAHLASWAGVVPGCNESAGRVKSATTRPGNRHLKAALGVAALSAARSKNTYYSARYRRIAGRRRPVQSRQNTSRGSSVAGMIALVALEHTMLTDAWHMLVNGAFYRDPGPDYYTRYQPGKTKAKAIKQLETLGYRVTLEPLTEVA

SEQ ID NO: 444111 - protein, 428 aa, unidentified
MKYNTQNSKIASITEKTLIVGIDVGSQVHYARAFDWRNYEYSRKPFAFSNDEEGFMAFKNWMNDIAEKYDKEVVIPGMEPTGHYWFGLGMFLQDMGMRPVHVNPHHVKKSKELDDNNPNKNDRKDPKTIAALVNEGRFSYPYIPSGIYAEIRNLSNLRFQTQEQITRIKNRIARWFSIYFPEYKEVYGNLDALSGMMILKLAPLPMDIVKLGVDGVNKIWRDAKLRAVGLKRAKTLVNRAEHSIGSQEAPEAARVELQILLSDYEMYNHRMDDLMQTIEEKLYEIPYIDKLLEIKGIGMITICGFIAEVGDIRRFDNPKQLQKLAGYAIVSNDSGKHNGESHISYRGRKRLRYVLYEAAISLIGKNAEFKEIHHYYRTRERNPLKKMQSVIAVACKVIRIFYAILTKGIAYDGAKMLEDIKRPALATN

SEQ ID NO: 444112 - protein, 411 aa, unidentified
MNPVVGLDVAKGESQVQAFLDKKKPYKRSFKVAHTIEGLESLHQYLREIENLAGIRPPVVLESTGHYHTPVVQYFEGRGYLLIIINPLVSYRAKSSSLRKVKTDVIDAYHLCELYYKEDLEPNKKRGIQLLNLRNLTRQHENVTGIYVQTKLQFQAVLDQVFPEYHGVFGDLYSVVSLLTLLEFPTSKDVLVVDEEALGNKIDELCTSRSRKWANTKAKKLIAAAAKNPFQTTLYQSHIMSLEMYIKMLMEYQKHLSKLDEEIGALAKEIEEYKIIQSIPGIGEKIAATIISEIGEIDRFNHPKKLVAFAGIDPSIFESGRFKGSVNKITKRGSSRLRHALYMAVRCAIRDCRKKKTTDEVIPRNKRLREFYDKKRKEGKPYKVAVIACANKLLQWIYALLQNNSTFQDLD

SEQ ID NO: 444113 - protein, 399 aa, unidentified
MDPVIGLDIAKGESQVQAFLQRKKAYKQSFKFEHHLQGLHAFYRFYQEVEQVSGQPPAVIFESTGHYHEPVLQCLEEYGITYYLINPVVSSEAKKTSLHKVKTDKVDAFHLGELYYKEDLEVFQRKTEQYLNLRHLTRQHSALTDSYVNIKLQFQAALDQIFPEYHKVFSDLYGTLSLNTLQCYPTAYDIRQISKQDLAIEMRQSGTRRSHAWFLDKASQLKGAAERNPFQHPICQGQLISLQLYIQMLFQYQEHLSKLKKEISALARTFDDYELTKSVPGIGDKIAATIISEIGGIDQFRLPKQLAAYAGLDPSVFESGKFKASINRITKRGSARLRQALYSAVQCGLAKNRNKKLIAFYQRKRDEGKPHKVAVIACANKLVHWIHAMLKRQEVFVDQ

SEQ ID NO: 444114 - protein, 411 aa, unidentified
MRLFVGDDWAEDHHDVEVMNEAGKVLARKRLPEGVAGMAGLHELVGRHLGEDADDAEVAVGIETDRGPWVAALVAAGYTVFGVNPLQASRYRERHGVSGAKSDSGDAHMLADMVRTDSHQLRAVAGDSAEAEGIKVLARTHKTMIWERTRQVQRLRHQLREYFPAALEAFDDLDAPDTLELLGKAPEPARAARLTRAQVSAALKRAGRRNITDKATAVLAALRGEQLGQPAAVTAAYAVTVRSLIAVIAALNEQVKILQGQVEADFGRHPDAEIYRSQPGIGAILGARVLGEFGDDPGRYADGKCRRNYAATSPITRASGKKKVVAARFIHNDRLVDALNAQAFASLNASPGARALYDELRARGIEHNDALRRLANRLVGILHGCLKTRTLYDEATAWSHRQNLPQSSVAA

SEQ ID NO: 444115 - protein, 369 aa, unidentified
MDVMHDRVAGLDVHKDTVVACVRTMSGTKATRKCQTYATTTEGLLALLEWLNLSQCSVAAMEATGVYWLPVFKILSEGAFDLVVANAAHIKAVPGRKTDLNDAMWIADLAAHGLIKASFVPDEEMHELRTLTRTRKQLVREQTRHVQRIQKTLTEANIRLDSVLSDTMGASGRRMIEAMIAGVRDPRKLAALADARVKASPKELYDALHGRLTDHHRFLLKLHLGQWDALDASIRVVDREVDARVNRMDKEARADKARFSDLIGLLASIPGVSTLSALSILSEIGADMSRFDTAGHLIAWAGLCPGQNESAGKRKPTRLRKGAPWLKTMLVQCAWAAKRATTAITRPSSSVCRPDAARKKPSAPWRLRS

SEQ ID NO: 444116 - protein, 405 aa, unidentified
MFEIEDVGVFLGLDVGKSAHHGHGLTPAGKKVFDKQPPNSEPKLRAVFDKLAAKFGTVLVIVDQPASIGALPLTVARDAGCKVAYLPGLSMRRIADLYPGEAKTDAKDAAVIADAARTMPHTLRSLELTDEITAELTVLVGFDQDLAAEATRTSNRIRGLLTQFHPSLERVLGPRLDHPAVTWLLERYGSPAALRKAGRRRLVEVIRPKAPRMAARLIDEVFDALDEQTVVVPGTGTLDLVIPTLAAYLATVHTQRRALEAQINALLEAHPLSEVLTSMPGVGVRTAAVLLVTVGDGTSFPTAAHLASYAGLAPTTKSSGTSIHGEHAPRGGNRQLKRAMFLSAFACMNADPASRTYYDKQRARGKTHTQALLRLARQRISVLFAMLRDGTFYEPRVPKDVELAA

SEQ ID NO: 444117 - protein, 344 aa, unidentified
MKQITTVGIDLAKSVFQIHAVDGRGRVVLRKQLQRKQVAAFFANLPPCLIAIEACGSSHYWARTLSEYGHSVKLMPPQYVKPYVKTNKHDAADAEAISEAVSRPNMRFVAVKTPEQQSLLALHRAREGFIKARTAQTNQIRGLLSEFGLVIPKGIGAIARALPECLEDAENGLPGTFRALLARLGAHLRELTRQVRELEGEIQQWHRHNAASLRLEKVPGIGPLTASALVASVGDVSHFKNARQLAAWLGLVPRQHATGGKPLLLGISKHGDGYVRKLLIHGARSVVRVSAHKAQPDPWLEGLLRRRHKNVPAVALANKNARIAWALLAHDRDYEPSYAPRLAH

SEQ ID NO: 444118 - protein, 323 aa, unidentified
MNKYNETFGIDISKDVFDCYGSVQGHLQFTNRETGFKKFQELLSKDSLVVMEATGYYHYRFAQFLYKKKVAVSVVNPLSVKRFIQMKLAKVKTDKSDSKAICEYELTQDVPLYNALTDTQSECLQLFRLMDSFLKKRTATKNKIHGEEVLGVPSNWVYRSLKRDKKHLDKELKGIEQKLLSLVKQDQQQQLTLLQSIPGIGLKTALFLIVVTDGFTKFETASQLCSYVGITPTIRESGSNVRGRARINKVGNRKLRNLLFLCSFTACKHNKGCSDLYQRITTKGKSKKLALIAVSNKLLKQCFAIAKSGHPYDPTFVSVLAVK

SEQ ID NO: 444119 - protein, 364 aa, unidentified
MDVHTTNFTFCCYTADSDRGFAVAQTEPDYRQVIKYMERVQKQRGEECKFVCGYEAGCLGYSLYHQLTRCGVDCVILAPSTMHQEKGKRIKTDRRDAENIARCLAFSLYSPVYVPTTEDDAVKEYIRMRDDIKADLKRVKQQIIAFTTRHGFAFDGKSYWTQKHLKWLETLVFEHPLYKETLQEYLILYYMLDEKVAVYDTRIEEMSHLEHYEENVQKLCCFRGVAAHTALSLLVEVGDFQRFRSAKHFAAYLGLVPGEHSSSDKQIRTSITKAGNTHLRRLLVEAAQSYNRGAIGKKSAALKARQGGNPAEVIAYADKANERMQRKYYRIAFKSRHNIAKTAIARELACFVWGMMTGNISNAA

SEQ ID NO: 444120 - protein, 432 aa, unidentified
MFGCDAGEGVVLEEDPQVEEIVARVAALDIGKAELVCCVRVPHEGKPGRRLQEVATYSTMTRSLLAMSDHLRCLGVSRVVMEATSDYWKPVFYLLEAQGLDPWLVNAKDVKHLPGRPKTDKLDAVWLCKVAERQMIRPSFVPPPAVRQLRDVTRYRIDLVGARTAEKQRVEKLLEDAQIKLSVVASDIFGISGRQMMAALIGGQTNPKALAQLARGRLRAKLEALEEAFTGHFTDHHAFLLATMLARIDALDADLAALEAKIQEMIAPFAAAVDKLDEIPGVGATGAHIILAEIGLDMSRFPTAAHLSSWARFAPGVKESAGRKKGSGTTGHGNRYLARVLGEAAVAASKTNTFLGERYRRIAKRRGKKRAIVAVGRSILVIIWHLLSNPAARFIDLGSDFYENRTGPDRKKRNHIRQLEALGYKVTLEPAA

SEQ ID NO: 444121 - protein, 342 aa, unidentified
MKIMTGIDLHSNNALCGLMDEKGRRVLHKKLPCDLAAILQVLQPYKARIAQVAVESTYNWYWLVDGLEDHGYPVVLANPARMKQYDGLKHTDDVSDAFFLCELMRLGILPTSHLYNRQTRPVRDLLRRRMLLVQLRTSLILSFKSLNERTLGQRVPLGLVKAMSIEAAQARFTAPADQLLSGEQIGLMGQFQESIAKIEKHILATTKEWPTFQRVQDVPGIGRILGLTIALETGDPKRFASAGNFASYCRCVKSLRQSNSKKKGENNRKCGNRYLAWAFVEAAHFACRHDERCRRFYDRKKQQTNPVVATKALACKLAKASWHVMHDDAPYDPQRVFGGGKP

SEQ ID NO: 444122 - protein, 349 aa, unidentified
MNATTVAVDLAKNVFELAVADAEWRIVERHRLNRARFARFFVHRPPCQVVMEACGSAHHWARRIRAEGHTVRLLPAHYVKPYVGRSKTDRTDAAALIEAARSPRIRVVPIKTIEQQQLQALHRLRSQWMSTRQRYLSTLRGILREFGIMIPLGPSVAKAQIGAALAAADSAIPDGLRPELAQMLQEIAPLEEKILSVERQLAALTRTDERVQQLREIPGVGLLTSTALLSTVGDIQRFPSGRHFACWLGLTPSERSSAERRRLGKISKQGDVYCRTLLVHGARSALLAARRAQRAGKPLDRLRRWALNCEQQRGHNKATVALANRLARIVWASWKYQRSFDGNWGNQAA

SEQ ID NO: 444123 - protein, 389 aa, unidentified
MLLDHPSDGLTAIRTHIGAIFVSLELSRSNWLVTSLSPGKGEKMSKHSVAAGNVAELLTLFAELKRKTEVRTGQSYPIITIQEAGLDGFWLHRVLQQEGIESHVVDPASIATPRRRRRAKTDRLDGETLLRALLAYKRGEPRVCAMVVAPSPEEEDRRRLCRERRTLIEERVTHGNRIKGLLFAQGISGYAPMRRDRRARLETLRTGDGRELPSHLKAQIGRELDRIELLLGQIKAVEAAQDALLAAARKPASEEAAPDPVTMLLALKGMGTNFAAVLWSEAFYRQFANRRQVAAYAGLAATPWQSGGIRHEQGVSKAGNPRLRTTMIQLAWLWTRHQPQSALTRWFKERSQQGRKRALVALARKLLVALWKYVTQGVVIEGAVMKPAA

SEQ ID NO: 444124 - protein, 379 aa, unidentified
MSMTTSSTSSEEATIKYVCGVDIGSQSCVGCICRPDKSMVVKSIPFANAREGWQIWEEKLSQLDAPPKQILIGMEATSCYHENLYHQLEQCGYILRLLHPRQTHQFHERQGLRAKTDRLDALTIARVLLSGEARAGYVPSEQVVMYRELVRLHMRLSDEAAAYQNGIQALVVVLFPEFTKVFTDPCGQTALAVLKALPSAQASSGRALAGRSVSLRILCDQLEHTQANLARLDAEIEQLLTNDPGVKGLQQVPGFGPKTVAVLRAELGDAQRFARTDEVIAYGGMDIEIKESGLWKGKAKLSKRGSGLLRRMLYMAALRSISLEGSAFGAYYQRLVERGLKKGSALMAVMRKMLAVAAHLLRHEEEEYDPHKVCGSSAG

SEQ ID NO: 444125 - protein, 392 aa, unidentified
MICVGIDVAKDKHDCFIMSSEGEVLADVFTVPNSKEGFEHLLQTINTCTGIGDSKIKVGLEATGHYSYNLLGFLLDNGLTTYVINPLHTNLYRKSQSLRKTKTDRVDARTIASMLMSDVSLKPYTNIAYHNSELKSLTRYRFDKVKERAALKSSVARLVNILFPELEKLLPTLHTASSYALLSELPSAKHIAEVHLTHLTNLLYVASKGRYSKDKAIQIREAARNSIGTYVPAKALELKHTIKLIKEFNNGIAEIESEIQSIMDKIDSPITTIPGISLRMGAMIIAEIGDFNNFDSPDKILAFAGLSPSTYQSGQLNNCYAHMEKRGSRYLRYALFNAAKLVRYWNPLFADYLAKKRSEGKHYNVAISHAAKKLVRLIFALQKSGQPYIANS

SEQ ID NO: 444126 - protein, 354 aa, unidentified
MIIIGCDYHPGFQQIAFVDTGTGELQVRRLEHREEAERFYHDLVAQGMKVRVGIEASGHARWFERLLAELNFELLIGDAAEIRAKRVRKQKTDRQDAQHILRLLLEDRFPQIWVPNWENRDLLQLLWHRHRMVQARTRIMNQLQAVALNEGLRCKKRLWRERGREQLEAFRLAPWASRRRRDLLELLDRLTPTIAELTEAIEQEAEKCSEAQRLMTHPGVGALTALAFVLIMGRAERFQCGKQIACYLGLVPLEDSSGDRRRLGHITKQGNSLLRFLLVEAAQVTVRSDQEWRSKYFHLALRRGRKIAKVAMARRLAIRLYWMWRKGWDYEQLKKFGSHAGQPGNRHGVQLNAE

SEQ ID NO: 444127 - protein, 355 aa, unidentified
MDSKKYIGMDVHKESISIAVRNDVGKIVMECVIETKASMILQVINGLRGDLQVTFEEGTSAAWLYDLLKPYVTKLVVCDPRKNASMREGNQSDKIDARRLAELLRLNHLSPVYHGEHGLRSLKELVRSYLTITKDLARVMTRVKAIYRSWAIPCTGKQVYAPRHRAEWLGKITEPGVHRRAEFYYQQLDALRALRQEVRRDLLAESKKHPAWKLLCQIPSIGPIRAAVLLGVLQTPHRFRTKRQLWAYIGLGIETQSSADHRRIDGQLQRVKKQSAIRGLNRNCNHDLKNLFKGAAIVAASKPGPFQEFYNALLTKGIRPEMARLTLARKIATIVLIVWKRGASFDAQHLKPQTA

SEQ ID NO: 444128 - protein, 390 aa, unidentified
MSQQHFDASRSLTALEQDSTIIAVIEMSQSKWLVAALVPGVERQPLKKLDAQEEGLLKLLHRWRTEAGQAGRAIKRIVVAYEAGRDGFWLARWLRAHDVEAYVIHPTSIAVSREHRRAKTDRLDTELLMRAFLGWLRGEKRHCSMVAIPTIEEEDARRPNRERQNLVTEKTRLVNQMKAIFTRFGIRTFQPMLRKAEDKLKGLRTAEGTPLPENTRAELCRHLARLRVVREQIRAVEQERLRKLAAAPAAEYGPHAMVRLIARVLGVGIETADMLVNEVLSRHWRDRKAIARYAGLTGSPDESGKRRRERGLARAGNARVRCGMIQFAWRFLRFQKDSALAQWFAARTADRRASTRKTMIVALARKLLIALWRLVTSGQVSDGIVLRPAS

SEQ ID NO: 444129 - protein, 461 aa, unidentified
MRKTRKVAGQRGKKRVDVTANLEILHPNAAGIDVGNAQHYAAVPVGRDPQPVQTFGSFTADLHRLGQWLRACKIETVVMQATGVYWIALYEVLEGYGFNVYVVNAKHTKTLPGRKTDVCECQWLQKLHTFGLLNNSFLPPEEIRVLRTYLRQRENLVAGAGTCIQQMQKVLTQMNVQLANVLSDLSGRSGLEILKAILSGERDPYRLAALADPRVQASRKEIAQSLEGHWREDLLFVLRQVHDLYFFHLDNIAECDRRIEAHLQTLGSKVDLATQPLPQPTPLPRRKHIPQTNLREELYRITGVDLTRIDGIQVQTAQVVLSETGVDMTPWEDEHHFASWLGLCPNHQITGGKIIRRGTKKVLNRATTALRLAAQTLHHSQSYLGAKYRRLRAKLRAPKAITAMAHQLARLIYRLLRFGTEYHDKGMQHYERQYRKNQIEWLKRQAAQLNMQLLPNTGVAR

SEQ ID NO: 444130 - protein, 373 aa, unidentified
MPKYSTAFGMDVHLRSTTVCALDADTGEAVARRFPGNPWGEIAGWMDGFPGPSLAAYESGYLGFAPQRELAGLGVECVVAAVSKIPRSAADSASKNDRNDAARMAKAILAHDISPVWVPSPEVEGIRDLAGAYDGATARLATAKQRLLAFLAKRGFAYGGTTPAGNPRKYWTYDFLRWLDKVRPEDDGGVRTLAALRNEVEAAAEARADLLSEYRAAVDASPIAAEVAALQSIKGCAFALAAAFSAEVGDFTRFRSGRQVTAYFGLAPSQRSSGDSVRLGGISGAGNALVRKLAVEGSWCYAAARHQPKLMPRDTGVPLEIRMHGRKGSERLLRRREEMLARGMPAAKANAATAAELVRWLWALGMMCREGAE

SEQ ID NO: 444131 - protein, 308 aa, unidentified
MTTIYAGLDIAKLNLQLHLAGRVHDLPNTAAGHRRLLKLLAVQLGVHVICEATGGYERDVVAALHQARVPVSVLNPARVRHFARATGQRAKTDHLDAAVLSAYGQALHPKPTAPRTELEEQLAELVRRRVQVLEILVGQRQQAERLTVPALRRQAHSLVRRLERDRVQIEDQLKELRTHATALDERVQKLEAITGVGTITALAVLAELPELGTLNRRQAAALAGLAPHPRDSGQWHGRRSIGGGRAPVRRALYMAALVAAHSNRQLKEFYQRLRAAGKPAKVALTAVMRKLVVLMNHILKNPNFALQN

SEQ ID NO: 444132 - protein, 321 aa, unidentified
MTITIGIDPHKGSHTAVAIDSNEHVLDEIRVRSCSTQTTQLRDWAQRFEERTWAVESANGLGYLLAQQLVAAGETVFDVPPMRASRVRVLGSGRSQKNDPNDARSIAIAALRADDLAVVRADDHSRVLKLLSKRHRDLGRLKNKASNRLHALLLEMVPGGASFRITSVTRVNAVIDDFEPVDAMGRQRQEIAREFAVDIDRYNQLLDASKQRINTAVAASSTSLTTICGVGPITAAMIIGQSGDVDRFKSKHHFASYNATAPVEASSGSKVRHRLNERGNRQVNWAKQASDLTVLLCGRRVGRSGRSCETSGSGDGVVEGG

SEQ ID NO: 444133 - protein, 347 aa, unidentified
MQMIGCDLHARQQTLAILDTETGVLEERVLEHTGNNVRDFYRSLPRPARVGIEATGSMHWFLELMEELGIECRVGHPAKIRACEPRKQKHDRRDALLLLTLLSEDRFPSIWMPSLDQRDVRALLTYRHQWVRIRVRVQNALQSIALSHGLRRGRAMWSKAGLAAIRSLPLPPYSTERRDALVDLYLQLQEEIDELDKTVAECAAERERARLLMTHPGVGPITALATESILGDPARFADGKAVASYVGLIPSEFSSGGRRQILGRLTKQGSPMLRFLWCEAVGHAIRKDEQLKRFYRRKLAQKGFAKAKCAAGRKLGIRLWIMLRDNISYQEFCRRARQQTDVPCGDA

SEQ ID NO: 444134 - protein, 347 aa, unidentified
MIIVGIDAHSRSHAAAAIDEHGRLLEGIEVGAGPRGLAQLSVWIEALPKPRLVAIENVRGYGLAIVQSLLAQGEELVDVPATLTCDGRRSSGQRGKHDQGDALVVARIGLRDEQRLPRLDASVLDDELKLLADARDQLIVEAGRWRNRAHALLRVAAPGYQTKTGALASAGSVRRARAIARRAQKHDPVRGRLAVQALDRLTALERDAGKLEQEIRELLRLRGCAHLLAIRGVGPIVAAKILGETRGIGRFRSAAAFAAHTGTAPVPASSGRVSRHRLNRGGNRQLNRALYTIAMVQARWDPAARAYLERKLAEGKSAAEARRCLKRHLANVVYRALIADQQEAALT

SEQ ID NO: 444135 - protein, 347 aa, unidentified
MSVTMIGLDTAKAVFQVHAIDGAGKAVMRRKLRRSELIPFFEQQEACTVVIEACGAAHHWARLLGGLGHEVRLIAPEAAKPFVKKGKKNDAADAAAICAAASRPEAKFVPVKSLEQQGTLALHSARSLLVKQQTMLANALRSLATEFGLTVPQGIGRLDELSALVAADETVPEPARQVFARLLEHCRATAEGVEALEAGIVAHARQDDTARRLATIPGIGPITASLIAATVGDIGAFESARHFAAWLGLVPRQRSTGGRTRLGRITKTGNREIRRLLVLGATSMVYRAEHWSSAAGAWTRGLLERRPVRLVTVALANKMARIAWALMTRKEVYRAKGRAAAAAEVAA

SEQ ID NO: 444136 - protein, 351 aa, unidentified
MTEHSREPIVTLGIDLAKRSFHLFGVDAHGREVLSKKLSRARLSEFMANLPPCTVAMEACGSAHHWARLFRTFGHTVRLIAPQFVKPFVKSNKNDAADAEAICEAAQRPNMRFVSVKSVEQQDIQAMHRMRSLVVERRTAQVNQIRGLLLEYGMEIPKGRAAVSQRLPEILEDAENGLSARLRAELSELAEELRHLDERVRHYDAQLQAIAQSDPRARDLMTIPGLGAQGATALLAAVGEDAHVFSNGRGLAAWLGLVPRQHSTGGRPRLLGISKRGDVYLRNLLIHGARAVLRWVELKEDPLSRWATTLKGRRHTNIAIVAMANKIARIAYAVMTSGKPYDAAKGALTNG

SEQ ID NO: 444137 - protein, 408 aa, unidentified
MNTLYVGIDVSSKSNVVYLMLPNGDKHSNFSVANSHEGSTQLVKRILSALTSYSLDTVLIGLEATNVYGDNLVYFLREDATLAPFNRKIHVLNPKQVKKFHDTYNDLPKNDYVDSFVIADCLRFGRINKEVYLGDYRYKALQNLTRARYFTVQSLTKEKQRFINVLFKKYSTMTQEKVFCDTFSTTALAVYDEFDSAEALANMDLHELTNFIIKKGKNRFTDPDAVAKAIQKAARSSYRLPKTINDSVNQVLSISITSMKALESQIKEFDKAIKAQMELLPNVLISIPGIGPVYSAGIMAEIGDINRFNNQAALAKYAGLAWKQHQSGGFEAEVTRLIPSGNRFLKYYLCEAAFSLVRCDKEYSDFYHLKYKEVNRYQHKRALALTVRKFVRLVFRLLKDNRLYCPAK

SEQ ID NO: 444138 - protein, 317 aa, unidentified
MQINNHCFGIDVSSRWLDIASDHSQVIRIDNTLDSVDLWLTGLPNKSVVAMEATSQYHLLVAKLAYSKGMIVYVLNPREVHHYARGVGRRHKSDKVDALLIKRYIEKENDCLTAWTPPTEAQEKISILIKRRSHVVVQKQSLTLSCKDIKHLSQELEVTLNALQKLADELERLILKEIKSNKQQAHLFNLLKSIPGIGKLTAAFFTNLLSHSQFKNADQLVCFMGMDLQFFDSGLMCSKRKLSKRGSSEARRLLFNCARAASQGKLKPLYETYASRMNHTKSTVAVMRKLIKLIYGVWKSGISFDISKFQSPLLNNA

SEQ ID NO: 444139 - protein, 340 aa, unidentified
MTITTVGIDLAKNVFAVHCIDQNGKAVLVKPKVSRAALSELIAGLPPCVIGMEACSGAHYWARLFRQYGHDVRLMAPKFVSPYRMAGKTGKNDAADAIAICEAVQRPHMRFVPVKDESQQAMQCLHRTRQGFIQERTATYNRLRGLISEFGVIAPQSTDALRHVVSDQKETLPVQVRLCIDDLLTHVTNIEEKIAEYDRVLSRVAKTDHRSQQLMELKGVGPTTASALVASIGNAHDFKNGRQLAAWLGLTPSQYSSGGKSKLGRITKAGDAYLRTLMVQGARSVMVGAENRTDPFSRWVCSLIGRRGYWRAVVAIAAKNARLCWASLYYGDDFRLYSTT

SEQ ID NO: 444140 - protein, 302 aa, unidentified
MVKTEFDELMSIGIDIGKDTFHLVGFDQDGPRVLRKQIKRLALIATFEKLPRCVVGMEACLSAHFVSRTLRKLGFESRIIPAIYVKPFNKGQKNDYNDAEAIAEAALRPNLKAVSEKTQEQLDLQALHRVRSRLVSRRTATINQIRAFLIEQGITVRKGLRALKNSFETILEERKDEISPRMRSILIGLYGDWMWMDDRIDKVSQEIEEISRTEENCVNVMTVPGIGSMISTAMVAAIGEGEAFDRGRDFAAWVGAATIQHWWANDLGTHLKTGQPVSTDVVRPSGESHHDAPASMARLQLR

SEQ ID NO: 444141 - protein, 345 aa, unidentified
MGVIIGVDPHKASCTAAVLDERGELVDQQRFASTRTGSRALGRWAKRWPERRWAVEGASGLGRRLAQQLVGDGEPVVDVPAKLAARVRLLSAGHGRKSDAHDAVSVAVAALGTRRLGQVRLEDHAAVLRLLSDRRDDLVRQRTRTLNRLHVLLCDLLPGGAKRSLDADTAAALLRRLRPATAPARTRRQLAVDLVADLRALDRRITAVEERLRHAVTQSATTLIELFGVGPILAAKLLGEVGDVRRFATKHRFAAHNGTAPIEASSGEVVRHRLSRAGNRKLNHALHLIAIVQIRHPTAGQAYYRRKLAEGKSRKEALRCLKRRLSDAVYRQHLADQHQPVQAQA

SEQ ID NO: 444142 - protein, 386 aa, unidentified
MTKKITNPEILAFRAAAEVDPACGRVWVGLDVGLKSTSVCVLDRDGKVVHQVSMKTHPTEIGRYLAKNFTSNVVVVGMETGAMSAHLAGGLRKQGYQVAVMDALQVHRVLSLKRNKTDTNDARGIAEITRTGRDYLTEVYVKSAACFEVRAQLIMRHRLVQQRLANENMIRGLLRVYGGRVEPGAKSSATYRDRVVEQLLIIQDREGINLRPRILPVLDLCERLQADAVRIETELEALAAANPVCRRFMAVPGIGAITALSFFTAIEEPSRFRRADDVAAYLGLTPRVYQSGESLTHGKISKMGNRLTRTHMVNAATVLLSATKTFSSLKDWGVRLAKKVGFNKAKVAVARKLAVILFGMWRDGTHFQFKTETLEPHRQMMQTARA

SEQ ID NO: 444143 - protein, 318 aa, unidentified
MVSFVGIDVSSRTLDIAVRPQSLKINVTNDRAGFEVLEKSLRGLKVKRVLLEATGGYEREVLSFLQSAGYKVIRVNPRRARSFAESMNIKAKTDAIDAAVLAYFAEVIPDKPTLQVSPQRALLRELLQQRDRLVQQRDDDRRRLKQAQSEVVAHFLKSNLQHFRSQIRQIEHEIKLHAEGLGDERIAQLVQVKGIGLVTAGKLVTLLPELGHVEAREIASLVGVAPFNHDSGTSVGKRSISGGRFGIRCALYMSCLVAVRQNPSLKAKYQALRERGKAAKVALVACMRVFIVRLNAMLRTGTPWQDVELPQCKSAPPA

SEQ ID NO: 444144 - protein, 410 aa, unidentified
MGYETLIRRAHVMTRKNTLKSLPTDTEFRVVGLDLAKSDVSVAAIPVDDNTPSLVDRMTYADLLDWAGKISPTLFAMEPCNGYSLLCLQLENLGHEIKVISGWTVSMWINTHLSGQKTDLNDAIALARLAVSDAELTPIRHKSITEIRIQTVQAVRQQLMSQRSKSIVSFKALAQQWGIPCAAGHRNLKKLRESIEAKVDLITRPVANAMLFLLDAVKSLDRQIGQLNQTLQELVMSDERGRLLQSVLGVGTQISARVITVVGNVERFNSPRSLVAYVGVAPRNFITGHKNLTKKKHGNCPDLSHKGQGKISRRGDKLLRSLFIQGAACLYMQFCKDQLPECQLKRWILKQLASQKPYGKLIVSLAAKLIRIVWAVLTYGEKFNIQKAGMTRSMWSEMALETPLNKEVPA

SEQ ID NO: 444145 - protein, 350 aa, unidentified
MKKNNKTVERQPEETIGVDLGDKISRYAILDGEGVVVEEGMFHNRVESIEKHFGDRGRARVALETGAQSAWIARAFEKLGHEVIVANARELKWITSSDNKTDPNDARKLARLARADRNLLHPVQHRSPEHQAELGVIRARDAMVRARTLLVNTARSLAKGFGLRLPKTVTPTFGERALENLPEFLHVSLHGLLGHIDALGRQIKEYDQGVDQVAERYPEVVRLDSVPGVGKLTALTFVLTLGNKERFAHSRDVGSYLGLRPRQQQSGKYDPQLGISKSGDKYLRKLLVQCAHHLLGRWGKDSALRQWGLSKGGGKSATKRAIVGVARKLAVLLHRLWVSGEIFKPFPQMA

SEQ ID NO: 444146 - protein, 336 aa, unidentified
MWIIGCDYHPSVQQISFVDQETGECGNVRLEHKNGEAEQFYRKLAGQKVRVGVEATGRMRWFERLLGELGFELWVGDPVKIKAAAAGRPHRDPEDADLILRLLLEDRFPKIWMPSQEERDARQLVLHRHRLVQTRTRAKNQLQAMATSEGLHRRVWSKAGQAELKQLALSRWGQVRRQDWLELLEDLNERIDPLDKALLKQGQERPEVKLLMTHCGVGPVVATAFVTTICDPKRFESSKQVAAYLGLVPHEHTSGKGRQRLGHITKQGNCVLRGLLVEAAHVVARHDPEWQRKYTRLAMKKNRSIAAVAMARCLAVRLWWMWKLGLSYEQWHAKQK

SEQ ID NO: 444147 - protein, 318 aa, unidentified
MTHTTQTTALYVGIDVSQNTLTVAIYPTDEVWTLVNDPHSHTALVQHLAQLPVQRVLLESSGGYEKAVVSALQQAGLPVVVVPAQRARYFAKSMRGDLKTDRADARMLAYFACCYPVQPVAPCAPVQAELKELWARREQLVQQVEREKKRLHTVQSEAVRASLERMLAVLKDEIAQIEARVAELIASDADLSQKAALLQTAVGVGRVVAYGLVAELPELGQVSHRAIAALAGLAPVRCESGAWVGRARVRGGRPRVRRLLYQAAVVAATHDGRWRAVYEALVGRGKAKKVALCAVARQLLVVLNAMVRDGRAYERVQE

SEQ ID NO: 444148 - protein, 544 aa, unidentified
MARRKGSSRRQGRIHRQKVNSAFLERARAVGAERFGILTVDPAKKRSAVKLTNYYGQELMAPLVVEHTDRDLKALVETVKREQQEHGLGDLVVGVERTGRYHAPIRRALELHWTVQMLHPFATKQLRQPVDPGQKTDPNDLNAMTRGMIVGYGAEEPGLPERWLEWRLVSRERENFVRKTATLRNQMKERLEALLPGYAALFGAFWQAPVALAVAERYPSAAALLQAGPDTILEALRRDGQATRRDTVARLLEWARNAPTPDPCADLNHRLLRGEFALLRHLESALRAFECDLVQYLVDTPFVLLISIPGIHVVSSASYAAELGPLEHYLTPKNISGRAGLYPSRYQSDETDRADGPLVSRRNARLRDAIMEIAHNLIRCNHYFEAWAEVRRRQHWPARKLDLAVATRFIRISFRMVSGRMVFRHPCAQGRDAILDKLLDFALRHQIPPRDIQDLLQRALRQIPQDAFEEEARALIGRLPRRDRRDDPRPDTSGREPVRLGDLLRQVIHHLAPHLSLELPRSTTEEPTHTGGLPNHRLSAAEGS

SEQ ID NO: 444149 - protein, 343 aa, unidentified
MITIGIDPHKRSLTAAALDPHSSPLGQLRLPASAQASRQLLAWAAAWPQRRWAVEGASGLGRGIAQLLVAAGEQVVDVPAKLAARARLLGTSSARKTDVADACSVAAAAIHHRRLRPVALEDQTVVFRLLSDRRDDLVAERTRILSRLHVLLADLYPGGAKRELTAARAATLLRQTHPITAVDVERKRIARELLTDVRRLDRQIKTASQTIRQAVGEQGTTLTQVFGVGPVLAAKLLGHAGDITRFPSRDHFASYTGTAPVEASSGDVRRHRLNRGGNRQLNTALHLIAVCQIRDPSPGQVYYQRKLAEAKTPEEARRSLKRHLANVVHAHLVADHRGQTPAS

SEQ ID NO: 444150 - protein, 417 aa, unidentified
MLAQRDKACGVDVHRDSIVATILDRNGKKDQKEFGTAVSELFEFRDWLSSNGCKAVALESTGTYWIPIYTVLEEGFEVIVANPYMIKHIRKRKKDQLDSEWIAELCLNDQIVPSRIFHKDQWELRMLTRSRESLGKMRSSLKNKIHRDLASANVKLASVITDIFGKSGMHCLTGKLLGKDLDEIIKTIPSKRVRKNADEIREAILPNLTQVQCLSINISLSLIESINQKIQVIDVEIRSRILDRQKDLEIVMSVPGIDFASGTTILAEIGNYRDFSSPEMLASFFGLVPYVYQSAGKLYTGPITKQGSKHMRWILVQVARAASKVKGSRLKRFFLRIKARRGSNVATIALARKILCILYHLLINQEMYEEATIKKSKPSKKRILKSSSPGEMNLEDMIEVIRQSGYSVDKVDRRAHG

SEQ ID NO: 444151 - protein, 372 aa, unidentified
MQFTTKFVGLDVSKEKISVAIADANGEAPRYYGSIPHTPAALRKLVKELGPADTLSFCYEAGPTGYETYRWLTSMGTHCVVIAPSLIPKRPGDHVKTDRRDAEQLARLFRAGELTPVYVPEREDEALRELVRAREAAKEDAHRARQRILKFLLRHQIVPPATLKRRWTKKYRAWLGQLKFPYEPMQIAFDEMLHTLNEIEQRMERLEKALVQQAAVGSKAALIQVLQSLRGIGLLTAVTLAAEIGSFARFRSPAQLMAYLGLVPREHSTGPTTRRGSMTKSGNGRLRRALVESAWSYRHRPAVKGDLAKRLDGMPADVQLLSWKAQERLHYKYRHLVFGKNKHKNVAVGAVARELTGFIWAVARTVEQPAAN

SEQ ID NO: 444152 - protein, 342 aa, unidentified
MKFYCGIDLSARDCHVCVIDEQLNVMVQQKLRNELPRICQLLEPYKGDLKIVVESTFNWYWLIDGLQGEGFDVVLAHTLGLYLITGAKVKTDRRDAYSLAKLLLAGVVPAAYIYPVETRPVRDLLRRRARLVQVRAGEYGSLRRLLLRQGILSSKQQEIKSATETELEQWFEHPLLRLHASQELQRIELYSQQIAELEKTILGLAQTNQSYRLLLQLPGVGQTIALTILYEVGELTRFADAKVFSSYCRVIPGIAQSGNVTRRGRASKQGNHYLKAAFSQAAVHAVRCYPKVRRYYERQLKRHQGRGRQMICYNIIAHKLAQAAFHVLKEQTEYRAELLFGR

SEQ ID NO: 444153 - protein, 392 aa, unidentified
MKVTRIGLDIAKQTFELHGVDQRGRAVLRKTLRRERMLEFFTQLEPCEVALEACGGAHYWHRELSKLGHTVRLVPANKVKPYVDGNKNNAHDAAAICEASSRPSMRFVEPKTVAQQDLQALHRVREVAVHHCTLLANHMRGLLLEYGVTVGRGYPALHRALPELLGDDEQRLSRLLKQLLAQQWRMLKLHQKQVQTYDRRINCIARGETSCSALLKIEGIGPITATALVAAAGKGHQFKKGRHFYLGLVPGHSNTGNKTVMLPITRRGNRYLRTLLIHGARSALYAARNKENPRSLWLQRLKARRGYNVAAVALANKNARIAWAVLRFGETYQPAKAHRPERCATPSPRLQRQPQNRLTLKPQGASSQVRNSASSRPALIKPEGRAGKMPLI

SEQ ID NO: 444154 - protein, 316 aa, unidentified
MQANEVFVGVDVAKDTLVSCTWGAPQRQLVPNEERAIKEWLKTLLPRAVVGMESTGRYHQELARLAHQAGLRVYVLNAKDVYFYAKALGARGKTDPGDAQVIARYVAEHHGSLHAWAPGTATQLRVQELLQRRARIAVCRASVRQALTGLDELAPAVLQLEQQFEQLLRRIDREVQALVASESQLSQGSAMLQSICGIGPQSAALLAALLSRIEFANADALVAYSGLDPRPCDSGTKSGRRRLSKRGSPNLRRQLYLAAMAATRSKAMGSIYQAIKAKGFKSTQALVILARKLLRIVWAVWKSGKPFDPTRLQPAA

SEQ ID NO: 444155 - protein, 352 aa, unidentified
MDIVGGFDVHRKQITFDYVEMESGEVHCGEICPADREHLRSWLEEFTERFCGREAAFAVEATTGWRYVVEELGRAGCDAHLAEPADTKALQGRKKRAKTDRIDARHLRELLLIERLPESWVPPEHVQQIRTLMRMRHTMVEERTAYLQRIHAQLFHNGCPQENNLLSVEGRERLRQMELPRAARKVVDLCLKMIEHINEELSPIEAELRSYARAQAGCRALMSHYGVGELTSVALFSELGDTRRFSSSKKAVRFAGLDVTVHSSDEKRAAGKLSRQGSPVLRWAAYEAAKGAYRKGSPDHEYYLQTRERIGTNRAALSIARKLIRRAHHTLRELGEEAMSEPLLAVSSSSSV

SEQ ID NO: 444156 - protein, 425 aa, unidentified
MNRGIKMNAIQWNEQPYFAALDWARAHHDVVIIDRLGQIKQTIRFDHTAPGWQRFQHLARQYPNLPVAVETSHGTVVEQLFAAGVSVYPINPKAAERYRERQSPSGVKDDQLDAWSLADALRLDGHMWRALTMRDPIVAELQLLCRDEIALIEQRTAFVNQLKQALHEYYPAALEAFDDWVSPGAWDFVLTFPTPSQLQHAGRRRWEKFLHVHKLWRAATAESRCAIFGRATALSGSAPTVAAKSLLAVTLARLLRQLESQLDAYRERIAAVFASHPDHDLFGSLPGAGPKLAPRLLSEIGDDRARFVDAQGLQCVAGTAPVTFQTGNRIRYQKMRHACDDTLRATVHLWANLSRPQCAWAEAYYQVHRKKGQSHACALRCLGQRWLKILWKMWQSRMPYDEALHTRNQTQHGSWVLTLSSPQSS

SEQ ID NO: 444157 - protein, 332 aa, unidentified
MQGETLSEGPLQTGQAALAEFFQALPPARVVIEVGTHSAWVQEVIAGEGHEVLVANPRLMDGSKRRKRKNDRIDANQLARLGRVDPKMLHPITHRSREVRQDLVLLRARDALVEVRTELINASRGLVKSLGTRLPKCSSPSFGDKVADAIPVEIREAVLPLVQLVDGMSACIKVYDRRIEELASDKYRHTKLLRQVKGVGPLTSLAYVLTLEKPERFPKSRDVGPYVGLVPRQEDSGESQPQLGISKAGDTMLRKLLVGSAHYILGPFGPDTDLRRYGLRLCERGGKKAKKRAAVAVARKLAVLLHRLWVSGDVYEPLGYTSSGAKVQKAAA

SEQ ID NO: 444158 - protein, 468 aa, unidentified
MQTWYRRCCGIDVHKKSVQVHVLPPQGHAHIKPLEREYRTFSRDLQRLKVWLQRCQVSEVVMESTGQYWRAVWNVLEGEIPRLVLVNPQHIKALAGRKTDRIDSRRLARYLENNDLEGSFIPPREIRELRDLTRARVHLLQEVNRVKNRVGQMCEAGNIKVSSVATDLFGVSGRRMLAAIAGGKRDAGWMADYARGTLRGKKKQLEWALEGSFTEYQRWMLRAQLEHLKFLEEQIAQLEQEIERRMQPYQEQLRRLTTIPGVDRITSWTILAELGPDMSVFPDARHAASWAGLCPGNRESGGQRLPSKTRKANAYLRRGMCEAAWGASHSKDTYLAALYRRQRSRLGHNQAIFALAHQLLVIAYTLLRRGEDYRELGADYFDQKNKPKVVNRLLQRLIRLGFYVSLQEASIPSAALETAPSDTVAVASAASASAQPAIKRGRGRPCKCAMRGLPCRHKNSPLPTQPPA

SEQ ID NO: 444159 - protein, 339 aa, unidentified
MRLYIGVDLHANNNFLAVVDGKGRRIAQKKLPNDLFVIQEFLKPRKKDIVGIVVESTYNWYWLVDGLMDAGYKVHLANPSAIQQYSGVKHADDKHDAFWLAEMLRLGILPEGYIYPKEERPVRDLLRKRRHLVRLRTSLIVSLQNIISRNCGVKFPVNEVKRLREDRVSPLLEGNEDLALAGQASKEMIDQLTRQIQKIERVILQRVELKESYRFLLTLPGVGKILALTIMLETGVIRRFAQVGDYVSYCRKVPSRWTTNEKSKGKGNQKNGNKYLAWAFSEAAEFARRHDAQAREYYHRKMRKTNFMVAHSALAHKLARAAYYLMRDQVPFRPEKLFC

SEQ ID NO: 444160 - protein, 340 aa, unidentified
MDKTLPAVGIDVSKLSLDVRVDAQERPRRSPGHLANSGEGFLQLQGWFQSQGMPRVHACLEATGTYSDAIARFLFEQGHQVSVVNPARVAAFRTSEGIRTKTDRHDALVLARFCAQKRPALWSPTPASVQHLQVLLGRHEEVQVTCRQERNRLENHRLDPLTRQEIQQHIDWLQTQSAHALQRADNLLLEHGELRQACAHLDSIPGIARLTAMRLYSVFFDQQRFDGAAKLVAHAGLCSAKQESGTSVHRKASISKKGNALVRKWLSMSALAVKRCNPDFRQWAASLKARGKSGMCIVVAIMRKLLHLVHGVLKAGEDYDARKAFPSHYSRPTPPVEEAA

SEQ ID NO: 444161 - protein, 344 aa, unidentified
MQNMYYIGLDVHKRTISYCVKDASGRVYAEGSLPATRFDLDRWMKTLPQPWSAAMEATVFTGWIYDHLQPHAAALKVAHPLMLRAIAAAKKKNDRIDASKICDCLRCDFLPECYMASTAIRERRRTLRYRNLLVRQMVQMKNKISGLLMEAGVSYNKQRLHRAGYFRELLATNPDIDEGLVSLLRLCRETVVRLQKTESAVVQSLEHDSLLMDRVERLMTIPAVGPITALTWALEVGDAQRFSSIKKAISYCGLCGAEKSSANTMQRTPLSKQRNKHLQTTLIEAAKMAPRYSPNLAMLYDKEKQKGNANRATLAVARKLVAYLMAIDRGQRNFQAVETNCIAA

SEQ ID NO: 444162 - protein, 291 aa, unidentified
MVVVGTDAHKYSHTFVATDEVGRQLGEKTVKATTAGHATAIMWAREQFGLELIWGIEDCRNMSARLERDLLAAGQQVVRVPTKLMAQTRKSARSRGKSDPIDALAVARAVMRETDLPLATHDETSRELKLLTDRRDVLVAQRTSAINRLRWLVHELDPERAPAARSLDAAKHQQALRTWLDTQPGLVAELARAELTDIIRLTGEINTLAQRISARVHQVAPALLEIPGCAELTAAKIVGEAAGVTRFKSEAAFACHAAVAPIPVWSGNTAGQMRLSRSGNRQLNPPYTASH

SEQ ID NO: 444163 - protein, 363 aa, unidentified
MIGVGIDVSKLKSTICILNEYGEVLQTPYEISHTETDLKELSKSIKGYGGKNDVRVVMEATGAYSRPILYYLLDEGIFVSEINPLAMRKYRADINFRGVKNDRIDAIAIAQYAVEKWNRLKEYQRADKEYAAMKALSRQYLSYMKPHVVLTQNLDHLIDQVMPGIKEEFDGYDPVTGRDRLADFLEEFRHYDYITSLGPKKFEERFNKWAKKKGYRPRQNKSGKIYSLAKEGIPTLAYDPTSRLLVEQAVAALKGLNQVLYQILAQIRELAEKRPEYAAVRAMSGVGDILAPLLVAEVGDPRRYHSADALIACIGIDVPPYESGQFKASERKITRKGSKQLRKLGYLMVKNLKRIKPVQDITM

SEQ ID NO: 444164 - protein, 392 aa, unidentified
MIYVGIDVAKDKHDCFAMNSDGEILIENFSFLNNSDGFNLFFNSISQFNESFENIKVGLEATGHYSNNILNFLTSKGFNVFVINPLQTNLFRKGQSLRKTKTDKLDARFIATMLIADNLKPYSNLSYHISELKSLVRHRFRLVEERSKFKVSFSRLVTIIFPELEKIVWSISQNSMLYLLYELPSVKDISECNLKHLTYLLEKYSKGKYRRDKAIQIRELSRKSIGTISRSLSFELKQVIQTILFLQSQIDDIDKELKNLIDELNSPILSIPGISYVTAAYILAEIGDINNFDSPAKLQAFAGLDPSTYQSGKFTASNSRMVKRGSKYLRWALLTATRLVCMRDKTFNDYKNKKMAEGKHYFVALSHTSKKLIRVIYYLLKTNQSYQLPKVA

SEQ ID NO: 444165 - protein, 427 aa, unidentified
MNTVRPIAVQNRKYVLSVGLDWADQKHTLCQRCWADGQRQQFEIGADPASVEAWLAQLKALAGPEGRVAVGFEQNRGALFAMLRAHTDWIDLYPLNPLTVSKFREALFTSGAKDDPLDSQLIEELLYHHLDRLRPYMAPEPELRELDLLCQQRRKAVDAAVACANELCSLLKVYYPLPLDLHEELRCSLTLHFLKRWPTLEQLKKAKPQTLRSFYYQHHSRSQSLITERLEKIARAQAVTEDLALIRPSVLSLQRLVNQLLTLQASVAAFDKAIQALFAKHPDHLIFESLPGAGPRLAPRLLAAFGSNRAALSHSSEMQKKSGTAPVLDRSGQAKTIARRWCRSKFLCQTFHEFAAHSIPHSTWAKACYQQLLARGKSHNAAVRALAFKWIRIIFRLWQNGTLYDESHYLKALENRRSPLSKKISKL

SEQ ID NO: 444166 - protein, 343 aa, unidentified
MQVITTIGLDIAKSVFQVHGIDAEGNVLIRRQLKRRYVLAFFQKLAPCLVGIEACATSHHWSRELKALGHTVRLMPPAYVKPYVKRQKNDATDAEAICEAVTRANMRFVETKTPGQQSCLMLHRTRQLFIRQQTSVINAIRAHLAEFGIVAPVGRHGVEALLEVVADVSDNRVPEVARACLAALGAQLRRFKEQILEFDRRIMAWHRSNETSRRLDAIPGIGPALATALVASVANPKAFRSGRNFSAWIGLVPKQHSSGGKDKLGSISKQGDRYLRSLFTAGALAVIRYAKIHGTHHRPWLTALLARRPTKVAAIALANKIARMAWAMMAKGERYKEPVALAA

SEQ ID NO: 444167 - protein, 384 aa, unidentified
MPSLTASPAIIYLGLDVHKDSVPIAVLPADASAPTRIDKYPNDFAKLRRVFERCAKEGELRACYEASGAGYVLQRAMKEWGYHCDVIAPSLIPIKPGVQRKHDKYDAGQLARLYRAGELTVIRIPREAEERVRDVVRCRETLQREVVKSRHSILKFLARRGFIYRGGVNWRPAHYTWLRQLTGTTSPLASEDQLVFSEYFALLAYKLSRRDVLDAHIETLALQPAYAPAVAALQCFRGLQVHGAMVLATELVDGRRFASPRQLMAYLGFVPREHSSGARERRGSITKAGNAHCRHVLVQAAWSYRLHPKIGPALAIRQRGQPASVTLHAWKAQQRLYTMYHRLSMRRGPQIAGVAVARERIGYLWAVMREITPEATPSATLAAA

SEQ ID NO: 444168 - protein, 401 aa, unidentified
MDIVFGIDVSKHSSNVAILIEQKVYKEFKIQNDRHGFEILEDELDGLTSPQIIFESSGIYSRSIRAFLIRNGWQYTEINPLAAKKDMDSFRHNKNDRLDAVSLAMAMSQHHYKPTFQEQPVYSELHDLERTYQELNEDIVRAKNRLHQKLQLAFPEIERFLSVTDGALYWHIVQQFPHPSLVLEMGITELARLILEATPKNMGERRSLVLAQHLQDLAYNSAPAVENCTHAVQAVIYLAGEVERLDTLKKKTIDEMTEISANLQEISILQSIPGIGIKTAVCLVAELGDIRRFRKPNAINAYIGIDLIQYQSGDFEMGQHIRKRGNTYARKILFKAVLNIVSVSRYHPSNISLFYQRKKQSSGDIHTKKIAIAAMGRLNRTIYHLIKNNEFYDPMKFTPEL

SEQ ID NO: 444169 - protein, 355 aa, unidentified
MNTLNENSIVVGVDVHKYSHTAVAMNAWGEEKGKLDFSNNNLETYTEWLNHLGFKENIVIGLEDVNSYGIHLVERLRREDYHIRYVPAILTERERKSSTKRHKSDEVDAKRVGKVILTKYEDTLPAKESIADEKELETAKSLDLLLMERRDLTRNKTIIKNQLHCLIHQYYTESYRLHCPRSFSKKAIKWFLDDLKDNKTILATSIVRRLERLLFVEDQIYTISKEVAVIGETSKEVMSLTTIHGCGMVTACSIVSEVITIKRFKDKHHFSMYAGIAPTPHSSGRKNKMHTNPFGNRQLNRAIHSIALSQIAIKGDPTGKEYYQKKLKEGKTKLWALRCLKHQLAKVVFQKLKYC

SEQ ID NO: 444170 - protein, 367 aa, unidentified
MKKVSTIATKQSKNFSRPTLTIGLDLGDRNSWYCVLDETGQVQLEQRVRTTEKALQEVFGAMPRSRIALEIGTHSPWINRLLSEFGHEVIVANARKVRLIGESRKKDDRLDAQTLARLARIDPALLSPVRHRSAQAQADLTVIRARAGLVRARTALVNTARGLAKSYGERLRGCNVRNMNPEKAEGLSPELQAALEPLLMALESVSEQIAEYNERIEKLAEQSYPQVALLKQIKGVGTLIALTFLLTLEDPHRFGKSRDVGCYLGLQPGRRNSGQSQPQLHISKEGDPYLRTLLVQGAQHILGPFGVDCDLRRWGLKLAERGGRNGKKRAIVATARKLAVLLHHLWVSGEVYEPLHNSSRMTVAAVA

SEQ ID NO: 444171 - protein, 424 aa, unidentified
MKVTYKTCCGVDVHKSFLVATIITTTGGIEPSYQKKRYSTFNNSILEFKQWLLDNDCHELCMESTGKYWIPVFNLLEDEINVTIANPKWVKAVKGNKDDTKDSKWIGDLFRLGLVKGSYIPCKKIRILREFTRYRYKIVSCRSSEKNRYQNALTVCNVALDSVVSDIFGKSSTSIIDYLLEQSGNSINHEEIASKLLKSLKSKEDAVIESIEGYQMTDSQKYRMHLVRAHMDYITAEINDVDREIEKLISSDPDFENAIQFLMTIPGVKRDSAITVISEIGIDMTQFSSSKRLCCWAGLTPGSNESGGKKKSVRVTRAGVYLKPALVQCAHAAVKSEKSPYYKKKYESLMKRRGKKRAIVAIARMILTAIYQMLSTGESWNPSDLYKIDILEALLEKQKAKAIKQAMKLLQREGLYPPPEPIAS

SEQ ID NO: 444172 - protein, 448 aa, unidentified
MVRRRCIGLDVHRDFAQVAIWEDGKIRHAGQVAVCGEALWVFADSLGPEDEVAIEATCNTHAIVRAIEPRVKRVVVSNPMKTRAIAEAKVKTDKVDAAVLAELLAADYLPSVWVADEQTQALRRQVARRTQIVRQRTRLKNQVQAILHRNLVARCPFADLFGVKGRCWLSDQHLPPDEHHAVEALLRQLDFHGQELRIIDAALGRIALERPEVKRLMTIPGIDATVALSLLAAVGDFRRFRTPEQLVSYLGLNPRVKQSGGKTATHGRITKNGRAHARGMLVEAAFTASKIPGPLRAFYQRVRARRGIQIAIVATARKLVCLCWTMIERGEDYAFARQSLTEKKLRALELRAGLPAHRGKKGTATNYSLKDVRRQELELAEQAEQAEQAEHAYRQQVADWQARGPGKPGVAAANGTRLKRPSVGQAARQASVPEPALRSGVGHAHPEG

SEQ ID NO: 444173 - protein, 320 aa, unidentified
MTISTAAGVDVGRDWLDVAIARSSEAGVAGRHFRLPNTPAAIAGIPARLRRAGVTRVVIEATGAPAARLVRTLAEAAMPLGVVDPRRIKALRLAEGRKAKTDKLDAGLIARFALLMTDAVRPAPSPAALELRALSTRRRQLVEMIAAEKTRLKQAFEPVLMASFRLTIELLGEERARIEAMIEARTSATPEDRRKGELLRSIPGFGPVISATLMADLPELGALDNKAIASLAGVAPHIQQSGAQAGRAHIQGGRPCVRAALYMAALSAVRHDAGFKADYKAMRAAGKPAKVALIAIARKLIVAANAILKHGEPWKHAQRS

SEQ ID NO: 444174 - protein, 350 aa, unidentified
MEIHAIGIDLGKTLFHLVGVDSSGTVVVRKRCSRRQLLAYTANVRVHRIGMEACSGAHFLGRALRGQGHDVRLMPAQYVKPYVKTNKSDYIDAEAIAEAVQRPTMRFVPIKTEEQLDLQALHRVRERWVMRRTAVVNQIRGLLLERGLTLPKGRCHVDRALPGILADAESKLSGSFRILLAQLKLELDQLSARVEEMDRVIQHAATDDEACKRLTTIPGIGPVTATALVAAIGNGSAFRKGRDLAAWVGMVPREYSTGGKQKLLGISKHGNSYLRRLFVQGARTVMQHRIKQAPGLRCWLDQLLARAHQNVAIVALANKLLRTAWAVLCKNETYRPPVLVTPSCGTGVVR

SEQ ID NO: 444175 - protein, 394 aa, unidentified
MFYLGIDIGKRTHVASIMNDEGKVLLKGFSFVNSLDGTHALLERLTSFSDSTEDFLVGMEATGHYWLALFSFLDEQQFLVHVINPIQTDGWRKGTEIRKRKNDSIDSVLIADLIRYGSFNETALADETMFSLRQLTRYRSYLVGTAGDFKRKVIAILDQIFPEYEKVFSKVGIFGKASKAVLSEFSSPDEFNQVSAETLAETLRVASRSRVGQSKAEALKTAAAHSFGVRFAQDAFVFQLRSMIDQLSFLEEQIKRTEEEIAQLMASLHSVIETVPGIGTVLGATILGEIGDIQKFSTPKKLVAYAGIDASVSKSGEYEATHNVMSKRGSPYLRKALFQAALIASRCDPVFKAFYDKKRAEGKHHLTAIGAVSRKLCYIIHAILTKNEPYEIRQ

SEQ ID NO: 444176 - protein, 350 aa, unidentified
MLHAGLDLSRKRLDVCLLSEHGELVEEFSAPPDADGLRGLVRHVGQHGEPVRGVIESMTGARFVHDTLERFGWEVLIADAQKVKGLAPLACKTDKIDARVLAVLSERDLVPAVWLPDPRVRCEREQARFRLHLVKHKSMLKHRIHSTMLSFGHPCPVTDLFGVQGRELLERLEIPDPWRQTVDASLDLIDYLERQIAQINKELRSSGAEHPYVPLLLTVPGIGWVLAFTIASEIGDITRFASAKKLCGYTGLCPRVHQSGEKDRRGPLTKHGPKYLRWAMLEATMHALRHPAYAERYQRNKKRLGKQRGAKVAQIDIARKLTEAIWHMLTRNQPFAPTPAPGGAAFRLAA

SEQ ID NO: 444177 - protein, 369 aa, unidentified
MSVVRRCGVTPTQTNEGMTVTTLARSVTGGVDTHLDVHVAAALDERGALLGVESFATTENGYKKLLGWLSDFGVVELVGVEGTGSYGAGLTRHLQAERVRVVEVDRPNRQRRRLKGKSDPQDAISAARAALSGDACGEAKTRDGNVESMRVLRVARASARKGRTQALNQMRNLVSTAPDSIRAELRGLNVFHLLERASTYRPGSKRDIVSLTKFSQRMLARRAMTLEEEITEIDAILKPLVKETAPELISTLGIGTDAASALLVAAGDNPERLRNEAAFAHLCGASPLDASSGKSQRHRLNRSGDRQANSALWHIVITRMVYDPRTTEYIDRRRKEGLTKKEAVRCLKRYVAREVYGLLPHEKLGLDSP

SEQ ID NO: 444178 - protein, 425 aa, unidentified
MTPEPNPEFAAFIGIDWADAKHDICLQAAGSRQREFAVLPHRPDAIDEWAAALRQRFHGQALAVCLEIARGPLVYALQKHDFFVLFPVNPATLAKYRQAFQPSHAKADPADAQIALEILLCHRDKLKALQPQSVGICTLERLLEERREFVDEQTRITNRLTSALKEYFPLANAWFDEKASALFCDFLSHWPSLKQLQRARRTTLLTFFREHHCYQPRLIEERLAALQRATPLTDDAAVIKPKALMVEGLVDQLRVTLKAIARFDAEIEAVAPTLPDYALFRALPGAGPNLAPRLLVAFGERRERFASAADVQMFVGVAPVTESSGKQHWVHWRLQCPTFLRQTFVEWAAQTITRSFWAGAYYRQQRAKGCAHQTAVRALAFKWIRILFRCWQLRTPYDESAYLNALQRRGSPLLASLALPSPATH

SEQ ID NO: 444179 - protein, 456 aa, unidentified
MGNARKNKIPARLVEDEDYQLRHERVAGIDVAKAKADVCTRLPPARDGGRRVSRAEEVPATAAEVMALAGRLLADGVELVVMESTSDYWRIWFYLLEAAGLRVQLVNSRQARQLAGRPKTDRLDAQWIARLAEMGLLRPSFVPPPEIRALRDLARTRLQLVRDRTREWQRLEKLLEGALARLSSVVSSLAKVASARLILEAIAGGETSPQALVALAHGNVAGGRAAVAAALEGMRLAGHHPMLIRLHLDRIAFLDRSAAALEDEIAAALDAVPAAWGITAAGEPSPDPGPGAAALDAAARLAEIPGITPDLARAIIAETGLDMSRFPTAAHLVSWAGLAPAARQSGPRSRKPKKGQGNDYLKGYCTQAATGAAKTATFLGERYRRLHKRTGGLRARCAVGRSILVIVWHLLADPSARYADLGPGWHARKTGRDRKIRTHLRQLEALGLQVTITPAA

SEQ ID NO: 444180 - protein, 312 aa, unidentified
MPEESQVDYVGVDIAEARLDYCIAEKNEGSCDNGPEGRQQLIKRLKRLPHPRVICEASGGYEKVVVAELLAAGLEVCVVQPGRVRAFAYAEGLLAKTDRIDARLLRRFGQKVALRLAEPADPAAAMLRELLEHRRQLTQQLSEVEGRLRLAGPTLAKLLHQQRGFLRQQIDTVEKMIGEHIDHDPDLRQKAERLQEMKGVGPVLAATLLAYVPELGKIDSAKLSALIGVAPHPQDSGTTLKPRHVRGGRAQVRHVLYMAAIAAARFNPLLAAFYQRLKARGKPAKVCLVAVMRKMLCVLNRLIENPNFALAQ

SEQ ID NO: 444181 - protein, 352 aa, unidentified
MDRYVGLDAHAETCTLAVMGPTGKRLTSRVVETNGHALVEAMRGIPGTIHLCLEEGTQSTWLYEILEPQVSEIVVAVPEESKGAKDDLRDAWARADELRTGRIRTRVYKAPKHLTALRSSAVAYRMATQDVVRVKNRLKAVFRSRGILAESDVYLPRSRTKWLKQLPAGHRELAEWLGRELDTLAPLREEAEERLLKEAKTHPITRKLGTAPGMGPVRTAQLVAIVATPHRFRTSRQFWSYCGLSVVTRSSSDWVRDKHGQWVRAEVQQTRGLSRKRQPVLKAIFKGAATTVLTQLVGHPLHADYQRRLQAGIKPNLAKLTLARRIAAIVLSMWKHEEVYDPARLKVATDKS

SEQ ID NO: 444182 - protein, 342 aa, unidentified
MKQYVALDCSLKQISVCVMTEQRRIVKEAVIAADAGSIAEFVWSQVPDAELIGLESGPSSAWLFHALRAEGLPVVVIDARHARAVLSLRINKTDRNDAVGLAELLVSGWYKPVTVKSLESHRVRTVLTNRALLVGIRQDLENQVRSVLKTFGFVLGKGRGSFADRVSEILAGKRLLLRLVRPLLKAWAAIREQLLSVDKEALAIAAQDDTCRRLMSVPGVGAITALAFKTTIDNPWRFSSSDKVGAYLGLTPRRYASGETDRAGRISKCGDGLVRTYLVEAAGVLLTRSKATSDLKDWGLRLAKRASAAKARVGVARKLSVILLRLWTDNSVFQPRVNVTAG

SEQ ID NO: 444183 - protein, 397 aa, unidentified
MYIVGIDIAKRKHEAAVIDGEGTVIIKPFSFTNNYSGYNRLLAMLTKAKLPLDEVSFAMEATGHYWLALFTRLQKEGFRVQVINPVQTNSIRSFYIRQVKTDPRDALLIAEVIRFGHFSESTLHPENIYELRELCRGRHAIVSMQADVKRKVVALLDQVFPEYETAFTNLFGDTSMAILQTCPTPKELSETPLEELCHLIEVSSHKRFRMAKAQELQALARNSFGFAMAGDVFSTMIRLYAKHLDFLKQQVREMDRKIAEIMETLDTPITTITGIGPTLGAYILSEIGDISRFSSAAKLAAYAGIDPTMRQSGEYNGVRNRMSKRGSPYLRHAIWLAASSAVLHDPALKLYFQKKRDEGKPYMASVGHACRKMVSIIYAVMRDNKAYTPCIPNEISA

SEQ ID NO: 444184 - protein, 471 aa, unidentified
MTSYERVNPFATVLPLRTLSHTMEETLMGRKSKQQRLKIVHPNCAGIDIGSREHWVAVDPDGCEEPVRCFSAFTDALYALADWLESLGVEIVAMEATGVYWIALFEVLDARGFDVHLVNSRATRQVSGRKSDVLDCQWIRQLMSYGLLKGAFRPADAVCQLRSLVRQRDNKVKEQSRCIAHMQKALTQMNIQLDHVVSDLMGKTGTAILRAIVAGERDPHKLATLRDRRLRADAETVARSLRGNWREEHLFALAQALAHYDFLSQQIRDCDQAIEQQLAALPSLADQPPEPVKPLRNPHRSAAQQAALHQALCHVMGVDLTAIPTIGINTALVLASEIGPDLSRFPSAAHFCSWLDLAPPTRISGGKPLPGRAPRVSNRAGQALRQAASNARNNQSFIGASHRARLARMDGASAVKATAHQLARLIYAMMSKGQPYVEQGMGAFEARSQDRQIRALQRKARKLGLHLVEAA

SEQ ID NO: 444185 - protein, 353 aa, unidentified
MDEQSIQNEVILGVDTHLDVNVGAVISHTGKLLGTLATSTSAKGYIELLTWARSFGCVRRAGVEGTGTYGAGLARVLRGQGIDVFEVNRPDRSKRRLKGKSDPTDAENAARSVLSGEAAAISKTQNGAAEVMRTISVARRSAVKAKTQAINQLRAILVSAPQEVRERLLKAKADQCVAACARLRQLGETPLLEALTKTLRLLAKRWLTLTAELKELDGALEQLTTQFAPHLREQFGVGPQTAAMLIAVAGDNPERLRSEAALAALCGVNPLPASSGKTIRHRLNRGGDRQANNALWTIAMVRMRSEPRTRAYVQRRSTEGMSNKEIHRCLKRYLIRELYPCILADLRATAVTS

SEQ ID NO: 444186 - protein, 482 aa, unidentified
MKKSNIYQDRSQELSKLFEQAGSNSNIMCIPIDYAKKDHVVMFCNGYGDILRKPFNVKNTPEGVKYLIDQTTRSCQHRHIKKEYVFFGGEDVNSYAQNFVHALQAKGWLVASVNAHDAKIQRESIQASTDQLDLMGIATMLLNRRANCNPVQSGVYRNLRTIVRHRRKLVKMKTEVRNRIHTVVDQLFPGFLSEKKSRITPFSPSSLYLMQDRFSAHQIRRRKRSTLVKRLKQHGTKSPEETAAKLQTYAGQVLAPADEYTSTLQVSLSSHVNHLRCLIDSAEMLEREMAILLAQTTGAFLTSVKGIGIVLASGVTAEIGDPVSQKSANNIVSYAGVVPRVKQSGGAEGQPRIGHVSKRSNHILKDQVVQSAHHIGRYGPKDLLADHKRREANGQHADFGMGRRFVRMALCLVRTEQIYLPPHLRKAETDPRERGEYYLSLWPYLHNKWDKLGASKVAFSKDRPLGQWRHIVQELYGIKLKL

SEQ ID NO: 444187 - protein, 399 aa, unidentified
MLTSQSLQLRVGVDVGTRCHSIAVGLTDGSLLDEFEISHTAAGFEDFFARIEGHARRYPSAIAVAMEGYNGHVRPLDSLVKVRGWRLFNVNNLKLARFKEIFPAAAKSDRIDSAKTLELFQLRDHLPMARDVLQEVMATPAENDILKRLSRRRRRLVNERTRVINSLQADLQAVAPGLLQITRDVGNRWFLSFLTCRKAIRKLARLRRASLLKLPAIGATYADRIQAWQQSACFGPDARLVGDMIRQDAERILELNRQIKALEDEMARIAATSAIACQLASIPGYGSVCSAELAGEIGTIVRFRSEASLALYLGMAILDNSSGKFRGSKAPKHVNTRAKAAMMAAVDHHRKRVPQSQRYYEKKRAEGKKHNQAIRALGRHLCRVIFKMLSQERPYRIDP

SEQ ID NO: 444188 - protein, 355 aa, unidentified
MIIIGVDFHPEFQQIAWVDTDSGEFQEQRLRHREEAETFYRELAGQVVKVRVGMEASGHARWFERLLGELQFELWIGDAAEIRTKRVRKQKTDRQDAQLILQLLLENRFPRIWVPSWENRDLRQLLWHRHRMVQARTRIMNQLQAVALNEGLRCKKRLWRERGRQQLESFHLAPWASRRRRDLLELMDRLNPTIAELTQTIEQEVEKCPEARRLMTHPGVGALTALAFVLIIGKAERFGCGKQVASYLGLVPLEESSGNRRRLGHITKQGSSMMRFLLVEAAQVTVRSLPEWRSKYFHLMLRRGRKTAKVAMARRLAIRLYWMWRRHGITSSSSSSVRTRESPDIAMVCGRTSSY

SEQ ID NO: 444189 - protein, 410 aa, unidentified
MVERFVGIDVALREHRIAVLDRDGEAVGQSFTIAASTDGVATLLRTLGARGATAAQTLIGLEASGHLWENLEAALVGAGYRVIVLNPLQTRRYRDVVRRKAKTDDIDAHVIAGLLRSGAAQASYVPDEQIQSLRELARLRARLMADRQDYLRQLVAQLDVVLPEHRTVLGDLLTARARGILAQFPTAQHLAQANPRAIRRAAEDAGARGFSLNDATVVRDSARRSLYSGKAAAARAHVVRTLVSQLERLTSAIDEVDRAATALLPPSEPGTGPSDAELLQTIPGIGPQTAATLLGELGAFTRFTDARALVAYVGFYPVINESGDRAATPRLSPVGSRIARHSLYLAAVNAVRRSAEWRTIYLRKKAQGKTAKQALVVVAVKLLHALYAMLKHRQPYNPSRLLVAPATIGS

SEQ ID NO: 444190 - protein, 325 aa, unidentified
MNTKVIVGVDIAKNSFDVCVSGCLGTYHFENSAKGFEELLNLVSSHKISSFVVEATGNYHRALVEVLEFHDFRVAVVNPRLIKNFSRALGLRSKTDVQDARLICEYGMRMEPPIREQPDKELLKLKSMVSRRRQLVANRTMETNRLEAQTEQEIKTDIRRHIQWLTLEIKRIDEVLSGRIGKIPKLKEKVELLKEVKGIGPVVMAALLTQVPELGSLDRRKISALIGLCPYSRDSGNFSGRRMIWGGRSDIRSMLYMAVLSAVRFNPEIKAFYENLIARGKVFKVAMTACMRKLITIINAIIRDGEKKQSSVLPNSDRNVSLVEK

SEQ ID NO: 444191 - protein, 350 aa, unidentified
MQTQRKQLEFSGQNFYCGIDTHKRNWTVTIQTDELVLKTFVQDPEPSILYHYLRNHYPGGNYIAGYEAGYFGYCIQRNFESLGMKCVILHAGDIPVSQKDKEQKRDARDSRKIANILKNNDMVPIWVPPVSLEQDRQLLRTREKLTTDQTRVKNQIKAALQINGIRYPDSFKSKASHWSGRFIQWVNDIQLSEPSATEAIRSKIRHLLFIRGEMLNLLRQIRALSRTDRYNRLYNKLIQLSGIGMIMGMTILTETGDIRRFKRPDNYRAFLGVVPRAHDSGDKEHPGRMTKRANSHLRYLLIETTWIAIRSNPYYLNIYQQYRKRMKTNVALVRTTGKLANQIYFCLKNE

SEQ ID NO: 444192 - protein, 381 aa, unidentified
MQSNHTVPTILVAIELSTATWLVAVRVPGSEKPHLHRVDGGDTAALLALIASVRARAAHQLNAEIGIVCCFEAGRDGFWLHRLLTTRGITNYVLEPTSVLVNRRARRAKTDRLDAEGMLRVLAAYLRGDHQVCSMVRVPTPDEEDAKRMHRARENLVQERLRIENRIEALLFTQGIRKRPSLRSWERDLAILRTGDGREIPRHLLAELDRLRRRLVMTLELIREVEAERDQATKTTPQNQACRKIAALCRIRGISDNFAAVLTREVFYRSFDNRRQIASYVGITPMPYQSGGIDRDRRISRAGNPRARTTMIQLAWLWLRYQPGSELARWFRERVGTLAGRTRRIAIVAMARKLLIALWRYTESGVIPAGAEIRAETPVAA

SEQ ID NO: 444193 - protein, 353 aa, unidentified
MRTYYVGMDVHLASIVMVVLNGAGKVVMELVIETGAERVRGFLKQLRGKVYVTFEEGTQANWLHDVVRPMVTEVVVCDPRHNKLLQSGNKNDRVDAKKLAELLRNGALKKVYHGDNGVRTLKELVRTYDCLVSDSTRVMNRLKAIFRGRAIACAGHEIYRQDRRERWLEKLGEPGAKQRAGFLYEQLAALKPLRRKAKLAMVKEVRRQTAYLWLMSVPKLGSVSVAQLIAVVGTPHRFRSKQQFWTYVGLAVVTRSTADHEVVAGVLRRSRRPVSTRGLNRNHNHLLKRVFKNAATSACHSGPFKAGYDARVARGMAPSLARLTIARQLAATTLAIWKRGEQFDPERKKQQAA

SEQ ID NO: 444194 - protein, 434 aa, unidentified
MKVTRGMRRRSAKLERRARLVTPDTLIAGIDLAEKESMVMFVRARDKVRLGRLRIPTTAAGVRTLARRAGDLQQRHQLPCLVLGMEPCSQYWKILAKGAIGIGLPYAVVQSFVVAHARELDDLTRDKTDPRDAALIADLVADLRFTEVQLETGVWAELRLLAEARDQRSVERRSAQQEQRALLQLVWPALLEQVTDLSGSHLQATLRLGLSPLEIAGLTLDEFARRLRDEHRDRRFMRWMAARIRTAAGAAADSDELSAAVLRIQLAAERIKAAQRAVEILDRRMQDAFERTGLGWMRGLIHGLGDVNLVNLLALTGDPGRFDDARCLPKLAGSNPTERSSGQSHAPGGIHRRGRKVLRLVAYQAAIGLVQHHADFRQRFLALTQRDHHRLEKKQAYIAVANKLLRTLWAMATSGRAYDCQIALGIVRSEDQAA

SEQ ID NO: 444195 - protein, 357 aa, unidentified
MNRDKYVGMDVDQATIVAHVTDGDGKFLMETFLKTKAEGIRQFLRSLEGRVHVAFEEGQQASWLYDIIRPLVTETIVCDARRNKTIGSKGDRIDARKICQWLRLGELRAVYHGQHGRELKELVHCYSKLVGDTTRTMNRLKSLFRGQGIVCRGQGVYNWQRQEEWKSLLKSEALRTRADLLYKQLEVLKALREDAKKAMLEEARRQTSNKLLLGVPGIGAVRAAMMMGIVGTPHRFRTKRQYWGYCGFGVVTHMSGEYEIKDGRRERRKKPLQTRGLNDNFNRRMKAVYKGAAVTAISAEPFKSYYQRMIDNKMRSEMAILTVARKIAAISLAIWKKGDTFQPGLVNQAQSAGDEKG

SEQ ID NO: 444196 - protein, 355 aa, unidentified
MRQEKYIGMDVHQATISVAVMDAGGKLIMECLLETQAATIVEFVRGLHGTLSLTFEEGTSAAWLHDLLQPHVSRLVVCDPRKNALLKDGSKSDRIDARKLAELLRTNQLKPVYHEEHGIRALKELGRSYLTITKDVTRVMNRIKALYRSWGIPCGGTRVYAPRHRAEWLAKIVEPGVRVRAEHLYQQLDSRQPLRLQARRELLRESSQHPAVKLLRQIPSIGPIRAALLVALLQTPHRFRTKRQLWAYSGFAVETHDSGEYRYVRGKLQRNRERITVRGLNHNHNKDVKNLFKSAAISASTRPGPLHDCYVARVEKGMRPTMARLTLARKIAAITLTIWKKGVSFDPKHLHRQAA

SEQ ID NO: 444197 - protein, 340 aa, unidentified
MNQVVTIGLDIAKSVFQLHGVDAVGAVLLRKRLPRSRMLAFFEKQAPCLIGIEACGSAHYWGRELSRLGHEVRLIPPSYVKPYVKRQKNDAADAEAICEAVARPSMRFVPIKAPEQQSMMVAHRTRSILTRQRTQLSNAIRGHMSEFGLVAPVGRNGLESLIRVISDAADERVPSAARTSLLMLVTQLRLVNEQILESDRCIIASARSTEVGRRLMGVPGVGPVLASALVATIADPKSFSSGRNLAAWIGLVPRQNSSGGKERLSGITKQGDRYLRQLLVVGAVAVIRYAQRNGARRPWLVQLLARRTPKVAAVALANKNARVVWAIMTSGERYREPLAV

SEQ ID NO: 444198 - protein, 327 aa, unidentified
MTPAILGIDIAKETLDVALKIEQRLLHKQFENTSSGYQHLTTWLKKQGSTQLHACLEATGQYGEGAADFLFSQGFQVSVVNPARIKHYGNSKLRRNKTDKADAELIAEFCEKEKPALWTPPPASFKDLQALVRHLDDLLETRLQETNRLGSGVHTKAVVESLTALLAFLDQQIKQCKQTIQDHIDSFPELRRMQNLLVTIPGIGRLTAARLLGEIRNILDFEDARQLAAYAGLTPRNFLSGTSVHKKSRLSKTGNAHLRKALYMSAISAKHHNPIVSQFCTRLSQNGLRPMEVIGAAMRKLLHLVFGILKSGRPFDPNFLANQQVLS

SEQ ID NO: 444199 - protein, 337 aa, unidentified
MKFSGIDLHSNNSVVVVSDEEDRIVYQKRLPNNLEQIVAALAPYREELAGVVVESTYNWYFLVDGLMDAGYRVHLANTTAIKKYEGLKYSGDFADAAYLAQLLRLGLLPEGYIYPREERAGRDLGRKRMQLVRCQTAQILAIENILARQTGGRMSSNQVKRLTAEQIEGLGFVPDVALALEANRAVSETLQQQIEALEKRLQQRVKLRPEYRLLKTVPGIGETLATTIMLETGTITRFARVGNFSSYSRCVDSRRESNGKKKGEGNAKNGNKYLAWAFVEAANFALRYCPEAKRFYERKKRRSNRIVALKATAHKLARACYHMLREQKPFDVQRCFM

SEQ ID NO: 444200 - protein, 317 aa, unidentified
MKDITQTPILGIDVSRDHLDGYFLPDGKRFRLPNTEAGHARLIELLALRPDVVVCFEATGGQEWRLWAALDTVGIAPRQLPPAQIKAFAASRGTRAKTDRIDAELIARFLDFRPDAGRLLPHKKLRFLRALCAKRGQLVEMRKRLLAQTKARMKNGSGGPFESMDGELKALLGIQIADLQTQIEAAIAADPSMANTACILRSIIGVGPVTSWMLIAELPELGQISGEQAAALTGLAPIAHDSGAMRGKRAIGGGRRNLRHVLFQAALVASHHNPRLTAFADRLRKRGKPHKVVIIAVARKLIIIANALCKSRQIWAD

SEQ ID NO: 444201 - protein, 357 aa, unidentified
MAKTSTGRPLLTIGLDMSDRTCEACVLDAASGDVIERFGAEATRSGLERRFGGRGRARVVIEAGGHSPWASRTLVALGHEVIVANPRKVRLISSSDHKTDHVDAETLARLGRVDARLLHPIEHRSAEAQAHLAILRARDQLVGLRTALINHVRGAVKSFGYRAPSTSAEAFAGKARDSIPPELSKALLPLLETIGGLTGSIREYDRQVEALCETAYPQTSMLRAVKGVGPLTSLAFVLTLGSPQRFRRSRQVGAYLGLRPRLCQSGDANPQLPITKAGDAFLRRLLVSSAQYILGPFGPDCALRRIGLGLMGTGGAGAKKRAVVAVARRLAVLLHSLWKTAELYDPMRHAPAAALTS

SEQ ID NO: 444202 - protein, 369 aa, unidentified
MTDITFFVGLDVHKKTIAVALVDGAAGAEMRFYGTIRNTPDAVRTLCKKLSKDRQPLHFCYEAGPCGYGVQRQLTRLGHRCDVVAPALIPRKAGDRVKTDRRDAMMLAQTLRAGQLTAVWIPDEAHEAMRDLVRLRAQAVRDLRKTRQQLLSFLLRHGLSSPYGHWTRMHRRWLGELVFAHPAQHLAHEEMLARIERAEALCDRLKQAILELVPQWSLAPVVQAIQALRGVSLIVAAVIVAEVGCFARFDSPRPLMAYLGLNPSEHSSGATIRRGSITKIGNTLARTCLVEAAWTYRFPARVTQIIRDRLKGLPEPIRNVAWKAQVRLSARYRKLIAAGKPAPKVVVAIARELVGFIWAIARMVEPRFA

SEQ ID NO: 444203 - protein, 343 aa, unidentified
MESIYYIGLDVHKKTIAYCIKTVRGEIVRQGVVGAQRKALQQWLKEIPGAWMGALEATIFTGWIYDFLKPHARELKVAHPEMLKAITAAKKKNDRADAEKLADLLRVNLLPECTMMSEELRELRRILRYRNMVVRTATQMKNKMSGLLMEVGAIYDKQRLHGRKYFGELLERVEDMPDSVKELLQLSRSNLELFTAIQKKLVKTLRENDLIRERVQCLMSIAGIGEITALTWVLEIGDPARFHSSREAISYCGLCSAQRESAGKEQRGPLSKKRNKYLQTALIEAAKLAPYWNPQLAALHEKELTKGNRNRATLAIARKLVEYMLAVDRRGTPFVVEAPSQVA

SEQ ID NO: 444204 - protein, 340 aa, unidentified
MSLYGGIDLHANNSVIVLLNEQDEVIYQKRLPNDLTMILGQLAPYHAELRGLVVESTYNWYWLVDGLMEASYRVHLANPAAIQQYSGLKYTNDHSEARWLAHLLHLGVLPEGYIYPKTERAVRDLLRKRTHLVRQHTANILSVQNILARNTGARFSGKRMQALTKQGLTTLLAEETQVLAVASRLVVLDCLRQQIKTLEKSVHKRLHHTPSYEQLLTVQGIGTILAQTITLETGAISRFPTVGHYASYCRCVDSTKLSNGKRKGTGNVKNGHPYLAWAYMEAAQFALRFQPAAQRFYQRKLAKSRNNAILARKAVAHKLVRACYYIRRDLVPFEETKAFG

SEQ ID NO: 444205 - protein, 376 aa, unidentified
MKNVRFVGLDVHAETIAVAVAESGGEVRSLGVIPNRPESVGRLIRKLGKPEQLRVCYEAGPTGYPLYWQLTQLGVRCEVVAPTLVPVKAGDRVKTDRRDAERLARCYRAGDLTAVWVPDAAHEALRDLVRAREAAKADQLRARHRLSKFLLRHGRRAENGVRAWTCRYWDWVKSRVHFEQPAQTATFIDYMHEVEHAAARIERLEQAIDTAVESVPPRMRAVIQALQALRGVAQVSAVTMVAELGQISRFARARQLMGYSGAVSREHSSGRRIRRGAISKAGNAHLRRVVIEAAWSYRYRPSIGKALAARQRGQSEAVKEMAWKAQHRLFYRYRKLMGAGKTKQQVVTAIGRELLGFIWAIGVHVESKSQPRLAAA

SEQ ID NO: 444206 - protein, 309 aa, unidentified
MEHFVGIDVSKDRLDVHLRPNGESFAVARDGEALARLVERLRTLAPALVVMEATGGYESVVASAIGAAHLPLAVVNPRQIRDFARATGRLAKTDRIDAAVIAHFAEAIRPPARPIAGPEAQALGELVARRRQVIEMIVAETNRRRMAGQRRVIRAIERHLALLQVELCELEGDIDGAIRSSPAWQADADLLASVPGIGPVTLRTLIAELPELGRLTRRKIAALVGVAPINRDSGTLRGRRTIAGGRSAVRAALFMAALVASKKNPVIAPYYAKLRAVGKTGKQALTACIRKLIVILNAILRDRKPWQPA

SEQ ID NO: 444207 - protein, 421 aa, unidentified
MTPPNEVVRAGIDTHTDTHTIALLDERGRPLGAETFTADPDGYDRLIGMPPGPGRVAAVGVEGTNSFGAALARRLTAAGYEVREVPRPRRSVRRRDGKSDPLDAVAAARSVMAGDGTSLPKSSDGWVEALRHLNAQRSQLVSAMTAIPDSTNGLLAAAPEPIRERYRGLRSETRMNRLAECRPAGGLVERSVLAALKSAAKAWKALKRQAGLLEERMRLILEEHARPLLDMYCAGAVIAATLAIVAGDNPERIRSEAAFAKLCGVCPIPASSGRTNRHRLNKGGNRQGNMALHRIAIVRLRYHKPTRDYMAKKTREGKGKLEIIRCVKRFIAREAYRALISIRNGEVGRGTPAERGAKLRELRVSRNITQQQIGEALCVPSSRISEIERGARDLPELEQRAIQWIHSTTNPKQHTQTLDNV

SEQ ID NO: 444208 - protein, 378 aa, unidentified
MIVIGADTHKYTHALAAVDAGTGRERGARQVKAEEQGYLAAVRWGRGLDDERVWAIEDCRHVSRGFEQALIAAGERVVRVAPHRMGASRRGEREPGKSDQIDALAIARAVVKDGVERFPAAYLDRAAIEIRLLSDHRKDLVAERTRVQNRLRWHLLELCPELERSLGRGSLAHPRQLARVDRRLRRLPARARVRIAREQVAQLRDLTRRVHALERELLVLITAHRPQLLAETGCGALTAALLIGRTAGAERFPSDASFARQTGTAPIPCSSGQRHRHRLDRGGDRQLNHALHIIAITRARHDPATKAYLARKEAEGKGKKGALRCLKRHLARRFHYLLSLPAETPQRDPSNGAVHNAAPRPGDTRIVAAAPALMPCVR

SEQ ID NO: 444209 - protein, 321 aa, unidentified
MNKDRKIYGIDISKDVFDVFSNESGHDQFKNDEKGFKALTKSLKKEALVVMEATGYYHYRLAQYLHKKGVVVSVVNPLSVKRFIQMKLAKVKTDKSDAKAICEYGQMNEVPLYSALTDVQSECLQLFRLLDNYLKKRTATKNKLHGEEALGIPSKFVYRSLKRDLKHLNNEVTGLEDRLLELVKQDQQAQLTLLKSIPGMGVKTALFLIVITDGFKKFDNASQLCSYVGITPTIRESGSSVRGRSRISKVGNKKLRNLLFLCAFSACKHNKACREIYERIVNKGKSKKLALIAVANKLLKQAFAIAKSGKPYDENFVSRLS

SEQ ID NO: 444210 - protein, 349 aa, unidentified
MKIIGCDFHPSYQQIVVWDQVSGEVVEKALSHERKEEVRAFYAGLQGPVRVGIEASGQSQWFEQMLGELGHEVRIGDAAKIRAATDRKQKTDRRDAELLVKLLEEGRFPQIWVPTPAERDVRQLLLHRHKLVRMRTQVKNQLQALALNQGLQRKGKLWSVAGRKQLEALPLLPWASRRRAELLGLLDQLEKSLEELDRATTEQANTRREVRRLMTHPGVGPVTALAFVLTLGPPQRFRRGKQVASYFGLIPSEYSSGEGKQRLGHISKQGSSFVRGLLVEAAQSAVRHEPQLRREYQRLAQRRCRALAKVAMARKLAVRLYWMLREEVDYAQLIQGSRAGQPESFRGRG

SEQ ID NO: 444211 - protein, 318 aa, unidentified
MKKAFFCGVDVSKDKIDVCFLTSITSEKAKFETLPNNYDLIKVYFNSFKNDEILVVFEATSNYHLALQKALSDLNIRYNVTNPYKASLFLKHLSTIKTDVNDSYGLAVYARTFKSEILPDRYNAEYLQIKSYNSTLNLLQKLNTQLKNFKQSQKFVKNSVIDDVIKNLIKEIAKLQSMLQKLAFDLVKKTIPETEEIIKSNKGFGIDLALNLFPQLHFNRDKSEKQFISFLGLSPRVFQSGSSVYKSQKINKMGSSNIRRILFMSALCAVRFNEKFKARYDRLIANGKKKMVAIVAVMCAIVRYLKSLFPFNAEIKAI

SEQ ID NO: 444212 - protein, 341 aa, unidentified
MEKVSIVGLDLDKNIIQAHGARFDGSVLFRRKISSKKLLGFLSELDPCIVAMEACAGSHHWAREIAKLGHRVRLIAPIYVKPFVKRQKNDAADAEAICEAAMRPTMRFVAVKSEEKQAAATVFKVRDLLVRQKTQIINALRGLMAEFGITAPQGPSHVGILITHVEDDNSSLTEAARAPCLALVVTLRALIDKIRELDLEIGRRARQDDVAKRLMSIPGIGPVIATALEALAPPAETFTRGRDFSAWMGLTPRQHSSGGKARLGKTSKMGQRDLRRLLIIGASAVVRWVSKRGAVEGSWLSRMIGKKPPMLITVALANRMGRIAWALMTNGGRYEEKRLAA

SEQ ID NO: 444213 - protein, 468 aa, unidentified
MAKVKQSAFDRLRLGARLNRKERRAVEQRLSAADPGLEIVNRDAAGIDVGNESHYVAVPGGSWTAALVEMAQWLVRCGIRTVVMQSTGVYWIAVHDVLQKHGLEVYLVDARGTKNVPGRKSDVQECQWLMRLHTYGLLRACFLPAPEIQRVRTVWRLRDQHVRDSSRCIQHMQKCLIAMNMQLHNALSNIGGTSGQAIIRALLAGQRDPKTLSSLRDRRCMASEEEIVHSLQGVWKPDVLFELQQAVDAYDFYRQQMAKCDEQLKQYLALLPARRVEAVDPPSTDMTKKSRKPHKPQGNEPLFDLEAELERILSVNATSIDGINVMTVQTVLAEVGPDLSAWKTEAHWSSWLNLAPKRDVSGGRVIRHVREHRTNRAGNAFRMAAQALIHAHSYLGARCRYLRAKLGGHKAIKAMARILACLYYRLVMKGQKWVDQGMEEFNRRSEQRELDLLQRKAHKHGMQLVPAA

SEQ ID NO: 444214 - protein, 457 aa, unidentified
MKKSGNKGGSRKIVKLESLKQINLNAAGLDIADEEIWAAIPEGRQDMSVRQFATFTADLHALADWLEQAQVDTVAMESTGVYWIPAFEVLEARGFEVLIVNARHIKNVPGKKTDIIDCQWIQQLHTYGLLRGSFIPGAEIRSLRAYIRHRDSLIRHRSAHIQHIQKALQLMNLKLTNVLSDITGFTGMSIIRAILAGERDPHKLAQFRHGQCAKSEEEIAKSLHGNYKPEYLFSLRQMVEMYDFYNQQIADCDTQIEAQFAVMKPQVDLDTKPLSPAKHSGWRSRNEPAFDLRTALYKSVGVDLTSIDGIHVLTAQTVLSEIGLDMSRWPTVKHFTSWLGLCPHNDVSGGKVQKSYAKKTKNRTAQALRNAARSVSRSQSSLGAYYRRMRARKGVMQANVATAHKMARIIYFMLKHKSEYHDPGIEVYEANWIAQRVKRLQHQATRLGMKLEPIPAN

SEQ ID NO: 444215 - protein, 456 aa, unidentified
MRFGLTRTLRCRPIRGLFYKDCGGPKPSYSQTTRGVNMEAESIDYAAWIGLDWGSQEHAICLKPADSETVEHYTLEQKPQALHGWFMNLIARFGGRKVAIAIEQTRGAVIHFLLCLACVHIFTIHPKSLKNYRDAIHPSGAKDDPTDAELLLQFLTLHQHRLKPWLPDRSEVRLLVRLVEFRRKMVGKRVRLTNELTQVLKEYFPAALDCAGDLDKVMACDFLAKWPTLEKLQESQPETIRKFYQEHGSRRRNVIEGRLKQIRSALPLTTDAPVIEPSVFLVQSIAPQLRSVIDAIAQFDRRINEVFEKHPDAQIFSSFPGAGAALAPRLLAAMGSDRSRFGSSQEVAEYSGIAPVTERSGKSKWVHRRFACAHFVKQSFHEFAAQSIMFCDWARCYYDQKKREGKSHHSAIRALAYRWIRIIYRCWKDRILYDEGKYVKALHQRKPDWAKFLRES

SEQ ID NO: 444216 - protein, 364 aa, unidentified
MTEHITHVAFDMHQDSITAAWLRPGATTPEVRKIPNEAKPLRRLVEQVLKAGPARACYEAGPLGYEPQRQLAAWGLPCEVIAPSLIPRRPGVRIKTDKRDAKKLVGLYRAGELTAIRVPTPAEENARELVRCREVAGEDALRAQHRLRKFLLRHGLRCPAGRAGSQAWWRWVQALRLSDPPAQRTLDEYLLAATTGRARWKALDPEVAALAAGEPWVRPVGWLRCFRGIDTLTAATLVLEVFDFRRFGTPRPFMSFVGLVPSEASSGVRLRRGSITKTGNAHLRRVLVEAAWHYQHRPGPSALIRARRAGQPPAVVAVGEQAEVRLHRRFARLVARGKLRTVAATAVARELCGFLWAAMMAAPA

SEQ ID NO: 444217 - protein, 460 aa, unidentified
MYQELLPLQERLAEELREIVVPQTLPGMDPEKLLNAYLGQLTLYVGVDVSNETLTAVIIDDAGEILDSLVGFANNPQGFERFKRWVEEVRARHKARIVAVGGECTGVYYEEFWRYLQQRTNYARVLYNARTTEHMGEVLSTRVRDDEIDAYLVAEQLRLGSTPESQPHQDLELLEARSCSRFARNIAKEINRKKNQTKSLIRTFNPAFYRIFPGNKFWSAPAQALLRKYIFPEDFIAAGVEEIAAELQAAGRGKLGRPEAQALLEECQTCYASPGQRHAVRQRIIDLTEDIARLKQRKSFYLKSGYRRIENRPETPLVRAVCGAGISNTLAIVSEIGDAHRFPDGEHLASFLGITTSKHISGTTLFSSKHITKQGSTNARFAVINLSDHLRRKVPKYIAIYERIKNRKPPRKGHYVALVAVGRDFVTNVLYDMLTNQRPFFIEVEDYKRYRQQQQRKAAA

SEQ ID NO: 444218 - protein, 363 aa, unidentified
MPVKAMSLVGLDVHARQTHAAVLVPETGELTVSKLRMEPVEVVGFLEGLGGVVRAVYEAGPTGFGLARAARERGVEVRVVAPGSIPKGSGDRVKTDRRDAIRLARLLAAGELSFAFVPSFEDEHFRDLVRAIEDVRGDLMRARHRLGKFLLRRGERYPGPGAGWTAKHLGWLRALRFEDACSQATFVDYLTSVELLMGRRTGLISALEAQIPDCTHAPVIARLRCFRGVDTLTAAGVCAEVGDFVRFAKPTLLSGFLGVVPSERTSDTKRRQGSITKAGPPHARRLLVEAAHHYRHRPFIGESVARRQAGADPRVIEIAWRAQRRLYGRWGHLHRERRKPAGVVAIACARELAAFLWEAATLD

SEQ ID NO: 444219 - protein, 356 aa, unidentified
MHHGVPPVSVIIQSVINMYKPDQETVVGHAGCDVSAAWVDAVRRHHQQQQARRFDNTATGHQALIRWLRQGGLPCRVVVEASGIYSLDLALALHEAEHIEVMVANPRAMKDYRRASMQRSKTDRVDAAVICDYAVRMPFLPWQAPPPAVLDLRQIARRIEALVVERTREKNRWRVACATATTCPVVLNDIEVNLRHLERRLAELEKQAMKVIGTSKPLKRAFAHLVSVRGIARRSAISLLAEVLLIPEGLSVRQWVAWAGLDVRQYTSGKSVERVRRISHVGNVHLRRALYMPALVAIRWEPSVGAFYEKLISKGKKPLVAIVAVMRKLLHAIYGMLKYDTDFEGEKFYKMGPVGA

SEQ ID NO: 444220 - protein, 457 aa, unidentified
MSRKHIKSRKVALPVLNPDAAGIDIGATEIYVAVPPDRDPEPVRRFATFTQDLAGLADWLQQCRIRTVAMESTGVYWIPLMQMLEDRGLETYLVNAKHVKNVPGRKTDVSDCQWLQYLHAVGLLRPSFRPSQDVCALRSLMRHRDSLIELATCHVQHMQKALDQMNLQLHHVISDITGTTGLAIIDAILEGERDVNKLAALRDPRVRASHDTIAKSLVGDYRREHLFTLKQSLALYRQHQQRITDCEKEMQEMMKALETKADVSKPTPVAKDSIKKCKVMKPAIALALHEQAYRILGVDLTTIPGVSVLHVQAVLSELGPDLSKFRSAAAFSSWMGLCPDNNISGGRILSSGTRKVKNRIALALRMAAQSLQNSVSALGDCYRRLRARLGPASAITAVAHKLARIIYHLLTTRKPYDDSVFAKAEETYRKRIESRLNAQAKALGFTLVPSIQGERGE

SEQ ID NO: 444221 - protein, 391 aa, unidentified
MVCVGIDVAKDKHDCCILDSDGMVRADCFTIPNNMDGFKQLLQTIRNCTKKSDKIKVGLEATGHYSYNILGFLLDNDLAVYVMNPLHTNLYRKSLSLRKTKTDCVDARTIATMLLSDVDLKSYTDTAYHNEELKSLTRYRFDKVRERSKLKQSVSRLVTILFPELEKLVPSLHIASVYALLSEYPGAKQISEIHLAKLTNLLATASKGRYGKEKAIQIREAARVSVGSVMPAKSLELKHTIKLIQELTSEINEIEDSIQQIMDELNPPILSVPGMGVNSAAVILAEIGDFSNFSSPDKILAYAGCSPSTYQSGKLTNCYAHMEKRGSRYLRYALYNATKYVCHWNPVFAEYLAKKRAEGKHYNVALSHATKKLVRLIYALQKSGKTYLTAA

SEQ ID NO: 444222 - protein, 395 aa, unidentified
MATTSATGERVVIGMDPHKRSVTIEVMTANEEVLGGGRFGTDAAGFAAMVEYVGQWPERVWAIEGCNGIGRHVAMRLLDEGQGVVDVPPKLSARARVFSTGQGRKTDATDAHSVALVGTRMSGLRPVVADDQLTVLRMLADRRRALGEEHTRKVSQLHALLLELLPGGAKKGLSAAQAKTLLARVRPRDAVGKTRRRLAAELIADLEQNYTRRKAADKELLALLAQTGTSLLDLHGIGPSGAARLLVEVGDITRFPDRNHFASWTGTAPVDASSGDHIRHRLSRGGNRQINRVLHTMAVAQLRNPTEGRSYFDRKKSGKKSSNEAMRCLKRRLSDAVYRVMTDDLAATTRTDPGGQPGNDSVSSATGSQPDTGSSDKPLPGPAKQKPRTPIPAAS

SEQ ID NO: 444223 - protein, 453 aa, unidentified
MQEEKQIKMEVVNPYAAGIDIGSRSHFVAIGQKETDVKEFGVFNEDLFAIAKWLKDGSIKTVAMESTGTYWQALYAVLIAEDFQVILCNGKFTKNIKGKKTDVQDCQWIQKLHSIGLLTGSFLPDLQTEELRTYCRHRAGLIDTAASTSKKMQKYLRLLNLRLDVIVKDICGLTGLKIIEAICNGEKDPLRLAALRNGNCKSSEDEMAKALQTNGRKDYLFTLHQEYKIYNNLQDQIRLCDVEIEKLLNNQINNNDHKKQHYVEPKVHKRINKNTPKNIDLNLIGYQYFEGVDLLEIEGFSHQTLLTLMSEVGLEGIKKFETAKQFASWLRLTPNNKISGGKVLSSKVPKGSNRLKIALRNAANAIGNLKESTPLRDFFNRINFRKGRVSAISATARKLGVIIWNMVVKNIPYKNPEDYLFVDQKRKLAVLQRVQKTINKFDLKTDIQSFVNV

SEQ ID NO: 444224 - protein, 325 aa, unidentified
METQKLCCGIDVSHRTLDVSYQNNLGELFHLRVGNNIKGFEKILEHTGTGYHFVMEATGVYYIRLAFYLHGRGCKLSVVNALSIKRYIQMHLERNKSDKKDAGWICRYAMEQRPAYWEMPDSAYFECKQLYNTIREYAEQIKRFNNQLHSLGLLPVPSKDTMRSLEKVKQQLDKEMTSLEMKLEAMLQKWQPAQLKSVSSIKGIGKRATAMLIVFTQGFKYTHNHRQLISFAGLSPTEYSSGSSIQGKPRIYKRGGKNLRDVLYMCSMNAMKTNPACKALYERLRANGKTGKQALIAVCNKLLKQVFAVVKNNSLYQPNYCSAKV

SEQ ID NO: 444225 - protein, 357 aa, unidentified
MGKSISNLSSVTCVGLDLAKNVFQVHAVDAKGRVVVAKAIKRGHLLAFFRSVPACLVGIEACSSAHHWARELIKLGHRVKLIPPAYVKPYVRRNKNDAADAEAICEAVGRPGMRFVPVRTVENQAELMRHRVREALAGDRTRLLNALRGHLAEIGVIAPQGAQHAYVLKRLAESGADEHGEILVPDGVRASLAPLVRQIDAIDEEIEAIDGALKASVKADDKARRLTTIPGIGPVTASAIVATIPDMSAFANGREFAAFLGLTPRQSSTGGKERLGSITKMGDRYLRKLLVVGACATLSHREGHNDALRVWAKRLLDRKAVAFKFKLTAVALANKVARIVFALLTKGGVYNDMPIVA

SEQ ID NO: 444226 - protein, 360 aa, unidentified
MVATMTYVGLDVHARSTHAAAVDVVSGELRRARFGAGCEEVVGWLGTLPGPVRACYEAGPTGFSLFRAAEAAGVRVEVVAPSKTPRAPGGRVKTDRKDAELLARLLLAGQLAFVAVPSASYEAARHLCRAREQVRFDLMRSRHRVSKLLLLHGRLYPHPNTWTQRHRDWLSRQRFEEPAAELAYLDALAAVEGLVARRQALDERLSRLAVEGEWRSTVARLRCFRGIDTLSAFALTLEIGDFHRFPRPSRLASWLGLVPALDQSGERRVEGAITKTGSGYARRLLVEAAWHYLRQPAVGAALAARQHDQPAQVLRIAWRAQHRLYRLHARLRARGKPANVATIAAARELACFLWAAAVAE

SEQ ID NO: 444227 - protein, 345 aa, unidentified
MTQYKRIGIDTSKAVFTLHGIDQHDRPVLRINLRRAQMIPFLKKLAPTVIALEACGSSHHWGREVTVLGHMVRLVPPQYVKPYVKRGKNDRNDAEAICEAAGRPGMHFVPVKSVTQQAQGMVLKVRETLIGQRTALINTVRGHAAEFGIIAGKGAGQIVPLLSAIEQEAAIPPGAREMFALLGQQIDAIDARIKDIDAKLTAAHKASEVSQRLITIPGVGPVTALTLAVEIDPAMFESGRHLAAWAGLTPKERSTGGKQRMGGISRAGNERLRVLLVSGATSVINAAMRPGSRQMTDWLRALLLRKPRKLVAVALANKMARTVWAMMKSGETYRRPSIAAGAVAA

SEQ ID NO: 444228 - protein, 323 aa, unidentified
MQGKIKPEPDADQAVYVGIDVCKDRLDVHLHPVNERFAVANDAGGWRRLKRRLTAHDVQRVVMEATSKYHRAAHRSLAAAGHAVAVINPLRARLFAEATGQLAKTDGVDAAMLARFGEQLVPSATEPAAESLEELRELVHARAAGVKDQTALRNRLGAALSTVVKAELTQMIQRVAAMNLRIEAAIERLIAADTALARRSELLRSIPGIGPAVANTLIADMSEIGSMTPKQAAALAGLAPYPRESGAKAGQRRIRSGRGIARRALFMAALVAARFNPCLKAFYTRLVEQGKAKKVALIAVARKLIILANTIVSENRHWQPKMS

SEQ ID NO: 444229 - protein, 364 aa, unidentified
MPEHDILRNQTQQKCRLNYRLVSKRIALDTSKAVFTVHAVDQASQPVIRRDVRRAGLLEFFAKQPPTEVVMEACGGSHHWAREISALGHTVKLIPAQYVKPFVKRGKNDRNDAEAICEAAGRPNMSFVPVKSAQRQAELMVLRTRALLVGQRTQLVNALRGNATEFGVVAGKGIEKVDKLLQMIATDTTIPPVARRTLAMLGEEIARYDERLGAIDADLISQHKANPVSVALAKIPGVGPITALTLVSEIEPAHFRSGRHLAAWIGLTPKERSTGGRQIMGGISRAGNERLRSLLVVGATAVIQHAKPGSKTASAWLLKLLERRPRKVAAVALANKMARIAWAMMSTGEAYRGVSQTGRLSQTA

SEQ ID NO: 444230 - protein, 354 aa, unidentified
MRTYYVGMDVHQATIAIVVLNGAGKVVMDLVVKTGAELVRGFLKQLHGRVYVAFEEGTQATWLHDVVRPLVTEVVVCDPRHNKLLGAGNKSDRIDAEKLAQLLRNGSLKAVYHNDRGTRELKELVRVYDCLVSDTTRVMNRLKAIYRGRAISYRGHDLYRWEGRAKWLAKLSEPGARQRAELLYQQLAMLKPLRQQAKQLMIKAARQQPAYRYLVTVPLLGPVSVAQIIAIVSTPHRFRTKRQFWTYVGLAVVTISTADHEVVDGTLRRRRKASATRGLNRNHNHVLKRVFKQAAVGACQRDPFRAAYQARLDQGIAASLARLTIARQLSAITLAVWKSQTEFKRERMNQPATV

SEQ ID NO: 444231 - protein, 343 aa, unidentified
MVTNYIGADVDCKMTELAVERKGKIIMRDRVPTDIKSLGRFLSSISGQKEMVVEEGPMAGWLYRNLRTKVDRFVVCDPRRNKLISGDGEKDDTLDAGDLAVLLRGGYLCEVYHTDDEDRLALKEIVALYHDRVRDAVRQINKLRGYGRGHGIRIPGRIVENPSLRGLWLKDLKPAIAQQLSIIWIGFDAVAQQVRMAKKEMSRRSKAYPIIGFWQDLPGIGLVRAATLFAYLDCPWRFSSPKKLWKYCGIGLKRFTSGSDKLGRPKPGNLRLFRHTNRRLKDAIMGAALNATSQLKNPFADHYRRMIRNGVTASNARHTVARKMLTTMWGMWKTNCRYEESLV

SEQ ID NO: 444232 - protein, 385 aa, unidentified
MQQNDLSRSHIPFKQDTTLATVLEMSSKSWLLAGLVPGITRQPRKQLSIDPERLLAQLHRWRDEAVKAGHAIERIVVALEAGRDGFWLARWLRARGIEAYVIHASSIPVPREHRRAKTDRLDTEMLMRALLGWLRGEPRHCHMVAIPTLAEEDAKRASRERESLVDEKTRLTNRLQSILVQLGLPTVKIKLRKTAKQLADLRTPEGEPIPPHTLAELRRGLERLAVIKAQIHAIEKARLQQLKAEPTKGTHPMMLMLAKVLGVGIDTADRLVHEVLSRNLRDHRAVARYAGLTGSPDESGTKRREQGLAKAGNARVRRVMLQLAWRWLLHQKNSDLAKWYRARTADGRKDTRKIMIVALARKLLIALWRYVHTGEVPGGVVLKAA

SEQ ID NO: 444233 - protein, 355 aa, unidentified
MNDTKFIGLDVHKTSISAAVLDHDGRLVMQSVFATHAAAILGFMHGLRGTLRVTFEEGTHSTWLYDLLWPHVAEVLVCNPRKNALLKSGNKSDQIDARKLAELLRGGMLSAVYHGQTSTLTVKELGRTYTTLTQDTTRVMSRLKALYRSQAIATEGKKLYTRRRQESWLAQLPQVGQRYRAERMFQQLEALQGLRRQARRDLMVECRKHTATALLTSVPFLGPIRAALLLARVQTPFRFRGKRQFWAYCGLALETRSSADYHFVAGELRRSKKPVLIRGLNLNHNHDLKNIFKAAATTASALPGPFRAFYENLLGKGMKPEMARLTLARKIAAISLILWKKGERFDPEQLKSQAA

SEQ ID NO: 444234 - protein, 370 aa, unidentified
MKSIIYVGMDVHKASFTISCFSVTTQETFATVKISPDAKAIKKYLDGVSLSRSEECEFVCGYEAGCLGYTLYHQLTAMNIRCVIMAPTTILRNSKRIKTDRIDAENLARCLAYGGYKSVYIPTAQDEAVRDYLRMRDDHKLMLKKIKQQINAFCLKHNKIYPGNKSKWTQAHVKWLDALEFDGYLQDAFNEYMITYRELADKVERLESQIEQLAELEEYRDKVKKLICIKGIKTHTALSLIVETGDFSRFQSAERYASYIGLVPGEHSSSEDQNRLGITKAGNRHMRMLLIEAAQCYSRGVPAKKSKDLKSRQKGASPEVIAYADKASIRLRRKYIRMELVNKKKANVAKTAVARELACFIWGMMTDNIA

SEQ ID NO: 444235 - protein, 410 aa, unidentified
MAELWCGIDWAEKHHDVAVIDDSGSLLIKERISDDVAGFDRLVELILELRKDGLDGLPVAIETAQGLLVSAIRAAGADVFAINPLSVSRYRDRYSPSRTKSDAADAMVLANILRTDRDNHRRLPDDSEQAQSVKVLARAHQDAIWDRQQITSKARSLLRQYFPAFLETFDDLTTMGAREALRLAPTPAAAVNLRPSTMAAALRKGGRKRGVEVEARRIVAGLRLPHLRQPLQVEIAMGRQAHAYARALTATAENVKSLEAALTSAFEEHPDAPILTSFPGLGVVLGARILGEIGDDRTRFATARGLKAYAGTAPVTRASGTKSTTRLRIVRNKRLNHAAYLWALPLILHSPDARAHYDRRRAIGDTYTAAARNLSNRYIGMLHHCLCSRELYDAAVAFAHCVEPADAMVS

SEQ ID NO: 444236 - protein, 323 aa, unidentified
MSKIVLGIDISKKDFHVTLILENQTTKSKVFKNNPEGFLVLKNWLSKQGATQVHGCMEATSTYGEALAEFLVENGHKVSVVNPSRIKGFAKSELLRTKTDKVDAAVIARFCLAIAPEIWTPLPVEVKELQALLRRLESLTDMYQQEHNRLETATPTVAALIESHLEQLKQLIVEVKQLIHDHFECHPDLKAKRDLLTSIPGIGEQTAAVLLTEMGCIEQYRNARQLAAHAGLTPQERSSGSSVQAKSHLSRIGNARLRKALYMPAVAAMRHNPLLKLFAQRLLDRGKVKMQVLGAVMRKLLHFAFAILKSQKPFDPDYLAHAS

SEQ ID NO: 444237 - protein, 344 aa, unidentified
MTIVEDACVITGGVDTHADMHVAAALDPLGGLLGVREFPATSAGYADLLRWLSGFGNLGLVGVEGTGSYGAGLARHLAAAGIRVVEVDRADRQDRHRQGKSDPLDAVSAARAALSGRVSGVPKGRDGAVEAIRTLMVAKRSARAERTQAINQARALILTGPDELRARFAGKRAAALAGAVAALRPRPGDAADYALRVALRELGRRVEFLDAQIGRLDDLIIPLVTVRAPGLLSLYGVGPDTAALLLIAAGDRPERLRSEAAWAHMCAVAPIPASSGKTRRHRLNRGGNREANHALWRIVITRMSAHPATRAYLERRTAEGLSKKEIIRCLKRYVAREVYPYLRG

SEQ ID NO: 444238 - protein, 321 aa, unidentified
MTRIICGVDIGSSSLAARIGQDGAAATFANTPEGIAELAAFCESHQVALVAMEATGGYEQRAFAQLSEHGLPVAVVNPRAVRQFAQSMGSLEKTDAIDAGMIAWYAQTRRSQPLCLAPPTQLELRARVTRLRQLTEVRTAQLNQQRLVTNEAVQKGFRAMLTFLAEQIRELEQAIAALIEADPLWRELNQAFRTIKGVADRTVARIMAEMPEIGTLSNKTVSKLAGLAPLANDSGKHQGKRAVRGGRAAIRDILFIVGSVVARHEPDFLAFQQRLRNAGKPPKVVRIAVAHKLLVRLNAKAREVRQRSAHFELSWSAPQQP

SEQ ID NO: 444239 - protein, 369 aa, unidentified
MVEYSEAFVGIDAAKSRNAIAIAEAGRAGEIRYLGEVEATPQSMRKVVARLAAKYQRLHFCYEAGPTGYGLYRQLTALGHDCIVVAPSLIPRKPGVRVKTNRRDAISLARLLRAGELTPVWVPDEAHEALRDLVRARDAAVEDLRRKRQSVTSLMLRHGRIFPGKTTWGARHARWLQEQRFEHPAHQIVLQELVLAIQHAQERLERIEAAIAEFVPGWSLAPAVEALQALRGVNLISAVTFLVEVGDLRRFETPRQLMGYLGLVPGERSTGDTVRKDGITKAGNSRARRTLVESAWTYRYPPRIGKVKLYHLQRVTPAIRDIAWKAQSRLCARFRALAARGKKSTVAVTAVARELAAFMWAIVRAVPAT

SEQ ID NO: 444240 - protein, 400 aa, unidentified
MLYLAIDQHRKQLTVNLRNEAGDVILKRQVSTEWKRVREFFENVRNQSVPEGGFITILEVCGFNDWLLKLLTEYGCRQTVLVQPEKRDRHKTDRRDANALGELLWTNRHRLLAGKKVQNVRQVVPPSERDAGDRQLTTVRQRMTHLRTRAINRVHHLLLKHNLQQECPTKVLKTKTARKWLAKLPLETIDRWELDQLLAQWELLDKQLGELEVKIGERQAENATARIIATIPGAGAWGSLALACRIGSIERFPHPGSLAKYWGLTPRSNNSGDHNHRLGSISKEGSSLARCILGQMVMHVLRHDAVMKKWYQQIKKRRGSRIARVAVMRRLATIIWHMVKRQQPYKLCSTRANDKGSDCCVVPADRDAFFKAKQGRSKAENEKSCRDTQAPSSQASLTRP

SEQ ID NO: 444241 - protein, 369 aa, unidentified
MDHHSVAYVGFDTSKTKHAVAVAEGGREGEVRYLGEIEATPAAVERLLGKLAGKYKTLHVCYEAGPTGYGLYRHIRALGHACDVIAPSLVPKRPGERVKTNRRDAVTLARLLRAGELTAIWVPDEVHEAVRDLVRARDAAAQDLRHKRQQVLSFLLRHGRIFTGHRHWSRAHLRWLAGQAFDHPAQQIVFQDQVDAVADAQARLERLDHQLAELVPTWSMAPVVAACQAMRGVSFLVAVTFVAAVGDVRRFESPRQLMAFLGLVPCERSTGDTVRRGGLTLAGNRRVRRALVEGAWSYRHPARVTETIRVRLENLPKAVREIAWKAQVRLSARYRRLIAAGKKAPVAIAAIAREMAAFLWAIGRVVEPA

SEQ ID NO: 444242 - protein, 336 aa, unidentified
MVVGVDTHKDGHSAALLDELGAVQAALEVAANGGGYRRLLSWARGQSDDRTWAVEGTGSYGAGLATFLAEQGEVVFEGDRPKRRPQGGAGKSDQLDAIRVAREALARVHHAQPRRRGQREAIRVLLTARAGAVDASSKALNQVYALVVTAPEPLRDRLRELKGDRLLAACQRLRCAGDLETATTALTLRRVARRAVELAAEAADYERQLTALLTTSAAPLLAQRGVGPVTAAQLLVSWSHAGRLRSESAFAALAGVAPIPASSGRTTRHRLNHYGDRQLNRALHLIALSRSRFDPATREYIARRTAEGKSRREIRRCLKRYLARRLFKLLQRLDMS

SEQ ID NO: 444243 - protein, 365 aa, unidentified
MKTKTAPSVVITPTPVANSGFTLGLDLGDRAHHVCVLDAAGQILREASLPNTRPALAQLLTEFPRATVALEAGTHSPWISRYLTGLGAKVLVANPRKLHAISRSERKCDQRDARMLARLARVDPALLHPIQHGSAQAQHDLLGLKLRDALVRTRVNLINAVRFTLKSLGHPVRNPSSESFHKTVDVPADCLPVVQPLLAVLAHVTEQIKAMERDLVARSKKDYPATQRLQQITGVGPLTALCFVLKIGDPQRFSRGRDVGAYFGLCPRRDQSGGTDKQLRISKCGDGLMRRLLVSAAHYVLGPFGPPCALREHGQRLAGTGSAREKKRAVVAVARKLAVLLLSLWKHGTNYEPRVTKSILVLTPA

SEQ ID NO: 444244 - protein, 389 aa, unidentified
MSELMLPKISMTVAFSIRKERPLSIALPFPTTWMVSKVCYKQSKTVLKKSDKIKVGLEATGHYSYNILGFLLDNDLPVYVMNPLHTNLYRKSLSLRKTKTDRVDAKTIATMLLSDVDLKSYTDTAYHNEELKSLTRYRFDKVQERAKLKQSVSRLVTILFPELEQLVSSIHGTSIYALLSEYPGAKQISEAHLTRLANILVKTSRGHYRKDKATHIRDAARTSIGSVMPAKSLELKHTIKLIQELTSEINEIEDAIRKIMDELKPPILSIPGMGFHSAAMILAEVGDFSNFNSPDKVLAYAGCSPSTYQSGKLTNCYAHMEKRGSRYLRYALYTATKYVCYWNPVFTEYLTKKQAEGKHYNVALSHATKKLVRLIYALQKSGKAYLAVT

SEQ ID NO: 444245 - protein, 380 aa, unidentified
MQIFGERAVTTEQGGMEMEVVYRCCCGIDVHKKSITVCVIKNGRRDLREIGTTTSEIKVLANWLIEHDCEMIAMESTGVYWKPLYNLFELMGLSAMVVNAAHMKTVPGRKTDVKDAEWIADLLRHGLLKASYIPDREQRELREVSRYRKSLIEERARELNRLQKFLEGSNIKLDSVVTDINGKSARKLIDAIIADEIPDAGKVSQMINVRMLPKLDQIMLSIEGITTPLQRKLIAGIVGHIDDMTRRIKDMDDIIKDYMQQYETAISAIDLMPGIGQRSAEIILAEIGVDMSRFPSAAHLCSWAGVCPGNNKSAGKRQSGRTTKGNTTLKTTLVQCAQAAARVKVSFFAAQYQRIAARRGKNRAVLAVAHSMLISIYHIL

SEQ ID NO: 444246 - protein, 388 aa, unidentified
MFNNFIGIDVSKDTFNYCVINSQLTTVEQGSCEMNTKGFKGFKNIVDKYQDSIIALESTGSYHINILSFIASFKKEVYLVNPVLIKRFIQTISLRKTKTDEIDANLIAKFIFYHNASLKQFVPNNMNEILALSRVRESITRDVAKMKTKLKQDVNTVFPELVKHYNIFTKTILGILKAFPTTQSIKEANESKIKKVVKEIKGKKVYSTIKDVQKLAKESISNNNGIFSKIIEHDVKTLEFLNQQLEEITKTLLEEIKKEKEISMDILTSIDGISDVTAAHFIAEVRDIKNFENRNKLIAFAGTDPSIKESGTSLKQNGKITKKGSSSLRRIIYIMGMSLIRSNQLFKDYYYKKRQEGFKHRKAMTALGNKLLRVIFSLLKKEEKWVKK

SEQ ID NO: 444247 - protein, 372 aa, unidentified
MIVVGVDPHKKTHTAVAVSSQLGELKAEVTVQARTNGHAKLIQWARALDAERVFALEDCRHVSGALERFLIARGERVVRVPPKLMGEARRSARSFGKSDPIDALAVARAALRETDLPAAHLDGPARDIQLLVDHRDDLVAERTRIQNRLRWHLHDLDPALDEQAQRLQRSHKRLEQIGRRLAQKEQTAQVRVCRDLLRRLKALSRDIKALEAELAELVGRHAGPLLELPGCGTLTAAKLIAEIAGVERFSSDAKLAKLAGVAPLDASSGKQQRHRLNRKGNRQLNCALHRLAVTQGRAHGPARAFLAAKQAEGKSRREALRCLKRHLARVVFRLLKAIASRSHPESENLFPSERERQLPSPARAGGRLVAAT

SEQ ID NO: 444248 - protein, 394 aa, unidentified
MKLVGIDVGKNSHHFCVMDKETGELNVTPSSFPNNKEGFDFLINSLKPYSKKSILIGMEDTGHYHVALLKFLLSNGYTVALINPKTTDLTRKMEGGITKNDKLDTITICDVLDTPERKKQYRITKVDRFDLYEQRQLTRHHHNLKEELNLYCNRLQKSIDLVFPEFNTLFSSKYGVVYMNLLKTFGSAEAIASTDIRTIRKCFEIKGRGGRISLTAEKLKECAKNSIGISSEVETIQIKHLVRQITLIKEQIAEIDKKIEEFSITNNSPILSIPGISHFSGTSILAELGDIGNYSKPSQIIKFAGVAPYHYESSQYNAQHTAITKKGSKYLRKTLYQIILPVINNNPVFKKYYRLKISQGKGHRCAQGHCIRKLLRIIYHLLETGQSFDPALLR

SEQ ID NO: 444249 - protein, 413 aa, unidentified
MSISPINGAARICAGIDWAKDDHVACIVDSDGEVLDRFGVEHTAAGLCRLVARLLKAGADEVGIERPDGPVVDALMAAGLTVLVIAPAQVKNLRSRYGSAGNKDDRFDAYVLADVVRTDRRRLTPLTRSTPAAQVLRSSVRARRDLVEHRVAAANQLRAHLQVVFPGIVELFSAIDSAISLTFLERFTTQVKADWLTVDRLGAWLHKVAYSGRTDPAVLHARLLAAPRGATGHQAKHHAATTLAFVAVLRTLNAQIAAQADSIAEQLDLHPDARIVKSLPRSGTVRAARLLAEIGDARGRFPTADSLACLAGVAPSTRQSGKVKAVTFRWGADKELRDALCDFAADSRHDNAWAADLYNRARDRNHDHPHAVRILARAWVDIIWRCWQDSVPYNPDQHRALQRVLNEHPLEAA

SEQ ID NO: 444250 - protein, 346 aa, unidentified
MEHYVGLDVSLKLTAICIVDRTGKIEREGVVASDPETIAAFIKSHAPHVARVGLETGATSTWLWTELNKMGLPVICIDARHAKAALKLQINKSDRNDAVGIARIMQCGWYKEVRVKDLDSHALKALLVSRALLVKIKRDIENQIRGLLKNFGLVIGQAKMNVFSVRAAELAEARPELTVAVEPLLRAREAIGRQIADLDGKVMRLARNDAQVRRFMTAPGVGPITALCFLATIDDPSRFKRSRSVGAYAGLTTRRYASGEIDWTGRISKCGDKMLRTYLYEAANVLLTRVAKWSALKAWGVRLAKRSGIRKAKVAVARKLAVILHRMWIEGTEFNWSSKEAANQPA

SEQ ID NO: 444251 - protein, 431 aa, unidentified
MCFAPAFGDQEESMGKINERCGGIDVGKRFLLCCVLSGAAHEEPRSQTRRFDATVSDLVRLREWLAAERITHVVMESTGSYWVPVFNILEGHFIIVLANPEEVKNRKGHKTDRKDAEHLADLLRHDHIRASFIPPKPIRDLRDLTRRRLQLIQDATRERNRVEKLLEHVNVKIGNVLSDVFGVSGQSMLLALLDGKTTAEQIAHLARGQAKRKIPQLTEALEGHGMRDHERFLIRSCLRHLACLEEEVEQKDCEILQRMQESPFQGAFQRLQTIPGVGQLAAASILAETGVDLTTFPTAEKMASWAGLCPGNRESAGIKKGSQTTQGNSYLRTTLVQCAWSATRKTGCIFQTRFRELSPRRGQKRAIVAIAHQMLTVLHFMLKNDVPFNGAANAPTQRRRQRRAHHHLRCLRRLGISVQIVEPTEFAPQTG

SEQ ID NO: 444252 - protein, 347 aa, unidentified
MKFYTKTHQYYCGVDLHTKTQYLCILDQKGTIVLHQNLPNRPQAFLKAIQPFRENLVVGIECIFSWYWLADLCAREQIAFILGHALYMKAIHGGKAKSDKIDSEKIARLIKGGTFPLAYTYPPELRPVRDLLRRRRMLVRHRSEVLAHIKLTHYQYNARFFEKNINKQGNRQHVAELFSDPAVVKNIQVDLAVADQLQAEITQLENYVLRHAKTVDPRTFYRLQTVPGIGKILALTILYEVGDLSRFETVQQFCSYCRLVKCAKESAGKLYGYGGQKIGNAHLKWAFSEATALFMRESQQAKDYVDKLSVKHGKGKAMSILAHKLGRAVYFVIKRKDAFDVNYFFTS

SEQ ID NO: 444253 - protein, 412 aa, unidentified
MDVYCGIDWAEDHHDISLIGRDGKLLARRRISDDPAGLAALLDLLAGHGDTADDLIPVAIETPRGLLVACLRATGRQVYPINPMSVARYRDRHSVAGRKSDHGDSFVLANVLRTDMHAHRPLPADTELAQAIAVLARAQQDAVWDRTTAHNKLRSHLREYYPGFLAAFADLRDGIMRPEARIILAAAPTPADAAKLTLTQLRSLLKKAGRSRGIDTEATRLREAFRAPQMRQLPLVEQAMGRQALALLGQLDAACAAAADLERAVTESFSLHPDAGIITSFPGLGALTGARVLAEIGDDRSRFQDARGLKAYAGAAPITRASGKTTSVTHRRVKNNRLNAVGYSWAFSALTASPGARAHYDRRKDAGDRHAAAQRNLFGRLLGCLWHCLITGQDYEEAIAFTATPEKLPKAA

SEQ ID NO: 444254 - protein, 410 aa, unidentified
MAERFVGIDVALREHRIAVLDRDGEAVGPSFTVAASKDGLTSLLRTLDARGATAAQTLIALEASGHLWENLEAALVGAGYRVSVLNPLQTRRYRDVVRRKAKTDDIDAHVIAGLLRSGVAQASYVPDEQIQSLRELARLRARLMADRQDYLRQLIAQLDVVLPEHRAVLGDLQTARARGILAQFPTAQHLAKANPRAIRRAAEAAGARGFSLDDATAVRDRARRSLYSGKAAAARAHVVRTLVNQLERLTSAIDEVDHAATTLLPPSEPSRGPSDAELLQTIPGIGPQTAATLLGELGALTRFTDARALVAYVGFYPVISESGDRAAPPHLSPVGSRIARHSLYLAAVNAVRHSGEWRTIYLRKKAQGKPAKQALVVVAVKLLHAVYAMLKHRQPYNPSRLLVAPATVGS

SEQ ID NO: 444255 - protein, 341 aa, unidentified
MDHYAGIDVSLEQSSVCVVDASGKIIREGKVASEPQPLIDWFGALGFDLVRIGLEAGPLSQWLYAGMKQAGLAVELLETRHVRDAFKAMPVKSDRNDARNIAQLMRLGWFRPVHCKSISAQEVRAMLTARKLVQSKLRDIEMSLRGTLRGFGLKVGNTTLTRFAARIRELVGENATLQVIAESLLAVHAVLLREFRGFEKRLRLMARCNVEAQLLMSAPGVGAIVSLTVASAIDDPARFKSSKQVGAHFGMTPKKYQSGETDITGRISKIGDKAVRTALYQAAHIVLTRPVKGSALKSWAMRLAKRVGMRKAKVALARKLGVILHRMLADRKPFAFAATAA

SEQ ID NO: 444256 - protein, 413 aa, unidentified
MKQIPVNFAAFIGLDWADQKHDFCLKCSDSESLEYGIFQHTPEAIEEWALSIQKRFKDQPVAICLELKAGPLVYALLKYNFIVLFPIPPMALSKYREAFSPSGAKDDPTDAFLQLDYLLKHPESLKPLNPDTVDTRIIQRMVEDRRTLVGEKVRLTNRITAALKSYFPQALEWFSDLDTILFCDFIQRWSTLNKARKARPATLTRFFKEHRCVRQAVIDKRLTAIKKTMPLTEDEGVIIPFERLVKVFALQLQQLIVAIRDYDLNIAKRFRAHADNKIFDSLPGAGPVFGPRLLAAFGSDRTRFNSADEVCRLSGIAPVLERSGKKCWVHWRYSCPVFLRQTFVEWANQSIRYSFWAKEFYDEKRASGKSHQATLRALAFKWIHILFRCWKDKTPYDESAYLFALKRRNKMAA

SEQ ID NO: 444257 - protein, 340 aa, unidentified
MKITTLGIDLAKSVFQLHGIDTNGVVVLQKKLRRGAVLNFLSKLEPCLIGMEACATSHHWAREIAALGHEVRLIPPAYVKPYVKRQKNDAADAEAICEAVTRPNMRFVPVKTEEQQGVLVLHRSRDLLMRQRTMILNAIRAHFAEFGIIAAQGARNVAELVIRLTDEGDIGLPETARSAIQALAEQLDGLAQEVRKIERQLLAWHRQNDASLRLETIPGVGLITATALAASVPDPTVFKSGRQFAAYLGLVPRQNSSGGKDRLGHISKMGNGYLRRLLVVGATSVTRRAPTTDNRTGAWVRSLLERKPARVVTVAIANKTARTAWALLAKGESYKATPAI

SEQ ID NO: 444258 - protein, 417 aa, unidentified
MAKLKIVYPICCGMDVHRDFVIACIASTNAQGVTSYSSKRFSTFSESLRELRDWLAENNCKDVCMESTGKYWFPVHNILEKSCNVVVSHPKFVKAIKGKKTDKKDAQWIADLFKHDLVRGSFIPPEDIRQLRDLCRYWCKLTSYTTGEKNRAQNCLTVSNFKLDSVFSDVFGKSASAIISHILEHPGEQFDVMPFVDGRCKTPTVEIQAAVDGAFNMSQAEKLKIIREHMDDLEKLKLLLESQILTLAEPYTHQIDLLYTVPGISEPMTAIRILGEIGTDMAQFESSKHLCSWAGLTPQNNESAGKKKTTRIGKAGQYIKPLLIQCALAATNPRSKKHPEILQKYQQLKKRRGSKKSHVAIARRLLTAIYQILLKDEAYSPYVVPVTEAIPQQRILSSEQALALLRAKGYIIQDVPA

SEQ ID NO: 444259 - protein, 446 aa, unidentified
MRIVYQRCCGMDVHKDSVTACLLVINEGGKDRNEKREFGTMTRDLRELASWLASEGVEAIAMEATGVYWKPVWNILDAEKKFKMLLVNAQHIKCVPGRKTDQKDSEWIAELLQHGLLRASFVPPVEIRQLRDLTRMRTRIRQTLASFANRIQKVLEDANIKLGSVASDVLGVSGRHMLKALLAGEQDPQKLANLAQGHLRKKLEPLQLALEGHFTEHHRLQLKFLLEFIEFGEKQLSNLDSEVQLLLTRVQPKASLPDPDDGALAESKGSPPQATSLQTAVELWDSIPGIDQLAATTLVAEIGANMDQFPSARHLAAWAGLCPGNNESAGKRRSAKIRKGSVWLRRALCQAAWAASHTKNTYLAAQYRRLIVRRGKKRTIVAVAHSMLIVAYCLLKRQCVYQDLGANFFDRLDERALTHRLVKKLIRLGYQVTLKPGRAEAAPETA

SEQ ID NO: 444260 - protein, 400 aa, unidentified
MNAVGIDISKGKSTVAVLRPFGEVVASPFDVIHNDSNLKQLVKLIKELPGESRVVMEYTGTYFEPIAQYLHNNGIFVSVVNALLVHDYGGNSLRKVKTDKKDSLKLASYALDRWTELEEYVPSDEQRKTLKMLNRQYNQSNKIQTMMKNNLISLTDSVFPGINKLFTSPERQSDGHEKWVDFLSAFPHKDCIAELYLSVFKTKYKSWCKKSNYNYSDSKAEEIHAYSKSVIAVLPLNESVKLLVTQAVMQLNTMLETVSAIRKEMDRIASSLPEYETVMAMYGVGKVYGPQLMAEIGDTRRFRNRRAITAFAGLDAPPYQSGQLDITSRHISKRGSAALRKVLFQITEVFILNKPENEPVYQFIDKKRSEGKHYYSYRIAAANKFLRIYYAKVNQIMESQ

SEQ ID NO: 444261 - protein, 367 aa, unidentified
MKKNSTTTQRGKRAPAGTEATVIGMDLGDKTSRYCGLDRDGEVREEGSVATTKQALTQRFAGKKRCRIALEVGTHSPWVSRLLKNLGHEVIVANARQVRLIAHSSRKNDRLDARTLARLARADPRLLSPIQHRGEQAQQHLAMIRVRAALVEARTKLVNAARGFSKAQGERLPACDAAAIGVKEMAELPAGLKAVLRPLLEQVESLTGQIKKADVELEQIARTQYPETALLRQVKGVGVLIALTLVLTLDDPERFQKSRDAGCYVGLRPRQRESGASQPQLRITKEGDRYLRTLLVQGAHHILGWRGPDTDLRRWGLKLASRGGKNGKKRAIVAVARKLAVLLHHLWVTGEVYEPLRNSGAATTQAA

SEQ ID NO: 444262 - protein, 348 aa, unidentified
MLADEVDYVVGVDTHRDQHVLAVVVAPAGAVVARQAVAANARGYAQALRFADECANGTRVWAVEGAGHYGAALARYLSGHGETVLEAGRSPRGERRLQGKDDGLDAVRAARAALGHQLASPRAGQRREALRLLLVARRSAVDVRRETLVQLRSVIVTSPDRLRDELRRLPVQRLLDRCSRLRRPKTATPDELAARLVLRTLARRIEAATVEASELEREILTHVRALAPQLLDEPGVGPIVAAQLLVAWSHRGRVRSEAAFARLAGVAPVPASSGQTTRQRLSRGGDRQLNRALHTVILHRRQHDPATKEYIARRVAEGKTRRDATRLLKRYLARHLYRVLDNQAPNMA

SEQ ID NO: 444263 - protein, 371 aa, unidentified
MPSARQLAERGKAVEGRGVVRGAEPFSSRTSNGCLGTSPDSQARGMRRGKGTRHERPSEGQSMFVGIDVSKASLDVSFRPEGTSFEVSNDEAGIGDCVRRLQALRPALIVVEATGGFETALVAAAAVVGLPIVVVNPKQVRHFAKAIGRLAKTDSIDAEVIARFAEAVRPEVRPLKNEAGELLTALLSRRRQVLEMVVAEKNRLTTTHERHVRQRITYHLHFLKQELRELDKDLDKEVRSSPAWREKEDLLKSVPGVGPVLARTLLAELPELGRLDRKRIAALVGVAPMNNDSGSLRGQRRIQGGRAQVRTALYMAALVSSRFNPRLKRFYDSLRASGKTGKVALVACMRKLLVILNALVRTGERWNVEAA

SEQ ID NO: 444264 - protein, 422 aa, unidentified
MRPDEKYLYARSFPVHVGVDTGKAFHVLVARGPDGRRKRPHKVLVGREGFEAAHAHLRSLFPDIEPSRMLVGLEFAGHHGFTFAHFLKKKGYAVVSVLPAHTKKAKEIEDNSPEKNDRKDAALICKLVGDGTFVPFPFLREPYTSLKLLVMQRHRLTVEENRFKNRLQSILDLAWPEFMGHFSFINKKTPLALLERWPLPEDLARADARSVRRFIRSTSRGQIGPDKIRAIIESARESVGLKDGSELRRLEIQHLLGRWKLNRTQKSELDERIAALVERCPEAKALTSVPEVSTLSAAVIVAELGTPETYEHPRQILKLAGMNLVGSTSGTSVYGRRWQSKRGRPMLRRQLFLIAGRWCGPRGLYREDYQRMLERNGRRRTKAVAAIARKLVPVLFRVMKTGEPFDRERFLRNRYSREEAVA

SEQ ID NO: 444265 - protein, 347 aa, unidentified
MITIGIDPHKQTHTAVAASEIGQQLAEITISADEPGQQQLLAWAHGLGTEIRFALEDCRHVNGRLERFLVASGEPVLRVGPRLMAGARKSARTRGKSDAIDALAIARSALREDANLHLASHDEGARALKLLVDHRDALVVERTALASRLRWHLHDIEAGLEPPARSLDQASVRRSLTQRLARYEQTVQVRIARDLLARIGDLTRRERQLASEIGDRAKSYCPALLEVPGIASLTAGKLIGEIAGANRFASDAQLAHFSGCAPIPASSGKTQRFRFDRHGNRQLNAAFYRIALTQARVHPGARAYLAKKRKEGKSTTEALRCLKRLLVRVVWRTLRSAGEPRPSPSLS

SEQ ID NO: 444266 - protein, 346 aa, unidentified
MTMLETRPVTGGVDTHLDVHVAAALDANGGLLGVESFATAPEGFTALYRWLASFGPVARVGVEGTGAYGAGLARHLRGAGIEVIEVDRPNRQLRRVAGKSDTVDAVEAARAVLSGRARGVAKTADGNVEAMRALLIAKRSGREARITCLNQLRHLGFCAPDELRERFRGVPRTQLADVAAALRPRLDSDPVTYATKLAMRALARRVLSAVEDTDHIDTVIAHLVTATAPGLLELYGVGIDTAAILLVAAGDDADRLHSEAAWAHLCGVAPLPATSGKVTQRHRLNRGGNRQANHALWRIVFTRMSSESRTRAYVTRRLDEGLSKPEITRVLKRYVARETYRHLRPT

SEQ ID NO: 444267 - protein, 340 aa, unidentified
MQIAVLGIDLGKNSCSMVGLDGDGAVVLRRRMRREGVIKLAAKLKPCLVGMEACCGAHHLGRVLRVQGHEVRLMSPEYVRPYVKSQKNDDRDAEAIAEAATRPTMRFVELKSEEQLDMQTLHRARDRLVGERTALINQLRAILLERGITVAQGRRRLEQHLADMDAQGDLNERMRLLIEDMRAQWAELDCRIAELHKELAEWARNKEAARRLMTIPGIGVLNATALIAAVGLGESFARGRDLAAWLGLVPRQITTGGRPRLVGISKRGNKYLRKLLIHGARAALPTLLESPTPLGAWLRGLTVRMHKNAVVVALANKLARMAWAVLRHGKRFRIDIAAAA

SEQ ID NO: 444268 - protein, 338 aa, unidentified
MNVTHIGLDLAKNVFQVHGVDRDERVVAKRKLTRRQVHDYFEKLPSCRIGMEACAGAHYWAREFGRMGHEVKLIAPQFVKPYLKSQKNDANDAEAICEAVGRPNMRFVTAKPVAQQDMLAAHRIRSELVRQRTAKANQIRGLLAEYGVIVPVGINALRRVLPDIQEDAENGLSGLFRRLLEGLRADWVELDRRVDQLDGEIEAAAKEDETARRLQTVPGIGPITATALAASVGDGRQFRRGRDRAAWLGLTPGQHSSGGKERLLGMSKRGDSYLRTLLIHGARGHPGRGQQGRPAQPLDYRSGGAAAQERGRRGLRGREAYKPPPRGCPPWPGGIALQ

SEQ ID NO: 444269 - protein, 441 aa, unidentified
MNKLESPKYCGIDVSKSTLVCAAIGDLEEHHRHYHPGQSSDLGIIGEEAVVIRTFPNSWTGIVSMIKWMHSIGVSAAVMESTCSYWCAAYTTLEKEGIEPVLANARQVKNVSVHKTDLKDCVWLAVLLRAGFIVPSYVPAGLIKDLRDASRMRRSIMKDITRLKNRCHRVLDSVLVNLGMSVAFVKRGRAALTQALKGDYEGLTNEQQRAFESVTEVEKLMIIDLLTTIERSDERVKKYDSVLAALVKQLEEDRGDRDVILLATVPGVGLVSAIVVKAEIGTVERFPIPERLSSYAGLAPRVMQSGERRRMGQTVRLSNSHLRTTMYMVAQVCARSGPPRLIEFHQRVREKKGYKVATIALARKLLVIMWRMLKEGVTFKMAYEKGLAERKHKRMRTSLRRLTRLECDYGSERVFSAIQEVLDRREKESLAPGVSLHPELH

SEQ ID NO: 444270 - protein, 346 aa, unidentified
MSHKTAATVAHTIGIDTGKNTLHLIGLDDQGAIVLREKIARGRIAARLANVPRCLIGIEAGMATHYVARELSALGHDVKQVPPAYSKPFRQGHKNDFRDAYAVAEAVQRPSTRCVPVKTDDQLDLQALHRVRSRLVGQRTAVINQIRSFLLEHGIAVRQGLRFLRQQLPDILAKRSDVLSLRMIRIMEDLSGDWRRLDERIEHVTKEIEVLAHGSKSCHQLMTVPGIGPLIASAIVAAIGNGAAFAKGRDFAAWLGLVPKQMSTGDRTILGRISKRGNRYLRTLLMQGARVILLRPANWAKHSFGPWLTATANRLHHNVLATALANKLARIAWTVLMQARSYEARV

SEQ ID NO: 444271 - protein, 318 aa, unidentified
MNLPSPLPAVTYLGLDIAKRTLDLSAHPALVQRAFANDPAGHRALLAAVQQIAAPIQIICEATGGYEHDLLAALHAARVPVTLVNPRQVRDFARAKGLLAKTDVLDAAVLAEYGRIFQPAPAAALTPAQQRLTCLVRRRQELLELITQEQHRGEHHHDPFVVKKARSLMTTLRRQLEQLEEEISALEKADRTLARSVERLTAIQGVGRRTAWLLLAALPELGTLARGQAAALAGLAPYNHDSGPQRGQRHIAHGRPLARGALYMAALVAARFNPVLKPFYQRLRAAGKPGKVALVALMRKLVELANLLLKSSSFQLVQ

SEQ ID NO: 444272 - protein, 416 aa, unidentified
MFAVGVDVANGRSMVAVLDGMRNMVVKPFEVVHTAQGFAALVEKLRQLDGEVRIVMEHTGRYYESFAMSMHRAGFFVSAVNPLLIKNYQGSINVRKVKTDKADAQKIAQFALDKWTILPHYTPMDTIRYNLKTLHRQFQLASKTKTALSNNLIALLEQSYPGANRYFDSPVRTDGSQKWVDFVDTFWHVDCVAMSSEHAFVERYRKWCKRHGYVFSEQKAIQLHADARQKIPLVPKSDTCKLLVREAVSQLNAVSRTVETYRAEMDRLASQLPEYETVMGMTGVGKSMGPQLMAEIGDLRCFAHQKSLVGFAGTDPIKEESGDKVSQSAPSSKRGSPYLRKTLFVIMTILLQLQPQEDPVYQFLDKKRSEGKPYYVYMTAGGTKFLRVYYGKVRDCLKAKGLWEVPASASQEVNPG

SEQ ID NO: 444273 - protein, 429 aa, unidentified
MRDTFVFETALVVGVDPHRESLDAVGIRFPEVIVLDEVFDNTQAGHQSLWSKAQDLAVELGLTLVFGLEDGSNYGRSLSRYLVAAGSRVKEVNPLKTNRQRDFYGEDKTNHLDALATAAVVFRAYERLPDMVAVHEAVQATYDLSRYREKLVKQQTASINRLHSYLANQYPAYKDYFNEVNGVTALDFWATYPTTAHLRGASIEELAASFYEKSNHCLSAAACSDKAQQILTSLDDAPDHALDLLTKVQGEIISDLARRLLALKRSIKRMESRLAETLPQTGQKLESIEGMGTVLAAVFVGETRGTARFDYDQNKFARYNGSGPATKGTGPNLRQVQNRWCNRRLKTALVRLALGACHREPLSAVYYQACLDRGLQPHQARIRLMRRLSDVIFAMMRDKTAYDPEIHRLKQERNKTKKGESVAPASDDG

SEQ ID NO: 444274 - protein, 316 aa, unidentified
MENANKPTPSYVGVDVSKHRLDVYLRPDGTKLTFANDSSGIATLSEHLVSLPLALIVLEATGGYEIQLTTILATANLPVVVVNPRQVRDFARAAGQLAKTDGLDARILALFAERMQPEARRIPDEQARALTELVTRRRQLVDMITAEGNRRRESKETKVQERIAVHLQWLREELSAIESDLDTAIKGSSVWRADEELLVSVPGVGSTTARTLIAELPELGTIDRRKIAALAGLAPRNRDSGLMRGRQSIQGGRSSVRSALYMATLVATRRNPIIHSMYERLRAAGRPAKLALTACMRKLLTILNAMLRDRKGWIAA

SEQ ID NO: 444275 - protein, 333 aa, unidentified
MHVYGVDAQGRQVLSKKVSRGKLSAFMANRPPCLVAMEACGSAHHWARVFRGFGHEVRLIAPPFVKPFVKSNKNDAVDAEAICEAVQRPNMRFVAIKTVEQQDIQAIHRMRSLNVERRTAQINQVRGLLLEYGIEIPQGRAALMRGLPEILEDAENGLSERFRTELNRLLEELRHLDEQVTHDDTQIQVIAQSDETVQRLMTIPGIGALIATALIAAVGEDVGLFRNGRALAAWLGLVPRQHSTGGRERLLGISKRGDVSLRQLLIHGARAVMRWVERKEDATSRWATALKARRHTNVAVVAMANKIARIADAVMVTGQPYDPAAGRPLQAAV

SEQ ID NO: 444276 - protein, 352 aa, unidentified
MDATTIAVDLAKDVFEVAAANRADRIIERKRLTRRQFERFIDTLSPGTLVIMEACGTAHYWGRRCQARDLRVRLLPGQYVRPYVRRNKTDRTDTEALFEANRCGGVAPVPVKTVEQQTLQVLHRVRTQWQRARTARINAMRGILREHGFPLGVGAQTALKRIPGLLDDATIALPDLVRRTVSLVLEEVRELEARIASIDQQLAHIVREDSVARRLHQIPGVGVITATALVGTVGHIHAFRRGRHFASWLGLTPRESSSGGRRHLGGISKRGDVYLRCLLTHGARSVLLTAQRTARTAPRQLTRLQQWAVTIAARRGHNRAAIAVANKLARIIWAVWVRDTDFDATVGRPLAA

SEQ ID NO: 444277 - protein, 452 aa, unidentified
MAKITHSSSSMPVMHPNAAGIDIGSQFHVVAVPPERTDQSVRTFKSFTGELHAMAKWLKKCRVDTIAMESTGVYWIAAFEILESYGFKVFLVNAREAKTVPGRKTDINDAQWLQKLHQFGLLRASFQPSKEIAGLRAYLRQREKLIEYKASHIQHLQKAMMQMNVQLQHVVTDITGKTGLAIIRAIVNGQYNPDELVMLRDPHCKNSVDVMKAALTGNYKAEHLFALTQAIELIDIYTEKIAACDRVIESTLEGLHQETDSMETTLPKPRGRENSKNAPSFDVRQSLFNMIGIDLTQIHGFGSSIALKLVAECGTDMTKWPTSKHFTSWLCLAPGNKISGGKVLSSKTRRSSSKSATDLRLAAMVVGKTNTALGATYRRYAARIGKAKAITAIARKLATLFYNALRYGMAYVDQGADYYEEQFRKKVVSNLKRRADSLGYTLLKKDEAVSAA

SEQ ID NO: 444278 - protein, 347 aa, unidentified
MRIGSMQIAVLGIDLGKNSCSVAGMDATGRVVLRRRMHRDGVVKLAAGLPACVVAMEACCGAHHLGRVLQAQGHEVRLMSPEYVRPYVKAQKNDDRDAEAIAEAATRPTMRFVELKSEAQLDMQTLHRARDRLVGERTALINQLRAVLLERGIVVPQGRRKLELYLEALLVRKEASLSPRTRLLIEDLRAEWRELDRRIAAFDEEFATQARTDETARRLTSIPGIGPLNATALTAAIGGAQTFRRGRDLAAWLGLVPRQATTGGRPRLLGISRRGNAYLRKMLIHGARAALPTLSKSETPLGGWLRGLLARAHVNTVVVALAAKLARTAWAVIRRGETFEVRATATS

SEQ ID NO: 444279 - protein, 347 aa, unidentified
MRFYTKQHKYYCGIDLHTKKMYLCVLDGTGAIVLHRNIKTDREVFLKTIEPFREDMVVAVECMFTWYWIADLCVEENIPFILGHALYMKAIHGGKAKNDKIDSHKIGALLRGGMIPMAYVYPAKMRATRDLLRRRNHLMRKRAELYAHMQNTRTQYNLPDFLGCIAKPQNRQGIVERFADPSVQKMMETDLAVIEAYDPIIAKMERDIVRMADQHDPVAYALLKSIPGVGRILGLVILYEIEDINRFPTVQDFASYCRLVKSIKESNGKKYGSSGKKIGNAHLKWAFGEAAALFLKGNEPGKTYYEKLANKHSKGKALSILAHKLGRAVYFMLKNKKPFDQDKFLGL

SEQ ID NO: 444280 - protein, 453 aa, unidentified
MIVVVEVFFLVLFLLWATVEMWITSPLRRCTRCLSMRPRGKIGQEAEAFCVQGHVRSPPQRYAPPPVRAVSVKTERYPGDQPEYGKTGQETASNREDYIMNNEQAPVSPSIHWVGVDVSKRTFDAGLVRHGQKWPATPLAAVPVESFARTSVGVNDFLQWLDALLAENDPPLGVRVVMEATGRYSSELAVWMLTQRLALAPAIAPPHQTAAFIASMGLRNKTDKLEARALGFYGMERQPPAYQPMTPQEAQLRELARYRDFLVRERVAAANRADETSACKTVRDMEHKRLRLLDGDIKRIEEQMRRHTHETPELKRDVELLATIYGVGFITAVTIRVELGDLRRFHKARQLSAYAGLNPSLRQSGSSVNGRPHMNKQGNPRVRQCLYLAAMVAIRGHNDLQRTYLKLREQGKSAMSALGAVMRKLLVLMRAILISGKPFEPMWKTRPQAAQTP

SEQ ID NO: 444281 - protein, 311 aa, unidentified
MTDHNIGVDISKSHLDVFRLEDKMAKRFDNSVAGFRALIRWLGKARVARVVFEPTGAYHKAFEVALGTTLPLVKVNPLQARRFAEAHGTRAKTDAVDARMLALMGAAFNLEPQVPQSKETRDLRDLHVARAGLVKDRTRLRNRAVTQDLSVLKRQTKARLKLVEQQIAELDVEIVKLIEARESTARTCDILCSMPGVGAVSAAAMLTLMPELGTLDRKQAASLAGLAPITRKSGQWQGKSFIGSGRKPLRDALYMPALAAMRWNPDLKAKYEQMRAAGKPAKVAIVAIMRKLIEIANALVKANRKWTPKTA

SEQ ID NO: 444282 - protein, 312 aa, unidentified
MKRYIGIDVSKARLDVAVHDSAQCFSCDNTEAAVEALVKKMKELEPELIVMEATGGYERLCAAMLAAGLALSVVNPRQVRDFAKSTGILAKTDRLDARVLAHFGAAIKPEPRALPDAQQQLLDELMLRRRQIVAGLVAEKNRLGMARTDAVKKSLREAVAFYERLLADVDRQVGEHIERSPLWRAREDLLRSFKGVGPVSSRTLIGDLPELGTLDRKRIAALVGVAPLARDSGKRKGTRAIFGGRGQVRAALYMVAITAIRANDPIRQFYQRLRAAGKPAKVAIVACMRKILIILNAMVRTQSRWNEHLVIS

SEQ ID NO: 444283 - protein, 417 aa, unidentified
MDDEQIIERVAALDIGKAEVVCCVRLPAAGPGQRRVQEVTTHSTMTRSLTELANRLVQLGVERVVMEATSDYWRPPFYLFEAHGLDPWLVNAKDVRHLPGRPKTDVLDAVWLCKVAERQMLRPSFVPPHEIRRLRDLTRYRVDLVGARNAEKNRVEKLLEDACIKLSVVASDIFGVSGRAMMAAMIAGERDPKVLAGMARSRMRTKIGQLEEAFTGYVDDHHRFLLARMLARIDAVDADIDALDAEIEAHLAPFGDAAARLDEIPGIGAVAAAIIIAEIGVDMTRFPTPGHLASWAKFAPGVKSSAGKNKGNGSTGHGNRYLARVLGEAGIATSRTDTFLGARYRRIARRRGTKKAIVAVGRSLLTVIWHILSDPETRFTDLGADHYDRHVNTAAKKRNHIRQLEALGYHVTLEPAA

SEQ ID NO: 444284 - protein, 400 aa, unidentified
MNPVVGIDVAKDESEVQAFLEKGKPYGASFSIKHNREELDKFIKFLVEIKSITGSIPIVILESTGHYHTPIIQCLEENEILYILLNPIISYQAKKSSLRKVKTDAFDAYQLCVLYYKEEFEPYKMRGIQLLNLRNLSRQQEIVTNMYVEAKLQFHTILDQVFPEYRKVFGDLFSKVSLLILKEYPTSEKVLESNEEELTNSIREYCTSRSALWAREKAKKLIDSAKQNPFRKMMYQSHLFNLNMYIDILFHYQGHLSELESQMISLASEIEEYKIIQSIPGTGEKIAATIISEIGEIDRFNHPKKLVAYAGIDPSVYSSGKFTATTNRITKRGSSRLRHSLYLAVLCGIRSSRNKKLKEFYDKKRSEGKPSKVAIVACINKLLHWIYALLKRKEIFLDLV

SEQ ID NO: 444285 - protein, 343 aa, unidentified
MGRKIGVDLHKNSFRVCYYQNDEKYDFETYMVSVKGLEHFKKGLKKTDELAVESTGNTGHFYRAVEGKVNRIRVVNPMQFKVISQSVKKTDDEDALKIAKFLSKDMIPEVRMKSKAESQLGSLIGTRDKFVKLRTALKNKVHNILNANGIVTKTELLTSDKSLDKVLKQKLDEICLFELEIVVKEIRNLNEAIVKIDEQIKDKGSKLDGHKNITSITGIGDMSGTIFLNTIGDINYFKDDKALASYFGIVPRIRASNESVHMGRITKMGNKIARTALVQSTFVAIRYSPYLRAFYDRLKAKKGSGKAIIATARKLLGIIYNTLKNKWVFEDFASYKLAPQCAL

SEQ ID NO: 444286 - protein, 370 aa, unidentified
MLDTTTFIGLDVHARSIKAVSLDVMTGEVRAATFGYDAGAVAEWVHSVDPRARCVYESGVTGFDLQKRLSGLGVDCVVGAVSKMIKPSADRRRKNDRNDAEFLARMLSVGNVVEVWVPDDECEAARDLTRALEDARDDLSRSKQRLSKFLLRHGLVFDERTPTGRRKGNWTRAHWSWIESIRFAEGADNDVLAYYVDAVRRAAEDKARLEGLVEAEARKPRWRKRVDSLRCLKGVDTASAADLVFEAGEFSRFRNARSFAAWVGLTPSEHSSGESDRRGAITKAGNKHLRKTLVEAAWHYLTCSGRPKDLAKGQAPDRGARRHAAKGVRRLVERREALLARGVHGNKANVATARELACWVWAVGLMAEEA

SEQ ID NO: 444287 - protein, 458 aa, unidentified
MDTRIIGIDLAVTAAHKAIVLDQSSNQFVTGVVRFHTDPAEIEHLLALARAGTSGPVRLVAVLEATGMSWYMVGVYLERAGVEVYRVNGQQVADLRRVYQRHAKSDRIDARVLARLFLLHPERLHRLLLPSAEQMALQRACRELNRQTRRLSAIKRRLLATDQFAWLGLSDLLDPYQQLALWIRETWYDPWRVHQAGESAIADAWRAASPTQPADTQWIAAFCQRAAQVCALYGHPATLDYAHLQESVRREQSRLQEAQSQAHFLRLQVVRPLYRHLHPQRYLETLPGVGQDSAAVYIAFIGDIRRFPSLAHFRGWSGLTPFSRQSGEAQARGLHITQAGPSLIKATAFLDASVARLYDPQIAALYHDQMVNRGKHYLQAICACATHLLDRIYVILRDQRPYELRDVDGTPLAKRRARGICQQRYHVPDEVRQRNNHRVRQARAEERIERRTRHLQQG

SEQ ID NO: 444288 - protein, 392 aa, unidentified
MYIVGIDIGKNHHEASIVSPEGKQIGRSLRFATTHKGADSLMSFIFKNIGNSPCVFGMEATGHYWYPIYSFLKAKGYTIYVINPIQSDSLRKMYIRQTKNDSIDSFLIAEVIRFGQFGTTSMADENILAMRQLCRYRDSVISSRTEIKLRIGTIMEQIFPEYEKQFSSLWVSTSMGILEKYLTPENIENAPIDELFEIIKDKSHNRLTKSKAISIKEAAADTFGIKIAQDAFSFQLKQLIDRMNFLDKQIEALDCQILEYYEKFDCYLHTIPGIGMIAAATILAEIGDINRFKSSSALVAFAGIDPTVRQSGEFSSTHNHMSKRGSPYLRHAIFLAATTCSFHNSPLNAYYKKKREQGKHHLTATGAVARKLTTVIYAVLRDGKPYEPKSFC

SEQ ID NO: 444289 - protein, 320 aa, unidentified
MHAVLGIDVAKTKFQVSLLFPDGRRRRKSCANTPAGCAELLAWLQRHGATRVHACVEATGTYGELVATTLVDAGHQVSMLNPAVIHHYAKSRLARAKTDPVDADLIADYTAKEQPPAWTPLPCDIRELQALVRRLDALLGMQTDERNRAQAGALTPAVQQSIAAVLESLDAQIATVRRQIRGHINQHPGLRAQRDLLSTIPGIGEATAALLLAELFNKSFTSARQAAAFAGVVPRANDSGNRHGRRVMCKVGPARVRKALYFPAITALRCNPTLQPLAKRLRDAGKPEMLLIGAAMRKLIHLAFGVLKSGRAFDAHLAKA

SEQ ID NO: 444290 - protein, 384 aa, unidentified
MDHATPSTASANTLHCALELSKKSWLLAIQFPDREQPSLYPIAGGDAEKLMAKLTQARDRWAKTSGALPMITLCYEVGYDAFWLARCLKARGVECLVIDPGSLQVSRRGRRVKTDRVDVKTLLRTLIAWCRGERHVWSLVRIPSIDEEDLRRSHRERNRLVRERTAHINRIKGLLFAQGIRDINVKSRYKTLAVDELVTGDGHRLPPRLAGEIAREIRRLATVQEQIAEIERERDAAPTTCEATERKRDLLSQLKSIGPAISAFLSREVYYRQFANQRQVGSFLGLTPSPYDSGDEERCQGISRAGSGHARAVMIETAWLWIKHQPKSALSRWFVERTAGQSKRVRKIIIVAVARKLAIALWRYVELGLVPQGAILNPRMKARS

SEQ ID NO: 444291 - protein, 411 aa, unidentified
MRRIIGMDIHRTFAEVVFWEDGRLRPVGRVDMTRSGLEGFGRTLSKEDEVVIEATGNAMSVVRVLGPYVVRVIVANPMHVKAIAHAHVKTDKIDAGVLASLRAADFLPEIWVPDANTERLRRLVARRNQIVRQRTRIKNEVHSILHAHLISPCPHAELFGRLGRSWLGRQPLPSDELMAIDRHLRELDRLGEDLAVLDREIAQAATDDSAVKRLLTISGINLTVAAGLVAAIGDVKRFASPQKLVSYVGLNPRVRQSGLGPVQYGRISKRGRAHARAMLVEAAWAAAQAPGPFHAFFLRIRARRGHQIAAVAVARKLAVLCWHLLTKETDYLWVRPALVATKLRAMELQAGMPAKKGNKRGPAYAYNVKELRDREIDVARHAERAYECFVSQWQPRRPNVRRTGAAKEERR

SEQ ID NO: 444292 - protein, 344 aa, unidentified
MNHYAGIDVSLKSSAVCIVDGAGKIVREAAVESEPAVLIGWFKQFGIEVERIGLEAGPLSQWLYAAMQEAGQRVELLETRHVRDAFRAMSVKSDRNDARGIAQLMRLGWFRPVHCKSIEAQEMRAVLTARKLLQSKLHDVENCLRGVLRGFGLKVGKTTDRSFATRIEALVAGHSGLTLVVQALLEAHTVLLREFKKLDKQVQQLAKAHPQAKLLMTTPAVGPIVALTYMFAIDDPKRFRSSKATGAHFGLTPRRYQSGETDYSGRITKVGDASVREALYQAAHIMLTKPVKNCSQLKSWAMRVARRAGPRKAKVALARKLAVILHRMLADNMPFNPAAKAAAT

SEQ ID NO: 444293 - protein, 343 aa, unidentified
MTYFVGLDVSQKMTAICVVDDTGRRLWRGQCPTNPEQISIFVRRHAGDDARIGIETGAMTPWLVHELRNLGLEVVCLDARHARAALEMQINKTDQNDAEGLAQIVRTGWYRSVHVKSFESHRARALLGARTQLIGMTTRLSNHIRGVLKTFGLLPGAMRGLPFDRKVEALILHRSDVALIVRPMLVAWRQVREQIAVFDKAIRVLVRSSSACRLLMSVPGIGVLSALAYVSTVEDPGRFSRSRSVGAHLGLTPRQYQSGEVDRSGRISKCGDTLARTLLYEAAVVILTRLKKASSLKDWGHAIARRSGNGKARVAVARKLSVILHSVWRSGQPFRWPEHANVA

SEQ ID NO: 444294 - protein, 454 aa, unidentified
MNGDVMIAVDPHKASNTAAVLDPVTKTVIEAARFANSAEGYVRLTGFAGRWEQRRWAVEGCRGAGRSLAQRLVADGELVLDVPAKLAARVRVYSQGHGRKTDRDDAISIGLAALDGAGITQVSCDDALVSLRLLCDRREELGRLRTQAVCRLHRLLAELTPGGMRGELCASRAEAVLARLRPADEVGQIRLQLARDHLADITALDAKMKAAGAQIAAAVAATGTTLTSLFGIGPVIAGRLLAETGDVARFATKDHFASYNGTAPIDASSGEQARHRLSRAGNRRINHALHMMAVTQIRYPHTQGRRYYERKRTEGKTPKEALRCLKRRLSDLAYRQLVTDQRGRIGTCGSPTTPRPTPSTSISPASRSHRAAPPSRPAPRPASKPSSRSTGKVTASSASKSSTPAADCTQTSSTKPRSSANRAAAFPALPPAAAQDAGAQPASRPGRRPAAKLP

SEQ ID NO: 444295 - protein, 356 aa, unidentified
MASRTVNVTQKQEDASMESRESFWVGFDVGKNSFSAALDCHGKNIRAKITSLPCRDFKRTPEGVEQFFLWAKKTIPGHDIRIVMETTGCYSQHLTDWINQLHPEISVTIENARNIHAFIQSLNPPHKTDKLDAQAIARFGSERHPKPTNRPSKTILTIRELSRERTALIKARVNLENRRDTLTSPVVRKINAQALATLTTQIEKIDREIKACVVQDEELLSEVHIMTTMPGVSFISAYSILAEIGSLKQYSAKELSALSGLAPRIIDSGSSVHSSYLSRRSSGRLRQTLYLDSVPGVPKIPVLQEFHQRLIGKGKKKMTARCACMRKMLLILRSMVVHNTPFNDKFPNNQRKELDF

SEQ ID NO: 444296 - protein, 412 aa, unidentified
MQTLVERGCGLDVHQATVVACLLIVCKDGKVQKQLRTFGTTTRELLRLREWLLSEGCTHLAMESTGVYWKPVYAILEGALQIVVANAQHVKKVPGRKTDVKDAEWIAELLCHGLLRSSFVPPQPIRELRDFTRYRRKLVESRSSERNRLLKVLETANIKLASVATDVFGTSGRLMLRALIEGKSTPQEMADLAKGLLRKKIPELELALEGKLEEHHRFLLKLQLDRLERVESDLAALEQRIQEKLQPYATQLALLQEIPGVERTLAAVIIAELGVDMSVFQSVSQLASWAGVCPGNNESAGKRKSSRIPKGNVYLKTALVEAANSAARAKGTYLRDKFYRLKARRGYKRAAVAIAHKILLSIYHMLSQNVSYNDLGDCYLDNLNKHHLTRNLVHRLERLGYSVTLTLEQEAG

SEQ ID NO: 444297 - protein, 356 aa, unidentified
MSRDIQYIGMDVHKEAVVIAVFNSSGKLVMESIVETKASSILQFIHGLRGELHVTWEEGTWAAWLYDLLKPHVHQVLVCDPRRNALLKEGNKSDKIDARKLADLLRTGMLRPVYHGEHGLRTLRELGRSYRTISQDLNRVMNRIKALYRGGSIPCAGTQVYALRYREEWLHKIEHAGVRRRAELLYQQLDGLQGLRRTLRPELLAESRKHKAAKLLRQIPCIGPIRAARLIALMQTPHRFRSKRQLWTYSGLGIETRDSAQYRFVRGQLQHAKKPQQIRGLNQNHNHEMKEIFKGAATRASCGVGPLRDFYVALLAKGMKPEMARLTLARKIAAIALTLWKKEERFDAEQLKPQAA

SEQ ID NO: 444298 - protein, 454 aa, unidentified
MKTKKVRTNEKMISMPVVNPHAAGIDIGSKSHFVCVSQDNVKEFGAFTSDLYDIVNHLQKHQVKTVAIESTGFYWQSLFVILQENEFEVFLVNSRHLKNVKGHKTDVVDSRWLQLMHSIGMLTNSFQPDAFTLELRNYVRHRKSLVEDASRFVSKMNKVMVLMNIRLSTVLRDITGESGLKVIKAILDGERNPAKLEELISYRCKTSRGDIQKSLQGDWRKEYLFELRDCYEFYQYYWAKIRNIDTEIEHLIEEHAKQTTHEVSNKDYKAPKKKFHQKNDPEFSVEKYAYEMTSGVDLLQIDGVGINTVLTMMSETGFDISKKFQTAKHFASWLGFTPNRRISGGKELSSKTRKKTNPLAKIIRDAANAAGNSKSRLGDFFKRLAYRKGRMVAIIATARKIAVIIFNMLTKRESYCYEFSEAETEKIKNVKIQKVLKALKSYNISKNDLDFAWA

SEQ ID NO: 444299 - protein, 478 aa, unidentified
MRADRRWRTRKEKKEWARRLQSNDPGLDVIHPQAAGIDIGNASHYVAVRPDRDPEPVGRFECFTADLHRLADWLNSCGVTTVAMQSTGVYWIPLYDILEERGFEVYLVNARHTKNLPGRKSDVQECQWLLKLHTYGLLNNSFQPTSQIRVLRTYWRQRAEHVRAAASCIQRMQKALTQMNVQLANVISDLSGLTGQLIVRAIVGGERDPQKLAELRDPRIQASPEEVAKSLEGDWRPELLFLLKQEVDTYDTYQKRIAECDQQLQQQLASFASVAPEVAAAPVTQVQGGDQPKQAQAKRKKPAKNAPHFNLEQELQRVAGVDLTRIDGIDVMVAQTILAEVGLDMGRWKTESHFASWLGLCPDNRITGDKVVGRGTRHVVNRAATALRMAANALLRSHTYLGAQYRRLRTKLGAPKAITAMAHRLARLVYRMLKYGQRYVDKGAEYYEQNYRNQQLQFLRKKAAQLGFQLTEAETQTA

SEQ ID NO: 444300 - protein, 338 aa, unidentified
MNIVFLGIDLAKNVFQLCGLNQAGKPVYTKRTGRKELLQTLANIPACLIGIEASTGAFYWQREFEKLGHKVKVISPQYVKPFVRGQKNDGNDAQAIAVALMQPTMQFVPPKSPEQQDIQALHRARQRIVNHRTATVCQIRGLLLDRGIPIGSAVSRARRAIPLILEDAENGLSSRMRRTIAELYDLFNDLGRRIHFFDKEIETVFRQSEACQRIAKVKGIGPETATAVVAAIGKGTEFKNGRHFAAWLGLVPRQHSSGDRQVLMNMTKKGDKHLRTLFIHGARAAVRVATNNNDGHMNQWVNQLKERRGFNKTTVAVANKNARIIWSMLRNDTGYQVV

SEQ ID NO: 444301 - protein, 455 aa, unidentified
MAKKGKKHPSTPENMPILHPHAAGIDVGAEEHWVCVPADRDAQPVQKFSAFTCDLHRLADWLTACRVTTVAMESTGVYWIPLFQILEARGFAVALVNARHVKNVPGRPKTDRFDGRWLHKLHSYGLLAPSFRPPEDICQLRSLLRHRENLIQMTVKPMQHMHKSLDQMHLHLHHVISDVTGVTGMRIIRAIVAGERDPKALATYRDYRIKSAQDTIAKALEGDYRPEHVFTLTQSLALYDFTQQQIAACDQEIERVLDTFDSLVDPEDHPLPPPTTAHRRPQRNEPAFDLRTHLYRITGVDLTQVPGLQAPTIHIVLAEVGLNRHKWPTDKHFASWLGLCPDNQISGGKVLSTSSRRVQNRASRALRMAAQSLRTSPSYLGAFHRRMRSKLGPAKATTATAHKLAKIIYHMLQDKTPYQERGAEHYLHKDQERKIRQLRKQAKHLGFDLVLQTSH

SEQ ID NO: 444302 - protein, 400 aa, unidentified
MLSIGIDVSKGKSTVCGMKPGGEIVYAPFEVQHTREGMSELVSLLHNSGEEVRVVLESTGSYHCPVVAALLENGIFVSVVNSLRMKRFCSQSIRKVKTDRIDAMQIALYGLAYWQELQPARLPEDTYRELQLLARQYYQMTSLLIKAKVDFNAICDQVLPGMQELMNDHAGRHKLSDFVLRYCHTTHILEMGETRFRKDYCKWAEKKGYRNCERMAVLIFATAQNGIPVLPNAPSTQIVITEAIRVLHTVEASRDAILTQMQALAKTLPEYSLVREMPCIGDTLAPRLIAEIGDVRRFHSKRALIAYAGIDAPPYQSGKFCANNRHISKRGNRYLRKTGYEVMQSYVMHKPANDPIFTFIEKKRGEGKSGKLAMVAGLNKFLRVYYGKVTELYRSLPAIE

SEQ ID NO: 444303 - protein, 346 aa, unidentified
MQYLGFDIHKRYTFFTQMDATGQVLRQGKLPNTRQALGDFFADVGEPAQVVLEATMNWYHLYDLLETLQIPVVLAHPMRTRAIAEAKVKTDKVDSTTLAHLLRSDLIPRAYIPPRAIRDLRELLRYRAALVRLQTGVKNRVHSILLKHGYEAPVTDVFGTKGRRWLATLSLRAVYRDALAGLLAVLDVVQQQIAAASRTIDDEAARSPAAQRLRTLPGIGPYSALLILAEIGDIMRFPDPKHLVSYAGLAPRVRASGGRTFIGHISRQGSAWLRWVLVEAAQHAARRPGRYQDLFRRIGARKGRHIARVAVARALLTTIFWTLRHDETRQGSGLPEARMVPGGPVN

SEQ ID NO: 444304 - protein, 409 aa, unidentified
MDVMFERVAGLDIGKKSVTVCVRTPGAGSGRRSETRTFRTMTRSLAVMADWLVEQGVTLSAMESTSTYWKPVFYCLEERMECWLLNAGHMKAVPGRKTDVKDAEWIAQLLEHGLVRPSFVPPPPIRRLRLLTRYRTQLMGDRTRDAGRLEKMLEDASIKVSSVASSVTTVSARAMLAALVAGEADPAVLADLAKGKMRAKIPDLVEALTGHFDPDHARLTSAMLGRLDRADAALAGLDEVIDAATQPWAHQIKLLQTIPGVGIKVAQVIIAETGADMARFPSAAHLAAWAGLAPAIHESAGRRTPAGTRQGNKWLTSMLVDAAGSASRSKNTYLAAQQARLATRRGAKRAQIAVAHSILVSAYYMLQRDQPYQDLGPDWLQRRHDQAHTRRLVAQLERLGHTVVLDPAA

SEQ ID NO: 444305 - protein, 341 aa, unidentified
MSKVTVYVGLDYHKDSIQVCVMDQSGQVLANRSCPNDVQALVLLVAFFGDQVRGAIEACTGAAELADELVARHGWDLDLAHPGSVARLKQSPDKSDYSDAKMLADLVRVGYLPRVWLAPHDVRQLRTTVRYRQQLVNQRRAAKLRVTALLREARLVEPKPRRWGGPWLSWLATAEGLGSEARFVVDCHLAELRRLDEQLLRVQLRLATVTAEDPVVARLVAMRGVGLVTAWALRAEIGRFDRFRTGKQLARYCGLSPRNASSGQRQADAGLIKAGSELLRATLIEAAHRLIRFDTRWGELAAAMRAAGKPACVVAAAVANRWVRWLFHQVEGGAITLKTAG

SEQ ID NO: 444306 - protein, 395 aa, unidentified
MNKVIHYVGLDVHKETIAVSIAPQNTTEVRRYGIIGGTLDAVDKLIKKLSADNVELRWVYEAGPCGFVLCRHLRSKGFVCQVVAPSLIPKKASDRVKTDRRDADQLARLYRAGELTAIHVPDQEDEAIRDLVRARTSAVVEQRKARNRLKGFLLRLGYRYTGKSGWNDAHKRYLSSLVMPRPAQQIAFQEYIHAINDATERLERLSQAVEDALPGWKWEPVVRTLMSLRGVQVLTGMTLVAEVGDFSRFDDARSLMNFFGLTPSEHSSGGSRVQGGITKCGNVHCRRVLTEAAWHYRLTPKVSEPLQKRQEGQSKEVRLIAWNAQKRLHQRFRQLSAKKKSVIAAAAVARELTGFVWAIARQVKPVERPAAPEISRTCRGKVYRLNPEKKMQPAK

SEQ ID NO: 444307 - protein, 377 aa, unidentified
MEKIAYIGVDVHKDTNTAFMFYRDSQGNPSYYEIGTVASGTTPITRAIKKAMANCNLDPSFEVLAGYEAGPTGYGLCKSLQSQGYGCVIMAPTTTKKAPGERTKTDRRDARMLAMALATDAYKPVYVLDDEDQATREFTRARNALKGHMKKAKQQLLSFLLRLGRSYPDSGNNWTQKYMKWLESLEFNDPMLRYSFQTYLQEIKDFKVKIDMMDKMIEDLSKQDRYKGKVDKLMCFTGVEAHTALALVCEVGDFNRFPSAKEFSSYLGLCPGQVSTGKHIQYTGITKTGNSRVRTLLVEATKGIKRSNPYSKSWRISSRQQGQSPEIIAYADRGTKRIKKRMQNLESNRNKNANVATAAGARELACFVWGMMTGNIA

SEQ ID NO: 444308 - protein, 393 aa, unidentified
MALYVGIDVSKDKFDACGIGDEGEKLFSLSCSMNRAGFDKLVVQLTKVNTAALLLGLESTASYHIALCSYLTAKGYQVAIINPLLIANFAKLSLRKTKTDKKDAFTIAQFLLLQKAAVTTKTESPHLTELRDLSRRRERLVDQTTSLKNDMKRILSVTFPELETITGIFTKSTLRLLTQFPSAHAMVEAGYDAVAPIVTTRSSGRKSSASVQKLLDVATTSVGVASPAKDLILKQEASLLVGLQEQAEEIMNLIKTLSDEKIKRSAEILTSMRGIGDKTAFNFLIELGGDVKAFENDRKLIAAAGLDPTTYESGKYKGQSKISKRGNRHLRRVVWLMTTKVIIANPVFRAYYFKRREEGLIYKKAVLATAHKLIRVIFSMLVNQKPFDAERGK

SEQ ID NO: 444309 - protein, 423 aa, unidentified
MDKNDDSRLRVFRQMKSEVRGSADYLLVGIDVAKDRHDAFFGSSLGKTFLRKLSFATTREGFEKLCLHAEALKMQHGLKNIAFGLEPTADYHKPLGEYLIQKGHTVVLVAGSAVKKNRELLDGRWDKHDAKDAANVADLLSQGKCLFYELPSPDLRELRSLLSLKRKLKKSEQTYKVRIRNHLIAQYFPEMDSYFSYGEGPAIVRWCLDPKELSLLPFEEFVRMVSSRNGGEKQHVRLREIHEKAGSSIGCSAHPSVAFEAKTLLDALRQLHATIQETDKLIAEVCRRFPEYAFLLTIPGFGPDISAKVLGAIGNPHRFQNHRQVLKTAGLDLSADRSGKRSDVTPVISKRGKADLRYGLYQAALVASQKNATFMRYFTRKLEGRQREKGIGTKMRVKLAAKMLVIAWTLMKKKEAFNPGCIG

SEQ ID NO: 444310 - protein, 356 aa, unidentified
MSQKLNAAIAVIGIDIGKNSFHIVGHDHRGAIVLRQKWSRGQVETRLANLPPCLIGMEACVGAHHLSRKLQMLGHDARLMPAKYVRPYSKGQKNDFRDAEAIAEAVQRPTMKFVATKTADQLDLQALHRVRDRLVGQRTGVINQIRAFLLERGIAVRQGLRSLRSELPGILATRTDVLSPRMLRIIEGLAGDWRRLDERIEGLSSEIETLARQDKACERLMTVPGIGPIISSAMVAAIGTGDVFSKGRDFGAWLGLVPKQISTGDRTILGKISRRGNRYLRSLFVQAAWVVLVKIGPKHWDRYGLKSWIEAARKRLHHNVLAIALANKLARIAWAVLNKGRAFECVKTEETASRPA

SEQ ID NO: 444311 - protein, 350 aa, unidentified
MQIIGVDLHTRQQTVAMLNVETGEIVEKTLPHEGDSVREFYSTLAGPTRVGIEATGSMQWFLELMEELGIDCEVGHPAKIRAAEPRKQKHDRRDAALVLQLLVENRFPSIWMPSSEQRDVRSLILYRHQWVRIRTRVQNALQAIALSHGLRRGSSLWSEEGQQTIASLSLTRYTAERRTALQSLYRHLEEQIEDLNRKVEELAWERPQARRLMTHPGVGPITALATETFLGEPKRFVDGKAVASYVGLIPSEHSSGGRQRLGGLSKQGNPLLRFLWCEAVGHAVRKDAELQRFYQHKLVQKGLGKAKVAAARKLGIRLWILLRDQIDYQEFCRRGQLRQKHGGAHAGMPA

SEQ ID NO: 444312 - protein, 410 aa, unidentified
MRYHIGVDWADQEHAVWVEDEQGQRVSAGNKVPHSAAGFSDWGQELNAWRAQGITLWAAIERPEGRVVDFLLDHGVRVYPVNPKALDRARDRFRQSGAKDDLFDARVLAGFLRTDHGHLTALEPSSEAAQELKLLTEDCHRQLREQTRLMNQLTATLKEYYPRALEVAELTTALQREFLQAYPTPESLTALTERQWQRWARAHRLSAARTTELWTTLKQPQLPVPAHVVRAKSRLMQALVAELAVVVQMVARYRQAVDDFFAGMPAATWARTLPVGEHGITVPTLWARLGDAPSRWDSAEHLQAQAGMVPVTVRSGKQLVVLFRFACDKQLRYTVDQLAWLSLSGSDWARAYYDQQRERGHRHRRALRALGAKWLKIIFVMWRRQIPYDEEHHLATMARQALRRPEKKIA

SEQ ID NO: 444313 - protein, 311 aa, unidentified
MESAVFVGIDVSQERLDVAVSGARRVLQSSNDEVGLEALCEQLVDLRPERVVMEASGGYERGVAMSMLMAGLPVAVVNPRQVRDFARSLGHLAKTDAIDARVLARFAEVVRPEVSKLSSEAEERLRALELRRRQLVEIIVAERNRLRSAPRLADRIEEHLRWLEQDLTEIDKEMKELIESDSQWQAKAAILQSMPGVGSVVSVTLLSGLPELGRLNRKKISALVGVAPFNWDSGKLRGKRAVWGGRAHIRSVLYMAALVATRCNPVIRELYQRLCAAGKPKKVALVAAMRKLLVILNSMIKNESKWSAATQ

SEQ ID NO: 444314 - protein, 347 aa, unidentified
MNITAVGIDLAKLVFQVHGVNGHGKAVIRKQLKRTELTRFFANLPACLIGMEACSSAHYWARKLIEQGHTVKLMAPQFVKPYVKTNKNDARDAEAICEAVARPNMRFVPIKNVEQQVLLGIHRARQGFVKARTAQANQIRGLLAEFGIVMPKGVRFIAQQMPGILEDAENGLPHRSRELFAQLLAHFRNLDHQMNELERQIKTWHRQSSQSQRLEKIPGLGPLTASAVVASVGDAKTFRNGRQFAAWLGLVPRQKSSGGKEQLLGISKRGDTYLRTLLIHGARSVLFSLKRHADEPSGWLMRVAERRNLNIAAVALANKNARIIWALLAHEREYQAGYTSSSIAVAS

SEQ ID NO: 444315 - protein, 344 aa, unidentified
MFYCGLDVSLRETAICIVDADGKIVKELKVSSDPDAIANAIRDSGFVCEKVGLESGSTAAWLQAGLVTLEFPAICIDARHAAAMLRAGLRNKSDRNDARGIAQLMRVNAYRPVWVKSERSQRLGALFTARNTLQDQLVRIENVVRGLLRCDGIRLPLGRRHFEAEVRTRVGDHAEIMSTIEPLLIARAELIRQRTVFDRRIITLARRDEVCKLLMTMPGVGAHVALSFKAGIDDPDRFRRSRNVGAHFGLTPRRYSSGEVDLSGHISKMGDRHVRHMLYVAAQVTLRRDQGLWSSMKAWAMNVAKKRGLAKARIALARRIAVTLHKMWLTGEPFHWQKPGAAMA

SEQ ID NO: 444316 - protein, 447 aa, unidentified
MEILHERCAGLDVHKKNVKACLACPAGGGKRKKETRTYLTMTQSLLEMRDWLKEQGCTHIAMEATGVYWKPIYNLLEGDFEILVVNAHHIKTVPGRKTDVKDAEWIADLLSYGLLSASFIPAAPQRELRDLTRYRTKLVEERAREINRIQKTLEDTNLKLGDVVSDVMGKASRLILSALVEGESDPVKLASFALGRVRASQEDLERALTGKVTAHHRFLLGEHLRQIEHLDEAIRRVSEEIARRFTLPEPPAEEDGRSHAASEPTTEASETPPSSGVLAPLSWQEAVRLVDEVTGISEQVAQGLLAEIGINMDQFPSSKHLASWVGMCPGNHESAGKRLSGKTRKGNPYARRLLIQAAHAAGKSKNTYLGAQYRRLANRKGSKKAAVAVGHSILVIIYHLLRDHSSYHDLGGNYFDERDRQVVQKQLIRRLERMGYQVELQPLAQVG

SEQ ID NO: 444317 - protein, 341 aa, unidentified
MGRYIGVDLHKTAFTVCYMERGGEKQLKTYKVSVKGLDEFKKELSSEDEVAVEATGNAGHFVRGIEGLVKEVKLVNPMQFKVISSSVKKTDEKDAEVIARYLSKGLIPEVRVRSKSESQLASLIGTRDRFIKLRTALKNKIHNILNANGIVTKKEIFGTDKGLEKVLAMEIEEESKFELRIIVKQIRSLNESIDEINRELTDRGSKLKGHKNLTSIKGIGDISATILLNTIGDIKDFDDDRKLASYLGMVPRVYISNETSHYGKITKMGNKIARTAVVQSTLIAIRYNPYLRNFYEKLKAKKGSGKAIIATSRKLLTIIYRTLKYDWVFEDFTKYKIVATT

SEQ ID NO: 444318 - protein, 353 aa, unidentified
MPCERARRPLMEAYAGKQFVGIDLHRRRTVIVRTTEAGEVLETVQIVNDVQRLASVMARAGQCPEVVLEATYGWYWAVDALQAGGANVHLAHPLGVKAFEYRRVKNDVRDAQDLADLLRMGRLPEAWIAPPPTRELRELVRHRAKLVGLRSHCKAEVHAVLAKCGVQVLMSDLFGLAGTELLDSLELPAPYAARIASLRRLMDDLDFEINLFAGIIRGRMAHEPGYTAVQKIPGIGPTLAAVLVAEIGDVSRFASASKLTCWAGLTPKHHESDTHVRRGRITKQGSRLVRWAAIESVKTVSKGSVVGVLRERVADRRGRNIGSVAAARRQLELVFYALRDGHVRALEHLPAAA

SEQ ID NO: 444319 - protein, 428 aa, unidentified
MNYNTQNAKIASITEKTLIVGIDVGSETHYARAFDWRNYEYTKKPLEFSNSEAGFQIFKAWMEDIAEKYGKTAVIPGMEPTGHYWFALGKFLQDNGMKPVHVNPHHVKKSKELDDNNPNKNDRKDPKTIAALVNEGRFSYPYMPVGIYAEIRSLSNLRFQTQEELTRIKNRLARWFTIYFPEYKDVYGDLKAVSGRMVLKAAPLPEDIISLGVEGVNQVWRDAKLRGAGMKRAKTLVSAAEHSVGSKEAPEAARIELKNLLSDMDVYASRMEELLQRIEEKVKKIPHIENLLAIKGIGMVTVSGFIAEVGDIKRFDNPKQLQKLAGYAIVANDSGKHNGESRISYRGRKRLRYVLYEAAISLVGKNAEFREIHEYYRTRKENPLKKMQSVVAVACKALRIFYAILTKGVHYDPEKLLGDVRRPQVQAA

SEQ ID NO: 444320 - protein, 370 aa, unidentified
MHQSSTLYVGLDVHKESIAVAYVAKDHDAEVLFLGTIGTRHCDIDKLIRNMQSKAKQLVFVYEAGPCGYWLYRYLRKKGYECWVVAPSLIPKKAGDRVNTDRRDAVQLARLMRSGDLTPVSVPTAADEAIRDLSRAREDAIGDLKTAKFRLKAFLLRHDIRYTGRATWSPAHLRWLAEVVCPTPAQQIVFQEYVRAVNEHTERLQRLEQALQDQVKSWRLRPVVDALQALRGVQFTVAVTMVAELGDLTRFDTPRQLMKFLGLIPSEYASGERRRQGAITKAGNTHARRAIVEGAWAYRYPAKVSRHLQLRLETQPKVIQDISWKAQVRRCQRYRRLMARGKHANQVVVAIARELVGFMWAIAKQVPMTP

SEQ ID NO: 444321 - protein, 313 aa, unidentified
MTTSGAWIGVDICKRYLDVGSTTGTPVRVANDADGRAALARRLRCENVRGVILEATGGLERPLMQAFAAEGVPASIVNPARVRKFAEGVGQLAKSDRIDTTMLARFGDYMKPGPTALADPPRQKLRDLLAYRAQINQEITARSAQIRLYTATDLLARAKAAIEALRAERKTIEREIEALIKAQAAMQVVYQRLITMPGVGLIVAATMIAELRELGDMNRRQIASICGVAPFPNESGDRKGYRSIRGGRDEVRQALFNCARVAIRHNSVAKPFYERLRARGKAHKVALVATMRKLLTILNAMLKTNTDWTCKPA

SEQ ID NO: 444322 - protein, 348 aa, unidentified
MRFYNHTHAFYAGVDLHARSMFTHVLDSQGATVFAKDLPAQPQAFLDAVAPYRAGLVVGVECMFAWYWLADLCEDEAIAFTLGHALYMKAVHGGKAKNDRIDAAKIAGLLRGGMFPMAYVYPRDKRETRDLFRRRCFFVNQRSQLIAHIVNTNSQYNHPPLTAKLSYAGNRSEDFAQRFKHASTQLSIQADLKLIDAFDAQIDAIERHVLKNAKIDDPATLAFLRTIPGIGKILSLIMLYEIDRIGRFPEVGNFLSYARLVRCEHESAGKKKGSGGKKIGNAHLKWAFSEAACLMLRALPEAKKWLAKQERKRGKKKALSVLEAKIGRTVYHLWRKQQAFDAKRFFAS

SEQ ID NO: 444323 - protein, 356 aa, unidentified
MKKTNHLNFVNQHIYVAIDVHYKSWVVSIICNNLFLGSFSQDPDVMRLVNHLKKNYPFANYHCVYEAGFSGFWIYYSLIENGIDCLVVNPADVPTTHKEKDRKTDKIDSRKLCRCLSLGQLEGVYILDRQRYEERSLVRGRSSLVQEQTRCKNRIKGLMKFFGIEITDDDIKAHWSNKYLQYLDNIKTEYGWAKKTLSLYLSQLRYYRKLISDVTKEIRNLSRTEGYLRDVAILKNIPGISTLTAMILLVEFGDIRRFKNVDKLCGYVGLIPSEHSSGESEHRGKMTKRGKGILKAAIIESSWIAVRKDPKLLMYYNNQCQRHRKTRAIISVSRKLIARIMHDLKHKDQNNYQKVS

SEQ ID NO: 444324 - protein, 402 aa, unidentified
MRYIGLDVGRDFAHAAVVEGTGSARKLGRLRMGEELAAFAATLGPDDAVALEASGNTWALVELLGRHAGRVVVSNPLRTRAIADAKRKTDDIDAATLAELLAADYLPAVWIPDEATRRLRRIVAHRAGLVRDRTATRNRVSAILGRRLVRSPLSDPFGSRGRAWLAALELPPDERLALDSALRLNAVLDAEVDLADRAIATALIDDPRVRHLLTIPGIGLVTAAGILAVVGDIGRFPRPAKLVSYLGLDPKVRQSGDRPAHPGHISRAGQAHARGLVTEAAHAAVRAPGPLATSFLRLRARRGGGIAIVAVARKLAVLVWHLLTKDEDYRDARPDLVRAKQRALGRLAGRATARTRPSHRGATGSSHDQGRARLRGGDDPHHPALRHAIDRVQLDDTPVPGA

SEQ ID NO: 444325 - protein, 391 aa, unidentified
MVCVGIDVAKDKHDCCILDSDGTIRADCITIPNNMDGFKQLLQTIRDCTKKADKIKVGLEATGHYSYNILGFLLDNDLAVYVMNPLHTNLYRKSLSLRKTKTDRVDARTIATMLLSDVDLKSYTDTAYHNEELKSLTRYRFDKVRERAKLKQSVSRLVTILFPELEKLVPSLHIASVYALLSEYPGAKQISEIHLTKLTNLLATASKGRYGKDKAIQIRDAARTSIGSVMPAKFLELKHTIKLIRELTSEIDEIEVSIQKIMDELNPPILSIPGVGIQSAAMILAEIGDFSNFESPDKILAYAGCSPSTYQSGKLTNCYAHMEKRGSRYLRYALYNATKYVCHWNPVFAEYLAKKRAEGKHYNVALSHATKKLVRLIYALQKSGKAYLVAA

SEQ ID NO: 444326 - protein, 313 aa, unidentified
MPQFTPVAGIDCSQARLDVHIHPLGVAFAVTNDAEGWDELDRRLKDARVEVVGIEASGGCEREASRFLDAQGYSVRLLDPYRVRQFAKAAGKQAKNDRIDAAMIARFVAIMPTRPMRRLKHVEKLAELVLARSQLLDQLTLAANQSRHHQDALLRRLDRSRAARLKSDIETLDRRIAEVVEADGELKAKNTILRSMKGVGPVLAHTLLALLPELGHLGRKQIAHLAGLAPFDDDSGKRKGVRVIKGGRPAVRAPLYMAALVGGIHNPALKTCRDRLRAAGKKPKVAIVAVMRKMLTTLNALVRDGVQWQNRHA

SEQ ID NO: 444327 - protein, 370 aa, unidentified
MKLFVGIDVSSEKLDVCFLTDDNQLSILSEISVANDIEGASFIRETILEFNDSYHFDQIVIGMESTSMYSFHPSMFFHEDEKLKKLNTLVTIENPFRVKQFSRMFDENKTDRNDALRIADFLRIQRFTTSPIKEEKYMALQRLTRTRYQLIKQLIRTKQHFLENLTYKCNTLAREMRDESTSLFSATLISLMTEDFTLDELAELPLEAFCDLLQEKGKGRFKQPEKIAKAIQRAITMSYRLGALAQESINVVLSVLVREIRALEKNIKELDKAIEQVIVVIPEYQCLTSIPGVGKVYAAGLIAEIGQIERFEDQTKLAKYAGLSWKVNQSGNYQSQNTPLTKQGNRYFRYYLVEAANSVKNYLPEYKAFY

SEQ ID NO: 444328 - protein, 354 aa, unidentified
MSQTPNTAIAVIGIDIGKNSFHVVGHDARGAILLRQKWSRGQVEERLANIPPCLIGMEACVGAHHLSRKLASLGHDARLMPAKYVRPYSKGQKNDFNDAEAIAEAVQRPTMKFVATKTAEQLDLQALHRVRERLVSQRTGIINQIRAFMLERGIAVRQGIGFLRTELPTILATRTDAVSPRMLRVIEELAGDWRRLDQRIDGLSGEIEALARQDQACSRLMTVPGIGPIISSAMVAAIGTGDVFSKGRDFGAWLGLVPKQISTGDRTILGKISRRGNRYLRVLFVQAAWVVLVRIKNWERYGLKSWIEAAKRRLHHNVLAIALANKLARIAWAVLAKGRTFELTRTDDAGVRPA

SEQ ID NO: 444329 - protein, 350 aa, unidentified
MTTIAEARPVVTGGVDTHLDVHVAAVVTAVGGVLGTEQFPTTAVGYRRMVAWMRSFGPLDRVGVEGTGTYGVSLARHLRAEQVSVVEVMRPNRQVRRRHGKTDVVDAIAAARAVLSGEANATPKTHDGPVEALRTLKVLQRSATKARTQALNQLRALLVTAPDELRARLRDLTQRDLLATCAAFRVSDDDDRLAAVTRFGLRELAQRALFLAERLEQVKLRLKRITEQIAPALTVLKGVGPDVASTLLLAAGDNPERLVNERSFASLCGVSPVQASSGKTHRHRLNRGGDRQANAALWRIALVRLNCDQRTKDYLTKRVSDGKNKTEAIRCLKRYIAREIFAALPVPAAA

SEQ ID NO: 444330 - protein, 471 aa, unidentified
MKLKPSDSPRQPKPLQSPSSIEAAPLDTLKQINLNAAGMDIGDRSIYVCVPAGRDEQSVRVFSTFTADLNALADWLSQCGVKTVAMESTGVYWIAIFQILEARGFEVYLVNAAHIKNVPGKKTDILDCQWIQQLHTYGLLQASFRPDELTCVLRSFVRQRHMLIRNRASHIQHIQKALQQMNLKLTNVLKDITGQTGMSLLRDSLAGVHDPQQLARHRHPCCAKSEAEIAKSLEGDYRAEHLFALRQAVELFDVYTEKLRACEREIEQQLAKFTPQVNQPEQPLPPPTRRVTDRPKNHPLQDIRPALYQMAGVDLTQVDGLDILTVETILSEIGTDMSRWHSVKHFTSWLGLSPQNEKTGGKVIRTRTKKTNNRANGAFRQAAQALTRSKSALGQFYRRMRTKMGAPKAITATAHKLARIVYHMLKYRVPFAAVPPHQDETQSRERAIRQLQRQAERLGVTVVVEPSPQSL

SEQ ID NO: 444331 - protein, 351 aa, unidentified
MAAVMIGIDPHKGSHTAVAIGAAEKPLGEVRVRSSAAQTERLVAWAAPWPERTWAVEGAGGLGYLLAQQLVAAGERVLDVQPKLGARVRLLATGATNKNDPNDARSVAIAALRSPARREVTAENHAAVRKVWSKRHRDLGRTRTRVACRLHALLCDLVPGGISTEITAAQATIFLKQIEPSEAVALARCELAAEFPGDLRRIDAQMRDTKKRIAVAVRASGTTVTEIFGVGPVIAATMVGYVAGVSRFPSRDRFAAYNGTAPIEVSSGDRKIYRLPRRGNRRLNHAIHMAAVTQIRHRHSQGRAYYDRKIAEGKTPKEALRCLIGGLSVVRPARVVVPRSCRGMATLPCRL

SEQ ID NO: 444332 - protein, 392 aa, unidentified
MQLEVQMTKSNDLNMSLVPFKQDACVVAVVELSQSNWLVAAAVPGIERQPLKKLEPDEEALLRLLHRWRDESAGKGHEINRIAVAYEAGRDGFWLARWLLRHGIDVQVIHPTSIAVSREHRRAKTDRLDTALLMRAFLGWLRGETGHCRMAAVPTLAEEDAKRPSREHETLAGECTRTINRLKSALVRLGIRDFNPKLRGAQGGLEALLTPEGEPIPPNTLREMNNELARLAFIRAQMKATERARLERIKEAPNAGTNSMVQSLTKVVGIGIETADMLVHEVLARDLRDRRAVARIAGLTGSPDESGARRREKGLSKAGNARVRRGMIELAWRFLQHQKESALAAWFRSRVEAPGVRKKTMIVALARKLLIALWRLVQTGEVPRGVVLRQTA

SEQ ID NO: 444333 - protein, 406 aa, unidentified
MLFVGDDWAEDHHDVEVQDEIGRRLAKARLPEGISGIARLHALVGRFLPEDGDAAGVKIGIETDRGPWVAALVASGYQVYAVNPLQSARARQGNGVSGAKSDAGDAHVLADLVRTGCHQLRTVAGDSAQAGAVKVLTRMHQTLIWDRTRQVLRLRSSLREFFPAALEAYEDLVSPDVLELLTKAPEPSRAAALTRAQITSALKRAHRRDREAKTTVIMAALRSEHLTQPPLIAAAYGATVRALAAMITTCNEQITALEGPVEACFGRHPDAEIYLSQPGLGPILGARVLAEFGDDPTRYDGARARKNYAGTSPITRASGKKKVVLARYVRNKRLADALHRQAFCALRRSPGARAYYDALRDRDIGYNAALRQLGNRLVGILHGCLKTHTLYDEAVAWNELAQQVAA

SEQ ID NO: 444334 - protein, 430 aa, unidentified
MRSEVEAVKQEPQFAAFVSIDWGDKKHVWCWQAADSEKRESGELEHTPEAVEAWVGQLCQRFANRPIAVALEQSRGARVFMLSKYEPLHLFPVPSTMSASMRKALYPSGSKDDPRDADLLLDLLLQHRDKLHRLSPDTEATRRVQNLVEERRKLVDEKTAQANRLTSDLKIYFPQVLDWFERLDTELVWDLLQRWPTLAELQKVPPAKLRTFFRKHYGRDEELIERRLLAIRQAIPAIRDRAVIEAKSMVVRVIVQVIVSLLEGIADLDKKIEEAAATHPDFFIFDSLPGAGAVMAPRLLAAFGSQRERYGSAGEVQTYTGIAPVIEKSGKKKWVHFRWACPKFLRQSFHEWAGHSIAQSVWARSYYQQLRSRGKGHHAAVRALAFKWIRILFRCWKDRVAYDEKKYLAALVRRGSPLAAVNVAVAGKGL

SEQ ID NO: 444335 - protein, 313 aa, unidentified
MAEKIFVGIDIAKDTLDIHVLPSNEKWQCKNNAKDIGQLVKRLRSKAPEAIILEATGGYEALAAALLMEAELPVSVVNPRQVRDFAKAMGLLAKTDSIDALVLARYGETFRPRLTPLPTEEERLVKALVVRRRQLVDMRSAEKNRLGQVREDPIRRNIRAHIDHLDREIKQIEDDLDTTIKKSPLWQENIKLLKTIKGIGPVTARTLVTHLPELGKVSREQIATLVGVAPLNRDSGKMRGKRSCIGGRKEIRNVLYMAAKTAARHNQTIKPFFQRLEKEGKLYKVAIVACMRKLLVIANALLRDRQPYRENFA

SEQ ID NO: 444336 - protein, 350 aa, unidentified
MQYIGIDIHRKFSEVNVMNKLGEEIERKRLYHNNPLEVREFFENYSGAAATLEATVGWMWLADELEALGIDVHLAHSAGVKLIANSRLKTDKVDAKALANLLRTNFLPEAYLAPNDVRRQREILRYRMAMVKMRSMAKNRVHALLMRLNIHPTATDIFGSKGREMLYAFELEEPYRKILVGWLEFIDFLDYQVKSLDKVIIRDVGEDKRAKLLQTMVGIGRIFAYTIISEVGEIERFRSEGAFSSYCGLVPSTRQSGDKTHHGRIGPAGRRTLKWAFVEAAHTAVRRDSYFSSLYHKHKKSKGNGKAIVIVAHQMAKIVYQMLRDERPYKPCPKQRKNSSGVGPSAPMVG

SEQ ID NO: 444337 - protein, 403 aa, unidentified
MKNMTSAFRFLEKKITRQQIKQSPEALNQWIGYLRNRFRNGPIAVCLEQSKGALINFLICHDLFVLYPINPKTLAKFCEAFRPSGAKDDPDDATKLLEIVANHRNQLTPWKPAEEIVRIIDILARNRRDAVDRRKQVINQLRSVLKAYFPQAIDLVSEDICSPLTWNFLMKWPTLQKLQKVKDATLRKFYHDHHCYKKKVVETRLQLIRQTQPLTSNEAILKTSPIEVKLLCQLLKQYTQSIAEYEQQLKELYPQHPDAEIFRSFPRAGTVHSARLASAFGADRERYKSPESLQKYSAVAPITISSGKSKVALARYKCPKHLRQSFIECAGQSLQYSLWTAAYYRMQIEKGKTHNVILRALAFKWIRIMFRCWQDKIPYNELNYLQSLTRKGSKILNYMTAAT

SEQ ID NO: 444338 - protein, 387 aa, unidentified
MYYIGIDISKFKHDCAVIDDVGEVITPSWSFANDHEGFSQLKVLLDSLGTETRIGLESTGHYGTNLKLFLESIGFSFMEFNPLLINRFVKSKSLRKTKSDSIDCMMIAHYLMTVEYKPYPSSFYHTEKLKSLTRFRDSLVRQRSRHLVELTNILDKVFPEFKPFFGGRFSVTALHILSNYSSPEKISNMNSKSYEALRKLSRGRFSTVDFAKLKQLAKNTVGSTEDYLLQEMQIVLELYSKLDSMIDETERSIKECVSVMNPPMLTVPGIGIESAAVMLAEFGDFSKFDNPSQMLSFAGIEPGYFQSGTSETTGKMVKHGSSYLRYTLMNCAQTVVNYEPTFAMFYAKKRAEGKPHRVALSHVVKKLLRVIYTLQTKNLAYDAEAMR

SEQ ID NO: 444339 - protein, 338 aa, unidentified
MTLYCGIDLHSNNCVISIINDKDHLVSEKRLPNALEVITGHLAAYRSDLAGIVVESTYNWYWLVDGLMADGHIVKLANTAAIQQYNGIKHTNDQTDARYLAHLLRLGILPEGYIYPKELRAVRDLLRRRLLLVRQKTLQHLSLQSLVARHTGIRLGNAQVKKQTHESLADMLPNKTVLMAAHSALDLMNAFSSEISSLEREILSTQEGRHEYACLTSIKGVGKVIGLTILLETGDINRFPSPGHYASYARCVSSQKVSNGKQKGRGNTKNGNKYLNWAFMEAAHYAATWDPVIKRYYQRKKDKAHIMVAKKSLANKLARACYHMLKQGEEFDVNRAFA

SEQ ID NO: 444340 - protein, 327 aa, unidentified
MSHCHWHGEALLVGERIRHGAFSSTEAGFEQFLAWLARHRPDPAIPLHACMEATGNWGLDLAAFLHGRGVRVSVVNPARVKAYGASELARNKTDRLDAALTARFCRAHASSAWVPPAGALRELRELVRRCDALKAARAQEMNRRAAGFASPAVAASIKAHIDWLDEQIEAVMGEVRRLIASDPALSKNLALVRGVEPKGSPGITGFGEVSAVVLGAELPNIGEFTPKALAAFAGLSPSEHSSGASVRRPGKISRIGNQRLRSMLYMCALSAKRNNKVLADFVRRMAEAGKPPKVILVAVARKLLVYAHAVIRTQKPFQPFPEAPSSI

SEQ ID NO: 444341 - protein, 345 aa, unidentified
MQLHTIGIDLGKAVFHLVGLNSRGEVVVRKKFSRKQLLLFTANLEVELIGMEACGGSHFLGRALREQGHEVRLMPAQYVKPYVKTNKSDYIDAEAIAEAVGRPKMRFVPIKSDDQLDLQSLHRVRERWVMRRTAVINQIRGLLLERGITVRKGRRHIGVALPGILEDASNQLSGALRVLLVQLKLELDHLQVRIDEVDAMINKAAGENEVCRRLVAIPGIGPVTATAIIAAIGNGAAFKRGRGFSAWLGIVPGEYTTGGKQKLLGISKRGNSYLRRLLVQGARAVLQQSAKQSSGLSAWLAQLTTRVHSNVAAVALANKLARMAWAVLAKNEPYRPPMLAAAATT

SEQ ID NO: 444342 - protein, 348 aa, unidentified
MKQVTTIGLDIAKSVFLVHGVDAAGHVVLRQKLSRSRVLEFFAKLPRCLVGIEACASSHYWARELITQGHEVKLMPAQYVKPYVKRGKNDAADAEAICEAVTRPTMRFVGVKTVEQQSIMMLHRVRLILMRQRTQLSNALRSHLAEFGIVSAIGRVGLGRLLTIVADTDDGRVPAEARASLEMLAVQLEGVKAQILENDRRIIASARATEVGRRLLEVPGIGPVLASAFVASVADPAIFKSGRDLAAWIGLVPRQNSSGGKERLGGITKAGNGYLRQMLMVGAMAVIRYAQRNSARRPWLVQLMGRRPTKVAAIALANKTARTVWALMSSGERYRDRQAMQATVSTMA

SEQ ID NO: 444343 - protein, 390 aa, unidentified
MQTGWLYNQLLTGSSTLKVPDEMDALANPASANCAKQVYFKTGYMEDVHMRKHSLISIDLAKMVFQVCLMENNKVKQNKQLRRSELLQFIAKQQQTKIYMEACYSSHYWAREFQSLGHEVFLIPAQHVKPFVRGNKNDRNDALAIAEAGQRPGIKFVPVKTLEQQDVQVLHRIRDRKVAQRTGLINQTRGILSEYGVIAPQKLKAFRQLLIRCTDENLQQVTPLLREQLWVIREEYEFLCDRIDDLNDKLLKLAQTNPFMCRLMTIPGIGVTIATALVSAVGKGEQFNNAREMSVWLGLTPNQHASGTTNKMGHITKRGNGYLRKQVVHGARAALYRCKNNDDQMITWARALVQRRGPNKATVALANRMIRLAWTLLHTEQNYRPNPTMN

SEQ ID NO: 444344 - protein, 340 aa, unidentified
MSEITTIGLDLAKNVFQVHGIDETGQVVVRKALRRGQVVGFFAGLPRCLIGMEACATAHHWARELMALGHEVRLMPPQYVKAYVKRNKNDAADAEAICEAVSRPAMRFVPVKTAEQQGVLMMHRARDLLVRQRTMLVNALRGHLAEFGLVGAQGLHKVAALVTIIKNGTDERVPEIARQILTVVAGQIEEVEARVAALEAQILAWHKSNPVSQRLATIPGIRPIIATAITATVPDPGVFRSGREFAAWLGLVPRQNSTGGRARLGGISKRGDSYLRRLLVNGAHAVLFWSKAAKDDPWLNSLRARKHRLVVAVALANKTARIAWAVMSSEEKYRRTAAAA

SEQ ID NO: 444345 - protein, 422 aa, unidentified
MLEETQETEELIQRVAALDIGKAELTCCVRVPGQGGSGRRLQEVRTYQTMTRWLLVMADRLAELGVTRVVMEATSDYWKGVYYLLEAHGFEVWLVNARDVKHLPGRPKTDTLDAVWLCKVAERQMLRPSFVPPRPIRQLRHLTRYRADLVAARTAEKQRVEKLLEDAQIKLSVVASDIFGVSGRAMLAALVAGERDPKVLAQLARTRLRAKLGPLAEAFTGFFTDQHAFLLAKMLARVDGLDADLAELDAKLAELIAPFADAVDRLDEVPGIGRTAAHLLLAELGTDMTRFPTAGHLVSWAKFAPGVSESAGKRRGSGSTGHGNPYLARVLGEAAVAASKTDTFLGERYRRIARRRGARRAIVAVGRSILVIVWHLLSDPEVHFHDLGAGFYDTRIGPERAKRNHIRQLEALGYKVTLEPAT

SEQ ID NO: 444346 - protein, 420 aa, unidentified
MKVVYQTCCGVDVHKSFLVATIIKTTSGVQPSYTKKRFSTFNNSILQFKQWLIENNCHDICMESTGKYWVPVYNLLEDTINVTIANPKWVKAVKGNKDDTKDSKWIGDLFRLGLVPGSFIPKKDIRILREYTRYRYKLTSCKSSEKNRFQNALTVCNIALDSVVSDVFGKSATSIIDYLIEQSDNSIKHEEISSRLLHSLKNKSDSVIESIEGYQMSDSQKYRMRLVRAHMNYIISTINDIDTMIDSLIAPYENAVQLLCTIPGVDRNSAITILSEIGTDMSQFSSSKRLCCWAGLTPGNNESAGKKKSVRITRAGVYLKPALVQCAHAAVKSDKSPYYKFKYERLIKRRGKKRAIIAIARMMLTAVYHMLVTGEMFNPSDLYKVDMPQPLVEKQKLKAIKQALKLLKGEGIIPDSLKAS

SEQ ID NO: 444347 - protein, 351 aa, unidentified
MRTSQKTPGLIATIGIDLGKNTFHLVGFNKRGAIVLQQKVSRAQLERRLANIPRCLIGMEACSGSHHVARQLSARGHEVRLIPAQYVKPFLKGHKNDYRDAEAIAEAVQRPTMNFVAIKTPEQMDLLALHRVRSRLVSQRTGVINQIRGFLIERGITVRQGVAPLHRALPDILSSRPEALSRRMVSLIADLMQDWRRLDERIEVVSNEIEALAQQDDNCQRLMTVPGVGPIISSAMVAAIGNGAGFKQGRDFGAWLGLVPKQESTGDRTILGRISKRGNKYLRTLFVQAAHVVLVRRPSTAMRGLWPWIEQASKRLHRNMLAIALANKLARIAWAVLARGHAYQPRITAHA

SEQ ID NO: 444348 - protein, 314 aa, unidentified
MRNCIGIDVAKQYFDLHCLKTGQDQRMENSTDGIRQCVALCSKIHPELIVMEATGGYELTLAGTLQSEGFAVAVVNPRRIRDFARAAGQIAKTDTLDARIIARFAATLQPMPTEQINENTQKLKAMVARRNQLVGLHTAESNRLEHANTRDIQRSIAAVIKVIQTQLKNIDRQIEEHIRNTPQLQQRAENIDSVPGIGPTTAHLLVTELPELGRLNRRQIAALVGIAPIARDSGTFRGKRMTGGGRKNIRSRLFMPTLVAVRHNPVLKAYYTRLLSQGKCKMVALIAAMRKLICILNAMLKNNQKWNLNLIKIA

SEQ ID NO: 444349 - protein, 350 aa, unidentified
MTIVAQLFEHVVGIDTHARTHTYCLIAAATGAVIDGATFPTTKAGNARAIAWIVRRTSGSVLAAVEGTSSYGAGITAALSEAGFDVAEVRPAARSTHAHSGKSDSLDAEAAARAVLGREFDRLAKPRQAGQRTALRVLLASRSILDQQRTANRNALLALLRSVDLGIDARKPLTDAQVRTIATWRISRAAAQHDPSAIARREARRLACSVVEQGDLLKQNHRELHLLAETLAPGLQAQPGVGPVTAAIIICAYSHHGRVRSEAAFAALGGIAPVPASSGNTDRHRLSRSGDRQLNRAFDVIVRTRMSYDETTRDYVARRRAEGRSNREIRRCLKRYVCRAIFRELQTAMA

SEQ ID NO: 444350 - protein, 441 aa, unidentified
MHFRDAEEPVAEPDWAAFIAVDWADQKHDWAMEMPGGNIRERGQVAHAPEALDAWVTQLRQRFGDRPIAVALEQSRGALLFTLSKYANLVVYPLHPRTTSCFRQAMYPSGSKSDSLDADIQLDLLVKHRDRLQVWKPDTEETRLLQFLVEDRRRRVDQKTGLLNQLTGRLKLYFPQILRWFPSADSALAWRFLERWPDLQSAQKVSRQKLKAFLTRDARSCPADVDQFINRIREAMPATQDRAVVSSSTVFVQGLVCELQLLRATIQKYEKQIEAIVQQHPDFPIVSSFPGIGKALAPRLIAALGTQRERFPDAGSIQSYSGIAPVREASGKREWVHVRWACPKFVKQTFQEWAQHSMTRCAWARRHYDAQRARGKGHQTAVRSLAFKWIRVLFRCWKDRTPYDENRYTKSLGRRSATPNTDVRIMWKNVGGFSKPAAFSD

SEQ ID NO: 444351 - protein, 480 aa, unidentified
MNIKAKKAKVQPLSKKSVINVLSQDEIKKKVQVIEQELKASTWRELETKGKFEKNDKLSFISEEMLIVGCDIGSETHYIRAIDTRGRELSKGAFEFSNSSEGFASAKAWVLKLAAKNDKKQIVLGLEPTGHYWFAIAAWMVSNGISVVQVNPYAVKQSKEIEDNSQLKDDRKDPKIIANLVKDGNYGMPYLPEDIYADMRRLSMFRDQLTEDRIRNINRLHREMKIYFPEYMDAFGKIDGAFTLEILKVAPIPSDIVELDEEGLKSLWHEAKLRGRGYSRARVIVDYAKKSVGLTGGTDAGRESIKWFVEQIIQLDEQLAEIENVLHQKCREIPHAENILEINGVGENILAGILAEMGDISRFDDVKEIQKLSGMGLVACSSGKHKGQTKISHRGRKRLRYWLFQAAKSAVAHAVEFKQLHAYYTTRSMNPLKKMQSLVVIACKILRVIYTILNTGMKYDPERMLRDIRYPQGNTVQAAA

SEQ ID NO: 444352 - protein, 321 aa, unidentified
MVDHSMKVAGIDTGKAELHVCLLPDGTRFKVGNDAGGIAELVAKCVEAGIRRAGIEATSIYHRAAAKALRQAGIEVAELQPRQARGYAQALLQWSKSDTIDAAVIARLTRALDEVRPAPDPKIEAFAEVLTYVEQLEERIAWLKTSRERYANARFKARIAADIKALEKRRRTELKRLEAAMRKDQILATRLDLLLSIPGVAERTAIGLLIRMPELGTLTREAAARLAGLAPCDDDSGQHKGERHIHGGRSRLRRTAFMAAFAAALNWNHDLNIFYKRLRQRGKAHTAAVVACARKLIILANAIIARGTPWEKQRGMPCPAS

SEQ ID NO: 444353 - protein, 398 aa, unidentified
MTESSDYESVQVFIGVDVGKDTHHAVAINRSGKRLFDKALPNDENKLRSLISDLKQHGQILLVVDQPATIGALPVAVARSEGVLVGYLPGLAMRRIADLHAGEAKTDARDAAIIAEAARTLPHALRTLKLADEQIAELSMLCGFDDDLAVQTTQASNRIRGLLTQIHPALERVLGPRLEHPAVLDLLQRYPSPEKLASLGEKKLAAQLCKLAPRLGKRLAADIAQALAEQTVVVPGTNAAAVVLPRLALQLITLRKQRDEVALEVEQRVLAHPLYPVLTSMPGVGVRTAARLLTEVACRAFASAAHLAAYAGLAPVTRRSGSSIRGEHPSRRGNKALKRALFLSAFAALRDPLSRAYYTRKMSQGKRHNQALIALARRRCDVLFAMMRDGTFYTPQGS

SEQ ID NO: 444354 - protein, 321 aa, unidentified
MKFYCGIDLSARDCHVCVIDEQLKIMVQQKLRNELPKIVQLLEPYKANLKIVVESTFNWYWLIDGLQAAGFDVVLAHTLGLYLITGAKVKTDRRDAYALAKLLLVGAVPAAYIYPVATRPVRDLLRRRGRLVQVRAGEYGSLRRLLLRQGILSSKQQEIKTASETELEQWFAHPLVRLHASQELQRIELYSQQIAELEKTILALAQTEQSYELLLKLPGVGQTIALTILYEVGELTRFANVKVFSSYCRVIPGIAQSGNVTRRGRGSKQGNHYLKAAFSQAAVHAVRQMICYNIIAHKLAQAAFHVLKEQTEYREELLFGR

SEQ ID NO: 444355 - protein, 315 aa, unidentified
MEQLPAVPCFVGIDVSRDRLDVHLQPIGRAFAVPRTGEGLEQLLAELRPLGPTLVVLEATGGFELTTAAAVAGAGLPLAVVNPRQIRDFARATGRLAKTDALDAKVIALFAERVRPDPRPLADAERQILAELVTRRRQVVEMIGMETNRSRQARAPRVLRTIKATLKTLQAQLTDLDDEIDQTVRGSPVWRASDDLLTSVPGIGDITARTLIAELPELGHLNRRRIAALVGVAPINRDSGHLRGRRAIAGGRASVRKSLFMATLTAIRWNPVLKAHYQQLIARGRPKMVAVIACARRLLGILNAIIRSGSPWQTA

SEQ ID NO: 444356 - protein, 410 aa, unidentified
MLFIGDDWAEAHHDVEVEDDSGRVLARRRLPEGLAGITTLHELVAEHLDPTAEPDQVQLGIETERGPWVQALLAAGYGVFAINPLQVARYRERHSPSGAKSDAADAHLLAEIVRLDRAHHRRIAGDSEIAEHVKIAARAHQSMIWSRVRQVNTLRSLLREYYPAALAAFGTDLASRDALAVLSVAPNPELGRRLSQARIETLLRRAGRQQNLSTTAATIRAALRSEQLAARPGVIGAYTASASALLAVLTAMAAQTEVLAGQVEQGFGQHPDAEIYRSQPGLGDVLGARVLAEFGDDPGRYADAKARKNYSGMSPITKASGTKRVVLARFARNRRLGDALFLQAFAALNNSPGARAFYDRQRARGATHYQALRTLANRLVGILHGCLRTHTLYDEHLAWHSEPDKLSPAA

SEQ ID NO: 444357 - protein, 343 aa, unidentified
MSITTIGIDLAKNVFQVHAVDERGKVVLRKALKRAEVTKLFSGLPGCLVGMEACGGAHYWARQLIQLGHTVKLMAPQFVKPYVKTNKSDARDAEAICEAVTRPTMRFVPVKDIEQQTVLALHRARQGFVVERTAQANQMRGLLYELGIVIPKGIRYVESQLPEILEDAENGLPEISRSLFARLFEHFQQLGNQVKELESQIKAWHKQNAASGRIEAIPGIGALTASALVASIGDAKTFKSGRQLAAWLGLVPRQDSSGGKEKLLGISKRGDVYLRTLLIHGARAVLFHRMRQAEHQDGWLMKLRTRRNPNVAAVALANKNARVVWALLAHGREYSAAPVAAAA

SEQ ID NO: 444358 - protein, 342 aa, unidentified
MNKVAIAAIDLGKKSFHLHAQDERGHELYRKKLTRAALVQHLANLEPCTVVMEACGGAHFMAQQAAKFGHTAKLIAPHLVRPYVKSNKNDFADAEAICEAATRPTMRFVPVKTQAQQALAMLNSTRDSFIKDRTATVNRIHAALLEFGISLPAGFKSINELTALLEASSLPDPIRKLLTRMHDHFDYLHEQIRSLDKELECQAAEDDLAARLMTIPCVGPITSSALAAELGDGKQFKCGRGYSASIGLVPKQHSTGGKTVLLGISKRGDRNQRRLLIQCARVYLMHLDRQKGVLAEWVRHLIATHHHSNHVVCALANKFARIAWAIAAHHTEFDAGPSAMNA

SEQ ID NO: 444359 - protein, 369 aa, unidentified
MDKDTTYVALDDSKRKIVAGILRPSDTQPELREIANDARQIRRLFERLKREGPVAACYEAGVSGYDLHRQITGLGVACAVIAPALTPRRPGQRIKTDRRDAAKLVRLFRAGELTAIHVLDESEEAVRDLVRCRDDIRRDVLRWRHRVLKLLARHGRAYLTGKNWSHAHWRWIREQRFELPPLQRAFEATVFALEQALARQAELDKELEALAATAPYCEPVGWLRCFRGIDTLSAIILLAEVVDFQRFRRPRELMAYLGLVPSEYSSGETQRRGALTKAGNSHARRVLVEAAWHYRHRPTIGRALANRSQGQPDEIVSHAWRAQQRLHRRYRHLLGHGKRTPVAVAAVARELVGFIWAAMTRHESRRQAA

SEQ ID NO: 444360 - protein, 348 aa, unidentified
MDKITAVGLDLAKQIIQVHAVDAAGRVVLRKAVRRERLLALLAQFPCCVVGMEACSGAHHWARELRKLGHEPRIMAAEFVRPFRKSLAAKNDANDAEAICTAVVQPNMRFISIKSVEQQALLSLHRVRQGLIEERTATINRLRGVLAEFGVVLPQSATVLQRALPAVLADEERLPALVQRSVQALLEHLRDLDAHVAEFDRAIAQHAKSSAPAQRLVALTGIGPLTASAVVASVGNAQDYRNGRQFAAWLGLVPRQYSSGGKIKLGRITRRGDAYLRALLIQGARSALQAALRRAPARRDRLSAWIVQLAQRVGYHKTLVAIANKHARIIWALLARNQTFEHARTVRY

SEQ ID NO: 444361 - protein, 318 aa, unidentified
MPPDAPAFVGVDVAKAELVMAMRPSGARWTVANDDGGIRTLLKHLRQHAAVLVVLEATGGYERAVVAALAAARLPVVVANPRQVRDFARATGQLAKTDRIDADTLALFGERVRPAPRVLPDEAATAFDALLTRRRQILGMIVAERNRLEHALPTVRRGITQHIHWLERQLQDVDRELDTSIKASPVWRAKDDLLRSAPGVGPVLSRTLIGELPELGTLPRKQIAALVGVAPLARDSGTLKGKRLVWGGRSPVRAALFMAALVGTRCNPVIRAFYARLRAAGKPKKVALTACMRKLLTILNAMVRTNTTWRHLAPPETT

SEQ ID NO: 444362 - protein, 349 aa, unidentified
MVVIGTDSHKRTHTVVAVDGTGRKLAEKTASTAPAGHLELLRWARRWRDRTWALEDCRHLTRRLEIDLLAAGERVVRVPTKLMAGSRRSNREPGKSDPIDALSVARAALREPDLPSARLDGVERELRLRVDHREDLLVDRTGHQERLRWFLVELGIAEPAARSLDRTVVLDRLEAELTGRTEPVARFARDFLARIRELTAAIDALEREIRPLAAEVAPSLLALPGCGHLTAAKLVGQTAGIGRFRSRAAFARHNGTAPVPVWSGNTVRHRLNRGGDRQLNVALHRIAVTQLQREGPGRQYVAKRMAAGDTKTEAIRALRRRLSDEIFRRLLTDEIERNRAATALTAAAA

SEQ ID NO: 444363 - protein, 335 aa, unidentified
MKKFTYQVGVDVAKSTLDCTVLQEGKQLDYQRIANTPKAVKSYLQQLEKQGICCCDTLFCMEHTGVYNAHILQVLIQNRANIWLEAALRIKESLGFTRGKNDKVDSYRIARYAYLYQDSAVLWIPRREIVQQLTRLTMLRKRLVKTKVALLQPLAETKQFLGNKAFREERTLTDPIASTLKKQIKRVEKQIEEVIRTDEQLNYLFELVISVEAIGPVTAGHLLVVTNEFRNFSCPKKFACYAGTAPFENSSGTSIRGKSRVSPYANKDSKKLLHMAALSAINMQSELAIYYQRKVSEGKNKMAVINAVRNKLIKRIFAVVERGTKYEKKYTPTLA

SEQ ID NO: 444364 - protein, 326 aa, unidentified
MQGKDTPEQGTGVNVYVGIDVSKTSLDVYLHPVGQVVRVANTKPGLKQLNRLLAPHTVALIAIEATGKWHRCAHRTLHAAGFPVAIVNPYRSRKLADALGQLAKTDKIDAAMLALFAESLNPKATPPPARLLTDLQELVCARQKAVDEQTALSNRLGVAETAFLRRELKRRLKAVRGHIERLEAECKRLVMNDAGLARRFEILSSIKGIGDVVATTLVACLTELGVLDGKAIAALAGVAPMNRDSGEMRGQRRIKGGRGHVRKPLRMAALSAIRYNPALKAFYRRLRDNGKMSKIAITAVMRKLVVLANTLILQDRLWQPEAPKCA

SEQ ID NO: 444365 - protein, 424 aa, unidentified
MKVTYQTCCGVDVHKSFLVATIVKTTGGIEPSYQKKRFSTFNNSILEFKQWLLDNHCHDVCMESTGKYWVPVFNLLEDKINVVIANPKWVKAVKGNKDDTKDSKWIGDLFRLGLVKGSYIPCKKVRILREYTRYRYKLVSCRSSEKNRYQNALTVCNVALDSIVSDIFGKSSTSIIDYLLEQSGTSINHEEIASKLLRSLKSKEDAVIESVEGYQMTDAQKYRMRLVRAHMDYITAEINDVDKMIENMISSNPDFENAVQFLCTIPGVKRDSAITIISETGTDMSQFSSSKRLCCWAGLTPDSNESAGKKKSVRITRAGVYLKPALVQCAHAAVKSDKSPYYKKKYEALVKRRGKKRAIIAIARMILTAIYQMLSTGEQWNPSDLYKIDMPVALVEKQKAKAIKQAKKLLQREGLLPPDEPLAS

SEQ ID NO: 444366 - protein, 341 aa, unidentified
MQITTIGLDIAKNVFQVHGIDAEEKVVVRKRLRRGQILRFFEELSPCLVGLEACATSHYWARQLTKLGHEVRLMPAKDVKAYVKRNKNDAADAEAICEAVRRPTMRFVQVKSAEQQAQLMQHRARDLLMHQRTQLINAMRSHMAELGIIAPQGREGVKELLAIVTKDTNTHLPNDARASLIVLAAQLQALQTTIGAIEKRIVVQHRADKESKRLQTVPGIGPIGASAIAATVTNPKIFRSGRDFAAWIGLVPRQMSTGGKPKLGPISKQGDRYLRRILVVGAVSTLRRAKLNPQRYPWVTRLLARRPFKVVAVALANKMARIAWALMISGKTCRSAWFAAA

SEQ ID NO: 444367 - protein, 337 aa, unidentified
MNFVGIDLHKKSISVCVVDQQRQVLIRKRFACEDPDRIVAFFKELELFQAVMEATSSYEWLFKLLEPLAERILLAHPKKLRVIAESTRKSDKLDAQVLAEFLALDMIPEAHRATPRQRQHRRLVRQRIYLHKRITCVRSKIRWILSDYNADRSDLFTTKGLTYLEGVKVSSEDRFVLDQLTEEWKIYVQQVNALDKRLREFAKSAPAAEAEARAVLDSIPYVGPVTVDAVVSELGDVRRFRSQKRAAAYSGLVPGQRESAGHRRETGITKEGSRILRWALVETAWRLVYHSRRWGSVFEALCKRRGKKRAIIAVARRLLCMMVAMLQSGRRYQAAMV

SEQ ID NO: 444368 - protein, 387 aa, unidentified
MKIMAGIDLHSNNAMCGLVDSEGKRLLHKKVPCDLRCVLSVLEPYKQRLESVAVESTFNWYWLVDGLQEHGYKVALANPAAMQQYNGLKHTDDKSDAFFLGELQRLKILPTAHIYDRKTRPVRDLLRRRLLLVHQRTSLLLSLKSLHARTSGCSLSLGLAKALLPEQAAKLFRHPADQLIAREQAQHIRQLSQSIEAIEKMVLGEVKQLFCYRQLQTLPGVGSILALTITLETGDITRFPSAGDYASYCRTVDSARLSNERKKGQNNEKCGNKYLAWAYVEAANFAQRSDGPCRRFFDRKLAKTNRFVATKALACKLSKAAWYVMSQGVDFDSARAFPGPRPEAQTQRSGKAQAGQATKQTELKKKTDLGRASVNPSKGSGSKTLRD

SEQ ID NO: 444369 - protein, 344 aa, unidentified
MGEVITIGLDIAKSVFQIHGVDEVGAVVIRKRVSRAKMLEFFAELPRCLIGIEACPAAHHWARELQAVGHTVKLMPPSYVKAYLKRSKNDANDAAAICEAVTRPSMRFVAIKTKEQQAALILHRARQLLVRQRTMLSNAIRGHLAELGIVSAKGRNGTGELLEIITNDADSRIPLAARSILKVLAAQYNAIGTEIASIGKSILAWHRSCEPSRRLEEIPGIGPIVATALVAEIGDWKAFRSGRGLAAWIGLVPKQHTTGGKDKLGSITKQGNRYLRWLLVSGAMAVIRYAQKHGTKKRPWLGRLMERRPTKVAAVALANKMARIAWAIIARGERYREPELLLAA

SEQ ID NO: 444370 - protein, 404 aa, unidentified
MHDSTTGFAGVDWAIDNHAVCVVDGQGQVRVEFDVANTADGLAELCRRVERAGARRVAIERPDGPVVDALLEAGLEVVVVASRSVKALRERYGTSGNKSDRSDAYVLADCLRTDGHRWSSLERDSPATVTLRSHVRARKDLVENRVAVANQLRAHLRIVFPGAVGLFNDIDSPISLRFLERFPSATRAGWLSQKRFGSWLRANGYCGRKTPAELHHRLLDAPAGLLGDDGDARGAVTLSYVAILRALRAQIDELNTRLNELLDAHPDAVIFRSLPRCATVRAATLLAEIGDCRARFPDAESLSCLAGVAPSTRASGRHRAVTFRFSSDKKLREALTDFAGDSWRGNAWAEQRYRQLRADGKSHPHAERILARSWAHIIWRCWQDHTPYDPARHGAHQRLINDTA

SEQ ID NO: 444371 - protein, 427 aa, unidentified
MNQNKSATNFAATLGLDWADKKHDLWIQAGDGSKPEHRVIDQTPEALHEWVAQMRVRFPQGRMAIAIETTRGAVISALGAYNFIVLFPINPAMLCSYRAAFCASGAKDDRTDAMLLEEYLRLHMAKLRPLEPDTELTRKLAALVENRRGLVDDRTRLVNQWHSLLKTYYPLMEVLFENMTLPLAAHFLLKWPDLASVKKAGPAALRKFFYGHNSRSDKALEERLQAIAQAQPLTQDPALIEPAVLKAQALAGMLKVLHQSIEQIEALIEQTTEAHPDAAIFRSFPSAGPAMTPRILVAFGTNRARFASAQEVQQFYGIAPVKKQSGQSKVIHMRHRCPKFARQTFHENASHAVRTPGWAKTCYEQQRERKRGHHAAVRSVAFKLMRIYFRCGKDRKCYDANLYETALQKHGSPLASLLKKAATAKGE

SEQ ID NO: 444372 - protein, 351 aa, unidentified
MYLIGVDYHPSFQQIAFFVEETGECGEQELNHSDGQAEKFYRDLKQRGICVRVGMEATGYSRWFERLLAELGFELWIGDPAEIKAKRVKKQKTDRNDARLLLRLMREKNFPQVWVPSPENRDLRQLLWHRHRLVQMRTRIMNQLQALAMNEGYRWKKKLFSEQGRALLEKLALAPWASRRRQELLELLDRLNPTIAELTAAAEQEARKRPEAVRLMTHPGVGPRTALAYVLIIGTPTRFQRGKQIGTYVGMIPCEESSARKQRLGHISKQGNSLLRFLLVEAAQAAARNHPDWRRRYMHLAMRRHRSIAKVAMGRRLAVRLYWMWRNGCEYSQSLEFGSYAGQLGTVHGAK

SEQ ID NO: 444373 - protein, 408 aa, unidentified
MNPLFVGIDVSSKNNVAYLMKPDGSKHSSFSVQNNLGGAKILSERIVSALGSMQLSDVVIGLEATSIYGDSLVYALREDGSLGRFQRKIHVLNPKQVKKFKEAYPDLPKNDFVDAFVIADHLRFGRINREVYMDDYRYKALQTLTRARFDVIQNLTREKQRFANYLFLKCSGMAQDKDIQNTSATTIALMEHFETVDDLANADLEELTAFITETGRGKFADPDATAKAVRAAAKGSYRLPKTVNDTVNQAMAVSIASMRALKGQVKVLDKAIEQQFEIIPNTLTSIPGIGKVYSAGIIAEIGDIHRFDSQASVAKYAGLVWNRSQSGDFEAEHSRMIKSGNRYLRYYLLEAANSVRRCDSEFRRYYDLKFKEVNKYQHKRALALTARKLVRLVFRLLKDNRLYIPPEG

SEQ ID NO: 444374 - protein, 336 aa, unidentified
MHKCMNNFYFIGVDVSKKKLDFCVMFENKVVHEEVVANHQGAVIALIRQLEKDYGIDNAQMLVCAEHTGQYTYPLVCACESIECKLWLEHPSNIKYSSGVQRGKNDKIDARRIAVYASRFEDKVRYYELPDQEIERLKQLEAERSLYVVDLAKYKAQLKDQKEFMSERIYKDKERRLKKLMKGLEDVIKSITDEMESIVHSTEVLDRQYKLLQSIDGVGPIVALNMIVVTEGFTRFDNARQFNCYAGLAPFQYTSGSSQHSRARVSHRADKCIKTLLHLSAVSVISKAGGELKEYYLRKVEEGKNKMTVINALRAKIVARMFAVIKRNEFYKPIFS

SEQ ID NO: 444375 - protein, 366 aa, unidentified
MSAASSIDRRVVIAIDPHKASWTAAAVDASLRPLDTIRAPVTRDGYRSLQRFARTWRANMWAIEGAHGMGAPLTAQLARDGVNVVDVPAKLAARVRLLSTGHGRKNDDADALSVGIAALNAGHLTTVTIDDAATALRAIVEHREDLVKTRTQTVNRLHVLLTKLSPGGVSGTMTAERAATLLRTIRPRDAAAKALRALAVDIVSDVRHLDRRISKAAGDIDSAVTASGTTLTKLHGIGTISAAKILSRVGPIRRFRSAAAFATYTGTAPIDVSSGEVTRHRLSRAGDRQLNACLHTMALTQIRSNTPGRTYYLRKRSEGKSKREAMRCLKRRLSDVVYRQLTREANFLKADPGGHSGATLLSRAVG

SEQ ID NO: 444376 - protein, 354 aa, unidentified
MIIIGADYHPGFQQIAFVDTDTGELQERRLEHREDAEKFYRDLAAQELKVRVGMEASGHARWFERLLGELQFELWIGDAAEIRAKRVRKQKTDRQDAQLILRLLLEDRFPQVWVPSWENRDLRQLLWHRHRMVQARTRTMNQLQAVALNEGLRCKKKLWRDAGREQLESFRLAPWASRRRRDLLELLDRLTPTIAELTQAIEQEAEKCPAARRLQTHPGVGALTALAFVLIIGRADRFGCGKQIASYLGWVPSEESSGQRRRLGHITKQGNSLLRFLLVEAAQVTVRSDQEWRNRYFHLVLRRGRKIAKVAMARRLAVRLYWMWRRGWDYQQLKKFGSHAGEPGNPDGVQSSTE

SEQ ID NO: 444377 - protein, 423 aa, unidentified
MTSMTLDPPLTNQLPPGTALVAGVDTHKNTHHVAILDLVGRPVADREFRADGRGYAQVIAFFHEHGDVVRIGVEGTGSYGAGLSRALNAAGLTVVEVARQDRQARRRRGKSDPLDAHQAAVAVLAGTDTAIPKSGDGAVESMRILLAERRSAAKARAQVMNQIHALLITAPELVRQAFRALSGQRLVNTLAKTRPGTITSPDPAVVARQTLRRFAVRHLTMQAEIDLIEQQLEMLVRQVNPTLLSLSGVGPVTAATLLVAAGDNPERLGTRASFAALAGVAPIPASSGQRTRHRLSRGGNRHANAALHRIVLLRMRHREPRTMAYFERRRSEQLTERDIMRCLKRHVANEVYAALLNPATDHPVGRELRARRQAIGIPISVLATTLGVPYQRLRRLEIGTRADPELEARATAILEQISPPLAA

SEQ ID NO: 444378 - protein, 395 aa, unidentified
MKLVGIDIGKNKHFFCIMDKDSGEVLLQPSSFSNTKDGFDSLIQKLSSYSKDSILIGMEDTGHYHFALLKYLLEKNFTVALINPKTTDYTRKMQNGITKNDKLDTLTICDVLDTPVRKKQYRITKVNSFDLYEQKQLTRHHHNLKEELNVYTNRLQKCIDIVFPEFNSLFSSKYGIIYMNVLKTFGSAENIASTDIRTIRKCFEIKGRGNRISLTAQQLKDSAKSSIGISSAAEVIKIKHLISQIELINEQLAETDKKIEEFSIQNNSPILSIPGISHFSGTSILAELGEISNYSKPSKIIKAAGVAPYHYESSQYNAQHTAITKKGSPYLRKTLYQIILPVINNNNPVFKQYYDLKISQGKGHRCACGHCVRKLLRIIYHLSSTNQQFDDALLR

SEQ ID NO: 444379 - protein, 433 aa, unidentified
MPTNHPYDLVIGLDRSDRKADLHLIDTRTGTVQKQTVATSPEALHDWLAQLRQDHPQARVALCLEQPAANLIVFLETYSWISLYPINPITLQKFREAFVTSRAKDDGKDAQYQAELLLSHHDKLKAWQPDDSPTRQLQQLVLHRRAVVDERTGLTNRLIALLKQYFPQALDLCGEDLWRPLATAFLLKWPTLQSLQKVRKESLKQFYHLQGSRSQTLIEQRLERIDKAVPLTDEIALLQSYTLRVQLLCKELQLLLKTLQQFDQQIANRFQQHTDRHIFEALPGAGPVLAPRLLASLGSERERFARPENLQSFSGVAPVTKQSGGKCYIHRRYCCPKFLRQSFHEYAKESILHSRWAAAYYLQQRTKGSKHHTAVRALAYKWQRIIWKCWQTRTVYKEAIYEAALKKNKSPLVGLLDQIELGKSPVKSRAKKS

SEQ ID NO: 444380 - protein, 316 aa, unidentified
MAKLVSQITLGIDVSKDELVIAEWDTDQLTRLANQRSEIKIWLKARYGPLRLALEPTSHYHLAVIEEAQALGYQVYLINPRQLLHYREAVNVRNKTDPEDAWLLARYLAHEASQLRVYQPQSRQAQHLWTLLKRRAVVVGCRKQLHLSLQQLPISSQALFRQFGQLLKRIDQHIKRLIRELGWWQDYQRCLSVPGIGPINAAALLSTFHRGVFASSDAFVSFIGFDVRLRESGKYKGKRKLTKRGEAELRRLLYCAAQPARSYHLFDRYLQKQLDKGLSKIAAKVALARKLARIVFALLSNQQSFQQQEIATIQSP

SEQ ID NO: 444381 - protein, 412 aa, unidentified
MDVVVERCAFLDVHRDTVMACARTPDGRGGRVEEVCQFGATTSQLLALGDWLAERRVSLVGMESTGVYWKPVHWLLEASVPEVWVVNARHMRNVPGRKTDVADAVWGASLLEHGLVRPSFIPPEPFRALRDLTRYRKSVIEERARESQRLHKVLEDAGVKLSSVTSRVLTKSGREMIDAPIVGQRDSRVLAELAKGRMRSKITQLEDALAGRFNEHHALLCNTMLARIDHADATIELLGARIEELLGPYEAAVSLVVTVPGVAARGAEVILAEIGTDMSRFPTAGHLASWAGMCPGNNESAGKHRSGRTRHGSKWLRRALIEAGQAAGRTQGTYLAAQYAQIRGRRGPQRAAVAVGHSILVIIWHILSTGEPYTDLGWDYFDKRRNSNARQRRLVAQLEAMGNKVTLEPAAA

SEQ ID NO: 444382 - protein, 422 aa, unidentified
MEEITEEAAELVERVAGLDIGKASLVCCLQVPHDSRPGRCRRQVRTFATTTGQLLELRDWLTAEGVTRCVMEATSAYWKPPFYLLEDAIAECWLVNAREVKNVPGRPKTDKLDAVWLARLAERGMVRPSFVPPPWQRELRDLCRYRRTLTQERTREKQRAEKLLEDAQIKLSSVISDIFGVSGRAMLEALIGGQRDPRVLAQLARASMRGKISVLTEALTGHFRDHHGYLLAMMLGRIDALTAQIEQLTTRISQAIAPFAPQVAQLDEIPGIGVTGAQEIIAEIGVDMARFPTAGHLVSWAKFAPTARQSAGKSKPGSTGKGNPWLGGALGEAVIGAAKTKTFLGARYHRLARRRGKRRALVAVGNSILIIARRLLSDPDTRFSDLGPDWHDRIAPLRRKRQLIAELERLSGKKVLLQEAAA

SEQ ID NO: 444383 - protein, 412 aa, unidentified
MSQQDGPLFFVGIDWAGAEHAVCVLDHTGKKIAAFTIDHTAAGFGRLAARLGSLGPAEQIPVAIERPDGRLVDALLEAGHPVLPVKPNAIKTWREAEVLSGAKSDPGDAHVIADYLRVRIHRLRPAAPLSSHTKALRTVVRTRSDLVEARIAATNQLAALLDAHWPGAKAIFANIESAIALAFLTRYPTAVSAASLTEKQLAAFCAKQGYSGRKPAAVLLARLRSAPAGTLDPVVSTGVQDAVLAQVGMLTALNTAIKALDRSIAEKMDTHPDGKVFRSFPRAGTINAAQILAEWGDSRAAFDHPDAIAALAGITPVTKVSGKQRGVSFRWACNKRLRLAITTFADNSRHSSPWAADIYNRARASGKDHPHATRILARAWIRVLWRCWQNHTPYDPALHGGAQHRMKQPTAA

SEQ ID NO: 444384 - protein, 437 aa, unidentified
MSGKKSLELRVSVDVGYRRHSVAIGLPSGEVLEEFEIAHRPEGFAEFFSRIEKHHKARRCGVAVAMEGFNGCARPLDAMVRRRGYRLYNINNLKLARFKEIFPGAAKSDRIDARKGLELFQLSDHLPLAKEVLQEVKGTPQENEVLKRLTRRRRRLVDERVRVISNLQTDLQAVCPGLLEITKNAGNQWFLNFLVSAATLPQLARLRPSTLLKVPAVGRKYARLIEDWQKRAHFSEEVEWVSEMIQEDAQRCLELDEKIKALKAKIKGVAKDSKIAKTLLSIPGFGTICTAELAGEIGTIERFSKEGSLALYLGMSTLDNSSGKYQGSKQPKHVNRRAKAAMMVALDRHRKYVPESQRYYEKKRSEGKKHNQAIRALGRHLCRIIYKMLNDEREYEIRPEKGNTKTKVKSRSCVKTQIRKPKISAKGKITTSTNGAR

SEQ ID NO: 444385 - protein, 323 aa, unidentified
MQRIIIGIDVSQDFLDGHIRPTSVRQRFANTSAGIAELVAWVRPLAAERILFESTGPYQIAAVGALLAEGFPAVVVNARQVRDFAKAMNYLAKTDTIDAAVIAHFGEVATTKVRPLESEEIRTLRDLYDRRGQLVHMRAMEKNQRHSASVARASANVLHSIDKHIEYLEKQIHDLEQRMDRLIEKSAAFQARNEILQTITGIGPHVSRTLLVHLPELGQYTRQKIAALVGLAPFNDDSGEHVGHRHIRGGRNKVRVGMYQAAIAAIRHCPRMKAFYATLKARGKASRVAIIAIARKILILANALVRDMKPYEDRTNSICLKTT

SEQ ID NO: 444386 - protein, 344 aa, unidentified
MNDINRIAIDLAKNVFQVCALNSHNKVLFNKKLSRKKFIEFMVQLPLSSVFIEACYSSHYWGRTLTEMGHKVHLIPAQHVTPFVRGNKSDNNDALAIAEAANRPKIRFVPIKTVQQQEIMAMHRVRARLVKSRGQVTNQARGLLSDFGIIFAKGFKPFRENMIKLQENESLSLSFRETMSDLYTEFNQISERLNGLEKNLKNYTRQNNNCIIVGSTPGIGFVNASALVASIDQGQAFKNPREFGVWLGLPPRQYGSGDRFKSSGITKRGDRYLRTQLIHAARAAKKWAKHRDDQLSLWIKQLEARVGKHKATVAIAHKLARIIWVLLKKQQCFVPQYPQKIMSS

SEQ ID NO: 444387 - protein, 386 aa, unidentified
MRQSNDLSRSLNALEPTTAMIAVIEMGLSSWLVAGVVPGIERSPLKKLEPDAMKLFKLLHCWRDEAKTAGRTIERIAVAFEAGRDGFWLARWLKARGIEAHVIHASSIAVSREHRRAKTDRLDTEMLKRAFLGWLRGERDHCKMVAIPTIQDEDARRPNRERENLVGEQSRIVNRMKAALIRLGIRGFNPKLRKATDRLESLRTPEGEPIPPNTLAELRRDMERRRLVGEQVRQIEEARLQRLERSPLDGPNAMLRLLARVMGIGIETADMLVQEVLSRNLRDRRAVARYAGLTGSPDESGKKRREKGLARSGNARVRRGMIQLAWRFLMFQKDSALAQWFRARTENARGTRKTMIVALARKLLIALWRLVREGVVPEGIVLRPAQ

SEQ ID NO: 444388 - protein, 346 aa, unidentified
MLHAGLDLSRKRIDVCLLSDQGELVEELACPPDRDGLRGLARRVGVHDEPVVGVIESMTGARFVHDTLESLGWAVEIADAAKVKGLAPLAAKTDRIDARVLALLSQRDLVPAIWLPDPRVRSERELARFRLHLVKHRSQLKHRIHSTLMSFGRPCPVSDLFGVAGRELLARLEVPEPWAGNVLASVCLIDTLEAQISEINARLQRGGAEHPYVPKLLSVPGIGSVLAFTIAAEIGDISRFATPTKLTGYTGLCPRVVQSGESDRRGPLTKQGPRYLRWALLEATMHALRHPAYAERYQRNKRRLGKQRGAKVAQVDIARKLTVAIWHMLTRNESFAPKGAAFRLAA

SEQ ID NO: 444389 - protein, 407 aa, unidentified
MIFAGVDWAEAHHDVHVQDESGKRLGGGRLPEGVEGIARFHELAARHAQEPGDVVIGIETDRGLFVTALVAAGYQVFAVNPMSVSRYRDRHSVSGAKSDPGDAKVLADLVRTDRHNHRPVAGDSDLAEAVKVLARAHQSMIWSRRRQANMLRSALREFYPAALAAFDDLTSGDAIEVLRAAPAPALGAALSRPKIAAALCRGGRQRRIDARATDIQATLRSPQLAGSPVVAAAMGASVSASVAVIAEMTTQITVLERQLAADFEQHPDAEVVRSLPGLGTVLGARVLGEFGDDPGRYATAKCRKNYGGTSPITRASGTRRVVLARHVRNKRLADAIYLWAFASITASPGARAYYDTRRAAGNTHDAALRALGNRLVGILHGCLTKHTVYSETTAWAHRTDTKLTQAA

SEQ ID NO: 444390 - protein, 481 aa, unidentified
MDSTTSVQPPRTKAAKAKRKSRGNRKGMCLEDRPLLEPNAAGIDVGAREIFVAVPPDRDENPVQVFLTFTEDLQQLAAWLVKCRVTTAAMESTGVYWIPLYEMLEQYGIKPCLVDARHMKNVPGRRTDWHECQWIQYLHSVGLLRSAFRPEDDVCAVRALTRHRNDLVQLASQHIQHMHKSLTQMNLQLHHVISDLTGLTGMSIVEAIVAGERDAAVLARLRDPHIKASEETIRKSLVGNWRAEHLFTLKQSRDLYRTYQQQIVACEEEIEKLLQQFESRVDPNEKPLPPDRKRQRRSRKKRKKDGDREPGFDLRTESYKLFGVDLTQIPGLETLPLPLFSEVGRDMRQWPSAGHFASWLLLCPDNDISGGRVLWKGMRKGNNRAGQMFRLAANSLHHNNTPLGAYLRRMKAKLGPAGGITATARKIAIIFYTMVKNQVEYDATLWAQRDTQREKRFEDKVKRQAQQLGYQLVPIEEKPAA

SEQ ID NO: 444391 - protein, 315 aa, unidentified
MTQTNMTTAGIDTSKLKLDIAVHGRTERWKVANALPGWRALATNLAKADVTRVGIEATGGYERGVVEHLRAAGLIVLVLQPVQVKAFGRVHLRRAKNDALDAELIAACAAAIDRLRMVPDARLTELAGHLTFLEQTEEDIARFKTRLEHIDEPGLRRIVNSDIARLKARKAAQIRDIAKRLRAHDDLAERLDLVLSIPGIGERTALALLIRMPELGQVSREEAAALAGLAPFDDDSGQRKGQRRIAGGRGRLRRSLFAAALPAAYRWNRALIALYARLKARGKAHNAALVACARKLLIYANTVVQRGTPWTEKAA

SEQ ID NO: 444392 - protein, 477 aa, unidentified
MWLLSSLAVVPAKAGPITTKVLAIAGPTTSLCCGIYVGVDGPSTASLCQNEVVADLIQEEPSVNDLIRIGMDTSKSVFVLHGVDAAERPVLRKTLRRRQVIEFFAKLPPTQVGLEACGAAHHWARELGALGHEVKLLPAQRVKPYVARNKNDTADAEGICEAMSRQRMTFVPVKTAEQQAALMLAGMRDQLVARRTQLSNTIRGYAAEFGLVAAKGLEKIEPLLARMAADESLPALARELFAVLGAEYHELKLKLRKIEAQLLAWHRQNELSRRLAEIPSVGPIGAALMVMKVANPRAFRSGRDFAAWLGLTPKDHSTGGKQRLGVITRAGDEALRRVLVLGATAVIQQVRRGRGHSSLWLVALLKRKPPKLAAVALANKTARIAWKLMVSGERYRGACATEVTHGNVCFEGASSQPRKPGAVLAAVKARPGSAAARRTGNATAGLDGGCARRPTTIAVGTKKRSMVEQRNESHGHD

SEQ ID NO: 444393 - protein, 419 aa, unidentified
MPRDVRISIAQNEGRGMRKQDMTYDIYCGIDIGKNEHYLVALEPVSDRRVMSRPLPQDEKEIEKALFQLESLGKVLVVVDQVGTIGRLVVAVAQRMSIDIAHMPPRTFSKAASTYGELKTDAFDAFVIADSARSTPRMIEMVVSRNVAIEEMRVLASFRADAVKERTACYNHLHDLLHKVSPPLEKLFQGEALHADLALRLLAQYGGPLGLKKAGKSRVSTWAGKLKYHKTRGPAKVEEIFKAISEMTLVLPASAVLEEGIKRIAARTIELEALEETFNSEIALLEVSIPEVALLKSMPGMGDVLAPAIASEIGDINRFRSAGHLASYGGVAPVKKESGTSSKGARKAKGGNRKLKNALVQYAKSACMHDPHAKAYYDKKRAQGKSHSQSLLALARRRVEVIYALLKNGCLYEGLLKAA

SEQ ID NO: 444394 - protein, 390 aa, unidentified
MIYVGIDVAKDKHDCLITDSHGEVLLDSFTFQNTRTGFDSFVARLAGCSEDMSDIKVGLEATGHYSDNLLEFLLDKGYHTFVINPLHSNLYRKGLSLRKTKTDALDALSIVTMLRTENLQSYTPQSYHTRELKSLTRYRFSLVQTCAKLKSSYTRLVTILFPELLHLVSTLHQKSMHTMLLELPGATPIALCHLTRLTHLLQEASKGHYGKAKAAEIREAARTSIGSHNAAKALELQQTIRMIRLMTEQITQVEDMIKPIIDSLHCPIMTIPGISYSLAAMIYAEIGDFKAFGSAEKILAFAGMEPSVYQSGQLNSTHAKMVKRGSKYLRYALFQAAKYACNWDSTFAAYLQKKRSEGKAYNVAVSHAAKKLVRVMYHLVKRNQPFRRAV

SEQ ID NO: 444395 - protein, 549 aa, unidentified
MKLCLSIVDGESKLLCASVVGREGRLIIGAHCPSQSLVSGVSVFNIGDVFIRQSGYDPVKEMAAVSAPLRPQLLAQSPVAKTRKRDPIISHPQKQSQRTAQNSVSNLPQHLQHININAAGIDVGSDRHLVAVPEGRDTVSVREFATFTADLQAIADWLEQCGVTTVAMESTGVYWIPLYEILEQRGFEVYLVDARRVKNVSGRKSDVLDCQWVQELHTYGLLAKAFRPAEEVCVLRGYMRQKEMLVQTAAMHIQHMQKALQQMNLLLHNVVSDITGATGMKILKAIIAGERNPQVLAKERDPRCRNSMETIAKSLVGNYRPEHLFALRQAIELYEIYQTKIADCEAAIVAYLEQQDQCTEDEPPSPQKPIPARDRMRGGTDVRAKLYKMTAVDLFAIPGLAADTLLTLASEVGLDISPWQSEKHFTSWLALCPGTKRSGRRILSSKTRPSANRAAQAFRMAAATQARAKTALGAFYRRIRSRSGGREAITATAHKIARIFYSMLKNGTAYVEIGQAAYEQKFKERRLQSIKKQATALGYQLTPIAAGSF

SEQ ID NO: 444396 - protein, 383 aa, unidentified
MNSIEGTVQMIVIGTDTHKRTHTCGAVDALTAAARGELTVPARHGSFGKLLRWARTLDPERVWAIEDCRHVSGAFERFLLAHGERIVRVAPKHMAGARRSSRERGKSDSIDAFSVARAALREGLEELPGAHLDGAALDIRLLVDHREDLIAARTGDQQRLRWHLHDLWPELEIPAGALDTAKWLGKASRRLARAPQSTRVRIARELVRQIATRTTRIRELEQELAALVESYAPQLLAERGCGPLTAAKLIGEIAGADRFATDAKLARTGASAPIPASSGNTQRHRLDRGGNRQLNCALHRLAINKATWDPDAAAYLARKQAEGKSRKEALRCLKRHLARRVWKLLRAPTSNQDPRSNNNTNINTNNTPAPIIVNAPYFMPCAR

SEQ ID NO: 444397 - protein, 356 aa, unidentified
MEIHKVQNFVVKGKEVFVGLEDSKKTWKIAVRCDKMLIHRVSMPAQHQILIRYLRNKFPECTINLIYEAGFRGFNLFDRLTEEGIDCMVIPPHLVTEPKVSRVKTDKRDANRLAMIRENHDFKEPCCVPDKERREDRQISRTLWGMQKDIVRTRNRIRKFLDFNGIEVSFPERWGEEEFRALKELPLGDSLKKSLTALITLLEQLWAHKEALHAALRTLCSKERYKKAFGIAMSLPGIGWFTAIRLILELGEDLSRFTSGKKIASFVGLTCSEYSTGETERKGRITGMGSGLIRAALIENSWMAIRKDSVLLAKFTRIWKGKGSKKKAIVAVARMLIVRLRACVISGTPYAIGTVK

SEQ ID NO: 444398 - protein, 390 aa, unidentified
MEYRHAEVERPQPIPHASQTGSHADRRDRDEPFELARCGIVPGIERQPLKKLEVDESTLLKLLVRWREEANKSGHSIERIAVAFEAGRDGFWLARWLRARDIEAHIIHASSIAVSREHRRAKTDRLDTELLKRAFLGWLRGERDHCRMVAIPTIKDEDAKQPNRERESLVGEQSRIVNRMKAALVRLGIRGFNPKLKKAVERLDGLRTPEGEPIPPNTLAELRRDMARRRLVSDQIRQIEDTRLERLEQAPSDGPHAMVRLLARVIGVGIETADMLVQEVLSRNMRDRRAIARYAGLTGSPDESGRKRREKGLARSGNARVRRGMIQLAWRFLMFQKDSTLARWFRARTENARSTRKTMIVALARKLLIGLWRLVREGVVPDGVVLRPVS

SEQ ID NO: 444399 - protein, 457 aa, unidentified
MNKRIIGIDLAVSAKHKAVVLDPASNEFIGKQLSFRSRPDDLERVLSRARKGASKEVQLIAVMEATGMAWYPVGVYLHHRGVTVYRVNGQKTKDLRRVFWKHAGSDHIDSKVLARLYQLDPDRLEYWWPACGEQLALQRACRAFSRWRKLNTALQNRLHAYDQWAWDGIQKLVPADAQDWMRQQWYNPWRVQEAGVDHLAAAWQSINSRKAVDTEWITGWVSRAKQMTTLYGSEEMVGYDDLQAIMRHSLCLRDQYAQEQACLTKEQILPLYHKLFPDCFLVTIQGVGLQSAATYMAFIQNIDRFPTIEKFRLWCGIVPASKQSGYAETKGLRITQAGPNLIKATLYLNAEVARQWDVQLAAIYYKQMVEYGKHHSQAVCACASHLASRIFAVLKKQRPYELRDLENKPISKMESRNLCKEFRVPDEVRRRNNKRFRRAQAEARKDSHLKQQRDLVK

SEQ ID NO: 444400 - protein, 361 aa, unidentified
MAMKKRLSKKQIFFNKIKLTKDDDLYVGIDVHKETYGVALWLNGTPAIDFLMPADNGKLLKLLEKVRIAVRKVVYEAGPTGYTLARTLQKADIPTTVVAPSKTPRQSARDSKTDQLDAKTLARYAAKGLLRTIAIPTRQQEADRQLTRTRDQLVSKQSRLKLQIKSFLLQHGIEQPPALRIWSAKALKQLSALRLSKQLRLCLDLLAQELQFLQNQLTTIQERLKDNFDKGRHARDVALLKTHPGVGPVIARQYTAELFNPKRFKHKTEVAKYVGLAPTIIQSGQSRRDGPVTKTGRPQLRSNLIQGAWIWIRRDPQARKTFNRILHNTANKNKAITAMARRLAIHLWKMLCDNKPFTNTA

SEQ ID NO: 444401 - protein, 425 aa, unidentified
MNFTQNEKISQVTNETLVVGIDISSETHYVRAFDWRGMELTGTFKFESTSYGFKQMMEWLEETCKSNNKTKIIIGAEPTGHYWFTLAEYLKENSIKFVFVNPMHVKRTKELDDNHPSKNDRKDPKVIAKLVIEGRYLIPYIPEDIYAELRVANESRMRITSEIVAIKNRIQRWFAIYFPEYTHVFSSWEGDSSIEVLRNCPLPADALALGTDAINKLWREKKIRAVGIKRAKALVETARTSVGVKNGTNAARLEMSMLIEDYLIKKEQEARIIEVLETLCIQVPNSEKLLSIKGIGILTVASFFGEVGDIRRFNSPKQIQKLAGLAIANNESGKHRGKAGISKRGRKLLRCILFQAVTSLVIHSPEFRHLHRYYTTRSNNPLKGKQSKVALCCKLIRVFYAILTKGVEYDSEKLMSDIVRPELSA

SEQ ID NO: 444402 - protein, 347 aa, unidentified
MNTTTVGVDLAKYLFAVCQLDHTGAVTLRRELRREAFVAWLAQLPAGTIVAMEACSGAHHWARRCREHALQPRLMAAQFVTPFRKSRGSKNDRNDAEAIATAARQGNMRFVAIKTVEQQARLAWHCVREGYKTEHLAVMNRLRGVLAEFGIVIAPSAIALKRALASILECKNLPGEFIELIADLRDHWQQIQSRLHDCDARIEAHARADERSQRLRALTGVGPLSADAMVASVGTGGDFKNGRQLAAWLGLVPRQHSSGGRERLGRISRSGDAHKVPTEKATPEQIWIRQLATRIPFGKLLVAIANKHARQIWAMLARDDSYDPDAWLRHPMVQRNASRKNTLARAA

SEQ ID NO: 444403 - protein, 299 aa, unidentified
MGEVITIGLDIAKSVFQIHGVDEVGAVVIRKRVSRAKMLEFFAELPRCLIGIEACPAAHHWARELLAVGHTVKLMPPSYVKAYLKRSKNDANDAAAICEAVTRPSMRFVAIKTKEQQAALILHRARQLLVRQRTMLSNAIRGHLAELGIVSAKGRNGTGELLEIITNDADSRIPLAARSILKVLAAQYNAIGTEIASIGKSILAWHRSCEPSRRLEEIPGIGPIVATALVVEIGDWKAFRSGRGLAAWIGLVPKQHTTGGKDKLGSITKQGNRYLRWLLVSGAMDVNLDKFIRQPSYSL

SEQ ID NO: 444404 - protein, 372 aa, unidentified
MTQSNILFIGMDVHKDSIVISLADDDRSEVRRYGSIGGTLADFKKVLRKFVATGKDLFFCYEAGPTGYELYRYIVAQGHQCIVVAPSLIPKKPGDKVKTDQRDADNLTRLLRSGDLTAVYVPNAEDEAVRDLSRAREDAVIVFKSAKQRLKSFLLRHNIRFDGSANWSEKHLRWLAESVNMSYPAQKVVYQEYLNSVTEANARVKRFDKEILFHTKQWRLYPVVNALMALRGVRMVVAVTMIAELGDLTRFKNPKQLMCFLGLTPSEHSTGDKKKQGAITKTGNQHARRVLVEAGWSYRFHAKVSKEMQKRQESIPLEARDIAWKAQLRLTKRFRVMANKGKSHNVIVVAMARELAAFMWAIAQEIPISSSN

SEQ ID NO: 444405 - protein, 387 aa, unidentified
MPQPNDLSRSLAALDQDSTLVAVIEISQSSWLVGGIAPGVNRQPLKKLAADETALLQLLSRWRGEATKAGRTISRIAVAYEAGRDGFWLARWLRGRGIEAHVIHPTSVAVSREHRRAKTDRLDTELLKRAFLGWLRGEQRHCSMAMIPTLEEEDAKRPNRERENLVSERTRLVNRMKSALARLGIRGFKPHLRKAPERLDTLRTAEGMALPPNTLAELRRDMARLRFVMDQIREIEAARLARLEQHPEQANHAMVRLLARVVGVGIETADMLVHEILSRHLRDRKAVARYAGLTGSPDESGARRREKGLSRAGNARVRRGMIQLAWRFLMFQKDSALAQWYRRQTTDGRGATRKTMIVALARKLLVALWQLVTTGEVPEGVVLRRAA

SEQ ID NO: 444406 - protein, 471 aa, unidentified
MIRHRSDRVLLGPLASVRKPVSQPIICSRSIYAGWTVLVHVRLIPQEIESAMRNAGIHANSLLEVRRMYNAVGIDVSKGKSTIAVLQPGGTVIRKPFDVSHTSQSLIELAHYLGSLEGSTKIVMECTGRYHEPMLKALYEAGLFVSVVNPHLIKNFGNNSLRRVKSDPADARRIARYTLDNWAELRQYSGMDNTRTQLKTLNSQFSFFMKQKVAAKANLIALLDNTYPGVNKRFDSPPREDGSEKWVDYAYSFWHVDCVRRIGLKTFTERYRAFCRKHHYIFQPDKPEKLFHASKELVAVFPKEKTYKLLIQQSIQQLNLASGHVERLRQEMNALASTLPEYSTVMGIYGVGKTYGPLLIAEIGNVSRFTHREALTAFAGVDPGVDESGQHKSKSNRASKVGSDRLCKTLFQIMTTLLQNAPEDDPVYRFLDKKRAQGKPYYVYMTAGANKFLRIYYGKVKECLRNLEQAE

SEQ ID NO: 444407 - protein, 313 aa, unidentified
MKQSFVGIDVSKNSLDVHVLPENVSYSFAYEPQKVKALIRKLKQLKPGLIVMEATGGYEISLAVQLSAAKLNSAVVNPRQVRDYARAIGKLAKTDQVDAYVIARFAQDVKPEAREQLSLKELQLKELVMRRQQLIDMRTAEKNRMTRAYTPQVLQEIQKHISELNARIKAIDEQLHNDIKNNPSWNQKLEIIASVPGIGANTAHSILFCLPELGKLNRRQIAALVGVAPMNRDSGMMRGKRSIVGGRAVVRKVLHMPTLSAVTRWNKRLKTFYCHLRDQGKKHSVALTACMRKLVIMLNVMVKNNQVYDPKFC

SEQ ID NO: 444408 - protein, 383 aa, unidentified
MTKQSTATAFDHDSTLVLALELSGKRWEVGAVLPGVTRRPRRSLAARDMAGLLQQIERWKAEAGRAGRTVRRTVLTYEAGRDGFWIARYLRADGIEVQIMHPASIPVERRGRRVKTDRIDLDMLLRTLLAWLRGEPRVCSMVRIPSEAEEDMRRPERERERLVSERIALENRIENLLCLQGIVGFKPRQKKAVERLDDLCTRLGAPLPPRLLEEVRRLMVRHRLLSEQLREIETAREQAAMVAEPDQAVQQIQMLARLVGLGLATATGLTREVFCRSFADRRAIAGFVGLTGTPFNSGGSEREQGISKNGNPRVRRILLQLAWRWLRFQPDSALSCWFIERTGGAKGRIRKIMVVALARKLLVALWRYVECGELPPGAHLAGA

SEQ ID NO: 444409 - protein, 370 aa, unidentified
MHQPTTLFVGLDVHKDSIAVAYAQDGRMDPPAFVGSIGTRQADVDKCIRRLRTKASQLVLAYEAGPCGYVLHRYLTGKGLECRVVAPSLIPKKPGDKIKNDRRDAVEIARLLRSGDLVSIYVPRVEDEAIRDLCRARDAARIHLKAAKMRLKSFLLRQGLHYTGKARWNDAHRRYLSKVVCPTAPQQIVFQESLQAVDEQVDRLDRIEHELVEAASSWRLFPVVEAVQALRGVQQVVAITVVAELGDLTRFDNPRQLAAYVGLIPSEHSTGDKRRQGGITKTGNGRARRALTEAAWAYRYNAKVSPIIQKRAEALPANVRAIAWKAQVRLCKRYRRLAARGKHPNVVITAIARELIAFMWAIAKEVPLHA

SEQ ID NO: 444410 - protein, 359 aa, unidentified
MKFVGVDLHKQTITMCVVDAALNVLVRRRFGNRPTEPIVQFLASLADFTIVCEATASYEWFVQLVEPLAQQVVLAHPGRLRVIAESTRKSDHLDARTLAEMLAEHRIPRSYRPTPRQRAHRRLVRHRTYLTRRSTSVRNKIRHILADYNLDRPDLFTEAGQDYLARQSLAPEDRWVIDQLSLERTLYLQQRRGVDRRLAEFASQGSPQEQADRRRLRTIPGVGEVTVEVLLAELAGIERFSSAKKVVSYAGLVPGQRESAGKRKNLSIEKTGSPLLRWALVQAAWQLVQRSPKWGHIYDRLAQRVGRKKAIIAVTRRLLCVAHTLILKGEDYREVCPVSSARVSQARKSRRSRTEEAAI

SEQ ID NO: 444411 - protein, 385 aa, unidentified
MMNLDRTKTPAGDNYATVYVAFELSKAKWRLGIILPGAKKMSRYTIDGGDTAGLSARLSQARAKAATCGKPVRIQSCYEAGFDGHWLHRWLTEQGVISYEVDPSSIEVNRRARRAKTDRIDLDKLMRTFLAYIRGEPRVCSMLHVPTVEDEDRKRLTRERERLLKERTAHTNRIKGLLHAHGIRDAMPMKRGFIESLATVRTADGRPLSRWLKEEITREHERLCLVEKHICALEKTSTAELRAAAPGSADAKVIQLAELKGIGLTSGQKLVNEVFYRSFDNRRQVGSCFGLTDTPYHSGTSRHDQGISKAGNRRARTLAVELAWLWTIHQPDSELTRWFRERVGKIKGRIRRIAIVALARKLMVALWRDLTTGVVPAGVALHRAC

SEQ ID NO: 444412 - protein, 346 aa, unidentified
MILIGCDFHPSWQQVCWLNMASGETNNQKLVHASGDAEKFYRRLTVPVRVGIEATGNCQWFLELLGKLGHEVWVGDAAKIRACDPRQQKHDPRDARLLLQLLVENRFPRIWTPSSEEKDLRQLLLHRYKLVRMRVQVKNELQHLAMNKGITKGRRLWSAAGEKVLCELPLAPWASRRREDLLRLRSMLNEQIAGLDQAVEKVAEQNDRARLLMTQPGVGPITSMAFVLTMGDVSRFPRGKQVASYLGLIPREYSSGGHQRFGSISKQGNRFMRMLLVEAAQCVVRYDAGFRNEYLHRCHTKPRGVAKVAAARKLAVRLYWMLRTNTAYPEIARVGSSSRVALDGAS

SEQ ID NO: 444413 - protein, 430 aa, unidentified
MEQIPEQPIVKADLEPEFAAFVAIDWADQKHYWSLKVAGQQALQRGNLDSTPEAVEVWIMELHLRFAGRPLAVALEQRRGALAVILSKYAHVHLYPVHPTTLAKFREAWYPSRSKSDPVDADLLLEILTAHRSRLRRLDPDTVEMRLVQTLVENRRKLVDERTALSNRLTDLLKLYFPQILGWFDEVTSAVVGDLLEQWPSLQELQQAKPAKLEKFLRTHHCLEIPERLNQIRQAIPATFDRALMDSAPFLVAAWVRQIAVLRDSIRQLEKHIAELAAKQEDWHIFQSFPGAGAALAPRLMAALGTQRYRYASANELHCFSGIAPVKEASGNTEWVHFRRACPKFLRQTFHEWAGCSIAQCEWAKAYYQQQKARGKKHHAAVRSLAFKWMRILYRCWKDRQPYREEIYLTSLAKRRSALVAALAKAVQMP

SEQ ID NO: 444414 - protein, 424 aa, unidentified
MKNCNKQNEKIELVDEKTLVIGVDIGSYDEYARAFTCRKQELSKKPLHFHNTAEGFKTFKDWAVNIMKANGLEKIIVGMEPTSIYWEALATYCKDNGMILVHVNPAAVHKSKELDDNDPSKNDRKDPKVIAGLVADGRYQFPYMPEEEYAELRELSNLRIRTQESLTQCKNRLARWYSRYFPEFKEAYKNVVSKTAMMILDLYPLPEDIVTLGVEGILQIWRSKKVRGAGERKARKLYEAARNSIGRKEAASIARIEFKSIKEDLDRYQERLDEIEKKADEILPKIKNVDKLFEIKGVGKATVLTFLSEVGEISRFDNPKEIQKLAGYAIVTNESCKHQGEKRISYRGRKRLRWVLYQTALSVIAKNAEFRQIHAYYTTRTNNPLKGIQSVVAVACKMIRIFYKILTDGVSYDGTKMTQDIVHA

SEQ ID NO: 444415 - protein, 375 aa, unidentified
MRQDRAGEVIASYYGIDLHKDQITWHCIHKTGNGETARENGRISTDRILEVLVPMLSVNDSYLIVEASGSSFFFYSLVESHCKKALVVNPVAFRELYMTGKKTDRIDAKKLAERLKYHIECGDTESGFPEVFVPDAEIVKIRKMVTAYELVVKQGTQIKNQAKSIFRSKLMSVAVDIMEKGLDEALNDKRIDEADRSILIMLKRIYDTLMEEKEEIKKQILLLGSFRFREEVKLLMSIPGISLMSATVFMADICTVDRFKSEKKMTSYLASVGTVDSSGGITRNGGLSRRGRRTSYRYILQGLEHIVNGNKDFQKFKERHALTRSNKVRAAIVRKTFVSMYFMLKNKEAYRYLNEAIYTRKIRDLKKYGIDFKCA

SEQ ID NO: 444416 - protein, 427 aa, unidentified
MPYRIAGIDVHKRMLTVVVCDVEVRGEYEFERRQYGSTPSHLRVLAAWLVERQVEEVVMESTAQYWKPVWATLERYWKPLRQEREGAGPMSGALHLAQAQSNRGPRGRKNDFADPERLVKRLVAGELILSFVPSAEQRLWRTVMRTQHQLRCNQVQLQNRLEALLEEAHLKLSSLVSDLLGLSGRRMLTAIAEGETDPTVVAARADYRLRATPQELCDALGACGELHPVYRRLLKTALEDWQRTETRITQLGQEMATLLAAQQEQVQRLAEVPGLGIDSGQQIIAEVGASAATFPSAKALSSWVGVCPGEEESAGVNHNCRSPKGNRHLRRILNQAAHAAVKLKGSVFAILYRRYVVRFGHNQTIAVIAHRLWRLIWKILHQGVRYEERGPAVSQKSKQRRTARMIRQLRSLGYRVELLNALVGVPA

SEQ ID NO: 444417 - protein, 378 aa, unidentified
MKAARFTADEIERVAYLTSKGYLPVAVDVASRVFQVCYYDLGAKHIKNYQLSRVKFFEFIDDTQTPRKLIGIEACGSCNYLCRYIEEHNHKCHILLAQKVKAFLHLDKTDRIDALGILKALITPSMQHIPARTQENQYLLNLITVREQLNKQFVQTVNAAHAFLYESGVVAGTASVASATKVTEALKALCNAETKKEHSEDDCSYSHLNCISESLLSNIESLQTKIKEINSHLLSYASNNEICSNLQTVPGIGKLSAVALYAAMGEPERFSSSRAFAAFIGVAPVTTGTGGKTTVLGIRKSGIQSIKKMLYMCAMVYLSQAMKNGTESSWLKLRLNQNRSKKIIICAIMNRLARIAYAIAKSGQPFDENKCNMIKKLR

SEQ ID NO: 444418 - protein, 378 aa, unidentified
MNEMLRNDESKTGRLLVAMELSLSKWGLAAAVEGQPRKRVKTVAGGDYEALSEAVAEFKARFKLLPDTPVVFCYEAGRDGFYPYRCLVRLGHEAWVIDSASIEVSRHRRRAKSDGIDVDKLVELMQRKARGEQRALRIVRVPDEASEDQRQLPRERENLLTEQHRLLNQIESLLFLQGYRGIPQSSLRLKEWLEQTGELSPQLRERIKRDVERLALVETQFAGVEKCMKEQMYQEQAGNIGRVAVALMQLCGIGLIGAWVLASEIYGWREFRNRKEVGSVLGLTPTPYSSGNDQREQGISKAGNKRARSLLVELSWLWLRYQPESVLSRWFRERFSKGGKRLRRIGIVALARRLAVALWRYTAHGVVPDGVRLKAVGA

SEQ ID NO: 444419 - protein, 331 aa, unidentified
MLYVGLDVHSNKINMTVIRQDGQVERRRQMRSVAEMIEQLKRLPGPFKAAYEASCAYGLYYEVLTPLAQQVVVAHPGRLHMIFRSKRKNDRNDADWLARLLLVDAIPAVHVPAPEVQAWRELITFRRRLVQKRTRVKNALRALLRTVGVRPARKPGLWTQRGLAWLRTLPFSQLSHAIKRDLMLDELAALTAQVARVEKHLDQIAENNLSICQLQSVPGIGPRTAEAIVAFVDDPHRFRHSKSVGSYFGLVPCQDQSGSTNRLGHITREASATVRHLLTEAVWRGVRKSPTIARYFARVQREDPDRKKIAIVATAHYLIRVMWAMLKNGTL

SEQ ID NO: 444420 - protein, 339 aa, unidentified
MHIKRIGLDIAKHVFQIHGVDRFEKVLVRKQLRRVQVLDYFKSIAPCLIGIEACGSSHYWARELSQLGHQVKLIPAQFVKPFVKGGKNDANDAEAICEAVGRPSMRFVAIKSVEQQVMQAEHRIRSRLVRARTALSNEIRGLLSEFGIAVGLGISQIRKALPILLEDKELRLSARFKLLLSEMAEELRQIDEHISEHEERLKAAAKEDDRIKRLLAIEGIGPISASALVAAVGDATQFATGRDMAAWLGLVPSQHSSGGKERLGHISKRGDTYLRTLLIHGARSVINHCEGKEDRRSQWVRQLSQRRNRNIATVALANKNARIAWAVLSRRETYLQAVV

SEQ ID NO: 444421 - protein, 334 aa, unidentified
MALELLAIDLGKRSFHLYGIDTDGMILSRKVSRAKLAEVVNNLAPIAIAMEACASAHYWARCWLAVGCEVRLINPRFVKPFVKGSKNDAVDAEAIFEAATRPTMRFVPVKSTDQQDMQSLHRARDRLICQRTALINHTRGLLAEYGIVLPQGPSHFTARAPAAIAGADLSDLARTIFGQLLDQLDDLDRRVKKLDATIAGLCRTNETCRRLTKLPGVGPVVATAIVAAVNDGRQFRSGREMAAWIGLVPRQYTTGGKPRLGGIGRRANHYLRRQLIHGARAIVSRSAKHGDRQSTWLKALAARRGFNRTIVALANKTARIAWTLLSRKEEYVAP

SEQ ID NO: 444422 - protein, 423 aa, unidentified
MGTHNSYELFVGIDRSDASIDICVLPAGGGGARQQKVSTRPEALLEWVHALRAEHPGGQIAICIEAPCANIASFLGQFDFVDLFLVNPFLIKSYRESFHTARPKDDKRDAGCIAQFLLERHHKLAPWRPASAEMRKLRAYLEHRRALVDGVTETTNRLTAALKLYYPQALELSGQRLHAPLACRFLEKFPDLGALQSAAPAELRKFYYANASRRRPLVEKRVTAAADAIPITTDGGIITPQRELVLFLVRQLDMLRPQIKRYDALVAAITAGHEDAAIFESLPGAGPNLSARLLATFGDDRSRFPDAKSAQCLTGIAPVTKQSGKKRHVHRRFTKRTCPHFEHQTLIEWVGETILKPGWARAYWQQQRARKIGHWAIMRSLAYKWIRVLHRCWSDRVPYDEARYVAALERAGSPVAELVQKAA

SEQ ID NO: 444423 - protein, 345 aa, unidentified
MVILGVDAHKRTHTVVVVDDHGRQVASKTIGTATADHLGLLRWAEQFGADRQWALEDCRHLSRRLERDLLAAGERIARVPPKLMAHVRDSARTFGKSDPIDALAVARAVLREPSLPTARLDGADREIRLLVDHREVLVAERTRAINRLRWHLHELDPGWDPRPRSLDRASAYDRIEQRLQHAEGLVAALARRLLAHARRLTAEIDELTADITARVEAIAPSLLAIVGCGVLTAAKLIGETAGIDRFTSKEAYARHNGTAPLPGWSSNRARHRLSRTGNRQLNAALHRIALTQAHWHPDAKALLARRTAAGDGGLEALRVLRRRLSDVVYRALRADASLSITNPAA

SEQ ID NO: 444424 - protein, 347 aa, unidentified
MKFYNQQHKYYCGIDLHARKMYVCIINQKGKTKVHQNIKTDPELFFELIFPYLDDIVIGVECVFCWYWVADLCSEHKIPFVLGHALYMKAIHGGKTKNDRTDSYKIALLLKGGNFPTAYPYPAEWRANRDLLRRRMYLSRRCSELVAHILNTNTQYNLPGFNKKLSRKYNHEGVAERFEDPQVRKSVEVDLEMINSLNQVLKKLEWHIEKTARQHDYHTLYLLRSIPGVGQILALVILYEIHDIKRFPRVQDFSSYARLIRPVKESNGKWAGHSNKKIGNHHLKWAIKEAAVLMLRDSAQAKSYLARYERKYNKGKALGIFTHKLGRAIYFMLKNKEAFDMKRFFAQ

SEQ ID NO: 444425 - protein, 337 aa, unidentified
MNYSGIDLHSNNSMVVVSDETDRILCRRRVPNELGAVLALLEPHRAELAGVVVESTYNWYWLVDGLQAAGYRVHLANTAAIKQYEGLKHSDDDSDAAHLAHLLRLGILACGYICPPQERALRDLARKRLQLTRSRTSHILAVESMVARHTGGRISASAVKQLTLAEIEALGQLEDVTLAMAANAAVIRTLNTEIDKLEARLRERVKPRAEFSLLTTTPGIGEILGSTIMLETGTIERFAAVGNFASYARCVDSKRLSNGKQKGHGNVKNGNRYLAWAFIEAANFARRFCPEAKRFYERKKARTNNIVATKALAHKLARACYHMLKERTPFDVKRCFA

SEQ ID NO: 444426 - protein, 327 aa, unidentified
MFNSVLGIDVSKRKLDVALLMNEQVCYQIFDNTPSGYKGLLKWLTQQRAGCVHVCLEATGMYGESVAEFMHLAGHTVSVVNPARIKAFAESQLVRNKTDRTDARVIAHFCLAQLPTSWSPPDPAMRELRTLVRQLDDLAAIRQQERNRLKSGVSLPSALSTLRRHIAFLDREIKAGELRIKNHVARHPELTRLVALLMSIPGIGHKSACKLIAEIQNMDLFDNPRQLAAYAGVTPRQYVSGSSIHRKARMSKKGNALLRSALFFPAMVAKRCNPVLRPFADRLSHAGKPPLSVTGAVMRKLLHIVFAVWKSGLPFDPAFSTHSTVSA

SEQ ID NO: 444427 - protein, 347 aa, unidentified
MTTRLEKIFAGVDTHADTHHAAVIDSSGKQLGVAQFPTTPAGYAALAAFMAAFGMAVRVGVEGTGSYGAGLARHLGAAGFVVVEVLRPSRQVRRTRGKSDPLDAYAAARTALAQEEHATPKTGAGQVEAIRYLLVARRSAVKARTAGMVQLKSLLVTAPDLIRERYRALSDKALIEELARSRPAADPVLGAIGRSLKSIARRHQQLGAEISELDQALAALTAAANPGLVAAKGLGTITAAQLLVTAGDNPDRLRSEASFAALAGVSPIPASSGKTNRHRLNRGGDRQANAALHRIALVRMSYEPRTRDYVARKRALGHSNKEWSAAMFSDCPQPECDDFYAANVSGP

SEQ ID NO: 444428 - protein, 342 aa, unidentified
MIESNVIAIDLAKNVFQVCKLSPRGHVIWNKQVNRSKLIALLVNEPVSLVAMESCGGTHYWARYAKTCGHSIKAMSARRVKAFLQGHKTDANDAIAIGLAALQPAVKSSRTITLEEQCQQGITMMRDLAVRQKVALAKQLRDQLLELGHPINKGDAALLRCVPEIVEDAENGLPDFYREALYHQYQQLRDLLAHAEALEQRFKEAVRQDPVCRRLSALEGVGPVGAMLLKLALSQPGHFNNARQAAACVGVTPVQHSSGGKGSISKLAGDKKLRSVLFEGALAVIRSLDKREAKTIKEQWLKQLIHRRGKKVTAIALANKTVRTAYAMLKKNTDYQPALLVG

SEQ ID NO: 444429 - protein, 395 aa, unidentified
MFIVGIDIAKRSHEAIIIAEDGQVVRKAFSFRNNCTGYNLLLEQVRRLTLVKSQIVFAMESTAHYWLALYARLLKDGYAVMVLNPIQSHSLRELYIRKAKTDARDSLIIADLVRFGRCKASNVPQDKILALRELCRSRAYLVDMAADLKRKLIALLDRIFPEYESLFESVFSKASIAVLSKYSTPQKVKNANLRKLTDLLMESSNGHFGEWKAHQLKEAACSSFGIDDSGGVYSTLLGMFLEQILSLTAQADSLEKQISVFFQEFNNPLTSIPGVGTVLAATILSEIGDITRFSSADKLLAYAGLDPSVKQSGEFKSNQNRMSKRGSPYLRRAIWLASTVAVHRDPMFRTYYEKKISEGLHYMNVIGHVSRKMTAVIFAVLRDGQPYQPILQSAG

SEQ ID NO: 444430 - protein, 468 aa, unidentified
MSPQNNMTPEAATVHRKEQAMIAAVVEKGAGIDVHKKFLKVCVMVGPLSEEPRFEIRRVDCSNSALEGLRQWLKAEGVTHAVMESTGPYWVPVFNILEQDVKVILANAEQVKNRKGHKTDAQDSWWLAHLLRHGMIRASFIPEKATRNLRELTRRRKKLIEQAASERNRVQKQLEYGNVKLGNELSDVFGLSGQMMLQALVNEDRTPEEIAELAQGSLKKKKEEIAEAVRGQRLNETQKEVIRSCMRLITFLDLEIEELSDSIAKLIQESGQQKQKELLETIPGIREEAAGNVLAETGPDMKQFPDEGHLSSWGGVCPGDNESAGKNKSRHTTHGNPWFRATLTECAWSASRTKGTVFQSRYESLKPKIGHKAALVAVAHLLAETIYHVLSRGEQYRESQPQELPEVQRQRIIRHHVRRLRRLGYWLAADRLAPLESWYVTGRIPDSGPTQPKRRGPKKRQLQRGASE

SEQ ID NO: 444431 - protein, 341 aa, unidentified
MSDYIGLDVSLEDTHLCAVDGSGGVTARAVARTDPDELAKTIRDLAPKVKTVVLETGGQSAWLQQGLAALGLPAVIVDARQAKKALSARLNKTDCNDAEGLAQLARTGWYREVLAKRAGTRRIRTVLMARELLVRQRRDLANQVRGLLRGFGLAVGRIGHAGFEARVRELAHAEPALLAALEPLLAVRRVLDRQIDALTSELGTIARDSQDARRLMSVPGVGVLTALAFITAIDQPGRFARSGDVGAYLGLTSRRYQSGQVDWSGRISKQGDALARAMLYEAANALMTRVKRWTRQKAWAVRLAGRRGGAKARVALARKLAVTLHRIWVDGTTFNWANEPA

SEQ ID NO: 444432 - protein, 356 aa, unidentified
MIAMKYYTSTTQFNCGIDLHARQMYVCVMDRTGKILVHTNIRNNDFAYFLKLVAPYRHDLTVCAECMFGWYWLADACADAGIHFVLAHALYLKAIHGGKNKNDRIDSEKIAHLLRSNLIPPSYVYPAEKRPLRALLRQRLLYVWNRSELLARIQSHQLAHNRPTTRQTLYNREPWEKHLLASEPDPVRQLALQNDLALIGHYDAQLASLEKELLHLTKQTASRDFTLLKTTPGIGDYLGLTILHEIGDIERFPSVKDFLSYCRLVKGTVASAGKIKGLRGAKLGNPYLRWAFGEAAIIAKRDALLGPLAQRLEARLNNKFKANTVLAIKLARAVYFMLKTKTVFDPERLVAALSKN

SEQ ID NO: 444433 - protein, 428 aa, unidentified
MKFKQSDGQNQRIERITTSHLVVGIDMAKEVHVAQATNFRGIVLSSRHLSFKNKIEGFEKLQRWIKGLLQKYRLNNIIIGMEPTGHYWYNLANWLVDEGVHVVLVNPATTKRNKENRDNSPSKSDPKDALVIADVVSRGYYYEYTRQATNFQRLRTIMSDREFWVTNSVRLQNRIIRWLDIRFPEYASVFKDWTCPRSIATLKEFPSPLDLKGQSTAEVITGWRKYMKRAGGSTGIQKAAELISQASQSVGDTTALEEAKQDLQRLIEEFERIVGILEQIEKDIVTVLGEIPIASQLRSLKGLGPIYTAAILSGAGDLKQYAHGRQLLRRAGLNLAESMSGKRKGEIVLSKRGDAKLRKYLYLATLTLVGTNPIFRQLHENNVHNKHMSKQQSVFKLLGKLARILVGMVRHGESFTPEKTFQTYTQAA

SEQ ID NO: 444434 - protein, 419 aa, unidentified
MHEERRWFVGIDWASQEHVVSLCDGQGKKIGQRKFAHGGTGLGEMVVWLLKASGGEPGEIHIAIETPHGPIVEALLERGFNVYSINPKQLDRFRDRFTVAGAKDDSLDAYVLADSLRTDMQLFRRLTISEPLIVELREWSRIDENLKKDRLRLANRLWDQLWRYYPQILELADDLAAEWILDLWEAAPTPEKAARVSKTTVARILKNHRIRRFDTAHVISELRKPALSVAQGTIEVATAHIRVMVAQLRLVNRQLTDVQRQLDRLCKKLAEPIAGEEGENVSGQQQEHRDVTILDSLPGVGRNVLVTMLAEAPDAVQRRDYHALRNLCGAAPVTRRSGKSCIVMRRRACNRRLSNAAFNWGRTAIQNDPTSRAKYDAHRARGHGHARALRSVVDRLLYVACAMLENGTLFDPSVAAKKT

SEQ ID NO: 444435 - protein, 364 aa, unidentified
MNKKRKRMTTAPDPKPFAPDQVDPCGTEVSAEELIVALCRKGVQQPLKSFPNTPEGHREIGHYLARSGRLVRVCMESTGVYGLDLALALAAQAGIQVRVANPRAVRNFAKALMERNKNDRVDAGVLQEFAARMPFEPWQPPARPALHLCALARRLEAITDLCAAEENRLHASQATEALPAIIRQDLERSIRFHQRAAQRLTREALKIISEDSNLQQRYTLLVTVPGIAQTSALRILAELVMISAHLDARQWVAYAGLDPREYSSGTSVHKKVRISKAGNRHLRRGLYMPALVAVRHDPHLRGFYQHLLANGKLKMQALVAVERKLLHAIYGMFKHQQAYDGTKVYRLPDGLTPASSAPVRTEAA

SEQ ID NO: 444436 - protein, 404 aa, unidentified
MNNVAGIDVSKGKSVVSVLRPFGEVVAKPFAVGHTGSELKELANYLKSLDGETRVVMEHTGRYYEPVARFLHEEGIFVSAVNPKLIKDYGNNSLRKVKTDKADARKIARYGLDNWVELRQHTPMDTIRIQLKTLNRQQGLYSKTKTMMKNNLIALLDQTYPGVNALFDSPVREDGSQKWVDFATAFWHVDCVRDMSLTAFTERYRKWCRRHGYNFSQSRAIEIHTQAQDLIAMLPKDTLTKTMIRQAIDALNAVSASLERLKTEMRILAAQLPEYPVVMAMRGVGDSLGPQLMAEIGDVTRFTHRGAITAFAGVDPGTDQSGAHEAKSNRTSKSGPPELRRALFLVMDCLLKTMPQDDPVYRFMDKKRSEGKPYLVYMTAGANKFLRIYYGRVKEYLASLENAD

SEQ ID NO: 444437 - protein, 389 aa, unidentified
MKIFVGIDIAKLNHFAAAISSDGEILIEPFKFTNDADGFQLLVSKLESFDKNSIIIGLESTAHYGDNLVRYLVAEFYQVCVLNPIKTCQMRKNNVRKTKTDKVDTFVIAKTLMMQDDLRFITFFDLDMMDLKALGRFRQKTIKQRTRLKIQLTTYVDQVFPEIQYFFKSGLHQNAVYALLKEAPSPKEIASMHMTHLANLLKVNSHGHFTKEQAKELRILAQKSVGANDSAISIQITQTIQQIELLDSQLQKIEAEITDIMKFNDSVIMTIPGIGYINGGMILGEIGDIHRFSNPNKLLAFAGLDPSVYQSGNFQAKTTRMSKRGSRVLRYALVNAAWNVVRNNATFKAYYDAKRAEGRSHYNALGHCAGKLVRVIWKMLTDEVEFNLE

SEQ ID NO: 444438 - protein, 317 aa, unidentified
MDEPPAVARFIGIDVSKGHVDVHVRPDVTAFSCTTDPDGLADLVNRLALLRPQLVAMEASGGYEAVIAAALTEAGLPVAIVNPRQVRKFAGAIGRLAKTDAIDAGVIAHFADAIRPAPKPMPDALMLRLRELLARRRQLVVMINAEKQRLGKATDTLAQRSFRTVLRSLEAERARIDRAIDKLIAQSPLFCAKQDLLKSVPGIGDIVARTLIVELPELGSVDRHQIAALAGVAPMNRDSGHYRGKRRIQGGRVEVRAPLFMACLTAIRHNPPLRTFYRRLRDAGKPARLAIVAVMRKLLTTLNAIIRDSRAWAHVHI

SEQ ID NO: 444439 - protein, 358 aa, unidentified
MAGKVTETAVVGGVDTHKDLHVAAVVDQNNKVLGTQFFSTIRQGYRQMLAWMTSFGALKRIGVECTGTYGSGLLRYLQNAGLDVLEVTAPDRMERRKRGKSDTIDAECAAHAAFSRIRTVTPKTRNGMIESLRVLKTCRKTAISARRVALQIIHSNIISAPDELREQLRNMTRMQLIRTLGSWRPDASEYRNVTNVYRISLKSLARRYLELHDEIADLDVMIAAIVDELAPELIKRNAIGYESASQLLITAGDNPQRLRSESGFAALCAVSPVPVSSGKTNRYRLNRGGDRAANSALHIIAIGRLRTDDKTKEYVARRVAEGHTKMEAIRCLKRYISREVYTLLRNQNRQLNSIPITA

SEQ ID NO: 444440 - protein, 348 aa, unidentified
MQFYTNLHPFYCGIDLHARMLYVCILDERGEILVHQKIKDSPEELFKLLSPYIGNIVVGAECMHCWYWLSDFCEHHNIDFILGHALYMKAIHGGKTKNDKIDAYKIAKLIRGGNFPLAYIYPKEKRAIRDLLRRRTHAMRHSAELKAYIKNALAQRNLPLPVKSDLSYTTGRDAMRGYFPDPQVQRSIDMNLRLIEVYDHEVSSIECYVEKLTKHDNGRDYYLLRSLPGVGRVLALTILYEIGHIQRFDSVQKFASYSRLVKCKAESAGKTYGTQGNKIGNAHLKWAFSEAAVLFLKGNPPAQAYLAKLQKRMSKAKALSALAHKLGRCMYFMLKNQTVFDSERFLAG

SEQ ID NO: 444441 - protein, 311 aa, unidentified
MTYIGIDVSKATLDLAVHAGALSVHPNDRAGIVALVVAVQALAPALVVLEATGTYHASVTSALVAAGVPTAVVNPGQVRDFARSTGRRAKTDRLDAQLLAQFAAVVQPTPRPLKDTATQELAALVDRRRQLLDMQVAERNRLPVARPAVQRDIAKHIRYLEKAVARTESDLDDWIRRSPVWQAQEDLLRSVPGIGPQTARILIADLPELGRLNRREIAALVGLAPFAQESGRWRGARRCWGGRSAIRAVLYMATVSATRCNPVVRAHYQRLRAAGKPAKLALTACMRHLLIILNAMTKTEQPWRAPALAIA

SEQ ID NO: 444442 - protein, 339 aa, unidentified
MRLYAAFDLHSSNSYLGISDEKGKRIFKKKLPNDPATIKETLKPFKADIEGIVVESTYNWYFLVDLLREEGYRVHLANVMKTQQYSGLKYSDDKNDAFWLVEMLRLGILPEGYIYPKEERPIRDLLRKRGHLVRLRTSLIVSLQNIIARNLGGRLKSNDVKILTTDRVSPLFQGNEDLALAGKVSKEAIDFMTRQIKAIETTIDGRIHLSNPYDRLLSMPGVGKILAFTIQLETGSIDRFQKVGNYVSYCRKVPSGRFSNDKKKGTGNRKNGNKYLAWAFSEASDHARLFDAESRRYYQRKLQKTNAPIAHNALAHKLARAAYYIMRDGVIFMPEKAFS

SEQ ID NO: 444443 - protein, 272 aa, unidentified
MQHYVGLDVSVKETSVCIVDKAGKVIREVKVATKPAEILAVLTEALAIERIGLEAGPLSQWLYGALAEAGLPVICVETRHMKAALSAQINKSDRNDARGIAQMMRVGLYRPVHVKTLASQKRRMLLTSRQLLQAKALDIENDLRGTLRNFGLKVGMVGTVKFEARIRELVADHPDLAAIVEPLLIARRVLREQLGVLHRQLLGIVRHDEVCRRLMTTPGVGPVVALTFRATVDVPSRFTSSKAVGAAFGLTPRRQQSGEIDRMGASRNAETP

SEQ ID NO: 444444 - protein, 461 aa, unidentified
MSRKKPTGKQKGSTQKRVDWKALEIVHPDAAGIDVGGSEHWVAIGPDRDPEPVRRFGCFTADVREMGRWLVEKGVRSVAMQSTGVYWMPVLEVLEQQGLEVYLVNAQHTKNVPGRKSDVQECQWLLKLHAFGLLNNSFQPTDEIRIARTLWRQRSNLVAEASSVIQRMQKVLTEMNVQLCNVLSDVSGMSGMKIIGAILEGERDPWKLATYVEPEVKAKPEDIAKSLEGNWREELLFVLRQHVELYRIYQEKITDCDLHLRKHLESLESKVDLKTQPIGNRPKGKKNSKNAPGFDLRTELYRITGIDWTQINGIDVLTAQTVIAEAGADLSAFPSEKQFASWLGLCPTNEQSGGKILNRRTRKVVNRATVAFRNAALTLLRSQSYLGAQYRRLRTRLGAPKAITAMARKLACLFYRLIKHGQPYVDKGTGYYEAKYREQQIRSLAKRAQKLGLQLVIPKTA

SEQ ID NO: 444445 - protein, 350 aa, unidentified
MQSMYYIGLDVHKRKISYCVKDSSGKIHSEGSILATRLDLDGWMKTLPQPWTAAMEATVFTGWIYDHLRPHAAALKVAHPLMLRAIAAAKKKNDRIDASKICDCLRCDFLPECYMAPTALRERRRTLRYRNLLVRQMVQTKNKIAVLLMEAGVSYNKQKLHKAGYFSDLIHTNPDIPDGLRPLLHLCRNTVVRLGKTEGALVRSLQRDQLLRERIERLMTIPAVGPITALTWALEVGDVARFSSIKKAISYCGLCAAEKSSAETVKRSPLSKQRNRHLQTTLIEAAKMAPRNSPALAMLYESEKQKHNANRATLAVARKLVTYLMAVDRRQTDFLLMEKQTRTAACGANA

SEQ ID NO: 444446 - protein, 432 aa, unidentified
MNTPPYDLVIGLDRSDRKADLHLIRVADQHRQLQTIDTSPEALWEWLLQLRQEYPQGRIALCLEQPAAHLMAYLEAYAWITLYPINPLTLQKYREAFVTSRAKDDTKDARYLAELLLAHHDKLKVWAPEDESTRAIQQLVFHRRSVVNERVGLTNRLKDLLKQYFPQALVLCGEDLWRPLATRFLLKWPSLQAVQKAKTEKLKEFYYLNGSRSTKLMEQRLALIEKAVPVTDQAAVLDSFILRVQLICRQLQDVVATIKTFDLRITEAFKAHEDHEIFSSLPGAGPVLAPRLLATMGSQRERFESAAKLQNYTGIAPVTKQSGGKCYIHRRYLCPKFHRQSFHEYAKESILWSRWAAAFYLQQRTKGCYHHASVRALAYKWQRIIWRCWQSRKPYEEKTYEAALRKGKSPLVKLFDQVELGKSPLKKKLKKN

SEQ ID NO: 444447 - protein, 404 aa, unidentified
MELTAIYRCVAALDVHQSKLTVCILYENESGEIITELKEFGGFKRDRRAMADWVASFQPELVVMESTGIYWKSPYAALEKQGLTIWVVNARHVKQVPGRKTDFADAQWLAILARNGLLRGGFVPPAVFRELRLIARQMQKLTGILSGEKNRLHKILSDGGIRLGVVVSDIHGKSAKAMIKGLLAGESPEQVLKYASNRLKASEEELLDALAGDLSPSHHFVLTELMAHIDELEARIETFRQALLQGLAPYQAILRSLQTIPGLDETGAALLLVEIGDDMSAFGTPERLASWAGVCPGNNESAGKKKTGKTRKGNPYVRRILCEASNAASRTQCRLQDMFKGLLIRRGRKRAIFALAHKILKIDFLLIERGDYYRDATVDYEKLSVQRNAPRWIKTLKKYGYIAA

SEQ ID NO: 444448 - protein, 417 aa, unidentified
MINKKNQKYLKRLQYVQKKKFIIGIDIGSKFHYVQVQSSDFISIPFRINNNFDGFTKLSNYIQNNLTTNPDEVIIGLEPTGPYWEVLANYLDKHNYEWVFVNPLHTKRYESIMHNSPLKSDKNDPSLIIALVKNGHYLTHPYRKGKYRELFNLVRIRSQLVVNRVQLYNQLHSVLSSYFPELLQVFSSIRLKSLQRVLIKYPTPDSIEKAGYEKIFKEISKNTNKEWSNKKTKQLLQVSKKSIGISDGIESYKWQVRNLIININSLSQQIQEIEIHISEELNTMREAELLRTIKGISDYSIGVILGYLGDITRYSSVYDIIKYAGLNLYEKSSGKRQGQKHISKRGSGILRQALYMAALNLIHTYPHIKEMYKRYVKNKRSKVKSIIPIMCYILKVVYAMIKNDRGYEIDYREKKVA

SEQ ID NO: 444449 - protein, 310 aa, unidentified
MEPIFVGIDVAKDRLDVHVQPSGQAFSVSRDDAGLAELVRRLQPLGATLIALEATGGYEVVVAATLAAAPLPVAVINPRQIRDFARATGRLAKTDALDAQAIAGFAAAVRPAARPVADADARLLGELVTRRRQLVDMLGAEHNRRRLIEPPALKRRLDAHIRWLERALRELEGDLDTTVRASAIWRATEDLLRSVPGIGPITAYTLIADLPELGRLDRRKIAALVGVAPINRDSGTLRGRRMIAGGRASVRHVLYMATLTAIRHNPVIAAFYRRLVSAGRPGKLALTAAMRKLLVILNAILRDQRPWRPA

SEQ ID NO: 444450 - protein, 348 aa, unidentified
MTLVGCDLHSRKQQVAVLDTTTGETLEEELTHDGDAVEQFYRALRPPVTIGIETTGYTQWFHALMHRLGHTVLVGEAGKIRAMVVRKTKTDRRDARHLLDLLKHDRFPAVWIPDPGTRDLRALVAHRVRLIRMRTMVKNGLQAIALNHRLALRAKLWSQRGLGQLQALSLPPHTRRRRDDSLELLTWLTSRIDQLDEQIAAVVAADPAAHRLLTHPGVGPLTALTTVLVLGPVRRFPDSKHVVSYIGLAPAINASADKQHLGKITKQGNALLRWVLGQAAPLAARADDDLRRRYFAVLHRRGRPKAKVALARKLLVRLYVMLRDQIDYEEFRRRGRVARAQHPAVAVR

SEQ ID NO: 444451 - protein, 309 aa, unidentified
MESVVGIDVSKNTLDVHVHPSGEAFAVARNAEGIDALIARIAPLGVSAVAVEATGGFETVVAASLGGAGLPVIVVNPAQVRAFAQALGKRAKTDPIDAAVIARFVEATKPQIRPLPDEDTRLLAELVTRRRQIVQMIGAERQRERQMPTRHLKKSSARLIKALEKELDVLNSDIDDSVRGSPVWCEKEDLLQSVPGVGPITARSLLAELPELGTLTRREVASLAGLAPWTRQSGKWRGKSFTGGGRAAPRTTLFMAAMVGARCNPALKAFHQRLIAAGKPKLVALIAVARKLLTILNAILRDRRPWQTA

SEQ ID NO: 444452 - protein, 326 aa, unidentified
MNPTPPTFNHIVAFEVAKQTLAIHGLPDDRQDAIANTPPAIRKRLLHEMRRNRAAGRGPLLVICEATGGYERHVLAICVALGLAVHKAHGTRVRHFARYLGLAAKTDPIDARVLALYGRNTPGLRLYAPPTPELVALRALKTRRDQVQQMLIAESNRLAHTRHASVRRSLEAHIAGLRKALAALAAEIAAHIKASAALARKARLMCSLTGVGPVTAATLLAAMPELGTLSKGEAAHLAGLAPINRDSGKTCAPRHVAAGRARVRAALYMAALVALRHNPVLRRFATALRQNGKPFKVAITATMRKLIVTLNAILRSGEPWRHAKHA

SEQ ID NO: 444453 - protein, 337 aa, unidentified
MERRYVGIDLHRRRSVVVTMDEAGEVLSSVRIANDPSAMSIAVAEAGEGAEVAFEATYGWYWLADLLKADGHHLHLAHPLAMRGMTTNRRVKTDWKDATLLADVLRMGSLPEGWIAPPELRELRELVRYRAKLVALRSGLKAQVHAVMAKNGILPARVEMFGPGGQAQLDALDVPMNFTIRIESLRDLIEIYDREVAMLEREIHSQLKDDAGYQAIQKIVGVGKVLGAIFSAEIGDIHRFSSPERLCSWAGLTPKHRESDLTKHQGDITKQGSKLVRWAAIEAISGYRGGAKLRADYERIAQRRGKYRARVAVARKLLTLVYYGLRDGEIRCLETAA

SEQ ID NO: 444454 - protein, 300 aa, unidentified
MNQTTMVVGIDVAKRRLEVAAGGETFSVSNDEQGLQQLVERLTPLKPELVVLEASGGYEKAAWLGLWSAGIKVARVNARDTYHFAQACRQLAKTDRLDAQGLRRFGEQLKPPPTPAPSESDQELQELVRRRQQLVAMITAESNRRQQASNPAIRQSIGRIIRGIQREKGAIEHAIEQKLEQQSSKRVALLESMPGVGPVTCAVLIARLPELGRLNSREIAALVGVAPFTRQSGRWRGESHIFGGRADLRCALYMAAHNAVLRRGPLRDFYLRLAKFDPSPTDPMHLFLLIKDLRQAISGG

SEQ ID NO: 444455 - protein, 438 aa, unidentified
MSNKVFFNLNDLFISVGIDVGADFSWMSIALPNQQFVGKPYKILHNSIDSLTTAVSKIKEAEELYSLESRIFLESTGIYHYPLFCYLRDKGFNCSVINPIITKNSTNINIRKVHNDRFDSKKAALVGLKPDLKVSLMPSDLALNCRNLCREYYDLMDNRSAYVNKLQGELRMVFPQYLGIFSKVTINTSLTLLETYTSPSAFLKADKQEIIDIIKSTARFGLTYAQNKYNAIIQAATDANQFGYIIDSNIKRIRLYISFIRKYDEEINNILESLHELVDANEDADFVKQIHLIETFKGAGFLSAVSIMGEIGDFSAFSKPKQLFAYFGLDPAVKQSGKFEGTKVQISKRGSAIARRVIHTLTLQSISISRNGEAKNPVLREYYLKKCDSKPKLVAMGAVSHKVCNMIFAILRDNKPFKIIAPQEHIKQYNAAKCDIAA

SEQ ID NO: 444456 - protein, 391 aa, unidentified
MIFVGIDVAKDKHDCFILNSEGTVLADVFTIANNRIGFETLLSRIQSCSQGESKIKVGLEATGHYSYNLLGFLLDSGLATYVINPLHTNLYRKSLSLRRTKTDRIDARTIAMMLMSDVDLKSYSNTAYHNEELKSLTRYRFDKVKERAKLKSSVARLVNILFPELEKLVSSLHIAVVYALLSNYPGASYIANANTEELAEILCTASKGRYTKSKTAEIQVAAGVSIGSKMPAKSMELKHTIALIRELDKEISEVESAIDKITSQMDSPIFTIPGIGRHMGAMILAEVGHFSNFASADKLLAYAGLSPSTYQSGQLQNCYAHMEKRGSRYLRYALFNAAKYVCLWCPTFSAYLEKKRSEGKHYNVAISHAAKKLVRLIFAMQRSGKAFLADY

SEQ ID NO: 444457 - protein, 356 aa, unidentified
MSNKKDTVIDFKGQHFYIGLDVHKKSWSVNIRNNGLRLKAFSMNPSPEKLKRFLEENYPGGTWHAVYEVGFCGFWICRKLREMGIDCIVVNPADVPTGHKEKDRKTDPVDANKLARELEKGELKCIYIPDEADQHLRSLCRLYRCAVQDTTRIKNRIKGHLYFNGVELPRHTSQWSGKFIAYLKSLPLDKGPAKECLTISIEELEQRRQTSVHILKKLREYVREHRDSSTFQNLLTVPGVGLKTALVLYTEIIDMGRFPTLDHVKSFVGLVPSTDSSGDSARERGLTYRSNKHLKHVLIEAAWVAIRHDPVLLHKYHKLIVRMRSQNAIIKIAVILLGRIRHVWNNNCTYVKGVIQ

SEQ ID NO: 444458 - protein, 321 aa, unidentified
MRERRVRTAAAALSTALTGLPRSRVVLEAGPRSPWLSRVVAAFGHEVVVANPRQVALIARSQRKTDRLDAEWLARLGRFDPELLAPIRHRSEQSQHDLAVVRARDALVRTRTLLINHVRGAVKACGAALPSSTADAFHRKPAEHIPDGLRPALLPLVEAIGELTARIAQAGRAVEALCDAYPETRALRQVSGVGPITALTFVLTIEDTSRFPKNREVGAYLGLVPRQRDSGEREPQLGISKGGDAGLRRLLVQAAHYILGPFGPDTDLRRWGERYAGTGARNAKKRAVVAVARRLAVLLLALWKSGEIYEPLRHAAAREAA

SEQ ID NO: 444459 - protein, 408 aa, unidentified
MRVVGLDIHRVFAEAVMLDDGKIIRLGRIGMTRDHLGAFARTLTHDDHVVVEATGNASAVVEVIAPHVGRVVIANPRQVRMIAHAKIKTDTIDATVLAKLYASKFLPEVWVPDAKTLALRRQVTRRNQIVRQRVRLKTITQSILHANLLPQCPHADLFGNRGRSWLLAQDLPTDERDAVERHLREYNRLGDDLRAVERELARDALQGATIKRLMTVPGIDMVVAIGLAAAIGPITRFKGPDQLVSYIGLNPSVYQSGEGRPQHGRITKQGRTHARTMLVEAAWQAVRGPGPLRAFYQRIARRRGNHIAAVAVARKLAVIVWHMLTKNEDYAGVRPALHAKKLRDLELRSGLPARRGQRGAGYEYNLTRTRLEEKRRAEQAEIAYRRHVEGWTKRGRRAPTDAANEERL

SEQ ID NO: 444460 - protein, 403 aa, unidentified
MNRNAVGIDVSKGKSMAAILRPYGEIVSSPFEIKHTSGNIQSLIQQIKSIEGESRIVMEHTGHYYKPLARELSLAGLFVTAINPKLIKDFGDNSLRKVKSDKADAVKIARYTLDSWTELKQYSLMDEIRNQLKTMNRQFGFYMKHKTAMKNNLVGILDQTYPGVNTYFDSPAREDGSQKWVDFAAAYWHVDCVRKMSLNAFVDHYQKWCKRKKYNFSRDKAEEIYGAARELVPVLPKDDLTKLIVKQAIEQLNTASKTVEELRTLMNETAAKLPEYPVVMGMKGVGPSLGPQLMAEIGDVTRFSHKGAITAFAGVDPGVNESGTYEQKSVPTSKRGSSSLRKTLFQVMDCLVKTKPQDDPVYAFIDKKRAQGKPYYVYMTAGANKFLRIYYGRVKEYLMSLPE

SEQ ID NO: 444461 - protein, 391 aa, unidentified
MIFVGIDVAKNKHDCFITNSDGEVLFKSFTISNNLDGFDELYQKIESVMEDVSKVKVGLEATGHYSYNLLGYLLDKGLTTFVINPLHTNLYRKSLSLRQTKTDKVDARTIASMLMSDVNLKSYSDTSYHNEELKSLTRYRFDKVKERARLKISISRLVCILFPELEKLVPTLHQNSVYELLYEFPGARQVANAHLTRLTNLVATASKGHYTKDTALVFREAARTSIGSNMPAKSLELKHTIKLIRELDAEIEEIENEIKTIMDEINSPILSIPGISYRMGAMIIAEIGDFSQFDSPDKILAYAGMSPSTYQSGQLDNCHSRMEKRGSRYLRYALYNATTYVCLWDPTFKAYLAKKRSEGKHYYVALSHATKKLLRVIYQLEKTGQQYIKAV

SEQ ID NO: 444462 - protein, 430 aa, unidentified
MNYNTQNAKLGTITEKTLVVGIDVGSEMHYARAFDWRGYEYSKKAFSFSNTEAGFNCFLAWMHELGEKHDKQAVLPGMEPTGHYWFALGKFLQDNGMKPVLVNPHHVKKSKELDDNNPTKTDRKDPKVIAGLINEGRFSYPYLPEGVYAELRTASNLRFQAQEELTRVLNRIARWFSIYFPEYKDVYGKKDAKSGLMILAQAPLPVDIIALGVDGVNKIWRDAKLRGAGLKRAKTLVAAAEHSVGSQEGLTAARMEIKNLLSDYDVYSKRVDELMALIDDLMSGIPYIDKLLEIKGVGSKTVSGFIAEVGDISRFDNPKQIQKLAGYALVENSSGKHKGETTISRRGRKRLRYLLFEVAMSLVGKNAEFRELHLYYTTRQKNPLKKMQSLIAVACKLLRVIYKILTTGVSYDPVKMLGDIKRSETYVQAA

SEQ ID NO: 444463 - protein, 415 aa, unidentified
MQILYPQCCGLDIHKKSITGCCLWFDAKGQRQQEIRKFGTHTTELRQLAVWLRRHQVKHLAMEATGSYWRPIWNVLEGEGFEQTLANPQHMKAVPGRKTDPHDAHWIADLFQHGLIAASFVPNQQMRHLRDLTRMRTKVTQDRARVVNRIEAVLEDANIKLSCVATDIMGVSAQAMVKGLLQGERDTAKLAELAQGRMRSKRPQLQTALEGNLQPHHVFVLQRLLMQARFLQQQRAAMDRQIGRRLDPEMRQAIALWDSIPGVDEDIATIMVAEMGIRSEQFADGAHAASWTAICPGNHESAGKRKSGKMREGNRWLRGALTQAAWAATHTNGSYLSALYRRIARRRGSKRAIVAVGHAILISAYYMWKKKQAYQELGDNFLDTLKPEKTAERLMKRLLKLGYTVTVTQFPSPAA

SEQ ID NO: 444464 - protein, 333 aa, unidentified
MSKITLIGIDTAKQVFHLVGVDAHGHYVWRKQVRRARLLSTLAQVEPCDVVLEACGASHHWARSIKALGHTVRLIAPQHVRPYRRGQKNDYRDAEAIISAALSPGMRFVGVKRVDQEAEQALHRVRSRLMSHRNAAANELRGLLGEYGVVFGRGLKPLREGARYFAEAEEAHTLGLVELVNDVLEEIDVLQRRMDHYERQINQRVQSDEISRRLREELNGVGKLSASALRVKVADVRDFGNGRHFAAYLGLAPGHSGTGGTVRIGHIKRGHDRYLRQLLIHGARSALSHLGDKQDPQSCWLRGLLERRGFNIASVALAHKNARQAWAIMAREQ

SEQ ID NO: 444465 - protein, 511 aa, unidentified
MSTTVSSEAVPIGVGIDTARYGHHATFLRQDLQPATAPLEFTETCAGYNRLLKKLQQLQRRFPAAHFHIRIDAASQYATNLETFLRKLPFSQTISVGEPRRNKSYCRAHFPKRKADVTDSYCQARYAIVERPKDTPGVPKEFYALREIASRLEAQIRQSTRLTNQLHNLLARVFPELACVVSDLAAAWVLHLLQKYPTPDKLCRAQDASLMAIPHLSLEKADPLRALAKSSIGTLTGEVAEELVRTLVGQLQQSRAAKDRLEKLLVQAYHALPISSPITSIPGIGDATAAVLTAKIVDIDRFTSADQLVAYFGVFPEEHTSGVDKFGKPLPPGTMHMSRQGNDLVRKYLWNAAMSAVQYNPAARALYNRLLARGARPSVTIGHVMRKLLHLVFAIWKSGKPFDPNHYPWETPDTKQQVAGRNQGTRPARTAVTATQRSNVNKPARTVNRVRLTRTHTTQTNPEACHAMELPEPVTPAVPLLEENCSETARPAPSGRANSPKMKGANRRHQR

SEQ ID NO: 444466 - protein, 413 aa, unidentified
MEVVHPRCAGIDISKKDAKVCVRIQGSGRRPTNATVTTWGAMTNQILALCEHLLAEKVTCVVMEATGEYWKPYYYLLEDTLPVMLVNAHDARNMPGRKTDVSDAAWLADLGAHGLLRGSLVPPPPIRRLRDLTRARTALTRDRGRAVQRIEKVLEDAGIKLSSVATDIMGVSGRLMLEALIDGSDDPAAMADLAKRRLRVKIPALTEALTGRFTAHHGFLIRMHLTLIDQYGQALGELDDRIAEAIEPFRAARDLLISIPGFSTVVAEVFLAETGGDMSVFPTAGHLASWAGTAPGSNESAGRVKSTKTRPGNRHLKGALGTAALSVSRSKGTYFSAKYKRIASHRDPMKALVAVEHAMLVAAWNMLTNGDLYRDPGADYFTRRTPTKTRARAVGQLEALGYRVILEPLADTA

SEQ ID NO: 444467 - protein, 375 aa, unidentified
MATNTITWVGMDAHKNSIKVAAWLPEQAEPVEWTEDTTAEAIRRLARRLRRLAPGEVRACYEAGPTGYGLQRLLGVEGVICEVVAPSLTPVKPGSRIKTDRRDARKLGELLRAGLLTEVHPPSETDEALRDLCRCRDDVRVDLLRARHRLSKFLLRRHRIYRQTKHHWGSRHMQWLAELRFDDPMSQATFDSYQLIVHQLDERLGQLDARLAEFGTQEPYREKVAALRCFKGIDTVTAVCLVAELHDFQRFRSPRQLAAYVGLVPSEDSSGERERRGPITKSGNRHVRRLLVEASWHHRHRPALSRPLRARREGQPARVIAIADRAQERLAARFRRMSEAGKVHPKTIVAMAREMCGYLWAVLHPAALPTRSKSA

SEQ ID NO: 444468 - protein, 414 aa, unidentified
MHDHLFVGVDTHKNSHTAAVLSDYFDTEATITFANSYQGFDKFAQKLNKIADDKTLLFGLEDSQGLGNSLAEFLIDKDFLVVDVNPVYTDRGRKHTIHRDKSDDRDAILIAKTLIRERGNLHPVTINKNSLALRELVRHRQILVDESTRLKNRLHVLLFNQYGHTCSIFSSLFSKVALAFFARYPNPSMLGSISPDSLTDYLKANSKGRYSEKKAEAILSSLNNSMDNNLTDARAYIIRKHIERIAQITEELSQMKDMLSCLVEKSSYGSLTSIPGVDVITAAKIISSVVDIGRFSSSAKLAKFAGIAPREKSTGKKQKFQKSKHGKKYLRSTIYFMALAHISKTRNGRDKNPVSRAYYLKKVAEGKTKKEAITCLCRRLIDLIFAVMRDRSIYNFSKSEFTKQHNVILNTIVA

SEQ ID NO: 444469 - protein, 355 aa, unidentified
MTMLTEVVDAVIGIDTHRDSHEIEIADATGKPVAAMQVSNDSGGFAQLLAAIAELVPGPRVAVCIEGSRSYGIGLARALIAAGLLVIECEQPSRKQRRGRGKSDPIDAHLAVLAALRLDAGRLPVPRADGDREALRILLVARQEITEACTAQASRLRALLLAGDDTDRRAARTTLSGRALATLADHELAAHASREQAIRQAEIRRLAHALGQARCQLKDNRAQLLAIVNDIAPGLTSRYGVGPVSAAQAIVSFSHPGRCRSEAAFAALGGTSPIPASSGQTIRHRLNRGGDRALNRAIHAIALVRMRSCPRTRAYIARRTAEGKTTREIRRCLKRYIARELYRQLTHSMKPLMSP

SEQ ID NO: 444470 - protein, 423 aa, unidentified
MEMMHERVAGLDVHKATIVACVRVGTGRKVTRECRTFETTTDGLLALLAWLVECRCSHVAMEATGVYWMPVWKILSDGDFALIVANAAHVKNVPGRKTDLNDAMWIADLLACGLIKASFVPEEDVQELRSLLRTRKQLGREQTRHVQRIQKTLAEANIQLDSVLSDIMGASGRRIIEAMIAGTRNPRQLASLASAQIKATPKQLYDALHGRLTDHHRFLLKLHLRQWDGLDTTIREIDLEVEARITHMDKEVQAGEAPFCDLIALLCTIPGVSTLSARTILSEIGRDMSRFPTAGHLVAWAGLCPGQNESAGKRKPARLRKGAPWLKTMLVQCAWAAKRKKDSYYKAQFFRLQARRGPQKAICAVAASILTAIYHILRDGTEHHDLGADHFNRHSAERQTRRLVAQLSKLGFEVQLQRTAEAA

SEQ ID NO: 444471 - protein, 319 aa, unidentified
MSGMYVGVDVAKAELVVAARPSDERWSVANDERGARTLAERLKRVAPALVVLEATGGYELAAVAALAAAGLPVVVANPRQVRDFARATGQLAKTDRIDAGVLALFAERVRPEVRPLPNEEAQELDAVLTRRRQLLEMLTAERNRLGQVAGRGRRPVKKSLKAHIAFLERELRVADTDLGAMVRASPAWREKDDLLRSVPGVGPVLSLTLLAELPELGRLSRREVAKLAGVAPLARDSGTLRGHRYVHGGRASVRAVLYMAALVATRRNPVIRAFYERLLAAGKPKKLALVACMRKLLTILNAMARSGVRWEAPNALATT

SEQ ID NO: 444472 - protein, 334 aa, unidentified
MKVIKQSIGIDVSKDSLACCIGYFDQDRNEIFTKVQSFRNDLDGFKALLKWVKSHEPCNDIWYTMEATGVYYENLAYWLLENDLNVSVLLPSKVNHYSKTLEIKTKTDAVDARILAKMGLERKMKKWAIPSPLMREVRILTRELKETKAKLVVAKNQLHAKMHAYKTTKSTLRRVKKIIRLLESQIVEIEAELRVLVMEDSLLSDKIEKLESIPGISFLTIISLLGETNGFALFSSSKQLVSYAGLDIKHKQSGMRVGKSKISKQGNSFIRNALYMPALCSSRYNPDLKIFYNRINENKPCKKIGVTAVARKLLVLVYTLWKNDTEYIPNFKAA

SEQ ID NO: 444473 - protein, 400 aa, unidentified
MMTPDDIDVWVGLDVGKSAHHAHALDHDGNTLYDKPLKQDEKAIRTMLGKLSKHGRVLLVVDQPNTIGSLPLTVARNMGIAVAYLPGTAMRRTAQLLPGDAKTDRRDAHVIAWAALKLPETLRDAGPDDETLAALKLLAGHDEDLAHESTRHVNRLRSLLLQTHPAFERALKGERITRDATLALLERYGGPMGVKRAGIEDVKDWAKSNGLRAGRIIDDMFKAIGEQTVTVPGTLMAETIIPSIARDIKAIKDRRREIGTQVEALLEDHPLLTVLTSMPGIGVRTASNILLGIGGDIANFKSSAHLAAYAGISPVTGQSGTSIKGERPSRRGNKRLKNALWQTAFVASTKHPPSVAYYKRKREQGKHHNAAIICLARRRCDVIYSMLKNGTLYQEPALVA

SEQ ID NO: 444474 - protein, 466 aa, unidentified
MRQLETNTRRQRRAAVRAAAKGEAFPLVRPNAAGIDVGSRVHYVAVPPELNLPVRSFDCMTEDLKALGEWLRACGVKTVALEATGVYWIPLVEMLEDFGFEVYLVDARQTRNISGHKTDVKDCRWIQKLHSYGLLAPAFRPEKSITVLRSYWRQRQGLIASCAQQIHLMHKALDQMNVQVHKVLSDITGHSGMRIVRAIVAGERDREKLASLCHSGIKCTQAQVARALEGNYRAEHVFALGQALEAHDFFHHQLEAADRALEAQIATVPSRHTEPREARPQAQTRAKRRKNQPHFDLREQLRRIAGVDLARVEGIDAMTAFSVVSETGMDMTRFPSEKAFSSWMHLCPNNRITGGRVHSRRVRPGVNRAGQALKVAAQSLHHSKSALGAYFRRMRARLGPQKAIVATAHKLARLIYRLLKYGEAYVAQSEAQYQQLTRERALQQLTRRAQHLGFALVCTATGEVVP

SEQ ID NO: 444475 - protein, 344 aa, unidentified
MGEVSTIGLDIAKSVFQVHGVDVAGAVVIRKRVSRAKVLEYFGELPPCLVGIEACPSAHHWGRELQALGHTVRLIPPSYVKAYLKRSKNDANDAAAICEAVTRPSMRFVPIKTKEQQTALMLHRTRQLLVRQRTMLSNALRGHLAELGIVSAKGRNGTAESLRIITDDGDSRVPPAVRGILDVLARQYGAIGTEIASIDKSIMALHRGCEASRRLAEIPGIGPIGATALVAEIGDWKTFSSGRSVAAWIGLVPKQHTTGGKDKLGSITKQGNRYLRWLLVVGAMAVIRYARKHGTQKRPWLGRLMERRPTKVAAVALANKIARMAWAIMVRGERYKEPKLLLAA

SEQ ID NO: 444476 - protein, 436 aa, unidentified
MFVGHRFRTDPDELDTLWARLPKDAERIEVVMEPTRNAWVALAAWFRRHGATVVMVPPEQSADLRDYYNKHTKTDRLDSKVLARLPLLHPEGLHREDSLGPGDELKRAVKIRSGLVHRRTACMARLDALLEILGPAWIAALGSDMTLTALRFLARYANPVQVKRLGKARLAAFFRRSSRQAWADERADAVIEAAATTLRLWGADGGELDFDALAADIAAEARLALTLTDEINGFDKRIGALYDKADPAGIVRSVPGAGRVCAPQILGRLGDPTRFANLAAVRSFAGLVPAADSSGQADGHRGPTKAGDCCLREALFIAADHARKVDPTLAVHYQRLMLAGKHHDSAVCTLAAVLLTRIAACLRAGTHYLLRDTDGRVITEAQGRAIVAERYTVPPEVRAARRKVTPHKHPRRNERNERAKTGVATRSKASPVPQPA

SEQ ID NO: 444477 - protein, 308 aa, unidentified
MELFAGIDVAKETMDVFVRPDNMRKNFANNDEGRVELARLLAEMQPALIVLEASGGYEIPVVEVLALRKLKVVVINPRQVRDFAKATGKLAKTDTIDAEMIARFAEVIRPEVRPLKDRDAQQLQAFIARRRQLVQMLTEEKNRLQIASSWTKPDIEAHIEWLTGCINKVGKDISALIKKTPLWREKENLLKTFKGIGPVNACTLLARLPELGQLDRKKIAALAGLAPINRDSGKYRGRRTIFGGRADVRAALYMASLSAVRHNPVIRVFYERLIHAGKLPKVALTACMHKILIILNAMVRTNTPWCAR

SEQ ID NO: 444478 - protein, 353 aa, unidentified
MPRKSKAPSQLSVIGVDIGKDVFHLVGFDADGKIVLRKKIRRLALVPTFEKLPRCIVGMEACLSAHFVSRTLRKLGFQPRIIPAIYVKPFLKGQKNDYNDAEAIAEAALRPNLRMVQEKTQDQLDLQALHRVRSRLVSRRTATINQIRAFLIEQGIAVRKGAQALRNSLFTILDLRRDEISERMHDIIIGLYEDWLWLDERIEGLTDEIEVLSDQEAHCIRLKSIPAIGPIISTATVSAVGTGEAFDRGRDFAAWIGLVPRQHSTGGKPILGRMSKRGSKYLRTLFIQAAHILLMRPENWRKFSFGPWLEQAAARLHKNKLAVALANKLARIAWSVLRYGKTFDTHRDEAVAV

SEQ ID NO: 444479 - protein, 330 aa, unidentified
MNYIGMDIHKQFTVAVVKDEQGNKLAEEKFNNSEENFGNFMQNYKPEETKIVIESTGVWEYIYEILEAKKYEVKLANPLKTRAIAGARMKTDSLDASTLSDLLRGNLIFESYIPPKEIRRLREITRERRTFVKQTTQIKNRIHAILIKRGAEFGYATLCESAILWIKQKFPDDKIILYYLELLEYHNGKLNEINKIIAEKSYQDNNAKLLMTIPGIGTIRALDIVAEIGEISRFSSANHLSSYSGLVPSIHQSGNTLRFGKLVKQSSKTLKSDFIEACWNIVRTKESNPLQEFFKKLAKKKGKQKAICATARKLSCVVYVMLRDQKEFRY

SEQ ID NO: 444480 - protein, 342 aa, unidentified
MKITTVGIDLAKKVLQIHGVNKQGKKMFNKQLRTKQVLPFFAQLPPCLIGMEACSSAHYWARQLRALGHTVKLMAPQFVKPYVKTNKNDAADAEAICEAVSRPTMRFVPIKNVEQQAVLAVHRARQGFVKARTAQGNQIRGLLMEFGITLPQGLSHIAKRLPAILEDGENELPGVFRQLLQRLVDHLRALDGQVKELETQIQVWHQENEASRKLAGIPGIGPITASALIASVGDATNFRNGRQLAAWLGLVPRQHSSGGKQVLQGISKRGDSYLRTLLIHGARSVIRVAESKPNQTNRWLVNLVERRNKNVAAVALANKNARIVWALLTYQREYQSDFALAA

SEQ ID NO: 444481 - protein, 412 aa, unidentified
MEVMRHCCAGLDVHKDTVVACVRHTRRDGKIDEQVGTFKTTTAGLLELGDWLVQRQVTIAAMESTGVYWKPVWNLLESRLDLMLVNAREVKQLPGRKTDVKDSQWIAQLLACGLLKRSFVPPLPQRELRDLTRTRTSLLQDCSRVANRLQKILEDANIKLGSVAGDVLGVSGREMIRALIDGKMSAGQMADLARRRLRLKIPQLTEALTGKVSAHHRFMLRLRLDEIEHYEQQIARLDRRIEQVMSPLEKTALGLLDEIPGIDQRAAQNIVAEIGTDMSRFPSAGHLASWAGLCPGNNQSAGKRRSGRMSEGNGWLKGTLNQCAWAASRKKDSYFAAQHRRIASRRGVKRATMAVAHGQLCICWELLKHGQCYQDLGRDYFDRTNEDRVKRQLVKRPENLGYEVMLEKKNAA

SEQ ID NO: 444482 - protein, 347 aa, unidentified
MVTLGSDSHKRTHTVVAVDENGRPLGERTVTATAVGHLEVVGWARQWPERRWALENCRHLSRGLERDLLSAGEAVVQVSPKLMGQSRRSGRELGKSDPIDALAVARAALREGRLPVAKLEGPSREVKLLVDHREDLVGERTRIQNRLRWHLHELEPGYEVTPRALDRQVVIIAVAAWLQEREGVVAEIARELTARLGALTQRVNALERRIAALVRQLAPALLALPGCGSLSAAKLVAETADVNRFHSAAAFAMHNGTAPIPVWSGNTVRHRLNRGGNRQLNVALHRIAITQMRLGGAAADYIAHRKAMGNTKTEAIRALRRRISDEVYRRLRIDHPSRQTAPVAVAA

SEQ ID NO: 444483 - protein, 386 aa, unidentified
MPKPNDCSRSVTAFEQNSTLIAVIEMSLSSWLVAGVVPGIERHPLKKLETDEDALLKLLLRWRDEAVKAGHKIERIAIAFEAGRDGFWLARWLRARGIEAYVIHPASVAVSREHRRAKTDRLDTELLKRVFLGWLRGEPDHCSMSAIPTLEQEDAKRPNRERENLVGQRTRIVNRMKACLIRFGIRNFKPTLRKAPEGLEALRTPEGAPLPPNTRAEMRRDMARLRFVQDQIKEIEATRLQQLEQAPAEGPHAMIRLLARVTGVGIETADMLVNEILARNLRDQKAVARYAGLTGSPDESGKRSREKGLSRAGNARVRRGMIQLAWRFLIFQKESALAQWYRVATKDARGAIRKTMIVALARKLLIALWRMVTIGEMPDGVAMRAT

SEQ ID NO: 444484 - protein, 320 aa, unidentified
MMAQNDLVVVGIDVAKDKVDACIRSLSLKGTWPSTVQDQRKLIVWLRKHKVGKAVMEASGGYERDWAKALREADIEVRIVDPKRVRSFARSAGRLAKNDTIDAEMIAWFAETFGEAPGQTYDAAREKLSQIVNARQGLLDLQTNLQNRAEHAGPEPVQKMRARLLKQLALEIDKLEAVIAAMIKATPHFAERAEIIESVPGVGGITSAGLIAAMPELGQVSNKVAAALLGTAPYDDDSGRRRGERQIKGGRRKVRNLFYMACLGAATRHNPALKAFYRRLIAKGKKAKVALVACMRKLIVILNIMIARGEKWDTNRYAVG

SEQ ID NO: 444485 - protein, 307 aa, unidentified
MFVGIDVAKDRLDVHLRPAGEAFTVARDGEGIEALVDRLVTLKVELVVLEASGGFETVVAAGLAAAGLPLAVVNPRQIRDFARATGRLAKTDPLDAAAIAHFAEAVRPQPRPVASAEAHALGERVARRRQLIEMMTAERNRRRQLTTKRLVKGIDRILVALQTQLTELEQDIDDAVRGTPAWREKEDLLVTVPGIGQKIARTLIAELPELGSLDRHQVAALVGVAPFNRDSGKWRGRRCIAGGRPVVRSALYMSVLVSIRRNLPLAAVYRHLRAAGKPAKVAIVACMRKLATILNAILRDKTPWQNA

SEQ ID NO: 444486 - protein, 412 aa, unidentified
MQTLIERGCGLDVHQATVVACLLMVRRDGKVQKQMRTFGTTTRELVGLREWLLSEGCTHVAMESTGVYWKPIYAILEGACEIVVANAQHIKKVPGRKTDVKDAEWIADLLCHGLLRSSFVPPKPIRELRDLMRYRRKLVESQAAERNRLLKVLETANIKLANVATDVFGMSGRLILRALIAGKATPQEMAELAKGLLRKKIPELELALEGKLEQHHRFLLELQLQRLEAAEKDLAVLEQRIRQMLEPYAAQLALLDEIPGVDWTLAAVIIAELGVDMSVFGNVSQLASWAGVCPGNNESAGKRKSSRIPSGNVYLKSGLVEAANAAARSKGTYLRDKFFRLKARRGYKRAVVAIAHKILVAIYHMLSQQVSYNDLGDLYLDKLNKNHLTRNLVHRLERLGYAVTLTLQQKAA

SEQ ID NO: 444487 - protein, 315 aa, unidentified
MTTTLQDYVGIDVSKDWHDVAVLGQKRITQVANTRRGIIEFTQRMKQLNPKMIVVEATGGYEEALVLGLFEAGLPVALVSPQRVRQYGRARGLLAKTDGIDAQNIAEYGKNIQPRLFVAKSEEGRRLSALVGRRRQLGDMQKAEKNRLRMANTEIKASLQTVIDCLEAEVERLDEEIRKFMETHAAFQEQEKLLRSAKSIGPVTAATLLADLPELGKLNRKQIAALVGVAPMNQDSGKKRGYRKTKGGRPEVRSVLYMSALSAIRYNPVIKAQYERLVGRGKEKKVAITACMRKMLTILNAMMRDQHPFRVAPMS

SEQ ID NO: 444488 - protein, 356 aa, unidentified
MTSNPKYIGMDVHKESISIAVRNAVSKLVMESVIETKASMILQFIDGIRGEVHVTFEEGTWAAWLYGLLKPHVKKLVVCDPRRNALLQEGNQSDRVDARKLAELLQNNQLRPVYHEDHGLRTVKELVRTYLTITKDLSRIMTRVKAIYRGWAIPCTGRQVYGSRHRSEWLRKIQEPGVRRRAELYYQQLDALRALRQEVRRELLTESKKHKSWKPLCQIPSIGPIRAAVLLGILQTAHRFRTKRQLWTYSGLGIEVHSSADHHMVNGRLERKKKHIEIRGLNGNCNHDLKNLFKAAAVLASTKPGPFKEFYSALLMKGMRPEMARLTLARKIATTVLIVWKRGVCFDVNHLKPQTA

SEQ ID NO: 444489 - protein, 333 aa, unidentified
MIAAKVLVGIDVSRDWLDGFLLPAGQRFRLPNSAEGHAHLIEILQNGPSAPRVGFEATGGQEWALWKALVGAGINAVQLPPAQIKAFARSHGTRAKTDRIDAKLIASFMAFRPEAGRTLPTEKLQILRTLTTRRAQLIGMRKRLVLQISSRTRQAIPAQVDSMDDDLKALLDAQILELESRIEHVITQEKTLADKAMRLRSIPGIGPVSAAMLIAEMPELGKMTSGEAAAMTGLAPVPYDSGTTENTSPCLVSGRTRRCVSQPRSEISRTTTERAWQTPQARYHRCRKKARNNRKRHPQKWRLVEPSKPNLDTVARAVERDGPCELPFLVGGR

SEQ ID NO: 444490 - protein, 368 aa, unidentified
MIVRIITYERSTLVNDEKYIGLDVHQATIVVAVMDSTGKLVMESILETKAATILQFFAGLRGTLSVTFEEGTWSAWLYDLLHSRVDKLVVCNPRKNALLKDGNKSDRIDARKLAELLRGNQLKPVYHGETGVRMLRELSRSYLTIVKDLSRVMNRLKAVYRSWAIPCAGRDVYYRRHRAQWLAKIREAGVRRRAERLYEQLDMLQHLRQQARRELLAESRKHAITAKLRQIPYLGPIRVALAVALIQTPHRFRTKRQLWAYSGLALETRTSAEYRFVEGPVRRSKKLLSIRGLNKDHNHDLKGLFKGAATMASVRPGPFQDFYTAALAKGIKPTMARLTLARKIAAITLTLWKKGENFDADKLKSQAA

SEQ ID NO: 444491 - protein, 409 aa, unidentified
MRYYVGVDWADQTHAVWVVDESGTQITARTVPHTAAGFSEWGRELDEWRAQGIERWAAIERPDGRVVDFLLDHGVVVYPVNPKALDRARDRFRQSGAKSDPFDARVLADFLRTDHPHLQALQPSSDAAQELKLLTEDCQRHIRQQTRLVNQLTTTLKAYYPRALEVAELTTALAREFLHAYPTPEALTALTARQWQRWARGRRLSEARIGDLWAVLQQPQLPVPAHVVRAKARLMQSLVEQLTPVVAAVVQYRKAIDDFFARMPAAQWARTLPIGKRGITAPTLWARLGDAPGRWESFRHLQAQAGAVPVTKRSGKQRVVHFRFACDKSLRHVVDQVAFLSLLSSEWARAYYDQQRARGHAHHQALRALGAKWLKIIFVMWHRQVPYDEQYHLATMTRQQLRQRQKQIA

SEQ ID NO: 444492 - protein, 331 aa, unidentified
MHTQGGVVGSAQRPNAGIDVSKQHLDVCCGIEEPRLGNDAQGCDAVIAMLRAADVDLVVVEATGGYERGLVCALQEAGLAVARVNPRQSRDFAKSMGVLAKTDKVDARTLRDFADVLARHKDRHKYITAPVEPHRAELAALVIRRKQLVDMRVAEGNRLEHAREHKTVKSIKNVIKTLDQQLKDIDRDIDDMLEEHFKEQRSFLDSVKGVGSVTIVTLLALVPELGRLARRQIAKLIGVAPLARDSGQHKGKRMISGGRADVRCVIYMATLTAIRYNPVIKQFYDRLVAAGKPKKVAIVACMRKLLTILNAMLRDAAGWDAAKHALALSDA

SEQ ID NO: 444493 - protein, 396 aa, unidentified
MDAAGRRLAAARLPEGVAGITRLHEMIGAHLGEDAGAGEDAGAGEVAIGIETDRGPWVSALVAAGYTVYAVNPLQAARYRERHGVSGAKSDKADAHTLADMVRTDAHQLRPVAADSPQAEAIKVVARAHKTLIWERTRHTLRLRYVLREYFPAALEAFDDLAAPDTLELLAKAPDPASAAKLNRSQIRAALKHARRRDIDMKTTRIQAALRSQQLGRAPVITAAYAATTRSIAAVLATLTEQINTLRGQVETHFGRHPDAEIILSQPGTGVLLGARVLAEFGDAPGRYADAKARKNYAGTSPITRQSGKRKITHARFVHNDRLVDALMSQAQSALLASPGARAYYDKQRARGLDHHAALRQLANRLVGILHGCLKTRTLYDEATAWSHRIEIPAAA

SEQ ID NO: 444494 - protein, 344 aa, unidentified
MGEVSTIGLDIAKSVFQVHGVDGAGAVVMRKRISRAKVLEFFADLPRCLVGMEACPSAHHWSRELQALGHTVRLMPPSYVKAYLKRSKNDANDAAAICEAVVRPSMRFVPIKTKEQQAGLMLHRTRQLLVRQRTMLSNALRGHLAELGIVSAKGRNGIGQLLGIITDATDNRVAPAVRGLLDVLARQYSALGAEIRSIDKSILTWHRSCEASRRLEEIPGIGPIVATALVAEIGDWREFRSGRNLAAWIGLVPRQHSTGGKDRLGGITKQGNRYLRWLLVTGAMAVIRYAKKHGTQKRPWLARLMERRHTKVAAVALANKMARMAWAIMVRSERYKEPKLLLAA

SEQ ID NO: 444495 - protein, 421 aa, unidentified
MTNNRLIQRGRYVNPDVLIVGIDIGKYKHAAVGTSLHSGYTKTFFIKNNKISYEFFESEVKKWKKIFECKEVVIGFESTGHYWKTLAYYLKKRGRILVEVSPSYTKKSKEMMDNSPLKCDPKDARIIADLVKQGKILTPVLPEGEILALRNIVYTRENLIKERTSIINRLQKIVDISFPERGEIIGKINSKTSLFLLKEAPFPEGIIDNGLEWLKEEIRKKSMGHYKYEDARKLYQSARETIGLKEGSDGSTYELKILLSRLNKLEQEIEKVESNIENRLKDIEEAKYILSIKGIKEVTAATIISETGGLSNYETISSVLKVAGLNLFEISSGEHQGEKHITKRGRNLLRHKLYFAALQQAREGMPFYSFYRRLVEENGVKKNKALIAVARKLLRVSFALVRDKTEFISSYEEKTKIKKVA

SEQ ID NO: 444496 - protein, 355 aa, unidentified
MLIIGSDYHPGFQQIAFMDTETGECGERRLEHMEGAGQFYRDLQARGITVRIGIEASGYTRWFEQLMAELDFELWIGDAAAISRKRVRKQKTDKQDAELLLKLLIENRFPRIWVPSREDRDLRQLLWHRHRLVQMQTRLRNQLHAVALNEGVRLKKRLWRPKGRAQLESLALMPWAGRRRQDLLQLLDQVDGTIAELTASIEQEAEKRPEVVRLMTHPGVGALTALAFVLILGTPERFATSKQVSSYLGLVPTEESSGERRHLGHISKQGNTLLRFLLVAAAQVTARSDPDWRRCYLHLAMRRERAIAKIAMGRKLAVRLYWMWRNGSEYTQLPKLGSHAGQPGNRLGQAVGRPR

SEQ ID NO: 444497 - protein, 340 aa, unidentified
MSEITTIGLDLAKHVFQVHGIDAQGTTVLRKRLRRGQVLAFFSRIPRCVVGLEACATGHYWARELGALGHEVRLMPAQYVKAYIKRNKHDAADAEAICEAVGRPTMRFVPVKTADQQATQLLHRGREQLVRQRTMLVNALRAHLAEFGVVAAQGLRKVGELIAIIRDDGDRRLPAVARQVLRVLANQIEQVEAAVAALERQLLAWHNSNPVSQRLASIPGIGPIIATAIATTVADPTVFRSGREFAAWLGLVPRQNSTGGRTRLGGITKRGNRYLRRLLINGASANLLRSKATKADPWVIGLRRRRPPLVVAVALANKTARIAWAVMLRQERYQPRAVAA

SEQ ID NO: 444498 - protein, 413 aa, unidentified
MAITCGIDWAEDHHDVALVDGSGKLVAKRRISDDAEGHRRLLELLVEAGDTAQDPIPVAIETARGLLISCLRTTGRKVYSINPMAVARYRERHRVARAKSDHADAMALANILRTDAEMHRPLPADSELVAAIAVLARAQQDAVWNRGQLSNQLRSHLKQYFPAALAAFQVRGIGLDSREARAVLASTPDPSTAAKLTPARLRAVLRKSGRQRNIDAWADRLRGIFTAECLHQLPLIEAAMGRQTQALVLQLDAACRAADDLAAATAEAFAQHPDADIVTSFPGIGPLTGARVLGEIGDDRSRFRDARGLKSYAGSAPITVASGKSLVVHHRKVKNQRLAAVGYVWIFGALPSPQVKEHYDRRRAAGDKHAAAMRNLFNRLLGCLYHCLQTGQLFDPAKAFPSTATPPLAAAAA

SEQ ID NO: 444499 - protein, 388 aa, unidentified
MHVFVGVDIAKELHYAAIMDSDGVVTKPFSFENNDKGFNLLLSHLAPYNKESILIGYESTAHYQENLAYFLKSLGYRTAEINPLQTAALRKANIRNTKTDSVDARLICLALMNHHIQGDQRDSVRLDDLYQLCKMRMDTMKKRTTCKIQFVAIMDRIFPELASFFDNNLHTNTIYRLIDSFPLPSQIKKTRIDILTKLLHKASKGHFKKEKAQKLKNLADISVGIPSDIFAFQAQQLVHQIEFYTDQIQTIEERINTNPDVMSSPLMTIPGIGTFCVACILSAIKNINDFDAPCKILAYAGLDPVIRQSGKFTASHTRMSKRGNSLLRYALVWSAGNVVKNNHTFAEYYRHKTEDQGKSHYQALGHCAKKLVKSIYHMLKYNESFNLD

SEQ ID NO: 444500 - protein, 454 aa, unidentified
MAQRKRRRKRLAVADLPEHLQHVNLNAAGIDIGSDRHVAAVPAGRDEVSVREFGAFTTDLNALADWLTKCGITSVAMESTGVYWIPLFELLEQRGFEVKLVDARQVKNVSGRKSDVLDCQWLQQLHTYGLLAGAFRPPDQVCVLRGYMRQREMLVQASSMHIQHMQKALQQMNLLLHNVVSDITGVTGMKIIKAIITGERDPKVLARHRDQRCHSSAATIAKSLLGNYREEHLFALTQAVSLYETYQAKIVECETAIASYLKQQPNRTDEEPPPTDKSVRNRDRQRGGVDVRSQLYKMTGVDLFNLPGLAADTLLTLAGEVGFDMTPWPSEKHFTSWLALCPGTRKSNGKVLSRKTKRSANRAAAAFRIAAASLTRSKTALGAFYRRIRVRVGPAEAITATARKLAVLYYSLLKHGSAYVEIGQTVYEEKYQQRRLNSIQKQALAMGYQLIPTA

SEQ ID NO: 444501 - protein, 338 aa, unidentified
MAIVTLGIDLAKNVFAVHGVDATGKAVLIRPSVARGKLLELVAALPPCLIGMEACSGAHHWARLFQAHGHTVRLMAPKFVAPYRLSGKKGKNDAADAAAICEAVTRPSMRFVPPKSVQQQSQLMVHRARQGFVQQRTATINRIRGLLSEFGVVLPLKAATVRREAMQQLEDLPGWANTVIGDLLSEVHRLDERIAQYDRHIEQIARESAPARQLMQLPGVGATTATALVAMIGRGQEFKCGRQLSAWLGLVPGQYSSGGKQRLGRITKAGDPYLRMLLILGARSVLQTATDKTDPVSRWAVQLAARVGYWKTIVAIAAKNARMCWAVLHRGESFKLPA

SEQ ID NO: 444502 - protein, 350 aa, unidentified
MTPILALDLGKFKTVACSYDPADPEMARFRTVPTNVETLERLLGAEQPQLVVFETCTIAGWVHELCERLGVSCLVANPNGEAWRWKNVKRKTDRDDALKLARLAASDELPVVAMPCAAVRQKRSLLKYRQGIIGQRVAAQNHLRHLAEAQGRRLAPGYKAWTQTGLAVLESWARPLADCAAEELWRGQFHQALQLLRHLKDQEAALKVQLERLAESDAAIRRLRTIPGVGRRIAEVVVNYLPDPQRFRRAAEVSAYAGFVPRQYQSGEQDRRGRISKRGPGLLRKMLVEGAWGLLRFNAWAARLFQRLTKGQKTRRKVAIVAVARKLLVRCWALLRHRTDWREPVAAVMT

SEQ ID NO: 444503 - protein, 322 aa, unidentified
MLYVGIDVAKNKHDVTALNVPGKTVLKPLTFSNNKAGFELLDLSLRQLNQDCLIALEDTGHYAFNLLNFLHEQGYKVYTYTPLLIKEFAKSLSLRKTKTDKKDAHGIALKLLSDPNREQFQHDNRQVELKILARHIHRLKRKQSDWKVQYTRCLDIIRCLDIIFPELDKIVGKHSEYTYQLLTCYPNPQKRLEAGFDKLIEIKRLTASKIQDILSVAPHSIGTTSPAREFEIIENIKHYKRLIDKAEKCVNDLMAEFNSVITTVTGIGNRLGAVILAEIQNIHAFDNPAQLQAFAGLDSSIYQSGQIDLAGRMVKRGSPHLR

SEQ ID NO: 444504 - protein, 339 aa, unidentified
MKLYGAIDLHSNNSVLMLIDRQDKVRFQGRLPNEASYILETLRPYRPQLQGLAVESTFNWYWLVDALQEAGYPVSLVNTAAVKQYEGLKFTDDASDARWLAHLLRLGILPQGYIYPKEERAVRDLLRKRAQMVRQRTTNLLSIGNLVQRNTGGKLAGGEIKQLDESAVDEMLPESDLGLAVKCNLRVMQCADAQVAVLERAVLERVKLKPAFKYLRTVPGIGQILALTIMLETGDIRRFGGVGNFASYCRCVDSKKLSNSKKKGEGNRKNGNRYLAWAYVEAANFAQRYDPSIRRFYQRKQAKTHPVVAIKTVAHKLARACYYIMRDQVPFDRARAFGG

SEQ ID NO: 444505 - protein, 379 aa, unidentified
MEHDSTLYVGCDVHKDSITVAYALDAGEVELLGKSGTRQADIDRLCKRLRSKAQRIRFVYEAGGCGYGLYRQLVNKGFDCMVCAPSLIPKKPGERVKTDRRDAIKLVRSLRAGDLSAVHVPTVHDEAFRDLARTWVSARHDLKRARQQLKAFLLSHGVHYTGRADWGAAHQRWLGAHAFGDAWQQLAFEEHRRTIEDRLAQCARLETALREALPNWRFYPAVLGLQSMRGVQFITAVGMLAELGDLSRFTHPRQLMAWLGVTPSEHSSGDRRRQGSITKNGNSYARKLLIEAAWSYRHPARVSPDIQRRHEGIPKPIVDRAWDAQVRLCRRYRKLIARGKQNNIAVVAVARELAGFIWDIGRLAMALAIPAAGAPGMMR

SEQ ID NO: 444506 - protein, 322 aa, unidentified
MQNTSQKIYVGIDVSKSTLAINSGIKKMKDIANNVGEIRRTLLSLQRELSEGQELHVCFEATGPYTKKIKQVCSEQGIAYSTLNPTRVRKYAESMSIAAKTDAIDAAVIRAYAEHKQPCADVVKFAHQEELVELCNLRKNHMDEITRLKGLLESSTSTFARKHTKSMIQLMNRRLQALMIQIKKLCLADPMRKAIFQELIKIEGVGELTAILALAYAPEIGTLGRRKSASISGLAPYPHISGTMDARRHISGGRRSLRLSLYMAALSASMHNSVLKYVYAKKINEGKPSKVALTCIMRKLFVHMDRVAARAINLYTADKISA

SEQ ID NO: 444507 - protein, 343 aa, unidentified
MEEFNIVGIDLAKNAFQVHASDEIGRRLFSKKVLRGQLLKLMSTIKPCVVALEACASAHYWGRQIAELGHEVKLIPPIYVKPFVKRQKNDAADAEAIVEAASRPTMRFVAVKSADQQAAGMAFKTRDLFVRQRTQLTNALRGHLAEHGVVAPQGIVHLKRLKAALSDEKNELPATIVIHAELILDQIATLQSHIEALEKEILAVSRKEELATRLMTIPGVGSITAAALLAFAPDPATFKRGRDFSAWMGLTPKQHSSGGKEKMGRTSKMGQRDLRRLLITGAMAVVRWAARKGAQEGSWLARMIDRKPKMLIAVALANKMGRIIWALMAHGDTYNSHRGKAQA

SEQ ID NO: 444508 - protein, 393 aa, unidentified
MYLVGIDIGKLKHSFCLLEKETGEILVEPVFFKNNRDGFNALLSSFKHLPQKDILIGMEDTGHYNLALLKFLLDRNYQVALINPVATNLTRKMQGGISKNDKLDTLTICDVLSSNQRVKSYRISKYSSFDLYEQKQLTREHHNLKEEENQLLNRLQKCIDVVFPEFNSLFKSKYGIVYMNILKEFGSADAIAHADIRTLRKCFDTGRGKHISLTAEELKEAARNSIGFPSSSEATQIKHLVARIELIKEQIAEIDKKIEEFSIQNNSPILSIPGISHFSGTSILAELGDIHNYSKPSQIIKFAGVAPLTYESSQFTAQHTAITKKGCKYLRKTLYQIITPVIQYNPVFRKFYLLKIAQGKGHRCAQGHCVRKLMRVIYHLLSTGTQFDPALLR

SEQ ID NO: 444509 - protein, 365 aa, unidentified
MKLIIGIDFSKTKFDATIIVAEGINEKAPRVHNVFANNIEGFRDFDKWVDANSGDVDKDEWIFGGENTGEYCKALAYYLYGTGRNIWIEDAYRMKHTMGMVREKSDKADSNRIAEVIMRNHDKAVWYKPEQQGIQDLREVFLWRQTLVCERRRLTVRTGEKQNVEKDVRDVKKALGGRTRAKMCSGSDFVRKLAQKQVRELDKQIKACDAEIKRIIDADEVLSGTKRIVTSIKGIGLQNAAALIVFTNNFARFDLNARKIASYYGIAPFKNESGSSVHCGTHVNSMANKMLKALLSEATLCAIKYCPEIRTYYDRMIMNKKKKQVALNNAKNKLLHIVVAMVRNNTTYNPAYSDSLTKKYDKNVA

SEQ ID NO: 444510 - protein, 461 aa, unidentified
MQIIHRCCCGLDVHKKLIVACLISLNEAGEFQKEIRHFTTMTKDILVLADWLTSVGCTHVAMESTGVYWRPIWNLLEGQFELLLVNAQHMKTVPGRKTDIKDAEWIADLLQHGLLRPSFVPPAPQRHLRELTRYRSTLLAERARLVNRLHKVLEDTNLKLTAVVTNIMGLSARDMLDALLQGETNPEVLAKLARGKLRKKREDLEQALVGRVDDHHRFLRTRLLTHIDFLDEQVADCNGEIDQFLSAPSDEKAELVSSASDDQRQEQAPLSSTPVGTESMLAQDRVPEDGPKVPLSYQQAIALLDSIPGVNQRIAEIFLAEVGTDMQRFPTAGHLASWVGICPGNHQSAGKQIRGTTRKGDRWLRQARISAAQGAMRTKDTYLSAQGRRLTHRRGKKRAVVAVAHSILIIAYHVLQRQQPYQDLGSNYFDERERSAVARQSVHRLEQLGFKVTLETAGEAA

SEQ ID NO: 444511 - protein, 365 aa, unidentified
MDASIKYVGLDVHKNSIVISVANFGRDNEVRYWGKIENNTDQLDKVFLKLTSGGSTLSCVYEAGPCGYSIYRHLQGKGINCCVIAPSKTPRQSGDRIKNDRRDSMTLARLHRAGELTPVYVPDEADEALRDLVRAREDAQKALRKSKQQLSAFLLRHDLCFPGKTMWSIACFNWLSDIKMEHPAQQFTLQEYINTVENNDKRVQRHVDQIRELSRESRLYPLILALQAMRGVSLIVASTIAAELGDLKRFENPSQMMSYLGLVPSESSSGQKVKRGSITKTGNGHVRRVLVEAAQAYRLPARISRAIRKRQEEVPDNVSDIAWKAQVRLCKRYQQLVARGKNANLIKTAIAREIVGFSWAIAQEI

SEQ ID NO: 444512 - protein, 350 aa, unidentified
MVVVGADVHKRTHTFVAVDAVGRKLAEKVVRATSSGHLQALRWVRGRFGVEVVWAIEDCRHLSARLERDVLTAGQQVVRVPPKLMAQTRASARTRGKSDPIDALAVARAFLREPDLPIASHDEVSRELKLLVDRREDLVAQRTSTINRLLWRVHELDPEHAPKPRSLDLAKHRRLLGDWLATQRGLVAELARDELADITRLTETITTLTKRIGERVREVAPVLLALPGCGELTAAKLVGETAAVTRFRSEAAFARHAGVAPIPVWSGNTAGRVRMTRSGNRQLNAAPHRIAVTQIRLDGLGQTYYHRRIDAGDSKTEALRCLKRRLARVVFHHLHTDHRNRIQPCQPAAA

SEQ ID NO: 444513 - protein, 341 aa, unidentified
MYYMGIDNHKQRSHLTIMEEDGAIVKAGSVFNYRSDIEQFIRGLETEMKAVVEAGYSSYILVDILDGLGVDVKVAHPQQVKAIAKAKIKTDKRDSRILADLLRANLIPEAHKRSLETRRAQRVLRQRAFFVAAMTRVKNRIRALLAQQPEDIQKEIGLEKELFSQKGIERLQGLKMACVDKALLEGLLKLWEELSALIKTSDKMVEELFQKMKEAQRIYTVPGFGKFFSVLVATEIDDILRFESASKLHSYAGVIPSTHSSGQRIYQGKMTREGNRWLRWAAVEAVWPAIRHDQGLQLFYLKYASRKKANAAKVATARRLLTIIYKLLKEERNYVPFHKTQ

SEQ ID NO: 444514 - protein, 422 aa, unidentified
MKIVYPTCCGVDVHKSFLVATIIKTEGLTPKYSKKRFSTFNNDILRFQQWLVDNDCYDVCMESTGKYWVPVFNLLEDKIHVVIASPKWVAAVKGNKDDAKDSQWIGDLFRLGIVPGSFIPPKPIRILREYTRYRYKLTSCKSSEKNRLQNCLTVCNVALDSVVSDMFGKSAAAITDYLLQTDNFDPEHVKSLLKRSLKAKADTVIESIEGYQMVAAQKERIIMVRSHLDYVSEAITKLDAKLDELVAPYEPQIALLQTIPGVDRQSAITIISEIGVDMSKFDGSKRFCCWAGLTPSNNQSAGKKKSVRITRAGVYIKPALVQVAHAAVKAKDSPYYRNKYERISKRRGKKRAIIAIARMILTAVYNMLNTGEVWNPSDLCKVDMPPVLSEQQKRKAVKNAFKLLIAQGLIDPALVPEDLVVA

SEQ ID NO: 444515 - protein, 357 aa, unidentified
MLSSNVKYIGLDVHKEAIAIAVLNGAGKLVMESIVETKSSTVLDFLHGLRGELHVTLEEGTWAAWLYDVLKPQVKEIVVCNPRRNALLKEGSKSDKIDARKLAELLRAGLLRAVYHGENGLQTLRELARSYLTISKDLKRVKNRLKALYHSWGICCAGKQVYAARHREQWLNKIAQVGVHRRAELFYQQLDGLLVLRNTVRGELLAESRKHQAVKILRQVPSIGPLRAALLLALMQTPHRFRSKRQLWTYSGLAVVTHDSAQHRYVDGQLQRSKKPQQIRGLNQNHNHAMKEIFKSAALNSSRCAGPLQDFYARLLAKGMKPDMARLTLARKIAAITLALWKKGGSFDTEHLKAQAA

SEQ ID NO: 444516 - protein, 394 aa, unidentified
MKLVGIDVGKNSHHFCVMDKETGELNVAPSSFPNNKEGFDFLINSLKPYSKKSILLGMEDTGHYHVALLKFLLSNGYTVALINPKTTDLTRKMEGGITKNDKLDTITICNVLDTPERKKQYRITKVDRFDLYEQRQLTRHHHNLKEELNIYCNRLQKSIDLVFPEFNTLFSSKYGVIYMNLLKTFGSAEAIASTDIRTIRKCFEIKGRGGRISLTPEKLKECAKNSIGISSEVETIQIKHLVSQITLIKEQIAEIDKKIEEFSITNNSPILSIPGISHFSGTSILAELGDIGNYSKPSQIIKFAGVAPYHYESSQYNAQHTAITKKGSKYLRKTLYQIILPVINNNPVFKKYYRLKISQGKGHRCAQGHCIRKLLRIIYHLLETGQSFDPALLR

SEQ ID NO: 444517 - protein, 340 aa, unidentified
MKITTIGLDISKTIFHMFAVNQAGKLVKKRVIKRADLLSVFAQLEPTLIVIEACGGANHWAREFIKLGHQVKLIAPQYVVPYRRKNKNDFNDAEAIAEAAQRPNMTFVPIKSVEQEDIQMVLRIRKRHVKTMVAINNQVRGFLAEYGLCAAKGKTALAARLPKFIDDESNELSTFARESFRELYADFVAAQEKVEFYTKKINVYTRNNPICKRVKSVIGVGPMTAAELYASIGDGKMFHNGRHFAAWCGLTQRQNSSGGKTMLSGITKKGNPHLRSSLIHGARAALQYVDGKDDKLSRWAYELKCRKHSNVACVALANKLARIAWSVIANEEDYRLEYAA

SEQ ID NO: 444518 - protein, 342 aa, unidentified
MKTVTTIGIDLAKNSFSVYGVDAKGKPVLRRTLTRAGVIRFFANLPECLVGMEACASSEYWARTIESLGHTVRRIHPRYVKAYLLGAKNDVNDAAAICEAVQRPNMRFVPHKSPEQTDIQCVHRIRQGFVRSRTALINQIRGLLGEYGIVMRQGVSAVRKHLPELITDEANDLSSIMRQNLTSLYESLCFLDERILAQEKLLKDIVRENEACKRLMQVPGIGLLTATILLSVAGVASNFKNGREFAAYLGLVPRQNSTGGKTKLLGISKRGDSYTRTLLIHGARAVLHALIAGRTPQAQQNAWLAELATRRGKNRASVALANKTARIAWSMLAQGTEYKLAA

SEQ ID NO: 444519 - protein, 350 aa, unidentified
MIIIGVDYHPEFQQLASVDTETGELSDSRLHNPEQAEQFYRELAGRGAKVRIGMEASGHARWLERLLAELQFELWIGDAAEIQTKRVRKQKTDRQDAQLILQLLLENRFPRIWVPSSANRDLRQLLWHRHRMVQARTRVMNQLQSVALNEGVRCKKRLWRERGRQQLESFALGPWASRRRHDLLQLLDRLNPTILELTQAIEREAEQCPEARRLRTHPGVGALTALAFVLILGEVERFRCGKQVASYLGLVPLEKSSGNRRRLGHITKQGSSMLRFLLVEAAQATVRSVPEWRSKYFHLMQRRGRNTAKVAMARRLAVRLYWMWRRGWDYEQLYKFGSHAGEPGNRYGVR

SEQ ID NO: 444520 - protein, 429 aa, unidentified
MKNNTARKISQVPHRYLIMGIDPHKKIHVAVAMTQDTIIHTKFKFANSRQGYEQVMMSAKDQMAKTGNIGVIFAIETAGHYWRNLAYFLDEQGIPFRLINPFTLKRMREGKDINRRKTDFRDAEMAAELLRNGEFVETKLPKGIYAELRAIYSAYRRLVKERGRAKNLLKGLLDGLFPEFNQVFKNICGMTSLDVLALCPAPKTITGMKLEEFVDAIRKGFKGRAPKVQKLHAIYSLAQASAGIETGADSVSIELSFLVQRLRLFTEQIERLEDTLVRLVKSISDARYLLSIVGISYISVAGILAELGPLGDYQSAGQLIKMAGTNPIEWESAGKRSSHTPMSKKGRPGLRWCIWTAAMCLLRHNTDFRSWAKERRERPAHLHPLKAREVFGAVANRLLRLAYALVKKQTFYQSPKPKVAPELELVAAV

SEQ ID NO: 444521 - protein, 375 aa, unidentified
MNQFIKYVGLDTHKDTVAVAIADAAGGKPRYYGEIANTPTALSKLLKDVSPNGEVASYCYEAGPCGYGIYRQISDSGHDCSVVAPSLIPTKPGDRVKTDRRDSENLARLHRAGELTPVWVPGQEQEAMRDLTRAREDMKHLERQARQRLCAFLLRHGKRYDSGKSKWTQAYWRWLEKIKFAHPVQQVVFQEYIDSVKQQQQRVADLEQAMHEALADWPLAPVVEGLMALRGCRLITAMTVVAELGDITRFDSPRQLMSYLGLVPSESSSGPKTRRGGITKTGNGHVRRVLIEAAWCYRFPARKTAPLQRRAEQTSVEVQAIAWKAQKRLCGRYQALSKRGLLPQKISTAIARELTGFIWAIACEVMPRNATEANA

SEQ ID NO: 444522 - protein, 408 aa, unidentified
MTVYIGIDGSERTHAVVFLNEAGAEIAALRFPHQLEGFLQLERPCKQLGLALAECVVGIETSHNLLVDYLLEQDYAAVYVLAPNQVRANQGRFRQSGAKDDHADARLIAEILRTDRGRLHAWQPDSWLTRQMRVQVRWLLELQRQVVRLSNQLRAVLLRYYPAALAVFATGLTSQIASEFVLAYPDPERARALSQAEFIRFAKAHRYSHHHRLGACYARLQANYPPTSPELTRLYSSPAQQLAHLLRETLQTRVHNRSALQILYRQPPNHAIFASLPKTGEVIGPALLAFFGDHRERFPDAASVQRLAGTAPVTERSGKHRFVHYRYACDKNWRYICQEWARALIGRNPSPIALAYYHQIRPHCHSESHALRCVAHRWLAVAWKLWQSGQVYDLQYHLNQRAARAQPR

SEQ ID NO: 444523 - protein, 316 aa, unidentified
MGKMMIGVDVAKEWIDVAIAGDGRVKRIVNSEQTIAAWLVQTGAGSIGLVAFEPTGGYERHLRRCLLRAKVASKQVHPNEVVAYRRRRGIKAKTDRIDARLLADFAGEELARREFEPVPQADEVLRELASRRRQLQALLHAETCRCDVADSAIVRKSLQAVIATLERSLATVDKAIAEHIASSAHAETSRRLQTFCGVGPAISETLIADLPELGHLSGKKIAALCGVAPHTCDSGKQCGHATTGHGRPGVRKVLFNGARSAIQHNPVMKAFYRHLVDDNHRFGKVALTAVMRKMLVTLNAMVRDGSDWKHAAGPAA

SEQ ID NO: 444524 - protein, 348 aa, unidentified
MLIIGCDYHPGFQQIAFVDQETGECGERRLSHREEAEQFYRTLPGQKVRVGMEASGHARWFERLLNELQFELWIGDAAEIRSKRVRKQKTDRQDAQLLLRLLIEDRFPRIWVPDAENRDLRQLLWHRHRLVQMRTRVMNQLHVVALNEGLRRKKALWRAAGRQELESIALAPWASRRRQDLLDLLDRLTPKIQQLTGALEEEVEKRPVTRRLTTHPGVGPLTALAFELVIGTPERFHCGKQIASYVGLVPTEESSGDRRRLGHISKQGNVLLRFLLVEAAQVTVRSQPEWRNKFFHLAMRRGRKIAKVAMARKLAVHLYWMWRQGHDYGQLQKLGSHAGEPGNPDGGQ

SEQ ID NO: 444525 - protein, 477 aa, unidentified
MKPAKSSTSARTLPARGGQLSRKERRELARQIQSDNVTLEIVHANAAGIDVGKDTHYVAVPPDRDAKPVQCFASCTEGLQQMVAWLKKCGITSVALQSTGVYWIALYDHLQEADFEVSLVNARYTKSLPGRKSDVQESQWLMKLHTYGLLPNSFRPPQAIRWLRSYWRQRQNHVRSAASCIHRMDKVLIEMNVRLSSAVTDLSGATGLAIVQAIVKGERDPQKLAAYRDPRVKATRAEIARQLQGNWQEDLLFRLGQELEAYRFYQTLIKQCDQELAKLLRAFPDRSAGVALPEEARKGRRKKKRGNAPQFDLRQLLYLMSGVDLARIDGIDVITAMTVVAEAGYDMSPWPTADHFVSWLRLAHDNRISGDKIIGKGRTPTQNRLTQALKMAASSLRASKTYLGAQYRRLRARRGPAVAVKAMAAKLARLIYNMLRHGMEYVDRGIEFYEQQQRERRVYALVKNAAQLGFQLVPAAA

SEQ ID NO: 444526 - protein, 342 aa, unidentified
MTIIRIGLDTSKHVFQIHGVDENEKPVLRRQIRRSEVENVFAKLPPTRIGLEACGASHHWARVLRGLGHEVMLIPPQYIKPYVKRGKNDAIDAEAICEAMSRPTMRFVPIKTAEQQAALVLGLDPRMLGVRDLLVKQRTMLINALRGHAAEFGVTAAKGPQQVGELLRRLTTGEGVPALAREMLAMLAGQIEAVNAKLKAIEARLMAWHRRDQTSQCLATVPGIGPIGGVSFALKMPHAKAFRSGRHFAAWVGITPREASTAGKHRPGRISRAGDEDLRRRLVLGATAVIQQAKAGRASPWLLELLARKPKKLAAVALANKMARIIWAMMVSGETYRRPTVA

SEQ ID NO: 444527 - protein, 346 aa, unidentified
MRFYNGQHRYYCGIDLHARTMYLCILDQQGEVVLHRNMRCDPELFVEAIAPYRDDLVVSTECIYCWYWLADLCTREGITFVLGHALYMKAIHGGKAKNDKIDSRKIAVLLRGGTLARAYVYPPEMRATRDLLRRRLFFVRKRGELFAHVRTTSHQYNLTIPSGQLLYQCNRARVPEIFDDPIVRTSVEADLELAGHYDGLIRSMERTVLEQAKVDDLSSLDLLQSIPGVGTILSLTLLYEIHDIARFKTVQDFVSYARLVKCQKKSAGKVLGTSGSKIGNAHLKWAFSEATVLFLRKNPRGQKHLNRLRSRHGKGKALSILAARLGRASYFMLRRRTAFDMDRFMN

SEQ ID NO: 444528 - protein, 367 aa, unidentified
MKKVSTVAVKATKNFSQPTLTIGLDLGDRWSWYCLLDEVGEVLQEQKLSTTPKAMKEAFGGMPRSRIALETGMHSPWVSRLLSELGHEVIVAHARNVRLIGESRKKDDRMDARTLARLARIDPQLLCPVKHRSARAQADLTVIRARAGLVRARTALVNTARGLAKSYGERLRGCNVRNMNPEKAEGLSPELQRALEPLLAGIESLSEGIREYNARIEKLAQESYPQVALMKQVKGVGTLIALTYLLTLEDPRRFRKSRDVGCYLGLQPGRRNSGQSEPQMHISKEGDPYLRTLLVQGAHHILGPFGADSDLRRWGLKLAERGGKSGKKRAVIATARKLAVLLHRLWVSGEVYEPLRNNNQRAMPAAA

SEQ ID NO: 444529 - protein, 357 aa, unidentified
MGKSIINLSSVTTVGLDLAKHVFQVHGVDALGRVVIAKPIRRNKLLEFFASLPRCPVELEACGSAHHWARELIKLGHDVRMMPPAYVKPYIRRQKNDASDAAAICEAVTRPSMRFVGVRSLENQAALMRHKAREMLVSQRTQLLNGLRGHLTEVGVIAAQGPRHARELAELIEACDETVSFEVCEALAPLVVQLRNLDEAIARLDRIIAKLARKDETARRLMSIPGFGPITASAMAATIQDTSGFAGPREFAAFLGLTPKQNSSGGKPKLGRISKTGNRNLRKLLVVGAHAVLFHRKPHTDPLRMWAKKLIEKKPFKLVAVALANKMARIAFAIMRGTTVYRENSGVRSVGRIRDPG

SEQ ID NO: 444530 - protein, 343 aa, unidentified
MQTITTIGLDIAKSVFQVHGIDAGGQVVIRRQLKRRYFLAFFQKLPPCLVGIEACASSHHWSRELKALGHTVRLMPPAYVKPYTKRQKNDAADAEAICEAVTRANMRFVDTKTPEQQSGMVLHRTRHLCMRQQISVINAIRAHLAEFGIVAPVGRNGVEELLDIVSNPSDKRVSEIARMCLAALGTQLRRLKEQVLEFDRMIRTWHRSNEMSMQLDECPGVGPVLATALVASVADPRTFRSGRNFSAWIGLVPKQHSSGGKNKLGSISKQGDRYLRGLFVVGALAVIRYAKINGTKHRPWLTALLARRPAKVAAIALANKIARMVWAMMARGERYKEPIALAV

SEQ ID NO: 444531 - protein, 339 aa, unidentified
MKVSTLGIDLAKNVFQLHGVGCNGQTVLKKKLTRDKFLPFLMQLEPCLIGMEACASSHHFARVLRQYGHEVKLIPPQYVKPYVKTNKTDAADAEAICEAVARPNMRFVQIKTAEQQAILVLHTERNILIRERTACANSMRAILAEFGIIMPRTLSQLYKKIPEILEEYDNELSPFVRCSVARQLEHLQGVEDQITLIEQELSRWAKTQPACQRVMKVPGVGLMTATYLVASVGNGQQFHSAKQFAAWLGLVPREFSSGGKQRLGRISKRGDRYFRYLLVHGARAVAAVIERHKDNMPWLYRLLNKKAYNVAVVAQANKTARILWSMLVQHTEYRTLSVV

SEQ ID NO: 444532 - protein, 361 aa, unidentified
MPNAKISSVSRQVVGGVDTHKDLHVAAVVDEQDRILASESFATTRQGYKQMLTWMRSFGEVVRVGIECTGTYGAGLLRYLEQAGITVLEVTAPDKSYRRKRGKDDTLDAGNAAHAAFAGVRTVTPKKRDGMVESLRVLKVCRKTAIQARRVTLQLIQNTIVSAPDDLRESLRTLTRMQLIRTLAAWRPDLSSYRQVTSAYRIALKSLGRRYLELHDEIADLDVMIAALVDDLAPELVARNAIGYESAAQLLLTAGDNSDRFRSESSFAALCGVSPVQASSGKVTRHRLNRGGDRAANSALHIIAIGRLRTDARTQAYVSRRLSEGHSKLEAIRCLKRYIAREVYGIIQRRNSVINQSTVST

SEQ ID NO: 444533 - protein, 478 aa, unidentified
MIKSVGIDLAGVGEHKVRCLDEEAQSCDGFGFETSPEGLAKLEERVFRDGSNPVIVFEPTGLAWLVIAVYIRARHPDCRLVRTQARNVVALRKYLRRSAKSDRIDALTLAKMPFVDIERLNEVYLPPAKINAILRLARQRQRLEGDIAGRKKRILAIIDGYLPGVRQPFSNLWSPQGREFLRTQLNPLAVVRAGEKALNRFLTRARVRGKKEANESHWVYRACQNIATIYEMSRSSGAVDDDFFADLQDEIARELRLMEVEEAESDAIAQRIEILYRELHPSDNLRTIPGVGELTAPVFLAVVGDPARFQSQSAFANYNGVVPDSRQSSNTEAKGLRMTKAGPSIMRWALYQASQIGRRYDPQLASIYYREMVHNGKNHKQAMGAVMSHIGARILAVLQENRPYELRDIQGKSITWDEARKLVLTNYQVSEEIKQARRRRKTVGNSTKSQGKRREMAAHRAHEAAEAPQPVVTIASPG

SEQ ID NO: 444534 - protein, 331 aa, unidentified
MNYSHFVGLDVGKKTFDASLMSADEKELSHKSFDNTPEGIQSLLDWIAGYHLSLSKLLFCAENMGSYVTELSVSSISMGFSLALVCPLTIKKSIGLQRGKNDRIDAKRIANYAVLHYRKLELYKLPDKDLVRLRGWIIIRDNLVKQKVSSIKLLETFSQMAKLANVTESISFLEEQLKSIKEKILEVEENMEQLIAASTSLYTNYLLLRSIKGIGIINAIVLLCVTDNFQRFDNPRKFACYCGVAPFEHTSGISIRGKTQTSSLANKEVKVYLTRAAITAISWDPQLKAYYKRKIAEGKHKASVINAVRAKIIARSFAVIRRQTPFVTLAV

SEQ ID NO: 444535 - protein, 353 aa, unidentified
MDSKKYIGMDVHKESISIAVRNDAGKIVMECVIETRANAILDFIHGLRGELQITFEEGTWATWLYDLLKPHVWKLVVCDPRKNSRQGNKNDRIDARELSDRLYMNKLSSVYPGGAGVRTLRELARSYLTISKDLARVMSRVKAIYRSWGIPCAGKQVYATRHRAEWLAKISEVGVRRRAEFYYQQLDALRPLRQEVRRELLAESKKHPATKLLRQIPSIGPLRAALLIALIQTPHRFRTQRPLWKYSGFGIEMHSSADYRKVQGQLQRSRKQISVRGLNRDCNHDLKNLFKSAATIASVKPGPFQEFYAALLAKGMRPEMARLTLARKIATIVLIVWKRGVSFDAQYLKPQTA

SEQ ID NO: 444536 - protein, 346 aa, unidentified
MNVTTYGVDLAKLVFQVHWLEPQTGEVQRKKLSRAQFAEFFARRAAGIVAVEACGSAHHWGRRLREWGHEVRLIPTQFVRPFVKSNKTDSADAQAIWEAAQRPEMRFVAVKSEQQQAVLGLHRLRTQLVKVRTMHANQIRGLLYEFGVVLPQGWQTLLKQAGPMLADQKFSDVPELIREGLREQLQGMRELTARIDQLERSIRSYHQQDEQCRRIQAIPGVGPLISTAVLASVADARTFRSGREFAAYLGLVPRQSGTGGRVKLLGISKRGDGYIRNLLVLGARSVLYHANRTGRTPQPWLQALRSRRPTNVVVVALANKMARIIWALLAHGRSYDSGWRRTLPGT

SEQ ID NO: 444537 - protein, 429 aa, unidentified
MTSISSTTSPAVRVAIDIAKLTHQVLLELPSGKRRVMRVANTKTEIDRFVETLRALELPCEIAFEPTGDYHRPLAYVLGQVGLHLCLVSSIAVARTREALYNSWDKNDPKDAQVILHLLKNGTTQRYLDPVVTGHQDLQEMANTYQQVSLRKVRLQHSLITHHLPLYFPEAERYLHSSRAEWFTELLLFTPCPAAVRQYTKAAFVAAACEQIAGRKVDKARWLADFYETACHSVGLPVAATSETIRMFRVVLEEYRALCQLRKRLEAEITTQLAPQPDFVRLQTIPGVGPILAMTILAEARDLRRFGCVRQFLKYCGFDLCTEQSGQFRGTTHLSKRGNARLRYAFWMAGTVAIRMQQNSFRRKFEDYIRPDPKSADRRRKGYTAVAAKMARVAYAVVTTGTDYRRFPEATRPGGRIPSSGAVEAHATS

SEQ ID NO: 444538 - protein, 345 aa, unidentified
MMVIGIDAHKRSHTAVSVDEMGRQGFVKTVGTTTQDHLRLLKWAVGFAEERLWAIEDCRHLTRRLERDLIAAGESVVRVSPKLMAHVRDSARSYGKSDPIDALAVARAALREPDLPIARLDGIEREIRLLVDHREDLVAERTRIIARLRWHLHELDPGWTAPTKLERHSAFDKVKAHLSDHNDGAMVRRLALRLVEHLRLLTDEIDELTAEITVRVSKIAPSLLAIVGCGALSAAKIVGETAHAGRFRSKDAYARHNGTAPLPVWSSNKQRHRLSRTGNRQLNAALHRIALTQARCYQPARELLDRRKNGGDGGREGLRVLKRRLSDVVYRAMLTDETGSLPRTA

SEQ ID NO: 444539 - protein, 326 aa, unidentified
MYSIGLDVSKSTINVYIPINELDIQISNDFKSLKSLYSKLKKYYKKEVSKLVFVYEPTGSYSVLLSRFCNKQLINCFIVNPKKSVNFSKAIGNRNKTDIDDARMLSQMIVTAKEQEIKVPVINKTVDEIKELISYYRFLIKEQQQNSNHLEAVSVKEGSTLVIKTIKQILASLKKKEQIVLLSIKKIIASDKKLYQSYLNIQTIKGIGEVSAIVLLHHFIKYPNTNQRQIVSLAGLDPVHKSSGTSIRGKAKISKAGCNICRSTLFMATIVAVQHNEELKTFYNRLKDNGKHTTVAQIAVMRKMVVLAHTLYKNNEVYDPNRFKQI

SEQ ID NO: 444540 - protein, 352 aa, unidentified
MNAMTIAIDLAKNVFEVAVADERGRVEKRRRLSRGQLVRFLGTHPPAQVVMEACGSSHHWARVAVRHGHKVGLLPMQYVRPYRRRNKTDRADTNAILEAARAPDITPVAVKTPDQQALQGLHRVRAQWMRTRQARINLMRGLLRELGIVMPQGARTALSRIPELVEDAEVDIPAAMRAMLFEVLDEVRGLEQRIAQLERELKRHAGSESDASHLMQVPGVGLLTATAMVAAVPDPSLFRSARHFASWLGLTPRESSSGQRRRLGRISKRGNTYLRTLLIHGARAVLNRAKQVARLERQPLNHLQRWVLTLDARSGHNCAAVALANRLARIIWAVWRHRRPFQADWSPAALTC

SEQ ID NO: 444541 - protein, 450 aa, unidentified
MMSEPQEIEDEEYEQVLERVAAIDVAKAPGMVCTRVPHPSRAGRRQAKAWNVDATTNAILELGEYLAGLGTEKVTLESTSDYWRPFYYLLEAAGLSVQLVNSRDVKNVPGRPKTDKLDCVWQAKLTERGMLRPSFVPPQEIRQLRDYTRLRLDLTRDRSRHAQRIEKLLEDALIKLSSVATDIMGKSGRAMIGALIAGERDPQVLAGLARGRMRVKHAALVQALTGRFDAHHAELAAILPGQYDALTVQIDALTARIEALIAAIPAARGVDADGTTGPGAGAGTGAAVLAAIDRLDDIPGIARHTAQVILAEIGLDMSVFPAAGHLASWAKLSPRTIQSGPENRSGKTGRGNPCLKGALGEAATAAAKTGTFPGERYRRIVKRRGKLRALVAVARSILVIIWHLLADPAARYCDLGSGYYASRTGKDRKTRSHIRQLEALGYTVTLAHAA

SEQ ID NO: 444542 - protein, 325 aa, unidentified
MCTVGRTGVCRSDVPCFLGIDVAKAQLDMALRPSGERWAVPNDASGVATLVDQVQTLHPTLIVLEATGGLERAVTSALATAGLPVVVVNPRQVRDFARATGQLAKTDALDARALAHFADVIRPTPRPLPDAQTQELRALLGRRQQLIVMRTAEQNRLAGTSERLTKDIAAHITWLNADIATLDDDLETMLRASPLWRENDDLLQSAKGIGPVCAHTLLLELPELGTLTRQQIAALVGVAPLNCDSGTMRGRRTIWGGRAHVRTVLYMGTLVATRYNPQIKVFYERLLAAGKVKKVALTACMHKLLTILNAMLKHRTPWQPQEVQN

SEQ ID NO: 444543 - protein, 348 aa, unidentified
MKNNITIGMDLGDQSHFVVVMDEKGNEIEMISIRNTENSLRKFFTPYNEATVAIEAGTHSPWISRLLKEIGCTVYVGNPRKLRIIWDSNDKSDQRDARVLAMVCRVEPKLLWPIKHKNRQAQIDLGIIKARDALVRNRNRLISHIRSVTKTHGFRIPKCTTCCFHKRAPEHIPTDLIESFQPLISTIEDLTKRIKDLNRQINKLCKKYPETDKLLQVSGVGPVTAIAFILTLEDPHRFTKSRQVGAFLGLTPKRDQSGKSDKQLKISKAGNTYLRCLLVNCGHYILGPFGPECNLRKYGLAIAARGGKNAKKRAAVAVARKLAVLLHRLWVSDKPYTAFYNDTNQYAA

SEQ ID NO: 444544 - protein, 393 aa, unidentified
MVVSVGIDVSKDKHDCFIVSSAGEVLANVFTIPNTMDGFNCLLQRIQDCTTPQDKMKVGLEATGHYSYNLLGFLLDNGLTTYVLNPLHTNLYRKSLSLRKTKTDRVDARTIASMLLSDVGLKPYTDTAYHNEELKSLTRYRFDKVKERAKLKSAIARLVCILFPELEKLVPSLHIASVYALLEEFPGAKQVAAAHLTRLKTLLKTASKGRYKRDMALDIRDAARNSIGSSMPAKSLELQHTIRLIRELDIEIAEIEDHIQAIMDELHSPITTIPGLGFRMAAMILAEVGDFTRFDSPDKLLTYAGMSPSTYQSGQLKNCCPHMEKRGSRYLRYALYNATKYVCHWNPNFADYLTKKRAEGKHYNVALSHAAKKLVRLIFAMEKSRRPYCSLAA

SEQ ID NO: 444545 - protein, 309 aa, unidentified
MSSWVGIDVSKNTLAVWVRPSGVNFIACNSSEGHQTLLLNLAEIQVERVLLEATGGYERAVMGCLVQAGYPVVRINPRRARAFAQAMGKLVKTDPVDAGVLAHLAQVIEPSACQTVSLARDELQELVRRREQVVKLRDDERRRLTLARSGVVQESLQTNISQLNEQIARLNSAIEAAAQRTDNQLVKQLGAIAGIGPVTVASLLAYLPELGQLSRRQIAALAGLAPYNNDSGQHSGKRCIKGGRASIRRVLYMAIWSVIRCHSSFAARYASLRARGKCAKVALVACMRVLLIRLNAMVRDHSSWRAEAV

SEQ ID NO: 444546 - protein, 350 aa, unidentified
MTMLADLVEVVIGVDTHKHTHTAAVLDARTGGVLAVATVTADPAGYGQLVELADQRPGARAWAMEGAGGYGAGLARYLAEAAERVIELDRPKRPARRAGAKSDPIDAERAARDALARTPLAQPKTGAARAALAMRVTARRSAVDAATDAQRQLHALVVTAPEVVRARFRGQSTPAMVATALALRPAATAGDTEVSTALTVLQALARRIRDLKAEAAGHEKAITALIRSWRPDVLDLPGVGPIVAATVLCAWSHPGRCPSESAFAMLAGVAPIPASSGMTVRHRLNRSGDRQLNRAIHTIALTRLRVGDTTRAYADRRRTEGKTDREIKRCLKRYIARELYRHLEAPPAMP

SEQ ID NO: 444547 - protein, 352 aa, unidentified
MDKGNKLDFSGQHIYVGMDVHKKSWSVSIYTEQFEHKTFTQPPEVGKLTNYLQRTFPGATYHAVYEAGFSGFWLHDHFREQGIDCMVVNPADVPTKDKERAGKTDRVDCRKLARSLRNGDMKGIYVPPRVKVEDRTLVRTRQSMVRKQTRCKNQITSILFFYGINIPEESRWSRRFIHWLESIHMERASGDVALKAHLEELKHLRQIIANLNRAILSLSKTEEYRADVLLLKSVPGISTLTAMILLTELADISRFPSLDKLASYTGLIPDIKSSGETEYSTGITFRRNAALRSLLIESSWVAVRKDPALMMAFNKLSLRMKKTQAIVHIARKLLNRIRFVLKNRQKYVPAVI

SEQ ID NO: 444548 - protein, 315 aa, unidentified
MTQTNITTAGIDTSKSKLDIAVYGRAERWQVPNTLPGWRLLVSNLAKTGVTRVGIEATGGYERGVVEHLRAAGFMVLVLQPMQVKAFGRVHLRHAKNDALDAILIAACAAAMGPPRIAPDPRLADLAGYLTFLEQIEEDIARFKTRLEHIDEPRLRSLVGSDIRRLKARRKAQIRTIAKLLRGHDDLASRLDLVLSIPGIGERTALALIIRMPELGQVSREEAAALAGLAPFDNDSGLRKGQRHIAGGRGRLRKSLFAAALPAAFRWNKALIALYARLIANGKAHNAALIACARKLLVYANTVVQRGTPWVENAA

SEQ ID NO: 444549 - protein, 375 aa, unidentified
MKEKVRFLGLDVHAETIAVAVAEPDGEVRSLGTIPNRSESIRKMIRKLGPAEKLRACYEAGPTGYVVYWQLAELGIRCEVVAPTLVPVKAGDRVKTDRRDAEKLARCYRSGDLTAVWVPDEGSEALRDLVRAREAAKQDQMRARHRLSKFLLRSGQRPPTGVRPWTRPYMIWVAQLRFTQAAQESARQDYLHEVEHMRARVTRLEQAITEAVKLASPALQQVINDLQALRGIADISAVTIAAELGQVSRFGSARELMGYCGAVPSEDSSGKRIRRGGITKTGNAHLRRIVGEAAWSYRRPPCIWYGLRRRQESISEEAKEIAWKAQHRLHKRYMKLGAAGKPRGKVITAVARELLGFIWAIGIRAETIAGQQAAA

SEQ ID NO: 444550 - protein, 362 aa, unidentified
MKKPSQHLIIAEVPRSITKVGMTIGIDLGDVWSHYCTLNEDGEVVDRGRFRTTLAGVDKWFTDGPRARVAMETGTHSIWVSEQLRELGHEVIVANVRELRAISHSDRKSDTVDAEKIARYARLDPEILRPICHRTVAQQEALTLIRARNLIVRLRTAAVNSVRGLAKPCGYRLPASSTLCFAKRCMAVLPPGLAQALGPVLEQIAAMAVKIRHYDRLIKRLTETEYPETQALLQVYGVGQLTALTYVLTLGSKERFKRSRDVGCYLGLRPRRSQSGDRDPQLGITKAGNIYLRSLLVECANHVLGSRGKDSTLRRWGLHLASRGGKQSHNRAIVAVARKLAVLLHRIWITQEPYMPFYATAA

SEQ ID NO: 444551 - protein, 318 aa, unidentified
MKSSEFIGVDVSQASLDAAVYGQEQVTRIANAVSAIRRWLRTLPPQCRIAVESTGKLHCLLVREAIAAGHIVYVLNARDLSHYARALGRRSKTDRLDAQLIARYLAHEYRNLHPYQLPTELQTQLDDLIRRRHHLVVSRDAQRQSFAQISCKVRSLKALVRAFDRVIAEIDEQLQSLIAQDPTLATHASQLRTMVGFGPLLSTAMAHAITRRPFKNSDAFIAYIGYDPRVRDSGQLRGKRFLSKRGPAELRRLLFTAAMSASRTKLWHPIYERYRARGFSTTATLTIIARKLARIAFSIIRHGTSFQPERIQSACATP

SEQ ID NO: 444552 - protein, 422 aa, unidentified
MKKRVYRAEKLEKVNIEKLSAEIVGQRIVFGIDVAKEDFYGALMNEHCEVVKIIKWKSPWQVRDLVAFLKELPVSGLEVALEPSGTYGDALRVLLEQNGIKVFLVSPKRSKDACEVYDGVPSSHDAKSAAIIAKLHNDGMSRLWPQQPDDARKLSAALDLMVIYDEQRLRNANRLEAKLARYWPEFSEIVNVGLVTSLKLMEEFGGPSKVAKNSEESLTLMKKVGRGALSEKKCRNIIDSAKTTIGVPMIDEECQALSELAKEINDNRLKGDKAKKRVEELTVGDKKLATTSEAVGKVTAAMLTNCLGYAEGYDSASAFLKSGGLNLKERSSGKHQGQLKISKRGPGELRRYLYFAVLRLIQRDVYFSAWYKKKVARDGGRYKGRAIVALMRKLLKALWHVGQGASFDTQLLFDTRRLEIKA

SEQ ID NO: 444553 - protein, 363 aa, unidentified
MDCSNSTPNLVDVIVGVDTHKDIHAAAAVSALGTRLGATSVPASPDGYRRLEAWARSFGPVRAFGVEGTGSYGAGLSRALRAAGHHVVEVNRPDRKTRHRHGKSDPIDAECAARAVLAGQADALPKPGAGPVEMIRHLKIARDSAVKARTQAMLTMKAIIVSAPAALREQLAGIRGKLTLVRRLAAMRPGPLTSTTASAKAGLRAIARRWLALDEEIRGHDVHIEALTAARAPAMVAAHGMGAGTTAELLLVVGDDPARIRSEGAFAKLCGACPIPASSGKTNRHRLNRGGNRQANAALHRIVVTRLRAHQPTLDYVAKRKAEGKGKSEIIRCLKRFVAREVFGYLCAKPKPSGPDQGQSAPT

SEQ ID NO: 444554 - protein, 429 aa, unidentified
MNGVDITRLERFRQLRKEIRGSNEHLIVGIDVAKDNHHAFFGTARGKTLLKRLVFNNNLQGYEKLSTYVEAAKVKNNLNKVVFGLEPTANYHKPLGEHLIKCGFDVVLVAGTAVKKNRELLDGRWDKHDTKDAANVADLVSQGKCMFYEYPIMLLRELRNLLSFKRRLKKQEHGTSVRIRNHLLAQYFPELDPHFSRMSGCSLSVVKWCLEPSLIAGMEYEEFLRLVAPGKRTIRQREHVKLIWEKAFESIGCKVGETVQFEAKMMVEELQHVRESISEVEEKIEDICLNFPEYKYLLSMPGFGKDISSKVLGAIGNPFRFDNAKQVIKLSGWDLNANRSGKSSGYATAVISKKGKADLRYALYQAALVASSKNQHFVAYFTEKLRQRSREKGIKTKMRVKLAAKLLVIAWTLMKKREPFNPEYLKVTL

SEQ ID NO: 444555 - protein, 408 aa, unidentified
MNAVGIDVSKGKSMVAALRPMGEVALLPQEFLHTEVGLEQMAYAIIALGEDPRVIMGATGRYPEPVAAALHEYGIYVCVLNPLFIKQSGGGSIRKVKTDKADAMKIAKYGLDNWVDLREYTPMDTVRQQLKLCSRQYNLYMKTVVSLQNNLISLTDKTFPGVNELFSSPERADGHQKWVDFVMTFYHCDCICRVSENAFAERYQKWCKRKGYHFSAEKAQDVYLGSCGHFTTLPKNDNTKLLITTAAQQLLAGKMTLAALRTEMTRLAKQLPEYDIVRAMYGVGETTAVQLMAEIGDVRRFPRRSSIVGFAGVDPAVDQSGKHSAKSVPTTKRGSPHLRKTLYQIVCTYLKKSPVDEPVYQFLDKKRSEGKPYFVYMTAAQNKFLRIYYARVKECLEAFDAQQDTSQR

SEQ ID NO: 444556 - protein, 347 aa, unidentified
MPDCLSTSKKLNIIKAAQAGCINKGNYPMNIIGLDVSKDTIDAYLDPTNGNPAHIKITNDPTGYMQLQDWIKSRRLRKVIVCMEATGIYYEKSADWLSRYHTVYVINPLKIKEYGRTLFNHTKTDRADAKLIADYGKRYMDKLIQFENPTNDNRRLQKLIALGQQLKQQLKQAKNRLHASTDDYIANTHEAIICLLDHQITQTANQIDAIIKQQNDLNQHYQNLKSIPSVGKETAVMLLRHLSSKQFQTANHFVSFAGLSPKIEQSGTSVNRKGGNRYGHKKLKAALFMPALVAFRMNAFPQLIKNLQAANKPKMVIIVAIMRKLAKLAYYIYKTSQPYDKSRHQAA

SEQ ID NO: 444557 - protein, 358 aa, unidentified
MAKYIMVGCDLHDRSMLLKIAVDRGKPRLRCWGACASSRQAMVNDLLRWATQLQAERIVFAYEACGFGFGLHDELAEAGIECHVLAPSKMERSAQRRKRKTDEKDAQAILDIVRAYVLAGVAMPSVWIPDLATRDDRELVRRRLAVAEDSSAIQVRIRWLLKRSGIESAPAGAWTGRYMEWLGRLVQKELPKGAAATLASLLRQVEWLWGGQDLLSAQVAALSRTPRHAPLVAALRRHKGVGVLTAMVFLTELGDMRRFGDRRQVGSFLGLTPGSFESGEADDHKGHITRQVPSRVRKVLCQAVWSRLRSVPSERQAYDRIVNKDPKHKKIAVVARMRTLAIRLWHEGLAAQGVTPAA

SEQ ID NO: 444558 - protein, 349 aa, unidentified
MYIGVDTHKAAHVLVALDEQGRTLGTRDITNSPDGWGEALRWAQGWPSERMWGLENSGSWGKGLAQSLLAQGEAVVCEVSPQRTAQYRRRGRTQDKTDHADALAIARLLVAEGEQLPRVQADDASTELRLLSDHRDNLLGERTRLINQLHDQMVQLDPAYKVNSGPLKQRRGILYCRDWTPDHPSRVAGTRLLIVHQLATQILRLDDELAAITAELSARVQATQTPLLALRGVGEVTAARLIGELGSPPRIRSATALAALSGIAPVAVSSGGRTGYRLNRGGNRRLNRAIHILALSQRRCEPRAQAYYAKKRAEGKTAREAMRCLKRRLVDVLYRTLCQDRGVPVASAA

SEQ ID NO: 444559 - protein, 348 aa, unidentified
MSKGNQYVGLDVSLKQTSICVIDDADKIVWRGQVDTTPEAIVSAVTQHAPHAVRIGLESGQLSNWLFHGLKQAGLPVICVDARHAKAALSLKVNKTDANDALGLAQIMRVGWYREVTVKGLDCQAVRALLVARAQIVSQITTLKNCVRGILKTFGRVLPKGLRSQFPARVRAAIEGHPVLGAIIEPTLQVLEAARAQLLVYDRAVIQRARSDDTARQLMSAPGVGTVVALAYMTGVEDPARFKRSSSVAAYFGMTPRRYQSGEVDHAGRISKCGDGMVRGLLFEAAKVLLGRSSRPNALKTWGEALGKRIGLKKATMAVARKLAVILHRMWTTGATFQWNAGTTSSVA

SEQ ID NO: 444560 - protein, 324 aa, unidentified
MIDGILGIDVSKNTLDASMSSCNKVRAKSFANSPDGWRHLLDWLIGQKIRRVHACLESTGLYSLGIACKLNEAGHVVSIVNPAQIRDFARTKLGRNKTDAVDASHIREYCELFKPAPWSPPSHAHRQLGELQTIRAGIVAGLTEWKNRKNSGMIDVVAQSLADATISHFTSQLGAVEKAIAQTIDNDSDLRRKRDLLLSISGVGETLASAVLAELPGPDVLRSSAEVVAYAGLNPRQHQSGTSIDRPTRISKIGNVVLRTALYMPAMSAMRYNPAIVALVTRLKARGRLKPKQIVVAAMRKLLVLCFGVLKTGKPFDPALAMGC

SEQ ID NO: 444561 - protein, 315 aa, unidentified
MSDQMYKFHVGIDVSKRKLDVAISNSHHLLQVANEEAGFKELIKKLPNKKHCLIVLEASGGYEKSVANYLRSKKYNVAIVNAKRVRDFAKASGKLAKTDHIDANVIMAFAKAFNPAPQALATPTEQERLNHLNRRSQLVKMIATEKQHLEQSPKDFHAGIKKHIKYLEKALEKIETQLKKQIKSDPALQDKVERLDAIKGVGDVTAMNILLNMPELGQLTPKEVSALAGVAPYNKDSGQMKGKREIWGGRAPVRAALYMAVLSARQFNPVIKKFYDRLIGKGKLAKVAMVACMRKLIIIMNAMMRDNLPWQPKIN

SEQ ID NO: 444562 - protein, 385 aa, unidentified
MYFIGVDIGKNHHEATVLDDTGRSMGKSTRFNNDEEGFRQLWNALPGQPRQLAMESASHYWLNLYLFMVSNEEKVLVINPIQTEAFRRGQIRKTKTDSRDSWVIAELLRTNAVHASYVPEQWVQQVRELARFRFGLVDQAGDLKRQLIAVLDRVFPEFEKLFSDPFIRSARELLKTAPLPEEILNFDLSELSALLAGASRGKFKEAKASEVKKAAGCSVGARFCQDTARLQIKCLLEHIEFLEDQIADIEAQLGELVQDRDQYLCTIPGISTTTAAVLLGEIGDINRFERIEQLAAFAGIDPTTVQSGEFSSSKNHMSKRGSPHLRRALWLAATPARRSDPGLQAFYDKKIAEGKHPSTATGAICRKLLNRIFVILKEQRPYEKF

SEQ ID NO: 444563 - protein, 413 aa, unidentified
MDIVYACCAGLDVHKETVVATVRRRLDGGTVQQRTRTYGTMTEQLLELGDWLQAEGVTHLAMESTGVYWKPIWNLLEERFQILLVNAQHIKHVPGRKTDVKDSAWIAQLLQCGLLRGSFVPPPPQRELRELTRQRRQLVHSKASVANRIQKVLADANLKLGSVATDVLGVSGRDMLRALVAGEKDPVKLAELARGKLRAKIPALRLALQGRVTEHHRFLLELLLEELTHLEGLIERLTARITAVLPAPFAEAIQRLATIPGINVRAAENILAETGIDMAVFPTDGHLASWTGMCPGQRESAGKRQSGRTRKGNQWLRTTLVQVAWAASRTKRTYLSSQYRRLASRRGKKRALVAVGHTILVMVYHLLRDGTTYVESGADYFDRLDTERLTRTLVRRLERLGHAVVLKPKEPAA

SEQ ID NO: 444564 - protein, 322 aa, unidentified
MAMLSFGGIDVSKDRLDITVLPDEQCSSVSNDAAGWAELIEQLRGSSITAIGVEASGGYERGVVRALLAAGMSVRQINPFKLRQFAKASGILAKNDRLDAQMIASFVAIMPTRPAQRQTPMIEQLAAMLTVRRQLSDHKVATENASRLLEGAMLQRLSRRRVAGLTADIDLLDQRLVEIVTADPALAHRFWLLTSMPGVGAVLACTLIALLPELGQMSRKQVAALVGLAPYDFDSGKLKGRRCIWGGRARVRHVLYMAALSASNWNPALKAFHDRLAATGKKPKVVIVAVMRKMITTLNAMLRDGTTWVDRYSGRRSASTAR

SEQ ID NO: 444565 - protein, 398 aa, unidentified
MNTKDQKAAVVGMDVHRRFSTVTARNAERKIVWRRRLNHDDPLRLQATLGDWPTGTPVILESTFGWEWMCDELENAGLEPVLASSSKVAAWRRARGSAKSNRTDADLLSELNFQADRWWAVWLPPRAVRDRREWMRFRMSLVGSQTDLKNRVHAILHRHGILHDFSDLFGKAGRRMLTRLANDDHDTRLGVSGRATLKGYLQLLDQLRRQIASVTRSIRRDLTATSEGRRLQTLPGVGAVLGYTILAEVGDFARFRSGKHLASYSLLAPRSYDSGEETDEPPKGRHVGRVGRRTLKWAWIEAAHGAVRRGGRFRAIFDRYTDGGKRNRNRGYIMVAHALCITAFAMIKKEMDYSNNPPARPGSTNQRPAGKTRKRRRRTSRDSRPGTGQPDTGLVVAG

SEQ ID NO: 444566 - protein, 330 aa, unidentified
MVQIYGIDLASEKFDVNFLNENGRVCHKIVRNTRNQIEKFLETLPDNAWLVAEYTGVYGDLLLYLANIHGVRISYVPGYEIKHSSGLVKGKSDSNDAALIREYGERYIDKLTVTGFPSESVYKLKELYSTRRLLVQQRKQLYTILSGDKHRPMQCEVAVRIKEQMVAELDKALSNIEQEMQKLIDNDESLRKSAEIACSVPGIGKVTATELIIKTDNFKRVATARKCASLAGIAPFPNATGKSDKGNHVSRFGDKELKTLLFMCAQSAATYFEKMHVYKMKKLEVEKKHFFIVMNNIANRLLKILYALIRTGKTYDPLYISRDPRLKLQK

SEQ ID NO: 444567 - protein, 355 aa, unidentified
MNLKKYIGMDVHQETISIAVMTGDGKLVMESIVETKASTILQFVQGLHGDLHVTFEEGTWAAWLYDLMKPHVAGLVVCDPRKNALLKDGNKSDKIDARKLADLLRGGYLRSVYHGENGLRTLKELARSYLTISQDLTRVMNRVKALYRSWGIACGGPQVYAPRHRAEWLNKIGEVGVHRRAEFFYQQLDAVRALRQVVRRDMLAESRKHGATKLLRQIPYIGPIRAALLIALIQTPHRFRTKRQLWTYSGLAIETRDSAQYRYVAGQLQRSKKPQQRRGLNENHNHDMKAIFKSAAAMASRREGPFQDFYLELLTKGMKPAMARLTLARKIAAITLILWKKGAHFDAAQLKPQAA

SEQ ID NO: 444568 - protein, 319 aa, unidentified
MDGNRVIGIDIGKWTIDVAREGAARRERHANEAAAIAALVSELDPARDLVVFERTGGYERVLEGALAAAGIRWAVVHSKRVKAFREAQGIKAKSDAIDCRLLREFGRARLNAGDLRLGRIEDVTLAALVGRQRQINAMLHAERCRLETAAIALVRRSIAHTIAMLEAELVEIEAAVAAHVADDPQLGLKEKVMCHRIGVAHTTARGLLAVLPQIGEATSKEITALGGIAPRVHQSGATQKRRGLDPGRSAVKVILFNPARTAMRYDPDIKAFAQRLRARGKPGKVIMVAVMRKMLVQLNAAVRDALNSEEPRSAALAAA

SEQ ID NO: 444569 - protein, 341 aa, unidentified
MEKITTIGLDIAKHVFQVHGINGAGATVSRRKLRRDDVVGFFKALPPCLIGIEACATGHHWARVLMALGHEVRLMPASYVKPYVKRQKNDATDAEAICEAVTRPAMRFVPVKSEEQQSVLMLHRVRELLIRQRTMLVNALRGHLAEFGIVTRQGIAGVGMLIALVDDDDHDLIPPLARSALLPLIGQLREVHEKVSELDRQIHAWHRSNELSRRLETIPGIGPITASAIAATVTDASLFKSGRQLAAWIGLVPRQNSSGGKDRLGRISKQGDPYLRRLLVVGAHAVLRFSGKAKVAPTRWAAELLVKKPYNVVAVALANKMARIVWALMTTGRRFEATAAL

SEQ ID NO: 444570 - protein, 293 aa, unidentified
MLIHYIDIAKRNFVIAVSSLSKTKTETNNPKGIAHTIEYLKKHKVALVVTESTGGLEIPAAKAIHRAGIAVIIANPRQTHQFAQSQSLTKTDAKDAKMPAFFAQMKAQKEDWQTMPYHPPTEAEEVLEALVNRRNQSADMRTAEKNRLHQVHETQVGSVKQLIAHFDRLIDESDKQIDDHTHTHFDGKAQVAEQIKGIGSITTATLMAMLPELGRLSHKRIASLAGIAPHPRESEETKFKSRCFGGRSAVRKALYMATVQRHVLNRLFGISTNACCPRVSRIRLPLRHVCANC

SEQ ID NO: 444571 - protein, 339 aa, unidentified
MQLYAGLDLHSRNTYIGILDREFNRVFKKRVANNLELILQTLNPFGCQLKGLVVESTFNWYWLIDGLMDNGYQCVHLANPSAIKQYEGLKHADDQHDAFFLAHLLILGILPQGYIYPKKDRPVRDLARKRMFLVQHRTAHILSLQSLIARCCAKKVSSNEMRHLTLDDLQHLLEEEHLVLSAQANLDSIRFLTQQIKKIEKTINKKVKLNQAFQNLLTVPGIGNILAMTIMLEVGDISRFAKVGNFASYCRCVSSQRLSDGKSKGHGNRKNGNRYLSWAFVEAAHLTRRHCQQFRRYYNRKVAQANTSLATKALSNKLARICYYIIRDNVPFREDLSSQ

SEQ ID NO: 444572 - protein, 348 aa, unidentified
MNYYIGLDAHSQTCTAVVVNEKGEQKLRATFETTEAKLIEFISKVEGVKHLTFEECTLSQWLYVTLLEHVDHLLVCNPVYVAKKQVAKTDYRDALHLAEELRTNHLKPVYHEKSHWIELRTLTNNYLSLVDDIIRAKNRLKAVFRSEAVDTNTKNFYEDRDRIKDLTNPNAKFVAESLYEQIAALEKLKAEYKEKFEKNRKKYRPIRNLSTVPGIDLIRASIITAVVCQPQRFRNKHQFWGYSMLVRHIQMSGGKIYGNRRIHGRRELRDVFLGAAESALRTETSLRDYYEQLKARGTSHKDAKIAVARKIAATCLCLLKNNDTFKNDYDLQQNERTKLRKELNLENV

SEQ ID NO: 444573 - protein, 431 aa, unidentified
MKGGDLMKNNFLSTLFVGIDVSSKTNVLCALDFSGNKLLNLKALNNQPGAESILDSILDCLNSNSLQYVVIALESTSFYSTHIANFLSSHEVLLAYKPLVYCLNPKVVANYRKSFIDMDKTDPMDAYIIADFARCGRITSQPWRGAQFLALQRLTRHRLHLIECITREKTYMVSNIYLKFSELAVLDKKDKPFSNTFGVTSAAVLTEFLSLEDITYLSIEDLVAFVSTKGKNRFSDPYKTAKLLKKAARDSYRLDKVLYEPLNASISSSFNLIKAFEDEIKTIDKAIGKNIKGLNTTEFQSLTSIPGIGPVLASGILSEIGTITSFNSHDALAKYAGLTWRVKQSGDFCSDETKMTKTGNKYLRYYLIEAANSIIYHVPEYKDFYNKKYSEVTTHNHRRALALTSRKLVRLIFGLLTKNQIYSSNKVGESQ

SEQ ID NO: 444574 - protein, 342 aa, unidentified
MFHIGIDAHLNSSAVCILDENGRLFKRFVHRGDLRSLVKRLREELDQPFQVCFEASCGGGTLHDLLVPIADRVVVAHPGHLRLIFRSKKKNDRVDAAKLAKLLFLDEVPPVHVPDRNIRAWREMIGMRSQAVAKRTRAKNGLRALLRSHLIRSPRGLWTKQGRQWLTELKLPTASARLRRDLLLEEVRHFDRQIHRLEEELDRIARQHPGVTLLKTIPGIGPRTAEAFCAFVDDPKRFGTKQIGRYFGLTPSQDQSGSTNRLGHITREGPAVVRRLLAEAAWRASRLSPRVKAFFERVQRGDPDRRKIAVVATAHYLARVMLAMLQSGEVWQKEVAPATKAA

SEQ ID NO: 444575 - protein, 422 aa, unidentified
MEVIHPRSGGLDVHKETVVACVRLALGDKVTREVRTFETTTTGLLLLLAWLTEMGCTHVAMEATGVYWKPVWNILSDGDFELVLANAAHIKNVPGRKSDVSDAVWITDLLAHGLIRSSFVPDQEIQELRELMRTRKQLTRQQTSHVQRLQKTLECANIKLDSVITDIVGKSGRAMIQALIAGETDPVKLAALADRRIKASPQELREALRGRVTDHHRFLLRLHLQHIEFADAAILDIDRSVAALIARMDQEMEAGRAFHTLIALLITIPGIDVLAARAILAEIGPDMSRFPTAGHLLSWGGLCPRNDESAGKRRSTRLRKGDRWLKTLLVQCAWAARRKKDSYFRAQFYRITARRGPKKAACAVAASLLTTIYHMLKDGTPFQDLGADHFDRRSKEARAERLVTQLAKLGFDAKLTPLAQAA

SEQ ID NO: 444576 - protein, 347 aa, unidentified
MLHAGLDLSRRKVDVCLLGEEGEHLDQLAVPPDADSLKTLAKRIEEVHRQPVCAVIESMTGARIVHDTLETCGWSVEIADAQKVKGLAPLACKTDKIDSKVLATLSHRDLVPAIWLPDPRVREERELARFRLHLVKHRSMLKHRIHSTLISFGRPCPVSDLFGVEGRKLLARLEVPEPWRGNVTASLELIDELSEQIDDANRRLRVGHADHPYVSLLMSAPGIGWVLAFTIASEIGEIERFESPAKLTGYSGLCPRVLQSGDSDRRGPLSKHGPTYLRWALIEATMHALRHPAYAERYQRTKRRLGKQRGAKVAQIDIARRLCHAIWHMLTRGETFAPRGAVSRLAT

SEQ ID NO: 444577 - protein, 373 aa, unidentified
MQEPSTIVGLDVHRNTISFCVLKPYEREPWNGQISNQPAQVRKLAQRIKAQAQGPVHYCYEAGPCGYGLQRDLIAQDCECTVIAPSLTPLRPGDRIKTDRRDARKLAELFRAGLLTEVHPPSVDEEAVRDLCRCRDDARVDLTRARHRLTHFLLRHGLVFGTGQPHSWSQAHRAWLTSLDFERPSERIVFEDYLLAVEQREAQRAALDTELLAISQSEPWRERVGWLRCFRGIDTVNAMIFLSELHDVRRFPSAPSLMAFLGLVPSEASSGDHHRRGGITRAGNQHVRRTLIEASWNYRHKPRVSQELAKRRLGQPAAMIALADRAQKRLCRRFRRMEDRGKHRNKIVIAIARELAGFLWAALARPEVASTQG

SEQ ID NO: 444578 - protein, 316 aa, unidentified
MAMRVSKSIVGVDVAKAELVIYLADPDLLTSITNEKPVIKRWLKTLPGPTAIAVEATNVYHVDLVELAHESGHDVFIIDGFQLSNYRKGVGGRSKTDASDARLLARFLKNEGEDLRPWTPPPAVYGKLQSLLRRRASLIQAKTSLTQSWANDASLKAVFATFVKSMERLDLLVQKKLKEILREAGLLEEVARCQAIEGIGFLTATALVMAYNRGDFTSGDSYVAFLGMDLRVSDSGQKNGRRYLTKRGCSEVRRLLHNAAMSACRSNAWKAFYNHHLSCGKATTQVLVMLSRKLARIAFALMKNQSEYQSKGAVIA

SEQ ID NO: 444579 - protein, 316 aa, unidentified
MEKATVYAGIDVSKDRLDVAVYGKDKVSSFRNDEEGIEQAVKSLKKLLPALVVLEATGGIEMPVAAAMGAAGVPVAVVNPRQTRDFGKATGKLAKTDVLDAKMLAHFASAVHPEPKALPDATVQEFAAILARRRQLVEMLVAEKNRSCTAIKPVRERIRRHIAWLKQELDSTDKGLDQAVRGSPLWREKDDLLQSVPGVGPVLSSTLLGQLPELGTLNRKKIAALVGVAPLNRDSGKFRGKRSVWGGRASVRTALYMSTLVATRHNPVIKAFYRRLCAAGKLKKVALTACMRKLLSILNAMMKNHTRWSSICPANS

SEQ ID NO: 444580 - protein, 340 aa, unidentified
MQITTIGLDIAKNVFQVHGIDAAEKVVVRKQLRRSQVIAFFAALPPCLVGMEACASSHYWARELTKLGHEVRLMPAKDVKAYVKRNKNDAVDAEASCEAVRRPTMRFVRPKSAEQQGRLMQHRARDLLMRQQTQVINALRAHLAELGIVAAQGREGLKQLLAIIADERDERLPIDARASLIVLAAQLQALHTMIGSIEKRLTVQHRANEASKRLQSIHGIGIIGASAIAATVADPKAFRSGRDFAAWIGLVPRQDSTGGKHKLGPISKQGDRYLRRILVVGAHSVLRRAKHNPQKYPWLTQLLARRPFKVVAIALANKMARIAWALLASGGHYRPRLAAA

SEQ ID NO: 444581 - protein, 373 aa, unidentified
MTSIIRIGVDTSKSVFVLHGVDASEQPVLRKKLRRRQVLAFFAKSEPTEIGMEACGGAHYWARELRALGHEVFLLPPQYVKPYVKRNKNDSADAEAICEAMSRPTMRFVPVKTADQQAALMLVGTRDALVRRRTQLTNMIRGYAAEFGLTAAKGLAKIEPLLTRIAEDAKLPELAKQLFALHAQEYASLKRAIEKLEAELMAWHKHNEISRRLVEIPGIGPIGAILAAMKVPNPQAFSCGRDFSAWLGLTPKDHSTAGKTRLGVITRAGDEALRSVLVAGATAVIQHVRRGQGRPSPWLLALLRRKPPKLAAIALANKNARVAWKLMVSGERYNPARASTESEGRGAALRDGSAPRPSLTSTGRSRKTVAMNA

SEQ ID NO: 444582 - protein, 344 aa, unidentified
MEHFAGLDVSVKETSVCIVDEAGKIIREVKVASEPAALLAVLKNPAYCFKRIGLEAGPLSQWLFSALAEAGLPVICVETRHMRAVLKAQINKTDRNDARGMAQMMRVGLYRPVHVKTLRSQKLRMLLTHRKLLQSKAIAIDNDLRGTLRNFGLKVGMVGTVRFEARIRKLVENLPDLAALVEPLLIVRRTLREQFCILHRRLLAIVRDDEVCRRLMTAPGVGPVVSLTYRATVDVPARFRKSKSVGAVFGLTSAKYQSGEVDWSGRISRCGDEMMRTMLYEAAQAMMRSKKWSWLKAWAMQIARRCGMKKAIVALARRLAVIMHRMWVDGTEFRWTREQATAAA

SEQ ID NO: 444583 - protein, 321 aa, unidentified
MLLEGAMADKLFLGVDVAAEWIDVAIYGRAAVDRLANTAEVIAAYLARFEPDQVGLVAFEPTGGYERVLRRELAGAGLAFARVHPNALVGFRRARRQKAKTDRIDARLLADYAANELARRGLAPLVEGDERLREMTSRRRQLVDLLQAERARARLAETDVVRQGLDAVETALLAVLDQLETAISAHIESQPELAATAGRLRSLTGVGPVTVSTLMGELPELGRLSGKEIASLVGLAPQTCESGKTHRRAVTGHGRPGVRRVLFNAARSAIRWNPVMKAFYETLVHTNKRPGKVALTAVMRKMLVTLNAIARDQQPWLHAKP

SEQ ID NO: 444584 - protein, 316 aa, unidentified
MHTIGVDVSKSELVAARLTRRGAVEERWTIPNEPEAIGAWLDALPPHAELGAEATAEYHNGLARAAMERSIPFKLLNPIVTQQFTRATVRRRKTDRSDAEVIARCLANGEGYACTGESFSPGKRLLRTAEELRRMECSLRRMECQMRAFVNGADTKPLLRLAASAKIAAAATQAQGVSLADGKQSALLSSIPGIGKTLSATIAAEIGSCERFRSGKALVAYAGLDPRVKQSGATLSRNTRLTKRGSPYLRRALFLAAMIGERSDPELKAYYEKKRSEGKRFTEATVANARHIAHRVYAVLTRGTPYVKRELSTVAA

SEQ ID NO: 444585 - protein, 459 aa, unidentified
MDDFAGRDLRLDGVEEPDELLMAVALHAAADHVALEHIESGEQRGRAVPFVDAMGRAARACDLGAATTAGRCPMRQANDLSRSLATFDQPTTLIAVIEMSQSSWLVAGIVPGLERHPLKKLAVDEGSLLRLLQRWRDQAIRAGCRIERITVAFEAGRDGFWLARWLRAHDIEGYVIHPTSVAVSREHRRAKTDRLDTELLKRAFLGWLRGEADHCNMAAIPTIEEEDGRRPHRERESLVAERTRIVNRMKGCLARLGIRGFKPTLQRAPKLLSTLRTPEGTPLPPNALAEMGRDLARLHFVEGQISEIETARLERLEQAPTEKSHAMVRLLARVIGVGIETADMLVREILSRNLRDRRALARYAGLTGAPDESGSKRREKGLARAGNARVRRGMIQLAWRFLMFQKESALAQWYRSRTVDARQGTRKSLIVAMARKLLIELWRFVTTGETLLGVKMRPA

SEQ ID NO: 444586 - protein, 385 aa, unidentified
MQDHKPEDQTAIRTDLGAIFVSLELSRSTWLVTSLSPGGGEKMSKHSVPGGDVSGLLMLFSRLTERARKRAGEEFPIIAIQEAGLDGFWIHRTLEQEGIESHIVDAASIMTSRRRRRAKTDRIDGEALLRALMAYKRGEPRVCAMVRVPTPEDEDRRRISRERNVLIAERVAHVNRIKGLLFSQGIRYEPLRRDRRARLEELRTGDGRVLPEHMKRQINRELDRLELLLAQIKAVEAERNTMLAKTNEANLAPAKMLMGFKGIGAEFAMTLWSEGLFRHFDNRRQVGAYAGFAPTPWQSGMTDREQGIAKSGNPRLRTTMIQLAWLWLRHQPDSLLSHWFQERVAGKGRRIRKIMITALARKLLVALWKYVTAGVVIERAVMKTA

SEQ ID NO: 444587 - protein, 424 aa, unidentified
MMNHPKMKYTYVGVDSHKDTHCAFIINCFFEKVGTFTVKNAPNEFEAFVEMVKKYKLEGTSLVFGFEDVSEYGRQLVSFLLKKKFVVKHVNSYLVAHERKSLNVTQKTDEFDAECAARVLLNRFDSLPKADVQDKYWILKNLVTHREAMVKSNITLKNRLHSLLASHYPSYTNFFCSIDTLGALAFYEKYPSPSKIKDVTAEELNEFLTGASGRGNPKDKAQKILNYINADGDTTIEHQEIRDSTVISVVKMIRSNMEELRTIDKKLEELLEHFDYKLTSIRGVSTAIAAGLISEIGDISRFSNPAKLARYSGVAPITQASGKSEAQFADTRGNKALHHIFYSLALSLISVSQSKKARNIYFHNYFQKKVSEGKTKRQALNCLQRRLVNIIWGMMTYKTEYRNPELQLIEEPQKNPSLKKPSIK

SEQ ID NO: 444588 - protein, 375 aa, unidentified
MSSYASPRMIVYLALELSASSWVIAYRLPANEKAKLRRLEAGDNDGLVAFIADLRSQLHPSDDAEVLVVSCFEAGRDGFWLHRLLTAHGVINHVVEPTGILVTRGARRAKTDRLDAVGLLRVLATRFAGDVDACRVVNVPSVEEEDAKRPHREREFLVQERIRVENRIAALLATQGIRKRPSLRSWGADVNALRTGDGRPLPTHLVAELNRLRRRLSLTLEMIRELDAEREIALEEQQDPASQTVKMLCTVRGIGVNFASVLTREVFYRTFDNRRQIASYLGLTPTPFQSGGMDRDRRINRAGNSRARKTLVQLAWLWLRYQPESSLAAWFRERVGTLQGRARRVAIIALARKLLIAIWRFVTLGLAPEGAIITA

SEQ ID NO: 444589 - protein, 343 aa, unidentified
MDHFAGLDVSVKETSICIVDDAGKIVREVKVASEPEALLAVLKNLAYHFKRIGLEAGPLSQWLFSALAEAGLPVICVETRHMQAVLKAQINKTDRNDARGIAQMMRAGLYRPVHVKTIRSQKLRMLLTHRKLLQSKAIAIENDLRATLRNFGLKVGMVGTVKFEARIKELVESLPDLAVLVEPLLIVRQVVREQLGILHRRLLAIVRDDDVCRRLMTIPGVGPVVALTYRVTVDVPARFRNSKAVGAVFGLTPCKYQSGQNDRTGGISRCGDEMMRMMLYEAAQSMLVRSAKWSWLKAWAMKIARHRGMKKAIVALARRLAVIMHRMWVGGTEFRWTREVAVA

SEQ ID NO: 444590 - protein, 342 aa, unidentified
MLIIGCDYHPSVQQIAFVDTETGDCGEQRLKHSDREAEKFYRDLKLRAESVRVGLEATGHTRWFERLLAELGYELWIGDAAQIAAMRVRKQKTDRQDAQFLLKLLLEDRFPRVWVPSLENRDLRQLLWHRHRLVQMRTRIMNQLQSIAMNEGIQRRGGLRSEQGRKRLEQLVLAPWATKRRQDLLGLLDQLNDSVEELSAALQQEAEKRPEARLLMTHPGVGPVTALAFVLIVGDPERFRCGKQIGSYVGLIPEEASSGVHRRLGHISKQGSTLLRFLLVEAAQAAARFNPEWRSKFLHLAMRRERRIAKVAMARKLAVSMYWMWRKQRSFQPSIEVGSHAG

SEQ ID NO: 444591 - protein, 397 aa, unidentified
MIAVGIDISKAKSTVAVIDSDGTVLASPFTMAHTQPEMEAFVTYLKGLGEPTTILMEYTGHYHYPVLKKLQDEGFPVCIVNPYQMKKYGDVEIHKAKTDKKDALRIAAYALEKSYKLVPYSSMEQKYEDLKFLSRQYNQRISYVAKLKVQLIALLDQTMPGITRILPLNSRNPEKCALLLFIKRFKSFDEIQRIGKARFLASYDVLAKKASERSASSKGLSIYELAVDSITTRGEDPYIWLSQNQCVDLLSATQNAADEIISQMRNIAETIPEYKVLRAMHGVGDRLGPIILAEIGDVHRFHSGKALNSYAGNDAPPYQSGQFESRNRHISKRGSSALRKACYEVMQALKLTKPQDDPVYLFMLKKEQEGKPFNVAKMAGVNKFLRIYYARAMELYK

SEQ ID NO: 444592 - protein, 346 aa, unidentified
MTIVGCDFHPGWQQVAVLDTETGEVTECKLVNGNGEAERFYRRLPAPSLIGIEACGNSHWFLDLLQLLGHEVWMGDAAQIRASYVSKQKTDRRDAAHILKLLVEDRFPRLWMPSVKQLDLRQLLVHRHKLVEIRTRIKNGLQHLALNRGMQKKRKLWTEAGQKALRELPLESWAACRREDLLGLLASLEKQIDRLDVAVKQAADEDPQAALLMTQPGVGPITALAFVLTLGDVARFKRGKQVASYLGLIPREHSSGGKQRLGAINKQGNSFVRMLLVESAQTVTRLDEGFRKQYLHRCHRMAKGVAKVAAARRLAVRLYWMLRTKTGYPEIVRIESSPTLAMVDES

SEQ ID NO: 444593 - protein, 344 aa, unidentified
MNSVQYYIGIDISNNDFAASIFTAPSAPVKTMTEIANEFSGFEQFESWLISNQVQTNNCIICLEATGVYGEALSYFIKAKGYPVAVEPPLKVKRAFSDKTHKNDKADSIHIAEYAYRYFDELRLWRPKANIIEQINVLLMTREQLIEQRTASSNTLTALRKKVVQTPLANSIYQKNIERLSAQIKKIEKELEKLINKHPDFQITVKALKTIPGVAMLLAANFLVATNGFENDLAVQYRKASAYIGICPYQHSSGTSVYKKPRIPKYGPARLRKLLHLASRSVVTHNANFSAYYQQKIAQGKVRKLILNNVSNKLLKIMCAVTRTRKPFVDNHVSIHPQFVLFNT

SEQ ID NO: 444594 - protein, 365 aa, unidentified
MQKISTMQASGSDNFKGPRVTIGLDLGDRSSNYCVLNATGDILLEDKLPTTSQAMRQLFGRMLRSRIAMETSTHSPWVSRLLTELGHEVIVAHAQKVGLIVKSRRKDDRLDARTLARLARIDPQLLSPVRHRSAQAQIHLTEIRARAELVRARTALVNSARGLAKSYGERLRKCGTQQVGRELAMGLSAELRAALEPLLREVESLNEHIKEYDRRIEKMQETYPQVELLKQVKGVGDLIALGYVLTIEDPHRFKKSRDVGCFLGLQPGRRNSGESEPQMHITKEGDRYLRTLLVQGAHYILGPFGEDCDLRRWGRKLAERGGKKAKRRAVVAVARKLAVLLHRLWVSGEVYEPLRNSQKVARAAA

SEQ ID NO: 444595 - protein, 365 aa, unidentified
MNNNDTESSELSSHEETRFEFNRSTGAIKLGIDVHQDYYVVVKQEGGANPKPAQRFRKEAFVHWAAKLKSQGGEISAVYEACGFGFSLQRQLCALGIRSYVVCPQKLDERNKRVKTDGLDAKALCLKLDRFAQGNRDALALVRVPTEAEEQKRAIHRQREQLVKTRKRLEAQGRSLMVNHGMQPLSNWWKGRTFAQLQVPEWMKELLQNSQPILLALEEKIRALTVQLQGAAISKQPRGLGLLSSVVMDREVGNWDRFKNRRQVGSYTGLCPGEYSSGNTRLQSCVTKHGNPRLRAALVETAWRLVRFQPNYRAVKKWRHLLAKGALATGAARKKAIVAVARQLAVDLWRIRTGRVSIETLGLIN

SEQ ID NO: 444596 - protein, 398 aa, unidentified
MEVMDAAGRRLSAAKLPEGIAGMARFHAMIAAQLDPDADLDAQAGQVLIGIETDRGPWVQALIAAGYRVYAVNPLQAARYRERLGVSGAKSDPADAHLLADMVRTDSHQLRVVAGDSHLAEAVKVVTRAHKTLIWERTRHTLRLRSTLREYFPAALAAFEDLTDADTLELLAKAPDPASAARLTTTQIMAALKRARRHHRDRRAGEIQAALRTEQLGQPAVVARAYAVAVRAQVAILGVLNEQINLLQEQVEAHFGQHPDAEIYTSQPGLGQILGARVLAEFGDDPTRYGDTRARKNYAGTSPITRQSGKKKVVLARYVHNDRLLDALGGQAFAALTRSPGARAYYDKQRDRGLGHRAALRQLANRLVGVLHGCLKTGTRYDEATAWSHAQQDQQVAA

SEQ ID NO: 444597 - protein, 366 aa, unidentified
MKKISTMAKRGNEIFEEPKLTIGLDLGDRTSHYCILDEAGNVILEHSLPTTPKGIHQVFCRIPRSRIALETGTHSPWVSRQLTQLGHEVIVAHARNVRLIGESSRKDDRLDARTLARLARIDPGLLGPVRHRSAKAQIHLTVIRARAGLVSARTALVNRARGLTKSYGERLRKCGSGQVNRETAKELSQELRDALDPLLGEIESLNERIAEYDRRIEQIAKEVYPEVALLKQVKGVGTLIALTYVLTLDDPHRFRRSRDTGCFLGLRPGRRNSGMSEPQMHISKEGDGYLRTLMVQGAHYILGPFGEDSDLRRWGLKLAERGGKNAKKRAVVAVARKLAVLLHKLWVSGEVYEPLRNNHKVVSAVA

SEQ ID NO: 444598 - protein, 329 aa, unidentified
MVTASSLPVVGLDVSKATLAVCYQVNELVKHLEVSNNKAGFQQLVKACGAHCRFVMAATGTYNLALAYYLHEQGGEVAVLNPLVIKRFIQMHLSKGKSDRKDAQWLLRYGQQQPVKAWQPDETVLVECRQLEQVNEQLLKQKTLVSNSLEALQRQPVSSKLALKRLQQLLKTLTQQVALVEAELLTLLEQRFAAQMTLLCSIPGIGRKTAGMLLLFAGGFTHLDNYRQLIALAGLSPREHTSGTSIRGKVRITKMGGGLIRGKLFMGSFSAKKTNVACAALFDRLVAKGKNKKLALIAVCNKLLKQAFAIVKSGVPYQADFNSKLAPTS

SEQ ID NO: 444599 - protein, 323 aa, unidentified
MNKYNEIFGVDISKDVFDVYGSKSGHNQFKNAASGFMFFLKNLPKKSLVVMEATGYYHYRLAQFLFKQGVLVSVVNPLSVKRFIQMKLAKVKTDKSDAKAICEYGQINQVPLYSALSDVQSECLQLFRLLDSYLKKRTMTKNKLHGEDVLGIPSKHVYRSLKRNRKHLDTEIASIETKLLSLVKQDQQAQLTLLKSIPGLGVKTALYLIVITDGFTKFETAAQLCSYVGITPTIRQSGSSVRGRSRISKVGNKKLRNLLFLCSFSACKHNKSCREIYERIVNKGKSKKLALIAVSNKLLKQAFAIAKSGNPYDEKFVSVLMAK

SEQ ID NO: 444600 - protein, 341 aa, unidentified
MEKVSIIGLDLAKNMFQAHGACTDGSVGFRKKLSRDKVLMFFAAQSRCVVAMEACASSHFWAREIGKIGHEVKMIPPIYVKPFVKRQKNDTADSEAIAEAASRPTMRFVAVKSEEKQALGMAFRVRDLFVRQRTQAINALRGHLAEYGVIAPQGIAHLGRLIRVVVDPDNGMQGSVVALANMMLDQIKGLQERIDILEKEIRTRSKRDDVASRLMTVPGIGPICATAMEAFAPPAETFSKGRDFAAWVGLTPRQHSSGGKERLGNTSKMGQRDLRRLLIIGAMAVVRWAVRKGAPEGSWLARMLLRKPRMLVAVALANKMARIAWALMAKGGIYRNPAAVV

SEQ ID NO: 444601 - protein, 342 aa, unidentified
MYYIGLDVHKKTISYCIKDASGQVHREGTIGATGNELDRWMKTLPQPWTVAMEATIFTGWIYDHLLPHAAQVKVAHPLMLRAIAAAKKKNDRIDAGKIADCLRCDFLPECHMASTEIRDRRRTLRYRHLLVRQMAQRKNRVSGLLLETGVSHNKQRLHKVGYFRDLLSTNEDISESIRPLLRLSRETIVRLQKTDYGVVSSLQRDPLLAERIKRLRTIPGVGPITALTWALEIGDVSRFRSIKQAISYCGLCGDEKSSAEKVMRTPISKQRNKHIQRTLVEAAKLAPSQNHELAVVYEKEKQKGHANRATLAVARKMVAWLLAVDRRQRDFVPSEDRKNAAA

SEQ ID NO: 444602 - protein, 445 aa, unidentified
MSLTDFGLMEWRGLMTRLATDEFVAFIGLDWADAKHDICLQVAGSDKREVKVLEHKPEVIEAWATALLQRFGGGPIAIALELNKGPIVEALRKYDGFVLFHINPMMLAKYREAFTPSQAKDDPSDAELQLELLLWHRDKLTPLAPQSPEMRALAQLVEHRRRLVADRVRITNRLTSTLKTYFPQVLPWCPTKDSMLFCDFLGQWPTLKAVQLARRSTLERFFRHHHVHGEQRINERLDAIKSAVPLTTDEGVIASNALMVQALMAQLRVILEAIERFDQAIAERAQSHPDYALFEALPGAGPALAPRLLVAFGEQRERYGSAQEMQKYAGIAPVLERSGKQSWVHWRRQCPKFLRQTFVEWASVSIRFSFWARAYYEHQRDKGATHQAAVRSLAFKWIRIVFRCWQSGTPYDESVYLAALQRRGSSLISNLAQSSKKGEKEAKKP

SEQ ID NO: 444603 - protein, 482 aa, unidentified
MKSRPPEKAKKATDHSTRGHWNEMNRKQRREMMRKIQSQDLSLEVVHPDAAGIDIGNEFHYVAVPPTRDNQPVQRFGCTTVELKAMAHWLKQCRIHTVAMQSTGVYWIAVFDILEQAGFEVYLVNARDTKNLPGRKSDVQESQWLMKLHTYGLLRNSFLPSQEIRTMRTYWRQRNDLVQAAASHIQRMQKVLTQMNIQLANVLSDISGVTGQAIIRAILAGQRDPHKLAELRDPRVRASEEQIARYLEGNWQEDLLFVLKQEQQGYEFCQEQMAACDRQLEQYLQQRADRSQGTPLPKEMRKGRLLKKKGNKPQFALRAELFRMTGTDLTQIDGLDVMTAMTILSEAGWDMSKWADENHFVSWLRLCPDNRISGNKIIGKGRLLTNNRASIALRMAASTLRMSNTYLGAQFRRFRTKLGSPIAIKAMAAKLARLVYRMLRYGMKYVDQGAQFYDAQHRKLQITQLKWKAAKLGFRVVEAPAA

SEQ ID NO: 444604 - protein, 318 aa, unidentified
MKKAFFCGVDVSKDKIDVCFLTSVASEKAKFETLPNNYDLIKVYFNSFKNDEILVVFEATSNYHLALQKALSDLNIRYNVTNPYKASLFLKHLSTIKTDVNDSYGLAVYARTFKSEILPDKYNAEYLQIKSYNSTLNLLQKLNTQLKNFKQSQKLVKNSVVDEVIENLIKEIAKLQSMLQKLAFDLVKKTIPETEEIIKSNKGFGIDLALNLFPQLHFNRDKSEKQFVSFLGLSPRIFQSGSSVHRNQKINKMGSSNIRRILFMSALCAIRFNEKFKARYDRLIANGKKKMVAIVAVMCAIVRYLKSLFPFNAEIKAI

SEQ ID NO: 444605 - protein, 415 aa, unidentified
MEVLHERCAGLDVHKTTVVCCVRLARGGRVEKEVKTFKTTTGELLALADWLDGHGVNHVVMEATGVYWKPVWHILDDGERQLVLANATHVKNVPGRKSDVSDCDWLSDLEAHGLIRASFVPDNQTQELRGLLRTRKQLVRERTSHTLRLQKTLEDANLKLDSVISNVVGVSGRRMIEALVAGESDPATLASLADRRIKAPPEVLCEALRGRVTRHHRFLLGLHLGHIDAIDQAIDSIDQEVEASLQPFCAAIGLLKTIPGVSQLAAESIIAEIGSDMSRFPTCGHLISWAGLCPRSDESAGKRRSTRIRKGNPWLKTVLVQSAWAAVKTKATYPNAQFLSIRSRRGTRKAIVAVAASILTAAYHMLKTTTPYRDLGPQHFDNQNKEAQARKILTRLRRLGFVADFDSLRPAPVSC

SEQ ID NO: 444606 - protein, 386 aa, unidentified
MKPSNPSIATRGAENTAVIFVSIELSKKSWLTAIHTPLADKIGLHKVAAGSGTELLALIRRVMKKVERTMKGPVKVLSCYEAGYDGFWLHRILAEAGIINYVIDPASLQVNRRARRAKTDRIDALGMVRALMAFERGEEQVFSVVRVPSVEGEDARRVHRERERLIKERIQHVNRIKGLLATQGIYDYEPMRRHRRERFEALTTAMETLIPRHLRDEITRHLQRLELVLAMIRAVEAQRDAVVEAEPAANEDGRKIQHLVRLKAIGPQFATVLVGEVFHKKFANRRQVASYAGLTPSPFNSGSLVREQGISKAGNPRARTTMIEMAWLWLRYQPHSALSRWFHERVGTGTGRIRRITIVAVARKLLIALWRYVETGLLPDGAELKA

SEQ ID NO: 444607 - protein, 425 aa, unidentified
MHLTAISPTSMPPATIACDVSSDKLNLFCRELSSPGSIAAWEIANRTEAITSTLNAIHEQATARGIAALRVIVEPTGVYHKLLLRIAVSLGFQTALVDASHVKKMRSVIFGDSGKTDERDPRAIEAVAAQGRLIPDRRHAEVYQLLRQWGKLHHEAEVAMIDAKSRVHRALTLLFPDFDFTTDFLYGPSGQAIVRCVGLDPHLIAEQSESRMYERLRKHSKIRRSSVTRLLTQARQTIVAVTKSRVSDLLARELAYAWEDVEFAIRRRETARTELQALYDEARTTDPRLPDTAGSAISKVAFARFLGEAGPLSGYASWRQLLRMGGVNLRERKSGKYVGKTMIARTGRALFRSIINQMALPLVKRDRLYGTYYHHKTGVQKMPGKKAMTAVSRKIVKMIWGWYRSGAAFDATRVFTCQGEHQRAA

SEQ ID NO: 444608 - protein, 354 aa, unidentified
MSEKLNSAIAVIGIDIGKNSFHVVGHDRRGAIVLRQKWSRGQVETRLANLLPCLIGMEACVGAHHLSRKLQLLGHDARLMPAKYVRPYSKGQKNDFRDAEAIAEAVQRPTMKFVATKTADQLDLQALHRVRERLVRQRTGIINQIRAFLLERGIAVRQGVRFLRGELAKILATCTDTLSPRMVRVIEELAGDWRRLDERIEGLSTEIAALADRDTACKRLMTVPGVGPIISSAMVAAIGTGDVFCKGRDFAAWLGLVPKQISTGDRTILGNISKRGNRYLRVLFVQAAWVVLIRPKSWERYGLKPWIEAAKRRLHHNVLAIALANKLARIAWAVLNKERNFECTARNATTPRPA

SEQ ID NO: 444609 - protein, 362 aa, unidentified
MSKSTTIIAFDHHAATTVAAVLLLGQRTPALHILASANATILRFVERVRRQGPVTCCYEAGPCGFELQRALTTHRVPCDVIAPALIPRRPGDRVKTDRRDAGQLAILYRAGALTAINIPTEQEEAARDLLRCREDIRADLLRARHRLSKFLLRHGRRFTATKKAWTKRHAAWLQAQRWPLPALEQTHRAYVRAVDEAVERLRAVDTDLRDLLSLEPLKPRVERLRCFRGIDDLTALTIAAELGDPRRFPSAPSLMGFVGLVPSEHSSGTKQARGAITKTGNAHIRRVLVESAWHYRHHPFRGRALQMRQRGAPAAVVQQAWTAQHRLHRRYRRLAARGKPKQLIVTAVARELTGFLWAALTQ

SEQ ID NO: 444610 - protein, 406 aa, unidentified
MSVYMGIDWSTKKHDIVLLNEAGAIIARQTIPHQAEGFEKLDKMRRELGVPIGECLIGMETAHNILIDFLWGQGYERVYVIPPSVVKSSRGRYGSSGARSDQRDARLLADILRTDCARLQRWRPDSLLTQQIRAKASLIHHLTQSVQRTRQRLRAILVRYYPGALGMFGSLTAQITLHFLRQYPNPQAMSQLSYGQFKDFARAHGYQRRWWPRQYARMQETYPVASETTVQVYQEEMELLAQQLLELVQTRLTQKRALTQLFKQHPDQAIFASLPGAGEILAPALLAKFGDDRERFPDPQSVQALAGTCPVTAASGKRRVVKFRRACDKEFRHIAHQWARASLGKSVWANAYWEQVRARVGYNNDAYRRLANRWLAIAWRLWKSSQIYDEAYHLQQRAQRSKPQVR

SEQ ID NO: 444611 - protein, 353 aa, unidentified
MDTIYIGVDFHARQQTICYLTTAGGEVVTHQLKHQDKEQVRAFYGQFGGRVIVGLEASGYSPWFEALLEELGCEVWLGDATEIRRRARWRQKNDRRDAELILDLLVHDEFPRLHRPSPQSREILRMLRYRQKLIKIRTMGKNSLQALALQSGLAKRSHLFTKTGQQELRTATMSPAMQWQREQWFQLLAPLNERLVETMLWLKHQSKDDARISLLRTHPGIGLLTSLCVVHSLAPVSRFRNQRKVAAYAGLEPMERSSAERKHFLGISKAGSRVLRYLLVEAAHTAVKKDDDLKRFYQRLVERRGRPKAKVAAARKLLIRSYIMLRDEIDYAEFRRRAVAARLARQSSRPPCL

SEQ ID NO: 444612 - protein, 397 aa, unidentified
MYIVGIDIAKRKHEAAVIDGEGTVIIKPFSFTNNCSGYNRLLAMLTKAKLPLDEVSFAMEATGHYWLALFTRLQKEGFRVQVINPVQTNSIRSFYIRQAKTDPRDALLIAEVIRFGHFSESTLHPENIYELRELCRGRHAIVSMQADVKRKVVALLDQVFPEYETAFTNMFSDTSMAILQTCPTPKELSEMPLEELCHLIEVSSHKRFRMAKAQELQELARNSFGFAMAGDVFSTMIRLYAKHLDFLKQQVQEMDRKIAEIMDTLDTPITTITGIGPTLGAYILSEIGDINRFSSAAKLAAYAGIDPTMRQSGEYNGVRNRMSKRGSPYLRHAIWLAASSAVLHDPALKLYFQKKRDEGKPYMASVGHACRKMVSIIYAVMRDNKAYTPCIPNEISA

SEQ ID NO: 444613 - protein, 324 aa, unidentified
MLTRNKGIGIDVSKAELVLWDSISEQLIKIANTGKGMKQLRKYLFKINPDIVTIEATGKYHRLAARTCQECSVPFIVAQPYRVRQFALGLGIIAKTDPVDARVVCQFGLKSDLNVSTLESKEHEALRDLVVHRMQLAEDKAKFQARHTEASSKDIKVFCAQSLTFIEKQLKIVQKKIVQEIKKFADLQPRFQLLQSIKGIGEITAAVLVLLLPELGKLSKSQIASLVGVAPFDDQSGKSDKQKSIFGGRTRVRSALHMAVMSAVRYDPFLSHFYKKLKENKKKTRVATTACIRKIVVIANQIIKSGVPYDPSIPLALSLRAKKA

SEQ ID NO: 444614 - protein, 411 aa, unidentified
MDTLYPCCAGLDIHKETVVACIRKVSGGTVRKEVRTFRTETSGLLALADWLTDEGVTHAAMESTGVYWKPVWNILEGVLELLLVNAEHIKQVPGRKTDVKDAEWIAQLLACGLLKASFVPERPVRDLRDLTRQRVQLVRQKVQVANRIQKTLEDANIKLASVASDVLGKSGRDMLRAIVRGESDPVVLAELARQRLRAKIPQLQEALLGEVTAHHRFLLGMLLEQVEFLETQIARLGQRIAEVLPAPFAEAVARLETIPGIDRRAAQNIVAEIGADLKPFKSVGHLASWVGICPGNHESAGKRRSGRTTKGNAWLRVTLVQCAWAASHTKDTYLAAQYKRLAARRGKKRALVAVGHTLLGIVYAVLKKRGTYQELGADYLDRQDREKLTARLLKRLEKLGVKVTVEAGAVA

SEQ ID NO: 444615 - protein, 460 aa, unidentified
MPSKNGTRKSKSSVGEEMQVVHPNTAGVDIGSREHWACAAAADGSRPIKRFGTTTRQLVALADWLDELGVKSVAMESTYVYWIPLYELLESRGFDVILANAREVKNVPGRAKTDVSDCAWLQKLHTFGLIRSSFRPPKNICAMRTLQRHAASLIEQRVRDTQLLQRSLDQMNIQIHRAVTDITGKTGMSIIHAIIDGERDPRELAKLRDPRCKVTEQELAEHLEGTWIEEHLFTLASGVRSLEHTESEIEQVESRIMEMIKALQPEEAKAVEAPKHPTASKERSIQTKGGKELRDALWRFTGCDLTRIDGISPSTAMIVLTEVGYDLSAFPSEKHFVSWLRLCPRHAVSGGKRLRKQRSNLAVNRIAIVLRMAALSLQRTKTGLGAHFRKVARARDGKIAIVATARKLALLIYRMLKFGQAYVDEGAKAYEARQAERRIFGLHQSAKSLGYKLIPVEEVS

SEQ ID NO: 444616 - protein, 367 aa, unidentified
MQTVADRPEAPTAIRTDLGAIFVSLELSRSTWLITSLWPGGGEKMSKQVVRGGDVAELLERFARLREKARARTGKVFPFVVIQEAGLDGFWIDRALQNEGIESHVVDPASIATSRRRRRAKTDGIDGEVLVRALLAYKRGEPRVCAMIKAPTPEEEDRRRLCRERKVLIVERVRHVNRVKGLLFSQGISGYEPLRRDRRRRLDTLQTGDGRLLPVHLKAQVCRELDRLELLLEQIKAVEAERDVLLAAQQVAAPAPAAMLLDIKGIGPEFAAILWSEGLFRHFDNRRQVASYAGLAPTPWQSGSVDREQGVSKTGNPRLRTTLIQLAWLWLRHQPQSALTLWFEERVRRNGAVLRRRQSWRWRASCW

SEQ ID NO: 444617 - protein, 385 aa, unidentified
MIKYSVGIDVSKDSLHCCIAVIDQLQKVTFKSSRKFPNNNAGFNELLVWVDKHQKQKQLPVVFAMEATGVYYERLALHLFTAGCSLSVLLPNKAKKYLQATGLKSKNDKIDAKGLARMGAEQSLELWQPMGLYFYQLRDLTRQYQSLQEYKTALTNQLHALSYAMFETRLVKKQLMSQIKLFDKQIQELVIAIRKHLQENEQVSKRVNGICKIKGLGPLTVAVVLAETNGFALFDNSRQLVSYSGYDVVENQSGKYKGKTRISKKGNSRIRRALHMPAFNMITYSQAPFVSLYERTLAKHGQKMKSYVAVQKKLLVLIYSLWKSNQDYDPDHGDKHTKEKEQVSSSLPAPKEPSPENENSATKGATQGRHTSEISQSASSLQKQN

SEQ ID NO: 444618 - protein, 483 aa, unidentified
MTDQQRPVIGGVDTHKDIHVAAVVDDVGRILTTAGFPATAAGYRRLVSWMRNLGQLQRVGVEGTGAYGAGLARHLAAEDIEVVEINRPNRQARRRRGKSDTADAEAAARAALNGEATGAPKSQAGIVESIRALRVAFTSMRDTRTRISNQIRDLVVTAPEQLRRILGPLDTDDRVERCAGFRPGELVDPLEATKAALRALARQHQGLTIELDALRAQLDILTATANPALRAATGVGVDVASILLIAAGDNPERLSGDAAFAALCGASPVEASSGKTVRHRLNQGGNRQANHALWRIAMVRMTCDPRTRAYAERRRAEGKTIREIVRCLKRYIAREVFVLLTNPKPVIAGADLRTARNAAGISLATVADPRGLPGSLSSNVASGTTPTSRRATRCGSMPDKPLDSDRSISPSVVPAFVHCTAARVRGSVQTLEGPTPRAVRRYTNRSPDQVSSMAQTLLSTRTSLRIRRCPGFMPSFFWSGVPE

SEQ ID NO: 444619 - protein, 308 aa, unidentified
MIVQNYVGCDISKQWLDFFDETSGRLRRIDNQTDAIAAYVAGLDPSRDFVVMEATGVHDRLLRHALAKAGVPFSRHNPAHTHHYAKSTRRRAKTDPLDARMLSDYGRRYQPEAEPAPCEQNERLQSLAGHRDQLVDMRARLKKHLAEAFEAIVIASLEDMIADFDRRIHALESQIAEVIRQAQHTARDYSLMVSVPGVSKVSALSLLAHLPELGQRSPKSIAALAGLAPFDNKSGKLSRRSQIQGGRSRVRRALYMAALTAIRTCDRFKAFYTDLAARSGSKKLAIIAVARKLLVVLNAIIRDKTAFA

SEQ ID NO: 444620 - protein, 348 aa, unidentified
MYYAGIDYHKRCSFVSIQDEAGKIVLERQVPHNNPLMFEEIIREVGGPVAVVYEAGLNWTWLYEVLEKIGDVKSITLANAYKVRLIAEAQIKTDKIDARKFALLLRLGVVPACHIPNRQTRDRKEVLRQRAYWVRQRTGLRNRVHRLIGRQHGLQMPQVSDIFGKKGKEALHKAVLPDPDGMLLKQDLAVLEQLDAVIKADEEKIKAESKPDRAVEIFTSIPGVGLIIASITAAETDGIGRFPSAERYTGYSGLSPTTHSSGGHTYNGRMMWMCNKWLKWAFIEAAWVAVGCSAYFGGLYRYHRRRGKKANTAITIVARRMCRIAYQLLKENRFYEERTFSPVALVKV

SEQ ID NO: 444621 - protein, 347 aa, unidentified
MQNDTLVAVDIAKEVFEVGVSDRPGHVAARRRLARYEFLEFFAQLQQATVVMEACGSAHYWARRIEELGHVVVLLPPQYVRPYVVRNKTDRTDVNGLLEAFRNEQIRPVPIKTVTQQVFGTLHRLRSGWLADRTRAINSLRGLLRELGFFIPEGRKHVLPDAWEIIQDPKHGLPDALKPSLSSLCQEILSHSTRIEEIEAQLEALAKQVPVVARLRSVPGIGLLTATALYAFIGDVARFPSGRHMASFLGLTPREYSSGLRRRLGRISKRGDTYLRMLLIHGARSILWHSKRMKNRDRLRAWALRLERKLGHNKAAVALANKLVRITWAVWKHDRSFEPVPELQEAA

SEQ ID NO: 444622 - protein, 430 aa, unidentified
MKSNTQNAKIEAITENTLVLGIDIGSETHYARAFDYRGIEYSKKPFKFSNTEAGFMSFKAWIQDMKEMHEKDKVVPGMEPTGHYWFNLGKFLQDNEMRPVLVNPHHVKKSKELDDNHPTKNDRKDPKVIAGLVREGRYMIPYLPEGVYADLRTASNIRFQLQAELTRIQNRISRWFNIYFPEYKTVYGKPDAKSGMMILKVAPLPEDILTLGIDGVNQIWRDAKMRAVGKARAKTLMEAAEHSVGSKEGAVSARMEIRMLLEDYESRNVRLQEVMALIEELVKQIPMAEKLLEIKGVGIKTVSGFLAEVGDISRFNNPKELQKLAGLALVENSSGKHKGETRISRRGRKRLRYLLFEVAMSLVSKNAEFKELHIYYTIRRINPLKKMQSLMAVAAKALRIFYAILTKGVAYDPKKMINDIKRPKIYLQAA

SEQ ID NO: 444623 - protein, 393 aa, unidentified
MVCVGIDVAKDKHDCFILNSEGEVLADVFTIANNRDGFDTLLQRIQSCAHPSDKIKVGLEATGHYSYNILGFLLDNGLDTYVINPLLTNLFRKSTSLRRTKTDRIDARTIATMLMSDVDLKSYTDTAYHNEELKSLTRYRFDKVSERAKLKTSVSRLVNILFPELETLVPTLHMASVYAILSEFPSAKQIADSHLTHFKTVLSDASKGRYDREKAVEIREAAKHSIGSAMPAKSLELQHTIRLIRELDKEIEEIEAAIKAIIDEMAPPILTIPGISYRMGAMILAEIGDFSRFDSPDKLLAYAGLSPSTYQSGKFNANGAYAHMEKRGSRYLRYALFNAAKYVCIWEPSFAVYLAKKRAEGKHYNIAISHAAKKLVRLIYALQTSGKAFQSAA

SEQ ID NO: 444624 - protein, 338 aa, unidentified
MKAYVGIDLHSTNSVIGIIDEDNNKLFIKKLPNKLEQILLVLEEFKKIIIGIVVESTYNWYWLVDGLLENNYKVHLANPNGNVQYNGLKHSDDKKDSLWLANLLRLKILKEGYIYPKQDRPVRDLLRRRIMFVQQRTSQILSFQSTITRNLGIKKSSNDIKKWKPEEAVNLFDDQYLIITAKCNLEMINNLTTQIRIMEKEIKGVAKLRKEFEYLLTITGIGNILALTIMLEVGDISRFKKVGHYSSYCRCVSSIRTSNDKKKGEGNRKNGNKYLSWAYVEAANFSKRYCKEAERFYQRKKSKTNQIVATKALANKLARASYYIMRDKVPYDPKKLFK

SEQ ID NO: 444625 - protein, 464 aa, unidentified
MAMTLGVDVACRAAHQATLAVDGVPVWRGRKFFTHPDELDRLWEDLAVLVPADLTVVLEPTRNAWVVLAQWFRRRGAKVVMVPTTQSADLRAYYSKHAKNDRLDSEILAKLPLLHPEGLREFVGDSSADPLRRLTKQRSTMVKRRTAVYSRIDALVELLGPAWYAVLGSDYGKAALAFLARYADPNAVLRLGEARLARFLQARSRGQYGPEPARALVAAARESLALWGPGGMDFAELGADIAAEAEQAIFLTGQIKEIDERIANLYADADPDRIVASAPGVGPVTSAVIAGRIGDPHRFTSLAAIRAYSGLVPKVSQSGVGETHGGITKAGDPLLREMLFLAADHARLVDPQLAAKYVRLMAGDRHRDSALCHLAADLLTRIAACMRSGQPYVIRDVDGREITAAEGKAIVKTQHKVDPTKRDAAAHRRMNRRRRHGTDRESQKSPSAPTSRPAKIRIKPAAVA

SEQ ID NO: 444626 - protein, 351 aa, unidentified
MMIIGVDYHPSFQTIAFLIEETGEYEERELNHSDGEAERFYRDLHKRGIRVRVGMEATGFSRWFERLLAELDFELWIGDPAEIKAKRVKKQKYDREDARLLLRLLRENNFPKIWVPTPENRDQRQLLWHRHRLVQMRTRIMNQLQALAMNEGKRWKKKLWSAAGRAELEKLPLAPWASRRRKELLELLDRLAPSIEELTAAVEREARKRPEVLRLMTHPGVGALTALAYVLIIGTTERFQRGKQIGTYVGMIPTEDSSARKQRLGHISKQGNSLLRFLLVEAAQAAARTNPEWRRRYIHLAMRRHKSIAKVAMGRRLAIQLYWMWRNGCEYSSSLEFGSYAGQLGTGHGVQ

SEQ ID NO: 444627 - protein, 347 aa, unidentified
MRFYTQQHRHYCGIDLHARTMYVRIINQDGTILVEKNIPARPSPFLELIAPYRDDLVVAVECMFTWYWLADLCHEEGISFVLGHALYMKAIHGGKAKNDRIDAGKIAALLRGGMIPRAYVYPREMRATRDLLRRRLHLVRHRGRLLAHIQNTNHQCNHDAFAAKLTYKANREGVAERFEDPSMRKSVEVDLALIGHYDGIIRDLELFIIRMAKQHDADMFHRLRSITGVGKILALTILYEVHNISRFETVQQFASYSRLVKCSRESAGKRMGTGGAKIGNVHLKWAFSEAAVLYLRANPKGQKYLARLTGKHGKGKALSILAHKLGRATYYVMTRSRNFDGKKFLAA

SEQ ID NO: 444628 - protein, 410 aa, unidentified
MEIILRCCAGLDVHKDSVEACVRRLSAGGRVEHEVRHWGTTTRELVEMAEWLSSSGVTHVAMESTGVYWKPIFNILEAQFEILLVNAHHMKNVPGRKTDIKDCQWIAQLLQHGLLKGSFIPPRPQRELRDLTRQRTQLVDEASRISNRIQKVLEDANIKLGSVASNVVGASGRLMLEAIIAGQDDPVQLADLAKRRLRAKIPQLEQALYGKLTEHHRWLLRLLLDQFETSERFITRLDERIAELTRPLQPVLEKLDAIPGVDRRVAEVLMAEIGPDMTPFPSDAHLASWAGISPGNNESAGKKRNGKTTKGSRWLRQALVQAAWAASHKKDSYFQAHARNLMHRRGRKRGLVAVAHSLLTVIYHMLKGGTAYRDLGAQFLDRIRAAQLVRFHVRRLQNLGLQVTLSPEVA

SEQ ID NO: 444629 - protein, 359 aa, unidentified
MQAKVRTINFEGQNIFIGIDVHSKNWTITVMTENSLRKRFSQDPSSEGLRNYLDRNFPGGTYYSAYEAGFCGFSVHRELEGCGIHNLVVNPADIPTTDKERKQKEDRRDSQKIARSLKNGELAGIYVPTRAMEELRSLIRYRKTLVKEISRHKTRIKSYLHCNGVPVPAALSGASRHWSGKFTMWLETIRFTTPYGNMVLEGTLSTVKHLRSGLLKVDRELRKLEKEGECSFYIKLLRSIPGIGLIVAVTLLSELEDINRFKNLDQLCSFVGLVPRTNSSGENERTGGITPRANKPLRNLITEAAWIASRNDPALAQCYIELCKRMKPTKAIVRIAKKLLSRIRYVMKNEKEYVHSVVQ

SEQ ID NO: 444630 - protein, 348 aa, unidentified
MKNKSFVGIDISKNVIDVSIFREDTNIKMFPHEVFNNTRKGFGDMCSWLKKSRVVLSQALFGMEFTGCYSLDLEKFLTSKNYSFCMLSTRIVKHHPMGTIDKSDKNDSAKIADFLYRYDGTECAKPYKLPSKAMQQLKQLVNERKFLVEQRTNFMNRMQMFETKEDSAMYESYIKKLNHDIENIDQEECELMSKEEDVLDTFQNLLTIPGIGFVNATNIIAITRNFTAFDTARQYARYVGVAPCSHTSGTSVKWRARPSAHCNGQVKADLSMAALRAVEYDVEMQIFYNRKLGGRKDSDTKRKALNAVKFKLIRRMFAIGKQKRKWEVLNTSDDRKNLHIEKSKASEL

SEQ ID NO: 444631 - protein, 340 aa, unidentified
MKEAITTIGLDLGKKVFQVHGVDAAGGVRVRRSLRRSQLLGWFAKQEPCLVGMEACATAHYWGRELSRLGHEVRLIAPAYAKAYVRRNKNDAADAAAICEAVSRPGMRFVAIKTAAQQAAGGLHRVRDLLQKQRTMLINQLRGLMAEFGIVAAGGPQHVKDLLAVLADPADARVPELLRGPLLGLAQVLGDLERRVEALEGRIVAWGRGNATYRHLITVPGYGPILAGAFAALVVEPSTFRSGRDFSASLGLVPRQEGTGGKLRLGPISKRGNGYLRRLLVSGAMSVLNTKRACQDPWIARLLASKPRKLVAVALANKMARIGWAMMVRQEDFRPRSAVA

SEQ ID NO: 444632 - protein, 320 aa, unidentified
MTSRGAEKMKNDTIGVDVSKDHLEAHRLADGATRRFANNKGGHKALLKWLAETPLCRVVFEPTGPYHRAVERALGASGVPFVKVNPRQARRFAEATGKLAKTDRLDAAILARMGALLELEARPARSEVLLELRELYVAREALVKDRTAAKNRGKALTLSLLKRQNAQRLEQIDRQIATVEAAILQIVEADASLAARFDILTSIPGVSSITAFALLIAMPELGDLEAGQAANLAGLAPIARQSGRWTGRSFIRGGRADVRQALYMPALVAVRFNPDMKAKYAHLIQTGKPAKVALTAIMRKLVVLANALLKANRPWTPKTA

SEQ ID NO: 444633 - protein, 427 aa, unidentified
MNQAKNNQPNSTDYAAFLAMDWADQEHAWSLQVAGQDNKETGKLKQQPEVLGPWLAQLRERFGNRPVAVALEQSRGALIHALLSYDFLVIYPLHPTTVAKFREAFKSSGAKSDPLDTDQILEILTKHLKQLKPLRPDTEETRLLARLVEDRRKLVDLRTSHIQAAQACLKEYYPQALELCSGNLTSRLARDLIKKWPALEAFQQAKPSTIKRFFYGHNVRRPQAIERAVEISTRGAALTTDPAIVQSGGSLARTYLELIQTLQPRIKEYERRIEKLFETHPETALFTKLPGAGDALAPRLLSFFGTDRSRYRSANSAQSFCGIAPVTKSSGKSKVVYLRRACPKFARQTFHEFARLSVVKSQWARNYVDYYLGKGKSYHTTIRALAFKWIRILYRCWQSRTPYNEDRYMETLAKRGSIFATLHLKAS

SEQ ID NO: 444634 - protein, 387 aa, unidentified
MTKNKGRVVGLDVHPDSFAGAVVEGSDPAQARVLSTSTRVELERLERWALRHTSTEDRLVLEASGNAFAVAARLRTIGRKVEILDSHRAGKVGKVYCANDRVDAVKIARIYLSALSPIVWQPDEKTLERREVFSAYQAVVKESTRAKQQLRSMLNEHCVRLEKGFRLCHPNAIRRLVALREWTPARTMLLQQLHGTLVAARARRTLLRRHMAQEIVAEEALLRLTRLCGINLVTLYGVVAAVGDVRRFSHSKKLVAYLGLNPSVSQSGNFEGSGALKRHGRGALRALLIQSGKKLLEVNNPLQKWGLAVAARRGRNKAAVAVARKLCVALWHVLMGHTIGVLERLDTLETKLSKFATELGPVALAAFGYNNKAEFVEKKLYVLRSYP

SEQ ID NO: 444635 - protein, 316 aa, unidentified
MQAQQVFIGVDVAKDSLVSCIHGLAKPQVVANEERAIKGWLKTLAPQAVIGMESTGRYHQSLARLAHQAGLRVYVLNAKDVYFYAKALGARGKTDPGDARVIARYVAEHHAALHAWAPGTAAQLRVQELLQRRARVAVHRASLRQVLAGLEELAPDVLQLEQHFEQLLQHIDDEVQALVASETQLSQGSALLQTICGIGPQGAALLAALFNRIEFANADALVAYSGLDPRPCDSGTRSGRRRLSKRGSPSLRRQLYLAALAATRSKALGPTYRAIRGRGFKSTPAVVILARRLLRIAWAVWKSGQPFDAARLQLAP

SEQ ID NO: 444636 - protein, 368 aa, unidentified
MQDRILVGCDLHEKSLLLKIARGRDRADMRSWRNTPGDWDRMLADLRRRAGGAKVVFAYEASALGFGLYDYLTDAGVETYVLAPTKIAKSPRERRTKCDEKDAERLLDLLRGHVLAGNALPDVWVPDPQTRQDREVVRARLDLSVKATRVKAQVKMLLKRNGLRRPEGLGKGWTLGYRAWLRGLTGKKSALPFGARVALGSLVRQLADLEREIEELDREIKALSRSERYAETARRMTTEGGVGLFTAMVMLTELGDLSRFTGRKRLGAFLGLTPSSDETGEGADRKGHITHQGPWRVRRALCQMVWTLLRTDAAEKAYYDRLVAKNPKKKMIAVVACMRRLAVRLWHIGVEAQREAGVFAGRAVRRAG

SEQ ID NO: 444637 - protein, 390 aa, unidentified
MFYLGIDIGKFHHAAALLTDKGKVIATVPSFSNTHAGFEVLLTLITSHLPRAEELRIGMEATGPYWIPLAEWLKIHGWPPVVMNPIKTSSLRNYGVRGSKTDNIDSVLIANALRFEGDKPQPVSPKHSEELRHLTRLRADMVNDRTRVVLRVTSLLDRLFPELLSSFSKTISPSCLALLSQAPTPSRVLALGEERVSSLLSKASGGKLGVTRAREILNKAAVSIGVTSKALEEILPLLLEQIDLIDSQLKTLDHRISESYDQAGLYFTTIAGVGTLSAATILGEFGSVERFKQAKQMVAFAGVDPKLRDSGQHRGQVHISKRGSRYLRRALYLACQGVVRNDDYFNAIYQRHRDNGKSYKEAIIAVMNRFIHVIYAIWRDNRPYYPLTPV

SEQ ID NO: 444638 - protein, 358 aa, unidentified
MIVIGTDPHKQSFTFALVVAGTGELRSSETVPATTDGFLRARAWADRHADALEGRDEVVWAIEDCRHVSGRLERFLLACGARVVRVPPRLMAGARRGGRQRGKSDEIDAVAVARAALREGVDTLPSASLDPDALDLRLLLDHHDDLVRGRTGDQSRLRWHLHELECPIEVPTGGLDRKVWLSKLQRWLSRPERRDEVRVRVARTLVARIAGDTRQVAALIREIHERVDDYRPELLGIVGCGPLTAAKIVGETAGAERFGTDAQFARMAGVAPIPVSSGRTDRFRLDRGGNRQLNLALHRIAVNQGRRHPPAQEFLARKQAEGKSRMEALRCLKRHLARTVLNTLKTQDRTLDTAPALT

SEQ ID NO: 444639 - protein, 460 aa, unidentified
MFEIMLIREVDFIFNSQGLSFVNNILIFHFRKMVILTMNKDTLNTLFVGIDVSSKSNYVVAINFNGDSLLDFSVPNDLPGAELMLDRILSVLQDNNLSFVTIVIESTSVYSFHIANFLASNNSLFDFCSKVFVINPKTSSNFRKTYVDIDKTDPLDAFVLADMARCGRISQQPHKAPQLFALQRLTRQRFHLVKTISAEKAYMLTNIYLKYSSLCTSYKEDKPFSNLFGNTSSNLIVDFSPDDIVNMSEDDMINYILDKGKNRFSDPLKNVDLFKKIARDSYRLDQVAYDPINISISSSFNTINALQSNLKTIDKAIEKNIKGLCDNEYNILLSIPGIGPVFAAGILAEIGSIKFFKTNNELAKYAGLTWRKTQSGNFEADTTRMTKTGNKYLRYYFIEAIAHVKSQIPEYKQFYTPKYNEVTKTPHKRALALTARKFVRLVFGLLHHNQLYSDEKSVNS

SEQ ID NO: 444640 - protein, 316 aa, unidentified
MAKKVTEITLGVDVCKAELVIYDWDTEDTVTLENKDSTIEAWLEALYGPVRIAIEPTSSYHLAFVELAHALGYEVYLINPRQLAHYREAVDVRNKTDPLDAWLLARFLTHEADSLRPFKPQCANAQQLWSLLKRRATVIKARTQLRQSFAEIKLPIKAVFSEIQRVLDRIDQRIQALIRKLGWWAGYQRCLTIPGAGPLNAAALVTVFHRGAFAGADAFVAFIGMDIRVRESGKFKGKRKLSKRGEAELRRLLYCATQGARSYQPFDDFYQKQLDKGLPKIAAKVILARKIARIAFALMTNQQSFKKKEIVYSFSP

SEQ ID NO: 444641 - protein, 332 aa, unidentified
MIIIGCDYHPGFQQIAFVDTETGELQERRLEHREEAEKFYRDLGAQGASVRVGMEASGHARWFERWLSELRFELWIGDAAEIRTKRVRKQKTDRQDAQLILRLMLEDRFPQIWVPNWENRDLRQLLWHRHRMVQARTRIMNQLQAVALNEGLRCKKRLWRDAGREQLESFRLAPWASRRRCDLLELLDRLTPTIAELTQAIEQEVEKCPAAQRLQTHPGVGPLTALAFVLIIGRADRFQCGKQIASYLGLVPLEKSSGNQRRLGHITKQGNSLLRFLLVEAAQVTARSLPEWRSKYVHLTLRRGRKIAKVPWRGDWRFACTGCYARDGIMGS

SEQ ID NO: 444642 - protein, 463 aa, unidentified
MQTRPLEAVAGFASVSGSSAHLWVERRDEVPTRPAMPQGSGMQGATLAHVTTSTIDPTLTEAAATEVFAGIDWGGSFHQICLIDEDGKVLRQQRVPHNAAGFDELDRLLTCHRARLRVAIERAEGLLVEHLHLLGVEIFCVSPKISARARERYRMAAAKSDAFDAFVLADTLRHEHRHWRALTPPSPVLAELRAISRDRDRIVIAQQATENRLRAVLEAYHPAPLHLFSTLDRDITLDFITDYPTPEQAGRVGTARMDGFCRRHGYSGRTQPEVLVERLRPHLLSAGEGTVAGKAFSASLFTEQLRMLNTHLRAYDKRLDELLERHPDTPIFTSFPGVGPVVAATLISEMGEDRHRFPAPGALLAEAGLSPVTRASGRTRQVRFRYASNRRMRHMIDWWMFTAIREDDWTRQAYDHARARGQGKYRALRGLGSRWTRILWRCWTDHTRYDPAIHHRNPEPTTA

SEQ ID NO: 444643 - protein, 275 aa, unidentified
MNSVRYVGLDVHRDTISVAVLDESGRLIMQSVLATRAAAILDFIGGIRGTVQVTFEEGTHSAWLHDLLARRVSMLVVCNPRKNALLKSGSKSDAIDARKLAELLRAGMLSPVYHGESSGLEVQHLVRSYTMLTEDTTRVMGRLKAVFRCQAVACAGTKLYGKRHRESYLVELGTGGLRRRAECLYQELDALQALRREARRELILECRKHAAAKWLQSVPFLGPLRAAVLIGRVQTPHRFRTKRQFWSYCGLALETRDSGEYRVVNERWNAGKSQS

SEQ ID NO: 444644 - protein, 362 aa, unidentified
MTKNNRLGSGMTSKMTIGLDLGDRHSYFCTLDSAGENLESGRVQTTKSTLENRFRNCEAARVVIEAGTHSPWVSRLLADCGHEVLVANPRKLALITQNDSKDDPVDAELLARLGRVDPQLLSPIEHRGRQAQADLAVIRARDAVVAARTQLVNHVRGAVKSLGSRMASCSTRSFAKKAASQLPEDLRLALEPLLEVIAAMTQQINGYDRQIEDTCREKYPETELLRQVTGVGAVTSLTFVLTLENPHRFARSRSVGSFLGLRPGKDKSGAQDPELHITKGGDRLLRRLLVGSAQYILGPFGPDCDLRRWGLKLASRGRKSAKKRAVVAVARKLAVLLHRLWAGSEVYEPLHLAQPTALSVQA

SEQ ID NO: 444645 - protein, 369 aa, unidentified
MKKNNGSVSNNDQDQARVREGSKGRVKLGLDMHYRQVTVAMQEEDGVIKALGKMSHDGFSNWVEKKLKAGFELYSCYEAGASGYWLHRDLEGLGIKNFVVVPKPMGQDRRQKTDRRDSAELVDCLDRYLRGNRKALSTVAIPTAEQEQKRALIRYHRQIMADRSRYEARGKGLLCAQGIEVQGQWWQPQVWKELKTHGRFQAWMQTQLQGWRGKLLSAEQEQQKLRKQIEALAPALLPKGVGAYSAVALEYELKGLARFKTARALSSFTGLCPGIHSSDGRGKEGSINRCGNAAVRWNLVEMVWRLVKWQPNYQVVRQLGAGLVRSKRARKRLVVKAARQLAIDLGRLETGRVTAQELGLVMQPTSKAK

SEQ ID NO: 444646 - protein, 349 aa, unidentified
MSHKLNAGIAVIGIDIGKNSFHVVGLDRRVAIVLRQKWSRGQVETRLANLPPCLIGMEACVGAHHLSRKLTSLGHNARLMPAKYVRPYSKGQKNDFRDAEAIAEAVQRPTMKFVATKTAEQLDLQALHRVRERLVSQRTGIINQIRAFLLERGVAVRQGLRFLRAELPRILATPRDVLSSRMVRVLEGLADDWRRLDERIEGLSSEIEVLARRDAGCERLMSVPGIGPIISSAMVAAIGAGDAFSKGRDFAAWLGLVPKQISTGDRTILGKISKRGNRYLRVLFVQAAWAVLIKPTSWDRHGLKSWLEAAKKRLHHNVLAIALANKLARIAWSVLAHGRTFEASKMQAA

SEQ ID NO: 444647 - protein, 315 aa, unidentified
MTKPLCAVNVGVDVGKSQLDLYLLERDQALSIANDEPAIASLVRRLSRYRVERIVIEATGRLEQPFVRAALAAGLPVVVVSPLKIRRFADAIGQLAKTDAIDARLIARFAAAVKPVARPASNANAQAIKDLTVRRRQLVALRTMEKNRRQVMPQELKSGIDRIIKTLDQELKRLEQLIDHAVDQHAPSRHKRELLTSMPGIGNSVAATLIGDLPELGSLNRREIASLTGVAPFNRDSGKLRGKRRIRGGRAHSRTALYLSAMVATRFNPDIKRFYERLVSAGKHKKVALTACIRKIVTALNAMLRDNSPWQPAMT

SEQ ID NO: 444648 - protein, 402 aa, unidentified
MNCVGIDVSKGKSMIAVMRPFGEVVISPFEVLHTANELSELAGLLKSLDGETRVVMESTGNYHAPVAWLLHDAGLYVSVVNAMLVHDYGNNSLRRAKTDKKDAVKLANYGLDHWLTLPRYIPEEDTRLMLKICYRQYQQYSKVQTMLKNNLISLLDTTFPDANRLFTSPPRADGSEKWVDFVAAFWHCECVCGLSEKAFTAKYQKWCRKHGYNFSKDKALDIYASACRHFGVIPKTDTAKLLVEQAISQLQTTSSALAALKQEMQSLAASLPEYPVVMGMFGVGPTLGPQLLAEIGDVRRFHSKKALVAFAGIDAPPYQSGQMDVRSRSISKRGSASLRRTLFLVMGVLLQCAPMDEPVYQFMNKKRSEGKPYRVYMMASANKFLRIYYASVKAYLESLEHD

SEQ ID NO: 444649 - protein, 358 aa, unidentified
MADQSKLSHVISGVDTHKDLHVAAIVDHQDRVLGTESFATTRQGYRLMLAWMRTFGDVQRVGIECSGSYGAGLLRYLQNAGIEVLEVTGPDKHDRRRRGKNDDFDAESAAHAAFAKRQTVTPRSRDGMVESLRVLRACRKSAVQARRVALQMIQMSIVCAPDKLREPLRNMTRMQLIRTLAAWRPDLTAYREVEEAYRISLKSLARRYLELHDEVADLDDMIGAIVKDLAPELLEQTAIGLNSAAQLLLTAGDNPERLRSEASFAALCGVSPVPASSGKTVRHQLNRGGDRAANSAIHIIAIGRLRLDPRTQTYVAKRIAAGNSKLEAIRSLKRYIAREVFGIIMRRQKQINQAQIAA

SEQ ID NO: 444650 - protein, 393 aa, unidentified
MHSVGIDIGKHQHVAAICRDGQRTADKPVLRFGADRAGLADLQRWLARNGPVERVVMESSGHYWLPLAAALHRASVPVAIVNPVSAKAFGTRRLQRVKSDPADARTLAALGMADQPRIREPLAGAELREAARFAMHLVEDQSRIDNKICRLIELGFPELGQAYDDPTCTSALAVLRLAPTAQAVARKRVTTLADANRGAGHRAVGTTQAERISALAKDTIAPPELAAQIGFEMGLLIAQHDLLEQHIAQAEARVASLLDGALARRLQTIPGVGPAICATLIAEIGDIQRFADFDKLVAYVGVHPAEKSSGQKGGPETSWRMAKTGNAYVRAALYRMSVVGLQHNPTIKAHYARKRAQGKSKMNALGHCMKKSLAIVWGIWRGDHDFTPEPPIA

SEQ ID NO: 444651 - protein, 483 aa, unidentified
MKRKSIPSSRGPKTSRPSKSKKQAWKVVHPHAAGIDIGATEHYVAVPPDAVAAGESTVRSFGCFTQDLDALVEWLKACGVDTVAMESTGVYWIVPFQKLEAAGLEVVLVNAHTLKHVPGRKTDVQDCQWIQQLHTYGLLRASFRPDELTCRLRTLVRHRANTVSSGAEYILQMQKALTQMNVQLHHVVSHLTGETGLRILRAILNGERDPLILVELRDPQITRSTKEEMRKALVGDWRPELLFVLKQSLRGWEFCQEQMRECDGQIEQLLKEMPSAVAAKTPAARPQPDPLASTNPRPKGKQSRKRNDPEKDLGPELARICGVDLTAAHGLRLLTVLTLVSEIGVDVSKWRSAKAFVSWLGLCPNNKISGGRILSSRTRKVINRAANALRMAAVGVGDTDTWLGSFHRRMRAKLGPAAATTATARKIGTVVYHLLKHQEPFIDRDLMAYEAKVYRHKLARIKKQAAALGYALVKTDEEKQLTE

SEQ ID NO: 444652 - protein, 345 aa, unidentified
MTTNYIGADVDSRTTNLAVERNGRIVQELCVPTTIPALRAALESIRRPRELTLEEGPMASWLARGLKDSVDRLVVCDPYHNGLISRDGDADDLIDARKLATLLRGNFLREVYHSDDPQRVLLKQWVGIYQDRVRDGVRQVNKIRARCLQHGLWPPRGALRNPGRREAWLKDLGAHPAVEQLQVLFIGFDAAAQQVELSRRQIVRRSRPYKIIGFWQALPGVGPIRAITLFAYLDTPWRFDFNRHKLWKYCGVGIERSSSGKDRNGRPKVGFLQLAWRVNRQLKSAVMGAAFSAIQQGGNPFAAQHERLVHEGVSTGNARHTVARKMLYVMWGMWKNESAFDPQRV

SEQ ID NO: 444653 - protein, 338 aa, unidentified
MIAVGVDTHKQQHYAVALDGLGQVLGEIVIATTLAGYGQFVCWLRELGGNVLVGIEGAGSYGAGLCEFLQAEEIEVFEVERPQRRERRGGKSDRIDALLAAKKVLTGEGLSTPRGSGKRLALQMLLAGYRSIVSERSRLYNQLQALQVSAPYALRERIGQARNGAALANRLSGMRTRPTATQQENLTLQVLRDIANRARALDADAENYTRQIEEMVCSLVPALLEEPGVGPICAGRLLAFNPSRFTSEAAFARANGTAPQPASSGKTVRHRLSRGGDRQINAAIYTIALSRSVHHAPSRAYMQRKITEGKTKREAMRSLKRHLSRHLYNQLAKTPLTT

SEQ ID NO: 444654 - protein, 454 aa, unidentified
MMHGAHIGGQRAGAFLELVDGVDPRRVLLVGVDVAKATWFVVASNLVGEVVVDGVRLVADRAGLAVLERLIAATSGQLDAAVVVVGVEAAGHHHQTLVGHLGDREGLVVRLLNPAQVAAVRKQQGNRRRKTDWLDAAAIGELLARGEGSPPHLDASPAATLRPLWSGRKDLVDARGRLRQQAGALVDCLWPGFSATDKHAGVAPVLSSPFDTKAGRVVVGLLAEGWTPAGIAAADPAELRQIFAARGCRLSGPLAGRLIARAASALAPHPAATAGKAATLAGLLGALAALDLQIAGLEAEMAPLLAATQGAKLTQIRGVATVAAAGFVAFVGHTGRWADWSKVWRAAGLDPARSQSGATDASYGISREGSAWGRRAILDLAAGVCRQPGRFHDSYQARLRHRKHPKVALAAVGNQVGRTCFALMDSGADYDPDHQTNYAERRTATQPKAGGRAA

SEQ ID NO: 444655 - protein, 453 aa, unidentified
MSKMQSGTKPTGLPIINPFAAGIDIGSRFHVVAVSPNLCKEPVQTFQAFTSDLQRMADWLIAMGTKTVVMESTGVYWVAAFEVLESRGLDVILANAREARAVPGRKSDVNDAQWLQRLHACGLLRASFRPGRDIAELRTYLRARERHTDYAAAHIQHMQKALTFMNIQLQHVISNITGVTGMRIIRAIVTGERDPDKLAALRDVRCRESIATVRNALVGNYQPEHIFTLKQALALYDFYQQKIDECDAEIERTVARLNLDRPIPEAPLPKAKHRTKQVSDPNFDVRTAMYQLAGIDLTQIHGIGPFLALRLVAECGTDLSRWRTAKHFTSWLTLSPGCKISGGKVLSAHTRKTSSRLTVALRLAAVTVGRSNTALGAFYRRLAGRIGNAKAVTATARKIAVLFYNGMRYGQDYRDPGADLYEQQYRDRVIKQLHRRAAQFGLILQPQNSLLPM

SEQ ID NO: 444656 - protein, 411 aa, unidentified
MEKLFVGLDVSKNDYKVCILNGAGEKVMQVFALHNNADDSERLVDAVVSIATELNINKILFGYESTSVYGWHLQYFLADSTQLRPFSPSTICFNPSIIESFKKTLGDLPKNDRIDAFAIAERLRFGRLPESVPVDFRYLALQRLTRHRFHIVENIVREKCYYLSNLFLKCSGLCQAKVFSNNFGASALAVIDELGDIDMIADMPLEDLVRFLVEKGNEHFADADMVAKKLQDAVKSSYRLAPSVDNSLNLVLRCCIDNIKSMKKQKKAIEKAIKAEVTYFENEYTCLKSVKGIGEVISAGLIAEIAGISRFENDNALAKFSGIYWSFYQSAGFTADETSLRKCGNKYLRYYFIQAADQLRKYLPEYNAFYSRKFKESKTHHHKRALVLTSRKVVRLVFALLHEGKLYDPAH

SEQ ID NO: 444657 - protein, 349 aa, unidentified
MDKDTMTIIGCDLGDRSSHLCLLAPEGAVLRRAKIATTKKAFDKFFAGLEHSLIVLEVGTHSRWTSALLHELGHQCIIANPRHVRLIYAGTHKNDQLDAEALARLGRMDPTLLRPIQHRSGEAQAELSTLRARDALVRNRTRLIATVRGIAKSAGFRLVACDADYFTRKVTLPADLQPALGAMLQNIEELTAHIKDYDKQIAQLCAQHPETVLFQSVPGVGPITALAYALTLEHPERFPSSRQAAAFVGLVPKQRQSGRHDPQLGITKAGDRFLRRLLVQCAHCILGVRGQDTDLRRFGLRLAAQGGKRAKKRAVVAVARKLAVLLHRLWVSGELYEPLRPVPERSHAA

SEQ ID NO: 444658 - protein, 420 aa, unidentified
MNKEVRAWIGIDWADEKHDVSLYEVATGRQERLEVKQSPEALAEWIGQLRTRYGNAGQVAVVLEQGRGALLNVLMGCEFLVLYVINPKSLSCYREAFYGSGAKSDPVDAELMREMVRQNPERFRAWHPDDVLTRSLRLMTEGRRDLVNQATAVTNQLTALLKGYYPQALRWIGALDTHWACDFLDQWPTLQALQSSSRRQILRFYEKHPRHHLDLEQQIQQFHQTLPLTGDEAVLQYSILMVQALIPQLRALLDSIDEFDRKIAEVFRKHPDRPIFESFPGAGAALAPRLTAAFGADRDRYAAASEMQQFSGIAPVTEKSGKQHWVHWRMACPKFIRQTFHEFADHSRRWSAWAKAYYQLQIERGKKHNAAIRALAYKWIRILFRCWKQRVPYNEQVYLASLLKHQSALLLKSAPAVKKL

SEQ ID NO: 444659 - protein, 357 aa, unidentified
MEKRLKQCLGIDVSKLSLSLSLGILNQDLVKKFEKHSDVSNDLSGFKAILKWLKTVVDIDVDFLITLEATGVYHQSIAHYLYEQGFAVSVMQSGRVKRYAQSLDQRSKTDALDSKMLSMLGLERNIRLWHPPCETLNELKLLSRERSALLKDKHVESNRQEAKKSSSYNNGKADRRFKARKKLLDIQIIAIEEDMRELVSKNTVLARKINLLESIPGVSFITAATVVGETLGFESITNAKQLTSFAGYDVVFRDSGSFSGKTRISKKGNSHIRAALHMPSMTCIQYNPTLKQFYQRLKPKKVKPLIALIAVQRKLLILMYMVWKNEEKYDENYEIKKQQKLKTSAAQDNKLITQFIS

SEQ ID NO: 444660 - protein, 370 aa, unidentified
MFDYTKTVVGLDVHKESIVAAVLPPDSDRVALTTKFENTPVALKTFVERLRSRGALTFVYEAGPCGYQVHRDLTTQGQECVVIAPGLIPTRPGDKVKTDRRDAEKLAQLHRAGQLTAVNVPTREDEADRDLVRAREDVMSERLRARHRLGKFLLRHGLVWRVTKSWGVKHREWLKALRFELASQTRTFDAYLRGLEEVEARLNGLDLEVLALAKNGTWNKLVANLRCLKGVDTLSAITLAVEIRDFRRFASAREFMGYTGLVSREYSSGESVKRSRITKVGNAHVRRVLVESAWSYRLSSDRTGKTLLERREGGSTDAVSTARRAQERLCRKFRKMLGRGKPQQKAVIAAARELAGFVWHIGRLSQEVRG

SEQ ID NO: 444661 - protein, 368 aa, unidentified
MKKNITFVGLDVHKNSIDVALADAGREGDIRFYGTIGGDLESLHKVVRKLQSTGSELRFVYEAGPCGYDIYRALTTQGFDCIVVAPSKIPRKSGDRIKTDRRDALNLARLHRSGELTAVYVPTAEDEAMRDLTRSREDAVKALRVARQVLLSFLLRHGHRYSGQSYWTKAHQNWIADIKMPHRAQQIALQEYVHAAQEQLERVQRLTRQIQELVPSWQLAPLVTALQALRGVSLIIAATTVAELGDLTRFDSAKQLMAYLGLVPTEHSSGSTTRRGSITKTGNGHVRRALTEAAHTYCHPARESRVLLTRLDGLPQEVRKIAWKAQVRLCGRFRKLLVRGKNRNTVITATARELAAFMWAIACATLPA

SEQ ID NO: 444662 - protein, 372 aa, unidentified
MNYNTVYVGMDVHKESFSLCAYTIDSEKASYYQRTEADYKKVLKYLEFLRTIYGDDASFICGYEAGCLGYSLYHQLAAQNVKCVILAPTTMLEQRSKKRIKTDKRDAEIIAKCLAQRNYSSVHIPTAKDEETKEFLRMRDDHKLALKKIKQQILSLCLRHNWCYDGKTHWTAAHIKWLRSLEVEALYKELLEEYLLTYQTLSDKLDRLDKRIEELASQDEYKDSVKKLCCFIGVKTHTALSVVVEVGDFKRFASAEKFASYLGLVPGENSSGDDKTRLSITKAGNRHVRLLLTEAAQCYGRGTVGYKSQALKARQAGNTPQVIAYADKANERLRRRFYKMILAKGKKHNVAKTAITRELACFMWGMMTDNIA

SEQ ID NO: 444663 - protein, 330 aa, unidentified
MRKVTEAGIDVSKDVLDVAVRRDERRLETARFANDAAGHTKLIRWLTKGGRPVRVVLESTGTYSLDIALALHRARGVTVMVANPRAIKQFTGALMQRSKTDLTAAVALRDFVIRMPFVAWEPPAAPVLELRGIARRIAALVVERTRERNRLHALHATAEASPIVCNDIDVNVRHLERRIELLSAQAVALIGQHAELQTAFDLLVSVPGIATHSAVQLLPELLVLPETMTVRQWVAHAGLDPRAHQSGTSVDKPARISKVGNAHIRRALYMPALVAVQHNRHVRAFFEKLVARGKTALQAYVAVMRKLLHAIYGMFTTRTTFVAAKFHEAA

SEQ ID NO: 444664 - protein, 410 aa, unidentified
MEVLFDRVAGLDVGKASVSVCVRTPGARRGRRSETRTFKTTTGSLKVMRDWLLNEGVTIAAIESTSTYWKAPFYCLEDVMEVWLLNAAHMKAVPGRKTDVRDAEWIAQLLEHGLLRPSMVPPPAIRQLRMLTRYRVQLMGDRTREAIRLEMMLEDASIKLSSVASSLTTVSARVILQAMIDGERDPLALAQLAKGRMRSKIPDLAQALDGHFDDHHAQMARAILGRLELVERSLVELDAVIAAKCTPWQHEIDLLQTIPGVGEKVAQVIVAETGADMSRFPSAAHLAAWAGVAPGIHESAGKRTPTSKRHGNKWLTAMLVEAAGSVARVHGSNYLSAQHARLAKRRGTGRAQVAVAHSILVSAWHMLTKDEPYQDLGADWLARRNDEAHARRLVAQLERLGHTVQLDAAS

SEQ ID NO: 444665 - protein, 319 aa, unidentified
MFNLGIDVAKAKLDCALRLPNGKHRNKVVENNHKGFIALSEWLLKQDASSPRVCMEATGTYWEKVAEYLAGLGMVVSVINPAQIKAFGASRLVRTKTDKVDAQLIADFAHERQPEPWLAPSPAEQALRAMVLRLEALQTMRLQESNRLEVAREAVRQGIVDHITWLDGQIKELIQAIKRHIDDDPDLRGKSELLDTIPGLGERTIPVLLSYYANPERFDSAKQAVAFAGLDPRQHESGSSVRGKPRMSKVGHSFLRKALYMPAMVTVYRTAWGKRFGQRLRAAGKAKKLIIGAMMRKLVHVAFGVLRSGKIFDPTLHAA

SEQ ID NO: 444666 - protein, 417 aa, unidentified
MNTSDYAALVALDWGDKEHAFALQVRETKLETGTIPASAERLHGWLEQLGQRCDHQPVALAIEAGRNAVLHALVAYPWLTIFPVHPATSERFRKAFTPSGSKSDLPDARVLLTILASHRDQLRALALDTAETRALAALTAVRRDAVDHRTQLANELRSTLKHYFPQALDLCGDDLWTPLALDFLTRWPELAALRRAQPATVQAFYTAHNSRRQEVIADRLTLIAHARPLTTDRAVIAPALLQVRLLVALLRPLQKHLLEIEDEIAAAFAAHPEADLFRDLPGAGPALAPRLLVAFGTDRTRYPDAASIQKYSGVAPVKEQSGRQVWVHWRWNAPKFLRQTFVEWAGQTIPHCAWAKAYYLQQKHAGKRHQTILRALAFKWLRILWRCWHDRIPYNEACYLAALQRQNSPLAHALFAA

SEQ ID NO: 444667 - protein, 342 aa, unidentified
MDEYDGRQFVGIDLHRQRSVIVRQSESGEQLSAVRIVNEPVALELQLEQAGADPEVVLEATYGWYWAVDVLQACGARVHLAHPLGVKGFRYRRVKNDVRDAADLADLLRMGRLPEAWIAPPQTRELRELVRYRAKLVAIRSGLKAQIHGVLAKAGVLIAVSDLFGVTGRQRLAKVPLGPAYAQRIRSLLELINILDSHEARFAVMIAERLATHRGYQAIQQVPGIGPTLAAVFVAEIGDVHRFTDAAHLCSWAGLTPRHRESDTVVHRGHITKQGSKAVRWAAIEAVQRHPTTAKIAADKHRIEARRGKNIAKVAAARKLLTLIYYGLRDGQIRALDRARPA

SEQ ID NO: 444668 - protein, 416 aa, unidentified
MNKRSYRAQKVNEVSWEVVAQRVQDQAVVWAIDVAKVEQYGVLMDRDRQVVVTVKWGHPAETSALLQRLSALPCRGLTAVMEPTGVYGDTLRAQLRQAGLEVHQVSAKRVHDAAEVYDGVPSLHDAKAAQVIARLYWEGASRPWGEASVPQREFDAVGRLYRLYQKQYQQQQNRLEAALQRHWPEVGQYLALDSVTLEAVLLTYGSPANLARQADEAREQMRRVGRGHLSPDKIDAVLDCARHTIGLPCLEAEQDYLKALAAELRHNRQQRDAVAAQLAQQIDRDPPLKPLSDVLGKVTTALLIAERLDPREYANSRSYCKAVGLNLKERSSGQHKGELKLSKRGSALARRDLYLATLRLIQRDPTVRAWYDRKVQAQGGRGKPKVVVALMRKLTRALWHVARGQAFDAQKLCGAN

SEQ ID NO: 444669 - protein, 357 aa, unidentified
MSKYIGCDAHRSYSTFVVVDENGRAGAPVRVEHEREEFRTFLRSLPAGSPVGVEASGGWYWLIEEMEQAGLEPHLAHALEAKQRMRGRNKTDPLDARGLAWLLYEKRFPEVWIPSGKLLDLRGLMRSRLALRAYQSGLKCRILAAINRYGLRGNESNAGDWFKGKGRVRLSVHVGGLPENTREATIQEWQLVDQLERHIEQLEERIAEKIGKIGWVRLLQTMPGVGKVLGATMYLEIGDVKRFPTASHLASYAGLVPRVYSSGGKTHYGSTPQDANRYLKWAFVEAANCTVMHKHRYGERHVGRLYERLKKAKGHGKAATAVARHLAEASWWILCKAQAYREPAPATMSSSENGSAR

SEQ ID NO: 444670 - protein, 324 aa, unidentified
MTFFIGCDTAKAKLDIAVVNSVGREMPELTATILNEPRDIATMLLTLSGAYPDDEFVCVVEATGCYHLAFADVCFDLGIVCRVYNPLITKQQIRASVRGKKTDRTDALMIARLGLRGEGRPYTPDPYKTTKYYGRGCQRLSVLNSSFRQYKNHFSALVDDTMSDELREVLDGVQVAIKEARAQLYKDLAASADGVVFRRLQTIPGIGPYVAASIIGEVQDMRRFTTTKSIIAYAGLDPRIKQSGKSLNSTGRLTKRGSSYLRRSLFIAANIARQHDPYFQALYDKKRAEGKRYTVANCVVARKLLTIARAVWITEKNYDLSFWD

SEQ ID NO: 444671 - protein, 410 aa, unidentified
MAERFVGIDVALREHRIAVLDRDGEAVGPSFTIVASQDGVTTLLRTLAARGATAAPTLIGLEASGHLWENLEAALVGAGYRVLVLNPLQTRRYRDVVRRKAKTDDIDAHLIAGLLRSGVAQASYVPDEQIQSLRELARLRARLLADRQDYLRQLIAQLDVVLPEHRAVLGDLLTARARGILAQFPTAQHLATASPRAIRRAAEDAGARGFSLDDATSVRDHARRSLYSGKAAAARAHVVRTLVSQLERLITAMDEVDRAATTLLPPSEPGTGPSDAELLQTIPGIGPHTAATLIGELGALSRFTDARALVAYVGFYPVISESGDHAVPPRMSRIGPRIARHSLYLAAVNAVRLSGEWRTIYLRKKAQGKTAKQALVVVAVKLLHAVYAMLKHRQPYNPSRLLVAPATMRT

SEQ ID NO: 444672 - protein, 471 aa, unidentified
MSCFRGAIQNRLRKEDFMKKQDSYDYYVGIDCAQNKHDFAMKNNQDKFLIKRGHFSNTLQGYEKFLNTVLSKCLNKDKILFGMEVTGIYGTNLYERLKSDGYHVVMISPDSVKNYRDYKRLNKTDKIDSGCIAELLLNGDAQIVHVAKNGYTDLKAYIRRRNALKVTCTQETNRFLAKVCLYFPDLLKVFPSGRATLKAIFSIYPTPYSIIEADFDELVSVLQKASKNKFGVDKANELIHAARNSIVVRKSISDGELYNIHSLIDSIDSLESEIRNLEKIIDSKAEEFPAYHVLLTLTGCGKITAATIVAEIGDISRFHKASQIVSLVGLYGDNSKSGSSVNKRGKISKKGSRYLRHAIYMVAEFARRNNPIFKAYFTRKKNGDRTKHTLAVNAVANKLCKVIYSLMKNQSTYIIQYRDLVKLSESTQNEFFQNAETDFSAKTRRKKYLYEDEYGELHEFVFKSIKTALIE

SEQ ID NO: 444673 - protein, 350 aa, unidentified
MRFYHVQPQQQYFCGVDLHTKAMYLCVLDQAGQILLHKNIRTRPQAFLKAIAPYRQGLVVASECIFCWYWLADLCQREGLDFVLGHALYMRAIHGGKTKNDKLDAEKIALLLRGGMLPQAYVYPKEKRATRDLLRRRSYLVRMRADLLGHVQLTRHQYNLPAFKKRITYKANREGIAERFSDEVVQANVALDLEFIGSLDEQIRPLELYLVQQAKVHDPQAFYLLRSVPGIGKILALTILYEVENIRRFKRVQQFCSYARLVKGQKVSAGKRLGTMGAKMGNRHLKWAFSEATVLLLRESDQAKAYLARLESKHGKGKALSILSAKLGRAVYFMLLRKEPFDQERFFAQA

SEQ ID NO: 444674 - protein, 354 aa, unidentified
MNKIKQLNFEGKVIYCGLDVHKTNWKINARMEGIEMAAFSQNPDPLLLKNYVDKNYPGAELKVVYEAGFCGFEIQRSLKSLGIECIVVNPADVPCSDKDRKRKDDKRDARKLSIELAKGNLKGIYIPDKQMQDARSLVRQRHRLIQDQTRCTNRIKHLLLSNGIKTSEKSERWSLRFIRKLQQLDCGSISLKTSLQFAIEQYLQIRRILKEITLAIRDLSKREPFIKVQAVLQSIDGIGLINGMVIQTEIGDIYRFKRLDSLCDYAGFVPDIYSTNDKMVVRGISKRGNEFLRETIIESSWTLIRKDPAMLMKYNEYRSRMSANKAIVRIAKHLLSRIRFLWKNEQTYERGITG

SEQ ID NO: 444675 - protein, 429 aa, unidentified
MNYNTQNAKIASITEKTLIVGIDVGSETHYARAFNWRNYEYSKKPFAFSNDEAGFSSFKDWMDDIAEKHGMKVVIPGMEPTGHYWLNLGAYLQEQGMKPVHVNPHHVKKSKELDDNNPSKNDRKDPKTIAGLVNEGRFSYPYIPTGIYAEIRNLSNLRIQTQEEITRIKNRIARWFSIYFPEIKDVYRNPDAVSGLMVIKQAPLPCDIKELGVDGVNKIWRDARLKGAGIKRATTLVTAAEHSIGNTEAPRSARKEIRNLLNDYEIYKNRMDELMEEIKETLSEIPYIDKLMEINGIGIKTVSCVIAEVGDIGRFDNPKQVQKLAGYAIVADSSGKHNGESRISHRGRKRLRYALYEAAISVIGKNKEFKEIHSYYRTREKNPLKKMQSVIAVACKLIRIFYMILTKGADYDGRKMLNDIVRPEIQPAA

SEQ ID NO: 444676 - protein, 318 aa, unidentified
MNNCIGIDVGKQELVVFDGKNHRIFPNDEHLSQLHNYIKSRGKDVKIIFEPTSTYSRRLEELCITNSIPFKKVNPSIVPNLRRVENIRSKTDKSDSQLLFLYGSREDVVESAPKDNWPKSVISILNLYQIFQRNRIALQGSLDALIREPYMLEDSCNLIKEEIRRHKAMEEKMLKDAEGLVIENGREDMLQFLKSIPGIGIVTALYLLVFFFKFPDANRKQITALAGLDPIQHQSGSSVHGKPRISKQGSSLIRKILYQATLSAARYNPYIRKHYENLKKSGKPDKLARTAAARKLLLLAFSIFKYKRPFTLEYEPVN

SEQ ID NO: 444677 - protein, 409 aa, unidentified
MATDPPNVIVGVDTHSDTHFVAIIDEHGKHLAAEEFLAVSSGYRKILAFITHFGLIIGVGVEGTGSYGAELSRVLRTAGLSVHEVNRPNRQARRLRGKSDPLDAYQAAESVLAGRGTSTPKTKDGPVECLRVLRAARSSAMKARTIAINQIKGILVSAPEHVRSRFRPLTTAQLIPALKRSRPMGNLTDTEIATALTLKKLAVRYRFLEREILDTDAVMAEILRDCAPLLRNVPGVGIEVASQLLVTVGDNPERIATEAQFAALVGVAPIPASSGKTSRHRLSRGGDRAANAAIHHVVVSRLATDSRTRDYAARRTAQGKTKKEIMRCLKRYVARELYRQLTNPQAAPSITDLRTAREDLHITLREAAGHFNTWPGTLSRIERGLSRDDYLASQFRDWLHEQKAVQNIN

SEQ ID NO: 444678 - protein, 418 aa, unidentified
MNAEGHTRGTRRYIALDIHKHYCVVAGVDRDGRVMLHPQRVEHADLEGWLKKNLFANDHVVIESTTNAWHVYDLLEPLAERVVVANPIQVKQIANARVKTDIRDTLILARLLAANLVPEVWVPPQHVRQLRQLLSQRRQLVETHTQIVNRMHSVAHRHHLSHARGKRFNEKTTLWQKDKRLSSVEQFQLELEMENRAYMEKQISRIGKEVAKMSHQKPWAQSMTYLMQLPGFGVITGMTVLAAIGDIQRFDSARHLASYSGLTPGLEQSGTKYHEKGITKEGRKELRWAMVEVAQRAVKSDPLWKHRFQELQKRMHRNQAIVAVARRLLELVWYVLTRRQPYRHFSQERIAYKYLTWAWQMDDEARDGLTRQQFARYYLMRLGSGHDLTRIALNPKYPRKLASEAELLALRPELNHIE

SEQ ID NO: 444679 - protein, 318 aa, unidentified
MNTKTNQNINIGVDTGKFQLDIYIRPIDIYFTVSNDEKGIKEAVKIIKKHNPERVVIEATGRLEMPFILACASAKLPFTIANPVHVKRFAGALGQRAKTDKLDAQLIAHYSEAIKPKLSQLKPETMQAMSDLVSRRNQLLTMQTMEKNRLQIMPKELAMTIKPVLTLFKNMILKTEAKIAKLIESCPEYSAKNEILQSMTGIGRIAAASIISNLPELGYINSKQASALIGVAPMNKESGRFKGHRKIQGGRPQVRTVLYMAMMLAMQSNPVFKAIYQRLLAAGKPKKVAIIACIRKMIVILNSMLRDGVLWEAPKVIN

SEQ ID NO: 444680 - protein, 357 aa, unidentified
MKVTTIGIDLAKDVFGLHGVDGEGRVTFKRRLVRSRLLEFLSQLPRCLVGLEACSSAHYWAREIERLGHRVRLMSPRFVKPYRKSDKNDANDAEAICEAVTRASMRFVPIKSEAQHEVQALHRVREQLLKSRTALVNQVRGLLAEHGVVAPHGIARARRLLLGILADPERHGLSGLFRETLQEMAERLRFFDERVGAYDDRIERVFKEDERCRRLAKIEGVGPLVATAVVAAVGNASEFKSGRELSAWLGLVPRQHSSGNRSQLLGISKRGDRYLRTILIHGARAALRRADHKRDQRSRWAMRIKLARGYNKAAVALANKNARIIWALLTRGENYRPPAISVALPTTDRISLTQVQA

SEQ ID NO: 444681 - protein, 415 aa, unidentified
MALKIVYKICCGIDVHKTFVVACIASTNSKGITTYERHRFSTYTSGLKDLLQWLLKRNCKDVCMESTGKYWIPIYNILENDCSIVLAHPKYVKAIRGKKTDKKDAKWIADLFKHDLVAGSFMPPADIRQLRDLMRYRFKLTCFMSSEKNRLQNCLTVSNIQLGNVVSDTFGKSAQAILDKILENPEDTSFDLEPFVYRSLKKKLPELRDAIDGYITPEQAGKLKVIKAHYESLESRKAELEELILALAAPYQQELAILQTAPGISSGFTAIGIISEIGTNMEAFPSAKHLCSWAGLTPTNNESAGKKKSVRVSKAGCYIKPLLVQCANAVVKSKKHPEIRNRYLRLKKRRGHKKAIIAVARMLLTALYHMLKNGENYNAELYRKSDLPPIDCEITVEQALIIARNQGYRIKSATA

SEQ ID NO: 444682 - protein, 430 aa, unidentified
MKNSAANKLKQVPVGYLVIGIDVHKKKHAAVIVTQDFTTHSKFKFNNSREGFEMVLERARMEMVRTGSRGAIFAIETGGHYWRNLAYFLDERGIPFRFINQFTLKRRREGKDLNRRKNDYRDSEVAAQLLCTGEFTETQLRHGVYAELHAAHNAYRRLVKERTRIINLVKGLLDGLFPEFTQVFKDPCGMTALSVLSICPIPHIIAAMTEDEFVNTIRTGHRGLLMRKKLRVLYYAAQTSIGVKADAQSVSYELSFLVEKFSLIKWHIRGIDETLVRLVNETEEGKYLLSIIGLNYISVAGILAELGSFRPYRSAKQLIKMAGSNPTESESAGKRSGHTPMSKKGRPVLRYCAWTAVIPMLRFNPDFRVWAKKLRERPVHANPLSGREIVGAALNRLLRLAFVLVKNQTFYQVPEIESIPELELLPVARR

SEQ ID NO: 444683 - protein, 406 aa, unidentified
MFFLGIDIAKLNHVASLVSDNGNIVFSNFMFKNNLEGFLSLIDKVKSIPKDDIVIALEFTGHYSDNFVNFFFNRKFNVTLVNPANVANFRKSYGRDSKNDRIDSINIAKMLLSREYSLVTQSDIEYLSLKKLNRIRDSLVKQKSKCKILLTRNLDSIFPELHLLPSGIHSKAVYALLKKYPSSEEIAALGIDVLTNILKTNSRGHFCEKTAYIIKSQAKSSVGFEDISLSFHISQLISSIELLEEQIRNTEKQINAIIEKLKPVILSIPGISNVACACILGEIGNISRFRSPSKLLAFAGLDPKVRQSRQFRALSCRMSKRGSKYLRYSLIYTAWNAVRNNEVFSNYYALKRSQGKNHYKALGHVVHKLVRVIYRLMKDNIPFDAEQLIKKNYTKYLRKSIFNRLI

SEQ ID NO: 444684 - protein, 477 aa, unidentified
MQEKRHIGLDLGVKSKSKVYIIDQAGEKVRPEFSIWTNPQGLDYMIKQALKGAFKDILLDLTMEPTNVAWFGAAVYLRSKYPQVSIYRVKSEKAQDLRKFYRKHTKTDSLDAKTLATMPIVDSNSLQEVYIRPKNMLALNTRCKQRARLVKEATSKRNSICDQIELGFPHLVDCFSSKFTTPFVRLCERYVNPFKVKRLGKKNLLKVLVKLGFRKDVSSLAENIYQRTEEACILFTDEDNVIDYDDLQDRICSELRIFKALQKEIDKVTKKEQDLYKKCFPKKRLNSIPGIADVLGAVIASTIGNSDRFSSARSLVGYLGYYPRENSSGLSSKKGLRMTKAGPNIAKGSLYLTANTARLIDPQLGKVYYEQMVVHGNPHTKAVCRVATALIPRILRVMKENRDYVIYDLEGNPISRKEGRKIVKELFFVSEEVRQRLSNRKRMPLNKKGRTKPQYTRGSKAPQIRVDSSRRIVLSLS

SEQ ID NO: 444685 - protein, 420 aa, unidentified
MDALNEIDFVAYVGIDWADKKHDACIQEAHSEQREFVVIPHKVKLIDEWAKSLHKRFGSPIAVALELSRGPIVSALQKYDFFIIYPINPATLAKYRETFKPSRAKDDPTDAELAVDLILRHPEHFKPLKPQSVEMRTLTSLVEQRRTLVNDRVRITNRLRYALKQYYPQILEWFDHIDTVLFCDFLERWPTLTQVKRARKNTLKTFFSEHNMRFVHVQERREEAIREALALTTDEAVIVPHRLQALIFIEQLRVTLRALKRYDEEIAKLVDKHDDYFIFSPLPGAGPLLAPRLLVAFGEDRERYKSASELQKSAAVAPVTERSGNKHWVHWRWKCSTFLRQTFIEWAGQTVNKSYWAGAYYRQQRAKGSNHQAAVRALAFKWIRILYRCWQTRTPYDESIYLKSLERRGSPLVKQLGEMA

SEQ ID NO: 444686 - protein, 340 aa, unidentified
MAMEMRVVGLDVAKNVFQVHGVDRRGETVLRKRLRRSQVAEFFRQQTPCVIGIEATQGAHYWARVLRASGHEVRLVAPQFVKPYLKSQKNDANDAEAICEAVSRPSMRFVASKSIEQQDLQALHRIRSRMIGSRTQLGNQIRGLLAEYGIVLPLHLSQVRRAMPRLIEDDNPLLSGFGRRLLAALYEELCALEQRIERMEEQVQQIHRDNALCQKIAAVEGIGPITATAVVAAIADGRSFHNGRQFAAWIGLVPRQHSSGDKQRQFGITKRGDPYLRTLLIHGARSVVYRAPSKSDSRSQWIAEKQRKLGTAKTCVAVANKNARVIWALLARDEPYRRAV

SEQ ID NO: 444687 - protein, 448 aa, unidentified
MSNGNGVSRGDRNRNARLSRLRVLVPMSNAIVGIDLADNKQMVVVTDHDSKVLARRTFRCRAWDLGLALDWAGQQASKAGFAGVTVACEPTGHRWRVLGQLAADRGMAFVCVQTLLTSWARRSEDLTFDKTDEKDAVLIARLTAQLRCYVPEPLDETWGRLRHLGARRERLLAETVSQVQQIRDLLECVWPASLDTAKQPFRSRTWLAGMSVVLARTDGDPARLRRLGLARFEAAVRREVVARQGKKPCLRIVRLLFAAAVDPRGVTAHRPGALERAQLLLDDFRDTGRRLGEAESRMVAVLDELQLTELVCSIVGLSALGGATILAETGDLTRFASARAVVKHSGLAPREKSSGTYTGRTKLTGQGRPGLRAAAWRAVWGAQKANPVYAAKFTHLTSRDQNKLNRGQAHAAIAAALLRQLFAVVTTGQKWDAAIAAGGRCEVIEPAA

SEQ ID NO: 444688 - protein, 483 aa, unidentified
MIASHIAAIAKQGSTAWRHPLDRRIVSDKQLRVFSKHVKASTQLRVLGRCFLYVPNQRFMILQLHFDLPPEVSTVGTKVLARPKRKGLHLCNPLFIWRARQDLNPRPPNRMDAPLPLRRQLRQSGSVVRPLNREGASIMKITTVGVDLAKIVFQIHGVDERGKAVLRKQLKRTEMLSFFANLPPCLIGMEACASAHHWARKLIALGHEVKLMAPQFVKPYVKSNKNDRNDAEAICEAVARPNMRFVPVKTVQQQAVLALHRARAGVMKARNAQGNQIRGLLGEFGIVLPQGIGHLRRRGPELLEDGDNGLPGLMRTLLSRLLTQLQQLDQQVAALEREIVLWHRQNDDSRRVERIVGIGPLTASAYVASLGDAKAFTNGRQVAAWLGIVPRQDSSGGKPKLLGISKHGDVYLRTLLIHGARAVLRHVEHRPDPTDSWLKRLMARRGKNVAAVALANKNARIAWALLAHQREFEPEYVSKAPSR

SEQ ID NO: 444689 - protein, 343 aa, unidentified
MQVSTIGLDLAKNVFQAHGVSAEGKVVLKKQLRRGQVLSTFAKLLPCLVGMEACAGAHYWARELRKLGHDVRLMPARDVKAYVKRDKTDAADAAAICEAVSRPSMRFVALKTPEQQGRLMQHRVRDLLLRQRTQTINALRAHMAELGLVAATGRQGLGLLLAILADARDERLPQDARSSLKLLASQITALQAQIDTLDKRLHAQHRQCPASRRLETIPGIGVIGATALAATITDPKAFKSGRDLAAFIGLVPRNNSSGGKQRLGPISKQVDRYLRRILVVGAHSILKQARTRPDKHPWLARLMARKPGKLAAVALANKTARIAWAVLARGETYRAPTAPAAAG

SEQ ID NO: 444690 - protein, 342 aa, unidentified
MEEISRIFVDTSKQLFQLHGVDAVERVVVRRKLRREQFLAFFAGRAPLVVGLEACAASHHWARELTALGHEVRLIAPQHVKSYVKRNKNDLRDAEGGCEAMSRPTMRFVPVKTVEQQAGLMLLTRRERLVAERTALGNAIRGHAAEFGWTVAKGLDKIALLLTQLAAAADVPDLAKRLFARDGTRFSQLQEEIAELDREVAAWRRNDEVGRRLAQLPGIGELGSMMLPLKTPDPSGFKSGRDFAAWLGLTARDHSTAGKLRLGVITKAGDEPLRAVLVAGAMAVIQQAVRGKGPAWPWLAELLKRKPRKLAAVALANKLARIAWRLMVSGQAFDPQRIALAA

SEQ ID NO: 444691 - protein, 437 aa, unidentified
MSQNKNHAKKSVCLQSLPLIHPHAAGIDVGAKEHVVAVPADRDPRPVRSFKAFTPDLYELAEWLQQCGVKTVALESTGIYWITLYEILEERGFEVRVLNARHVKNVPGRTKTDVLDCQWIQKLHSFGLLSGSFRPDQQIRTLRSLMRLRDNLVVQSTQSVHHMQKALFEMNVQLSNVISDIVGESGMRILEAILAGEHDPARLATLCTPRIKAARETVAKSLHGNWREELLFSLRVALDSFRFAQGKIAECDARITEHLAQFADRAVLETPPSSLKSELHRVCGVDLTKIPGIKEQAAQIIISEVGLDMTRWNTEKQFSSFLGLCPNNSISGGKVLRRSTRKVYNRAADALRLCSQSLTHSKTALGAKYRRLKGRLGAPKAIVAMAHHLARLVYRMLRYGRQYVEKGIAEYEIKFRLQRLKWLKHEAKSLDMQLLPA

SEQ ID NO: 444692 - protein, 407 aa, unidentified
MEVLYPRCAGLDVHAGSVTACARIATGAQVTYEHRTVPTTTRGLLELVEWLTGHSCTHVAMEATGVYWKPVWHVLEEHVTLVLANAMHIRNVPGRKSDMNDATWIADLLAHGLIRSSFVPPAPIQELRDLTRTRRQLVHEVARHVLRIQKTLEDANLKLTQVMSDIVGVSGRAILNALIAGESDPERLADLTRGRLKAPRADLVDALHGRMTAHHRFMIQVHLGQIDALESAVAAIEAHIGDALGPFRAAVSLLTTIPGISETTARVLIAEIGTDMGRFPSVGHLISWAGFCPRLDESAGKRRSTRTRQSTPWLKPTLVNAAWAATHKKAGYLRAQFLRIKTRRGAKKAILAVASSMLTAAYFMLRDGVEYHDLGAHHFEQRDKEQLTTRLLQRLRDLGVAVEVKAA

SEQ ID NO: 444693 - protein, 342 aa, unidentified
MGEVITVGLDIAKSVFQVHGIDAAGEVIVRRRLRRARVLPFFEKLPPCVVGIEACNTSHHWARELIALGHDVRLMPAQYVKPYVKRGKNDAADAEAICEAVTRPTMRFVAVKSPEQQSVMMLHRVRLMLSRQRTQLTNAMRAHMSEFGIVAPVGRMGVERLLEVIADHDDTRIPADARVCLEMLGAQLVVVKEQLLENDRRIRASARETDVGRRLMEIPGVGPLLASAFVASVADPTIFKCGRDLAAWIGLVPKQNSSGGKERLGGISRAGNRYLRQMLVVGAMAVIRHAERHGTKRAWLLQLLARRATKVAAVALANKTARMVWALMTSGERYREPAVTLA

SEQ ID NO: 444694 - protein, 414 aa, unidentified
MEVVNPRCAALDVHKKTVVAAVRVHASTGAAREETRTFSTMTPDLLALSDWLGARGVTHVAMEATGEYWKPVYNLLEGQFELLVVNAHHVKNLPGRKTDVKDAEWLAQLLQHGLLRASFIPPAEQRDLRELVRHRTNFVRERVNIVNRIQKLLEGSNIKLASVASDVMGKSGRAMLDRIVEGQEDPVLLAHLARGSLRGKIDALEQALSGRIKAHQRVILAELLRQIDSLDESIGRLEAQITDYSVPFEKAVRHLDTITGVSVTTAQAIVGEIGVDMSHFATHSHLAAWAGVAPGNHESAGKRLSGRARPGNKALKRALTEAAWAASHTRDTYLSALYHRLAARRGRKRAIIGVAHAILVAAYHMIQRDEDYKELGPAHFDSRREERTVQTCKKRLERIGYDVHLTKTNVPVAA

SEQ ID NO: 444695 - protein, 430 aa, unidentified
MKRGVVGNQEFSIYVGLDWGTEFHRACVLDASGEVVRECQVDHSGPAITDFVRLLNAMIHGKPERIAVAIEVPRGPVVEAFLEGGFAVFSINPKQLDRFRDRYSVAGAKDDSRDAYVAADSLRTDQHCFRRVAVQHPDVTRLRELSRTEENLSGDLRRIVHQLYQLLLRYYPQLLQLNSTPEEPWIWALLEAAPLPQRGARLTVARLKQLLSKHRIRRWTAEQLHDVLVSPPLPLAAGSADAISEHALLLLPQLRLLYRQRQDIRDRIETLLDGMVAQGREGSEFQEHRDVGLLLSLPGVGCLIAANLFTEGSDPLAQRDYLALRAHSGIAPVTRQSGKTRQIIMRRGCNERLRNAMYHWARCSVQHDPLSKVHYARLRQAGHKHGRALRGVADRLLAILIAMLKSGKPYEASRRQNGRSHDAASPANNP

SEQ ID NO: 444696 - protein, 430 aa, unidentified
MGLIVPTTIHPEREDQPLPYAWFVGIDWGSQQHQVSVLDRDRRRVGERVVDHDGASLAQLADWLWTLSAGQPQRVAVAIEVPRGAIVEGLLERGFHLFALNPKQLDRFRDRHSVAGAKDDRRDAFVLADAVRTDQPSFRRLHLEEPQLLVLRELSRAEETLLEEFRRSANRLRDQLHRFYPQMLQLCAAADEPWLWDLIDLVPTPAHAALLSEEHVQRVLKTLRIRRVTGKEVLTCLQMQALPVAPGAAEAAQAHCQLLLPCLRVLAEQLQACSQQVSALLRTLAEEPGDGEGPSDVAIVLSLPGVGRKITAWLFAEAAQPLAERDYQMLRTHSGVAPVTKQSGKRRQVVMRRGCNPRLRHALYHMARVAMQRDAYFNSVYTTLRAKGQRHGQALRNIGDRLRRILVAMLRHRTCYDASRRRREPVVQMG

SEQ ID NO: 444697 - protein, 371 aa, unidentified
MEHTRFIGLDIHKERISVAVAQSGRSGAVEYLGEIINEPGAISKLCDRLRRPGKPLAFCYEAGPCGYGVHRQLTSLGHRCDVVAPSLIPTKAGDRVKTNRRDATMLARLHRAGELTPVWVPDTDHEAMRDLIRLRSVVRQIVTRARQHLQGFLLRHGRKHGGGTAWRMAYRRWLSTLAFEHPAQQIAFQDYVDAVMDGERRLKRVEEQIFGLLPGWNLRPVVDALQAMRGIALINAVVLVTEVGDFTRFPNPRQLMAYFGLVPGERSSGETVRRGGITKTGNSHARRALVEGAWAYRMKARIGRHKVDRIEALPKIVRDIGWNAQVRLCTRYRRLRARGKTANVVNVAIAREMVGFIWSIACAVQSTPKTA

SEQ ID NO: 444698 - protein, 319 aa, unidentified
MAQNDPVVVGIDVAKDKVDACIRASGLRQAFPNTAQGHRKLVAWLRKHKVSKAVMEASGGYERAWARVLREAGIEVRIVDPKRVRSFALSAGRLAKNDAIDAEMIAWFAETFSQAPSQKHDVAREELQTLVKGRLGLIDCRMRLVSQSEHAAPGLVQKSHAHILKSLSVEIAKLEAAICAKIKSVPDFAERVEIIESVPGFAETSSANLVAGMPELGEVSDEIAAALIGAAPYDDDSGKRRGERHIKGGRRWVRNAIYMPCVGAATQNNPVLKAYYQRLIARGKAPKVALIACMRKLIIILNTMIARRQKWDPGRHALS

SEQ ID NO: 444699 - protein, 437 aa, unidentified
MNPNPASSSSTEETLVASAPRIVVGVDPGLDEHGVAVLAAGSCARLDRRKVPNTVAGMQSLVERLSEWRGRSGGQLTVAMEEASTYGEALECYLSQAGFSVVVVSEIKVAGFKKAMGGDANDLLDAEAVARFVLVQPDLVQRPARQAVEADVHGSVHRRLRTLSRRHQRWTRDRTAAVNELHAVLRMAWLADYQRFFSDSACGSALELWRTYPTPAEAAAAAVEEIAALLRKASHGRFTQTVCAAKAADIQGTAKLLMFALGKPDPHRWSGWAIDIRGLARHVVHLDEQLAVLRRQMEELLTGIDSPLRRSKGIGPVTAAAIHGETLSVHRFPSADHFARYNGTAPREDSSGRGPRFVKNNRCNRRLRQALMQLALNADKYMVASKAYLLHLKGHGLTGAAARIRLARRLSDIVYAMLRDNRPYDLEYYVTHKKTAA

SEQ ID NO: 444700 - protein, 352 aa, unidentified
MNNGTRWVGIDLHRRRSHIAVIDEQGELAVSRRIVNDRDTFLELFGDPQDGDTHVALEATYGWEWLAELLEEAGYDLHLAHPLRTRAIAAARVKTDAIDAKTLAHLLRTGFLPEAYVAPRELRDLRELLRHRATLTRMRSAIKNRVHAILAKHGIANEHSDLFGKSGREFLASLQLRDAPRRRLDSLISLICDFDREIETTTREIEERAKADDRVDVLTQIRGVGRYTAMLIIAEVGDITRFQTARHLCSWAGLAPSVRSSDGKARLGHITRQGSPALRWALVEAAQKITTGSGPLREKFERIAKRRGRKIAKVAVAREILTLSFYGLRDGEIRCLARRSRASAKAKLADAA

SEQ ID NO: 444701 - protein, 411 aa, unidentified
MEVLFAACAGIDVHQKSVVVCRIYTGPDRKVRIEVRTFSTMTKNLLEMADWLAEVGITHVAMESTGDYWKSVYNILEGNFEIWVVNAHHVKNVPGRKTDVKDAQWLAQLMRHGLLRPSLVPKPPQRELRDLTRMRLTLVRERASLCNRLHKMLESVNIKLGAVASDLLGVSCRKMLHELATDPDADPNAMAELALGSMRGKRDELALALQGRMNDHYRFLLSQLLDHISELDGRIEAFEQRIEETSAPFKAAVALVDLVPGFSRTAAQTVVSEMGADMSPFASEGHLASWLGLCPGNNQSGGKRLSGKTRKGNRYARATLVQVAHVVCRMRETQYYSIYRRIAGRRGKKRALIAVAHALVRTIYYVLKNGVAYEEPGADYLQKRDPERELNALKRRAARLNLDLVPKPQAA

SEQ ID NO: 444702 - protein, 418 aa, unidentified
MRKIYSRCCGIDVHKKLICARFRNGRKDEYKEFGGTTQELRSMAKWLKDGKCQMVAMESTGSYWKPVYNILEDYSVPVIVVNAQHMKNVPGRKTDASDAEWICDLLQNGLLKASYIPDKQQRELREIMTYRGSLSKDQTAELNRLQKILEGANIKLSGTVSDITGKSSRCLIDALLDGKDIDLTLIESLRAEHKISSRLKASDEQLVADLDGVISERQRSLLKIVLQHIGELEAHISDIDSLIERTMTDDQKHAAEILTSCPGIGDASSKAIVSVIGSDMSRFPNANCLSAWAGMCPGNNQSAKKNNCCKTRKGNKLLRTTLTLCAHAAVKKKDSYFAAQYNRIAAHRGKKRAIIAVAHSMLIAIYHMIKDSTSFKELGGNFYDKFNTQKKINSYLKRLKELGWTGNQAFQNTATSLA

SEQ ID NO: 444703 - protein, 454 aa, unidentified
MRKPQVVPDEDHEVVYERVAAVDVAKASGVVCLRAPDPARPGRFVNRIWDNVPAMRAQIAELGGELLRCRVQMVTLESTSDYWRIWYYVLESIGLAVQLVSASQAKNLKGRPKTDKLDAMWLARLTQWGMLRPSFVPPAAIRRVRDFTRARQDLVAERTRCLQRVEKLLEDAMIKITSVAKDGMKAKSVVAMVAALAAGERDPRALADLAKGPLRARRDQLAQALDGMFDSHHGMIARSLLDQVAFLDRQITLMEDQAIAALAGVPESWGVDADGQTGPQAGTSPDSPVLAAAHRLAEIPGISLWLAIVIIAEIGLNMTCFPTPAHLVSWMGLCRSAASSGTRHGKGKPKKGNSYARAAAGQAAIGAARTATFLGERYSRIARRRGKAIAQAAVARSIMIIAWHLLNDPQARYRDLGPDFYASRINRDKKIRNHIRGLQALGLTIAITGDEQAA

SEQ ID NO: 444704 - protein, 348 aa, unidentified
MTVSVRNEAGDAVLRRQVSTEWGRVRAFFEDLRWLAHPEGGFAAILEVCGFNDWLLKMLSQHGCRETVLIQPEKRSKKKTDRRDAHQLSGLLWVNRGRLLAGRRVEGVRRIQPPTEREAEDRQLTAVRERVGRQRTRTINKIKHLLRKHNLEQEQPAKGLDTKRTRQWLAALALGPIDRLEMDLLLAQWKLWDDQIAKLELEIQKRQAKNATAAVLATIPGCAAYGSLALASRIGSIERFPRPASLANYWGLTPGCRNSGEATDRLGSITKQGSAMARFVLGHMVLHVLRRDGRMKAWYGRIKRRRGSKIARVAVMRRLATIIWQMVKHNQPYVMGGPPPRKLATRAG

SEQ ID NO: 444705 - protein, 384 aa, unidentified
MQKPNDLNQSRIDLKQDGTLIAVIEMSLSSWLVAGIVPGVERQPLKKLAVDESALLKLLNRWREEAEKAGRRIERITVAFEAGRDGFWLARWLRARGIEAHVIHASSVAVSREHRRAKTDRLDTELLKRAFLGWLRGERDHCKMVAIPTTKDEDAKRPNRERQSLVGEQTRIVNRMKAALIRLGIRGFNPKLKKAAGRLEDLRTPEGEPIPPNTLAELHRDMERRRLVSDQIRQIEKARLERMEQAPGDGPHAMVRLIARVIGVGIETADMLVHEVLSRKLRDRRAVARYAGLTGAPDESGSKRREKGLAKAGNARVRGGMIQLAWRFLLFQKDSALAQWYRTRTEGGRNRKTIIVALARKLLIALWRLVTTGEVPAGVVLRAA

SEQ ID NO: 444706 - protein, 402 aa, unidentified
MTKQLMAGIDLHSNNMFCGIVDQDGKRVFEQKLPCELPRVLQALKPFKGRIEKIAVESTYNWYWLVDGLQDHHYPVVLANPAKMEQYNGLKVTDDKSDAFFLAEMLRLNILPTGHICDRQWRPVRDLLRRRLSLVRQRTSLILSLKSLHVRTTGQDLPLGQLKALPPESAGGLFENPFDQLTAQVQTQLLDQFNQRIGEIEKALLGKVSGLPRYQVLQSLPGVGTILGLTITLETGDPTRFASAGCYASYCRCVDSRRLSNGKKKGRNNEKCGNKYLAWAFVEAANFAKRYDAQCRRFFDRKAAQSNTIVATKSLACKLAKAAWHMMSQQTPYDAGRMFPGEAGANRPDEKAAGVTVVCDAPIRAGQAGPLRGGDRRRRELDSSETRRRRRPARANKRRDDD

SEQ ID NO: 444707 - protein, 318 aa, unidentified
MTPPEIYVGIDVAKEQLQVAVRPGGEAWAVTNDPTGLRDLVKRLAASKPALVVLEATAGMEMPVAAALAGAGLAVVAINPRNAREFARATGRLAKTDVIDAHVLARFGEAVKPPLRPLPDAATQELNALVTRRHQLVEMLTAEKNRLGQAVAKAVRTGIQEHIRWLEKRLADIDRDLADAIGRTPVWREKDELLRSVKGVGPVLSTTLLAGLPELGSLGRKQIAALVGVAPLNRDSGRYRGKRMVWGGRARVRTALYMGTLVATRFNPVIRAFYERLLTAGKPKKVALTACMRKLLTILNAMARHETPYPTLVRQDGC

SEQ ID NO: 444708 - protein, 356 aa, unidentified
MISRGVLHIPRIIVGVDTHKDEHVAVVIDKLGARIGQRNLPTTNTGYVGLEHWVSGLGEIEAFGVEGTGSYGAGLARFLRGQGHSVIEVNRPDRSTRRRLGKSDPTDAEMAARAVLAGVARDQPKSGVDEVEMIRMLKSTKDSAMKGRTQAINQMKALIVTAPVELRAVLSGLTAGQLVARCTGWRNGQLETPTTAAKYALRSLARRYSQLAEEIEGLNKELARLIVAFAPMLMEALGVGPDTAAALLVTAGSNPERLKSEATFAALCGVSPIPVSSGKTNRHRLNRGGDRQANAALYRVVLVRLRYDVRTRTYLQRRTEEGKTKTEVIRCLKRYVAREVFGILHDIGMRHTVQNA

SEQ ID NO: 444709 - protein, 388 aa, unidentified
MKPNGSKIKNFTVPNSKDGARKLVKEMLAALSVFSLTDLLIGMEATSVYGDNLVYFLNEDASLVPYNRKIYVLNPKQVNKFKEAYNDLPKNDGVDSFVIADCLRFGRINKEVYLDDYHYKALQNLTRARFFTVQNLTREKQRLMNVLFKKYSSLAQEKVFANTFGATALAVYETFDSADTLAYMDLHELTAFLKEKGKNHFSDPEAVANAIQKAARSSYRLPKTVNDSVNQVLSISISSMKALESQIKEFDKAIAAQMQLIPNTLSSIKGIGPVYSAGIIAEIGNINRFPNQAKLAKYAGLAWRQHQSGNFESQNTRLIKTGNRFLKYYLGEAAMSLVRCDTEYSRFYHLKYNEVNKYQHKRALALTARKFVRLVFRLLKDHRLYIAP

SEQ ID NO: 444710 - protein, 321 aa, unidentified
MESTILGIDIAKQKFDVALLTEEKVITGKFNNTPTGFGMLDRWLVKYGIERVHACLEATGTYGEALAEHLHRAGHVVSVVNPARVKGFAQSELCRTKTDKADAQLIARFCSVMKPETWQPPATEVKELQSLVRRLEALNGMLDQERNRLETADDIVKESIERVIKHLQQEIKATRKLIRNHINRHPDLRGKRDLLESIPGVGPGTSAMILAEFGDVSRFHDAGSMASFCGLTPRHRQSGSSVRGRSMPSKTGSSRIRKALFMPALAAIRYNPVIKAFRARLLANGKHKMIIVGAVMRKLVYFAFGVLKSGRPFDPSIAAAA

SEQ ID NO: 444711 - protein, 328 aa, unidentified
MSERVSLGVDVSKDSLDVCLLQGQESRYYQVANHDEGFADLQRWLRKCGVKKVRACLEATGLYGEQLAEFMHKQGHEVAVVNPLRIKAYAASQLTRNKTDRVDSKLIADFCRTQEVGLWSPPPAEWRELRELVRHRSALVRIRQQERNRLCAGLHSDQVMAMLREHLLFIQKQIDELEKKIQEHIAQHPVQKHRASLLCSIPGISHVTAAVLLAEIRDLLAFDDVRELVAYAGLNPRQQRSGSSVFSPSRISKTGNARIRAALYWPAISALRSNPLIKPLCDRIVREGRPKMVAIVAAMRKLLHLAYGVLKHDRPFNPSHPSTLPALT

SEQ ID NO: 444712 - protein, 491 aa, unidentified
MTNEAHTKKTHVIQVRHRLGAGIDVHNEYLTACIAVQRGPVIERVAVQEFKRTPQGLGEMCRFLGKHIIETIVMEATGVYTPVVLDVLEAFKGWSSIMPRIAVINPTIIRKFPGEVHEDKRDALGLARLGLSGLAMGSYIPQGFQRVLRTLTREMRFIDRDCTRAKNRIKRILSLHGLPLKDFSLDSKWATYVFEALLKARGHFGKTMDLITSGTMNIPSTSKSAIERRVKDFQQYVTISIPLPLLSVLESYYLQLAFNATIMERIRPKIEELVSSDPVVLRQVRQLATIPGLTEAAATSLVAEVGNVARFRNRRAFLNYVGCASAQYISGKTALAGRLSPRANKFARYVFIMAGKAIVDNVTKDSELKEYARKQLNENWNDKKLAYTNTGIKVARVTYAMLRNGQPFDQYRETRPAAPTESNENEGIVPGAPDKLVLKTIRQKTRSLVKFMERHLDGDKGPHFARLEEIFKQLQQGKDDEEESDNQEKTK

SEQ ID NO: 444713 - protein, 313 aa, unidentified
MMFTGIDVSKTELVVTCRPTLTRWTEPNSATGIEALTRQLAEVAPEVIVLEATGGYERDVTAALVAAGLRAVVVNPRQVRAFAKATGQLAKTDRIDADVLALFAERVQPAWRPLEDEATTDLAAVVLRRRQLSEMLTAEKNRLGLARRPVRPSLKKHIAYLERELRITESELREWIEASPIWRVNDDLLQSAPAVGPVTSQTLLAELPELGRLSHKQISALVGVAPMADDSGASRGKRAIVGGRAHVRQVLYMAALVATRCNPLIRQFYQRLLAAGKPKKVALVACMRKLLTILNAMVRDQKPSSPSLTPASR

SEQ ID NO: 444714 - protein, 319 aa, unidentified
MAKRTVEFEQVIERGCGLDVHRDTVVATVMGKGIQTETRTFGTTTSSLKELGEWLERLQVTDGAMESTGIYWKPVLHVLREYPLNLLVVNARHIKNVPGRKTDKADSQWICKLLISGLLKGSFIPPENIQALRDLHRYKKKLVGTVASEKNRIIRVLEDANIKLSSVVSDTSGVTATYLIKGLIEGCKDLEKLVSECYHKKLQATPEQIVEAINGRLTPHLTFLLKAMQKHIQSVEEQLAEIDAEIERHIKDFEKEVELLQTIPGVGREGAIGIVAEIGVDMGVFPSEHHLASHSGMCPGNNESAGKKKAQEHDRGTNT

SEQ ID NO: 444715 - protein, 344 aa, unidentified
MDHFAGMDVSVKETNVCIVDDTGKTVREVKVASEPEALLAVLANPAYRFKRIGLEAGPLSQWLFSGIAEAGLPVICVETRHMRAVLKAQINKTDRNDARGIAQMMRVGLYRPVHVKTLRSQKLRMLLTHRKLLQSKAIAIENDLRATLRNFGLKVGVVGTVKFEMRIKELVENVPDLAMLVEPLLVVRRALREQIGILHRRLLVIVRDDDVCRRLMTVPGVGPVVALTYRATVDVPARFRKSKAVGAVFGLTCSKYQSGEIDRSGRISRCGDEMMRVMLYEAAQSMMRSKKWSWLKAWAMQIARRRGMKKAIVALARRLAVILHRIWVDGTEFRWTREQAAAAA

SEQ ID NO: 444716 - protein, 384 aa, unidentified
MNKHSMIFIGLDTHKEFHEVAYCEEQRGASSVHYGRIPSSKVSVKKLLRQFESKYFGATLHVVYEAGPCGYWIYRLITSLGHCCYVVAPSLIPKKPGERIKTDRRDALKLVKLLKSEDLTPIYVPEPEDEAVRDLYRAREAAMKDLKEAKHQLKALLLRNNIRYEGTANWSKKHLRWLTELILPHPAQQIVLQEQLQTIEERIRRLERLDNELTHHMHQWRYYPVVKAVQAMRGVRLLVAVGVVAELGDLHRFDHPRKLMAYLGLVPSEQSSGGKRHLGAITKAGNGRARRLLIEGAHSYRYPANVSTELQLRQEGLPKDIVDIAWKAQLRLCKRYQRMSKKGKHYNLIITAIAREMAAYIWAIAKEVVLTPVNPKLRLSRVPA

SEQ ID NO: 444717 - protein, 350 aa, unidentified
MESYEVLREKQVLFVGIDIHQRTYHVTGIWGDGRVEFTKGMPADKEILVKYLLQWRLYHIVAVYEAGYFGYTLHDYLNEHGIECMVTPPSLVPGAYGNRVKTDRRDSRKLALYCAKGLLKRVYVPTEEERSHRQVIRTRRQLMRDRIRKQNQIKSFLTQYGIPFPDVVSKWSKHFIEKLNWIRFKDRWLQKSFEHLMHAYEFVDGQIEEQTNLLKELAKEECYRERVAILRSIPGIGIISAMELLLELQDVERFSTADQLAAYVGLTPSQFSSGDHVHMGRITRIGKHQLRALLIEAAWILVRKDVKANETYKRIRARAGSKRAIVAIARHLLIVGRRLLMNNTMYTRFA

SEQ ID NO: 444718 - protein, 449 aa, unidentified
MSNSNLQCVHPRSAHCPDANPRCAHPSLAELDVAAVVGIDWADQKHDVCLLDLEASGTSRYQEQIIPHTPETLMAVVNSWRQRFPGRKVAVVLEQSRGPLMHHLMGYEFLLLYPVNPSALDSYRKTFKSSGAKNDTTDAFLLCDLLHKHSEQYRPWHPQSEPTRKLERLTRDRRQAVGNQTKLTQQLQSTLKEYYPQALDWAGDSLNSLMALDFLERYPTLEAIKRPRTETLRRFYGQHHSRNQAKIEERLQEIKSAQPLHQDSAIIESCRMRVSMLVAQLRALHDAIRNYDETIAEIMAVHPDSDIFTSLPGAGAQMAPRLLAAHGDDRERFAKPGDVQQLSGIAPVIKKGGKSEHVHKRYACPNFMRQTFHEFAGHSILWSRWAKAYYDQQKAKGVATHVVLRALAFKWQRIIWRCWQDRVPYDEDTYIEALRRRNSPLADALPVAP

SEQ ID NO: 444719 - protein, 429 aa, unidentified
MNYNTQNAKIASITEKTLIVGIDVGSETHYARAFDWRNYEYSKKPFAFNNDEAGFAAFKAWMEDMADKHGKESVIPGMEPTGHYWLNLGAYLQEQGMKPVHVNPHHVKKSKELDDNNPNKNDRKDPKTIAGLVNEGRFSYPYIPTGIYAEIRNLSNLRIQTQEELTRIKNRIARWFSIYFPEIKDVYKNPDAVSGMMVIKKAPLPCDIKELGVDGVNQVWRDAKLKGAGLKRARTLVSAAEHSIGSTEAPGSARIEIRNLLNDYEVYKNRMNDLMREIEEKLSEIPYIDKLMEINGIGLKTVSCFIAEVGDIRRFDNPKQLQKLAGYAIVADSSGKHNGESRISHRGRKRLRYALYEAAISVIGKNKEFREIHDYYRRRKQNPLKKMQSVIAIACKLIRIFYTILTKGVDYDGQKMLSDIIRPETIMAA

SEQ ID NO: 444720 - protein, 331 aa, unidentified
MKYSGIDLHSNNSVVTITDEEDRVMAEKRLPNDLTKILDFLKPWKDELVGVVVESTFNWYWLVDGLQEAGYKVHLANTAAIKKYDGLKRSGDETDARHLAHLLRLGILPTGTILPPEQRTVRDLSRKRMQLVRSRTAHILAVENITARQLGARISSNQVKQLACDDVDQMPLPGDVAMAVKANVAVIKTLSEQIKLLEKHLQEKVGARAEYGYLTSAPGIGQVLATTILLETGPIERFAAAGNFASYARCVDSVHTSNHKKKGEGNTKNGNKYLAWAFVEAANFALRYSPEAKRFYDRKKSRTNNVVAIKALAHKPVLSLSKGWRGHASTF

SEQ ID NO: 444721 - protein, 347 aa, unidentified
MRFYTKQHKYYCGIDLHTKKMYVCILDGEGQIRLHQNIKTEPESLLRILTPFREDVVVAVECMFTWYWIADLCIQENISFVLGHALYMKAIHGGKAKNDKIDSHKIATLLRGGMLPQAYVYPVKMRATRDLLRRRNHFMRKRAELFAHIQNTRSQYNLPDPLGCIAKPQNREGIVERFDDPSVQKSMAANLEMIKAYDHTLTQLEHDIIASAKEHDLRSYALLQTIPGVGRILALVILYEIESIERFPSVQDFVSYSRLVKCIKESNGKSYGPSGKKIGNAHLKWAFSEAAVLFLKGNEPAKRYLERLSRKHGKAKALSILAHKLGRTAYFMLKNKEAFNQKQFLNL

SEQ ID NO: 444722 - protein, 369 aa, unidentified
MKDNITYVGLDVNKNSIDVALADNEKTGEVRHYGTIGGDLGSLEKMIRKLVSRSRELRFVYEAGPCGYEIYRHLSNQGLDCIVVAPSLIPKKSGSRIKNDRRDSEMLARLHRAGELTAVYVPHLEDEAMRDLCRAREDAKSAERKAKQQLGAFLLRSGFRYSGKTNWSLAHWRWLSDIKMPHPVQQIVVQEYINAVRACTERVERLAEQIRLLVPEWRLAPVVEAIQALRGVSLIVATTVIAEIGDIGRFDNPRQLMAYLGLVPSEHSSGETIKRGSITKTGNGHARRVLVEAAWAYRLPARVSRRLLERHQSLPEEIRSIAWKAQLRLCGRYRRLIAKGKQAQIAIIAIARELAAFIWAIARNVPATT

SEQ ID NO: 444723 - protein, 339 aa, unidentified
MDITTIGFDLAKTVFQVHGADGEGRPVLRRKLRRGKVLAFFAGLPSCLVGMEACASAHYWARELQALGHKVRLIPPQYVRPFVKTNKNDAADAEAICEAVTRPTMRFAPAKSTEQQSVLMLHRARELLVRQRTMVINALRGHCAEFGLIVAQGASKVEELVAIIEDPGDVRLPPLAREALGSLVEQLRSAQARIKQLEVTLLAWHRSNEASRRLATIPGVGVITATALVATIGDGAQFRSGRQLSAWLGLVPRQHSSGGKDRLGRISKRGDGYIRRLLVHGARTVLRWHRAKPDTRPGWTDQLLARRPTNVVLVAMANKTARVAWALLRYERIYQPVSA

SEQ ID NO: 444724 - protein, 422 aa, unidentified
MNEEDGKRQVEQRCWVGLDWGSEEHAVSVVNDAREVLGKFRTGASLRGLEQLVDRLRGFGAVAGIAIEATRNPVTNYLVSAGFTVYPINPKVSKNWRGCNSVACVKNDERDGLVLAVELAGRHASLRALKQEDPAVAELAGLCEKLRDLIDERTSLLQRLKATLGQYYPEVLGFFSDWTSPVAWRFVKQFPRPEALARARKETLIRFLKANRIGLKPIWLERIEASGEVARWPKPGDHVALEAMALATIAQLQGLQPHIDRMDRLISQRARDLPHAHLLESLPGAGKRLAPVLAAITAAVASGEAEIEAIRCVSGVAPVEDQSGKRRRVRVRRRCNKHWRDIMHLFAYCSTMWCGWAKAFYDMHREQGDRHASALRKLADKWLKIINRMLETGEPYDDERYVQALRRNGSPLYPRLGVKTCG

SEQ ID NO: 444725 - protein, 428 aa, unidentified
MNKDFASTLFVGVDVSSKSNYVCAIDYFGNKLISFSTSNNHPGSVYLSSCLLQCLKDNNLSHIVIAMESTSFYSFHLCNFLSADENLIWFKPKVYCLNPKIINAFKNTFVDSDKTDPHDAYTIADFARVGKIKAAPWNGARYIALQRFTRMRLHLVESINREKLYMLSNIFLKFSELAVLDKGEHPFSNTFGATSTAVLTEFLSPEDIANSPLEELVSFVVEKGKNRFSDPNATAKLLQKAARDSYRLDKALYDPLNVSIASSLNCIKAFEKEVKSIDKAILKAVKALDNYQYECLSSIKGIGPVFAAGIIAEMGDVSKFDDQAALAKYAGLTWRKKQSGNFTAQDTYMTKTGNKYLRYYLIEATGSIIRYNEEYRCFYEKKYKEALKHQHKRALALTARKLVRLVYALLRNNQLYSSSKGDDASKIS

SEQ ID NO: 444726 - protein, 343 aa, unidentified
MQAVATIGLDIAKSVFQVHGVDVHGKVVVRRQLKRRYVLAFFKKLSPCLVGIEACATSHYWSRELQALGHTVRLMPPAYVKPYLKRQKNDATDAEAVCEAVSRPNMRFVETKTAEQQSCLMLHRTRHLFVRQQNAVINSIRAHLAELGIVAPVGRNGVEKLLDVVADPDDDRLPDAARECVAALGAQLRMLKAQILEFDRRILAWHRSNETSKRLDEIPGVGPVLATALVASVADPKAFRSGRDFSAWIGLVPKQNSSGGKEKLGNITKRGDRYLRSLFTAGALAVIRYAKIHGTKHRPWLTALLARRPTKVAAIALANKLARMAWAMMSKGERYREPAALAA

SEQ ID NO: 444727 - protein, 344 aa, unidentified
MRHFVGLDVSLRSVALCIVNDDGDIVFERAIDCEVEAIDDCLRKFGCPITKLGFEAGVMSQMLFHGLQGLGYDVVCMEARQVNAALSAMRNKTDKNDARGIAQVVRSGWYQPVHMKSRESHYIRAMLSSRKAVLRKCVDLENEIRGLFKTFGIRLPSTLSHYRFDDSVRPIIEADEGLAFALLPMLEARGALFAQFREMDKRVKHIAAQDPVCNLLMTTPGVGAMTAMHFKAAVDDPARFKSSRTVAAHFGLTPRRFQSGEIDNPGRISRAGDTEVRAALYTAANALLTRIKETSPLKAWGLRIVKRRGHKRGTVAVARKLAVILHRMWVTGTPYRWSDVEVAK

SEQ ID NO: 444728 - protein, 420 aa, unidentified
MSVQETAVSLLPRVLCYVGIDWAAETHAVCVLDGSGRIKTQFTIGHTAAGFADLLRRLVRLTGDPADVAVGIERPDGRLVDALLEAGHPVVPVSPNAIKTWREGEVLSGAKSDAGDAAVIAEYLRLRAHRLQPATPYTAETKALRTVVRTREDIVDMRVAAANQLSALLDAHWPGAKAIFADVESAIALAFLTRYPTYPSAQHLGEKRLRAFCVKHGYSGRRTAAELLTRLRSAPAGSTDEALTDAVRDAVLAQVAVLTALTVAEKNLGRSVVAHLGEHPDAAIFTSLPRSGQINAAQVLAEWGDSRAAYDSPDAVAALAGVTPVTKASGKYRAVHFRWACNKHFRKAITCFADNSRHASPWAADVYARAIARGHDHPHAVRVLARAWIRVIYRCWIDGVPYDPNKHGNASKLRETAAAA

SEQ ID NO: 444729 - protein, 485 aa, unidentified
MVLGHVGDTGEAVRAAIPFERVSTTTYPSRRGIPILMMEQAMAVRKKVVLELAHPNAAGIDIGSASHYVSVPPDRDDEPVREFKSFTEDMERLADWLKACGVDTVAMESTGVYWIPLFELLDARGFTVFLVNARHVKNVSGRKSDVLDCQWLQQLMSFGLLSGAFRPKDEICALRAVSRQRDMLLSYQARHVQHMQKALTQMNVQLANVISDIVGETGQKIVRAIISGERDGAKLAKMKNVRIRASDADIAKSLRGTWREEHLFALKQAMALFDAYGERLAECDRQLEAMLSALHRDGAGEPGKARRRGRAKNAPGFDVRSHLFAMCGVDLTRIDGIDTTTALKVIAEVGPELSRFKSAKHFASWLGLCPGTKISGGKLLSGATKRTANRAAQALKLAAAALRSSHSALGAYFRRMASRLDRAKAITATAHKLARLIYTMLTKGTEYTDKGQDYYEERYRERVMHHLTKRAKQLGFQLTPIPETV

SEQ ID NO: 444730 - protein, 329 aa, unidentified
MSDYPPTPTIFGADISSTEIVIACASSNQAVKTIANNRQAIKAWLTQLPKDAVIGMEATGRYHCTLADGAVLHGHRVYVINPKHLSLYAKGVGQRGKTDPLDASVIARYVAREGDRLHPYTVPTATQRTLRNLLSQRAGIVKHCGAIRQCLLATESIGSAALKHAHKKALHSLQTLIAEIDVQLHAAVKKDAALEQKCVMLQTITGIGLLNGLALTHRFDRTPFANSDAVVAAYGLDPRPKDSGNKVGRRRLTKQGNAEDRRLIYLAAQSAAKTKTFKPLYVALQAKGFATTEAIIIIARKLLRIAFAVWTSNQPFDPDKLGFQACKKP

SEQ ID NO: 444731 - protein, 404 aa, unidentified
MEPTLLLIGWDWASTSHAVTVLDAAGAIVGCWTVGHTEHDLETLLARLAAYDDPAALPVAIERAEGLVVDRLIAAGHPVVPVDPGAFHAARPRWGAAGAKSDPGDSYKLADYLRTDGHRLRRLEPVDAATRELQALVRLRDDHVAARTAASNQLGALLDAHWPGAKQVFFRLASKITLAFLAEFPTPQAAAQLDEHQLAAFCRRHAYRGGRRPAELLKRLQAAPTPAVGLDPTVLARLVDAQTQLLATLLATIADLDQAITTRLATHHKAHLLARLPRVGHLSHAQLLAELGPILDRASSAEHAAAEAGATPVTRASGKTSSVHFRLAANRRARQALHVYADNARHGSPWAARLYADARARGKRHPQAVRVLGRAWLRVIWACWHTNIPYDPARHRAEQRLAAA

SEQ ID NO: 444732 - protein, 425 aa, unidentified
MNRNANHNPIETPALPAAWIGLDWGDKEHAFALQHPGGTLVTGTLEHSAEQLHQWLKEVGQRYEGRPVSLAIEASRGAVIHALLEYPWLTIYPINPITSARYRSAFAPSGAKDDVPDAKVLLELVRDHSGKLRPLEQQDSATLKLAELVEARRKLVDRRTQVILQLESLLKTYYPQALALVGDFKSAMALEFLDRWPDLLSLKAAKPATIKRFYYQHQIRSDELIAQRLALISQARALTTQAARVSVAILHLRGLLDQLRVFLKHIPLFNREIKHVFAQHPDKALFCDLPGAGPQLAPRLCVAFGTLRGEYPAPDSLQKYAGVAPVREKSGNQVWTHWRWGAPTFLRQTFVEWAGQTVRYSSWAKVYYERMLKKGKSHPVILRALAFKWIRVLWVCWQKRQPYDEARYLKQLRHRKSPNAVPVPA

SEQ ID NO: 444733 - protein, 340 aa, unidentified
MRLIGCDLHASQQSIAMLDRDTGVVIEKTLKHEGEAVREFYAAIPPPVVVGIEATGSMGWFLRVMEDLAIECRVGHPVAIRKAESRRQKHDRRDAALLLQLLAEDRFPTIWMPSTELRDLRALLLHRHQWVRMRTRVQNALHAIAMAHGVRRGHTLWNREGQAVLASLPLAPHTAHRRSELQALYQHLDAQVDRLGERVKHVADERPRATLLMTHPGVGAVTALATEVFVGDPCRFPDGKAVASYVGMIPSEYSSGKRQRLGALSKQGNPFLRFLWCEAAAHAVRRDPDLQRFYRRKMAQKGFAKANVAAARKLGIRLWIMLRDQIDYAEFCRRGLARQS

SEQ ID NO: 444734 - protein, 384 aa, unidentified
MASRRRGPGPSSVLITPDCAGNVVGVDPHKRTVSASVADPRGGIVATEHFRVSGDGHRALEVWAGQFGPIARWGVEGASSWGRHTAIFLIARGYDVRDVCANRTPRSDRARQRGKSDQLDSERIARETLAHPLLPKAFKRAGQDRGPDEHHELLALRHNQRRSILTSRQHLINEAEHLLSSLPLELSEQLPDSTAVRPRLAALAHRNRRRRYDRPTALRLTLLDDYRTQIARLDDEDQQVTRELAVLVRASGSTLGALCGLSTVLVSELLVEVGDPRRFTIGGFARFNASAPLAASTAEGPGEPVRHRYNPGGNRRVNRTLHLMAVTQLRCEPRAQALYENARARGHTKKEARRILKRHLSDVVYRRMIRDLAERAADRPLLAA

SEQ ID NO: 444735 - protein, 361 aa, unidentified
MNGVGTEAAPSIIEGTTMEHYAGIDVSLESSCVCVVDRTGRVIREAKVASEPDALIGWFRSLGVELARIGLEAGPLSQWLYAGMREVGFAMELLETRHVRDAFKTMPVKTDRKDARGIAQLLRLGWFRPVHCKSLPAQETRALLTARKQLQSKLHDIELSLRGTLHGFGLKVGRTTARTFAGRVCELVSGHPTLATIADAFLSARTILAAQLHRLEKRVLAVARSDTRTQLLMSAPGVGPVVALTYVAAIDDPARFKSSKATGAHFGLTPKKYQSGETDVTGRISKIGDASVRTMLYEAANVILTMPVKGSSLKSWAMRVAKRAGMRKAKVALARKLAVVLHRMLVDGTKFIADKAAAAAA

SEQ ID NO: 444736 - protein, 353 aa, unidentified
MIIGCDYHPSFQQIAFVDTETGELKEQRLEHREGAEKFYRALAASGQQVRVGMEASGHGRWFERLLAELQFELWMGDAAEIRRKRGRKQKTDRQDAQHILGLLLKDDFPPIWVPSGENRDLRQLLWHRHRMVQARTRIMNQLQAVALNEGLLCKKRLWRERGRQQLEAFPLAPWASRRRHDLLELLDRLNPTIAELSQAIEQEAEKRPAAQRLMTHPGVGALTALAFVLIIGDADRFQCGKQVASYLGLVPLEDSSGNRRRLGHITKQGSSMLRFLLVEAAQVTVRSLSEWRRKYMHLMMRRGRKTAKVAMARRLAVRLYWMMRQGWDYQQWSKFGSHAGQPGPGDGVQSNIE

SEQ ID NO: 444737 - protein, 410 aa, unidentified
MATQIPNAVPITVGVDTHLDQHVGAVLDQLGRLLGTRAVPSTAAGHAGLLAWARRFGVVERVGIEGTGSYGAGLSRWLRAHGVEVVEVERPKRPAHRGRGKSDPIDAEAAARAVQAGTATARPKAGTGPIESIRALHGARRSAVKARTQAANQLHALVITAPDDLRAGLRRLGVARLVAVAAAFRPRAPSTPTAATKLALKSIAVRYRQLTAEIEALDAHLGRLVAAAAPELVALKGVGTDTAATLLLTAGDNPDRLRSEASFAHLCGVAPIPASSGRTVRHRLNRGGDRQANRALHLLAVRRMGWDPATQAYAARRTAEGKSKPEILRCLKRYIARQLYPLLVGYAALRPATLGTGGPRSGPPTTPQPGGAAVTRRAGAKRRTPPQAGLTAAGGGATASPPHPPQQPVT

SEQ ID NO: 444738 - protein, 384 aa, unidentified
MIKHNILFIGLDTHKEFVEVAYIEDHYGAQSVHYGRVSSAKASITKLAKQFQSKYPDATLHFVYEAGPCGYWIYRLLTSLGHCCYVIAPSLIPKKPGEKVKTDKRDALKLAKLLKSEDLTPIYVPEPEDEAIRDLSRARETAMKDLKDAKYQLKALLLRNNINYKGTANWSLQHLRWLTELILPHPSQQIVLQEYLQTVTERIARLKRLDNELEHHVRNWRYYPVVKAIQALRGVRLLVATGVIAELGDLTRFDHPRKLMSYLGLVPAEHSSGGKRHLGAITKCGNTRARRLLVEGAHTYRYPANISTDLQLRQEGLPKQVVDMAWQAQLRLCRRYQRLMQKGKHYNVVVTAIAREMIAYIWAIAREIVLVQINPKLRLARVPA

SEQ ID NO: 444739 - protein, 373 aa, unidentified
MPKYSTAFGMDVHLRSTTVCALDADTGEAVTRRFPGNPWGEIAGWMDGFPGPSLAAYESGYLGFAPQRELAGLGVECVVAAVSKIPRSAADSASKNDRNDAARMAKAILAHDISPVWVPSPEVEGIRDLAGAYDGATARLAAAKQRLLAFLARRGFVYGGTTPAGNPRKYWTYDFLRWLDKVRPEDDGGVRALAALRNEVEAAAEARADLLSEYRAAVDASPIAAEVAALQSIKGCAFALAAAFSAEVGDFTRFRSGRQVTAYFGLAPSQRSSGDSVRLGGISGAGNALVRKLAVEGSWCYAAARHQPKLMPRDTGVPLEIRMHGRKGSERLLRRREEMLARGMPAAKANAATAAELVRWLWALGMMCREGAE

SEQ ID NO: 444740 - protein, 414 aa, unidentified
MENFQWFVGIDWGSREHRFSLLDHTGRVHGRRTVAHTVLDLAAAFQWVCAQSGVVPAEIAVGVEVPHGVLVDAALEQGFAVFALNPKQTERFRDRFTMAGAKDDSRDADTVGDGLRTDRRAFRRIQPTDPRVVALRELARLADDLTSDLGRLSNRLREQLYRVDAPWLHVCAAADEPWLWTLLDKTPDPTQWRTLSRRHLASVLRRHRLRRLTADALLALVQQPCLHAAPGVATAVGTRVASLVPQLRLLHEQLRHTQRQIDQALAQLAEDTDSESTEHRDVVILQSLPGVGRMVTATMLTETSGALSARDYGTLAALTGAAPVTKQSGKCRFVQMRRACNHRLRQALYHWTRASIQHDAAARAFYERHRRAGTPHATALRCLGARWLRILVAMLRSQTLYDPSTCPIAGGAAA

SEQ ID NO: 444741 - protein, 408 aa, unidentified
MAVVMIGIDPHKGSHTAAAIGPGEEPLGQVQVLASASQAGQLIEWARPWPGRTWAVEGATGLGHLLAQQLLAAGEAVLDVQPKLAARVRLLEAGNTNKNDANDARSVAVAALRSATRREVTAEDQAAVLKVWSKRYRDLGRARTQVACRLHAVLAELVPGGFGKEITAGQGARVLQAITPASPAAAARCELAAEFLADLRRLDAQRRDTRTKLAAAVRESGTTLTQVFGVGPVIAAAILGATGHAGRFGNQDRFAAYNGTAPIEVSSGGRKIHRLSLRGNRRLNHAIHMAAVTQIRHSHSPGRAYFDRKIAEGKTGKEALRALKRQLSDVIYARLQADAAGRGRGAPAEAEGPGGQSGNDSVSSAASSHPRRQLFGQATPGPQLSLRPAAPARQAVPATPVKNSRRAP

SEQ ID NO: 444742 - protein, 457 aa, unidentified
MSQGKRSSRKRVMPPVHTHAAAIDIGAALHVAAVGPDRDPEPVRSFGTFTADLHRLADWFERCGVRTVAMESTGVYWIPAYEVLEQRGFAVVLVNARDAKHVPGRKTDVSDAEWLQRLHEHGLLRASFRPEARIAALRDYLRQRERLLDYAAAHIQHMQKALTQMNLQLQHVAADITGASGLRIIRAIVGGERDPAVLAALRDYRCKASEETIRQALVGNDREEHVFALAQALDLYDTYQAKVTDCDARIAAVLDRLQAERPAPAAPLSEPRHQAQTANALAFPAREALHRILGVDLTQIHGLGPYLALKMVGECGTSLTAWPSAKHFTSWLCLAPSNKISGGKVLSSKTRRSNNRAAALLRLAAVAVGRTETALGAFYRRLSGRVGKAKAVTATARKIAVLFYNALRHGMAYADPGASYYEERYKQRVLANLRRRAKSLGYVLQVTGSTPPAAEVS

SEQ ID NO: 444743 - protein, 401 aa, unidentified
MNTRHEHLWVGIDVGKGHHWAVAINSAGEAVFSRKIPNDETEILKLIATACEAADQVQWAVDLRGKTATLLLVLLAAHGQHITYVPGRSVSRAAEGYRGEGKTDAKDALIIADMVRVRRDFNAIRIPPEQVCTLRLLTAHRRDLIADRVRLVNRTRDLLCGISPALEKAFDYARSRGAVILLTHYQTPAALRRTGIKRLATWLQRRKVRSAQRLAEKAVEAAEQQHTALPGEARAAVLVGELAHQLLALDERIAANDKEIRDLFRTDDRAEIIESLPGMGPILGAEFVAIAGDLSSYRDAGRLAAHAGLAPVPRDSGRRTGNLHRPKRYDRRLRWVFYLSAQSAMMYPGPSRDFYLRKRAEGLRHVQAVLALARRRVDVLWAMLRDHRLYVPALPSAPASS

SEQ ID NO: 444744 - protein, 365 aa, unidentified
MIRLTRKDTPCHGIKVPSMVQFSEQSTLGVSNMNSNVFGVDIAKQVFQIHWVDQETGEVHSDKVKRKDFVQYFANQQPSMIGMEACGGAHHWGRLFKEMGHTVKLLPAKKVKPFVYGNKNDVVDARAIWTAMQQPDMKFIAVKTEEQQAILSIHRMRELLVKHRTAQINSIRGLLTEFGLVMPKGKQAFKEKLPDCLAKLKEDTPSAFMCALQVQVERLTQLDEDIKQLEKQIQSWFKHDEDCQRIAKVPGIGPLTATALIASMGDASAFKSSREFAAWVGMVPRQTGTGGRVHLHGISKRGDVYLRTLLIHGARAVMTHSKEKSEWLVSLQARRPKNVVTVALANKIARTVWSLVANQTEYQPC

SEQ ID NO: 444745 - protein, 316 aa, unidentified
MSSTPACFVGLDVAKAHLDLALRPAAGEVRRFPHTEGGLSALVAYLQPLAPTLIVLEATGGYEADVAAALGLAALPVAVVNPRQVRDFARAIGRLAKTDALDATVLAHFAEAVHPPPRPLPDAAHQALVALVARRRQLVEMLSAERNRLPLAPAGRIRRDVQTHIHFLEQRLKKANDDLQHTLRASPLWRAADDLLQSVPGIGPTSSAVLVAELPELGRLSPRAVAALVGVAPLNRDRGARHGGRTIWGGRATVRGTLYMATLVAKSHNPVIAAFYRRLRAAGKPPKVALVAAMHKLLTILNAIMRTQRPWTHETA

SEQ ID NO: 444746 - protein, 433 aa, unidentified
MEEVTDEPLYRDRVCGIDIGKAGMAATIRVPSGRDRSRRAAETRSFGTTKREVLALADWLRSWQVPAVVMEATGDYWKGPFYRLEAEGFECVLADAKQVKNLPGRPKRDPSDSRWLAACFERGAVTACFVATPEFRVIRLRTRYRRELTEERTREKQRAEKLLESAAIKLSSVVSDLHGVTGRDIMDHLIAGEHDPKALAQLARARARRKIAQLEEAVEGAEFFTADHAALLKVMLARIDRVQRETGRLTAVINRLLAPYEEQLQQAESMPGWGRRAAQDAVAETGAGMTRFRTGGHLSSWAGKTPLDNQSGTRTGRAKSKKGNRYLAAITGETAAAVSKTQTREGARYRRLARRRGKAKALAATGNTQLKVYHKLLSNPGMRHQDLGADYYERQRDTRRQISHHVGKLGALGFEVTLCRRPDPDGSDTTQAA

SEQ ID NO: 444747 - protein, 431 aa, unidentified
MSGRRSMSSPYPPTGDEQPVRTFRTFSGDLHRLADWLEETGITTVAMESTSVYWIPVFEILEARGFEVLLVNARDVKHVPGRKTDVQDAQWLQQLHQHGLLRGSFRPRDGVVRLRAYLRHRERLVEYAASHIQHMQKALMQMNVQLHHVVSDITGATGMRIIRAIVGGNQAPERLAEFRDVRCAASEATIRAALTGNYRAEHIFALRHGLELYDVHQAKIAECDAEIEQVLRALNEARTMPREPLPAVRHAKAKNEPEFDARPALYTLLGADLTQIHGFGAYTVLRLVAECGDDMRKWPTAKHFTSWLSLAPRNKISGGRLLSSKTRRSSNRAATLLRIAAVNVGRTQTALGAFYRRLAARTGKAKAVTATARKLAILFYKALRFGMAYVDPGASYYEERYRQRVIEHLQRRARHFGFALVADPAATGGVS

SEQ ID NO: 444748 - protein, 392 aa, unidentified
MSLIEDCVGLAGAGPQTWGTDLMSNIVFVGLDVHKATIAVAVAEGARGGEVRELGNFINHPDQIKKLVERLAKGGPSLSFCYEAGPCGYGLYRQLIGLGHECVVVAPSLIPMKPGDRVKTDRRDAVMLAKLHRAGELTAVWVPDDAHEAMRDVVRARATAVRVLVKARQHLQGFLLRHGRIYAGKKGWTLAYRRWLATVRFDHSAQQVVLQDYIHAVTNGEERVERLTQQIADLAQTWSQAPVIAALQAMRGVAFIVAVTVVAEVGDFTRFANPRQLMAYLGLVPSEHSSGSTVRRAGITKAGNALARRALIEGAWTYRMQARVSRKLHDRIDGLPQAVRDIAWKAQVRLCARYRRLAAAGKPKVVVTTAIAREMLGFIWAIAQTVQAPRAI

SEQ ID NO: 444749 - protein, 543 aa, unidentified
MAASNAQLRVNCWSALNRSNSGTVAADISLAVIHKRAKRPGTARRSELVNNCAAGENFAGERPAPARSQSQSPHPKRVIGRLLAEPEALAPTSHRKTPPEGRYISKMDGRAKRRKNHKEQKQTMNDSQQWQQHRAFGALDWASEKHSVVLVNQTGKVIEDFEIEHSALGWKKFREKLQPYGSIPFAIETSQGVAVEQLLEAGMLVYPLNPKSAQAYRERKAPSGVKDDRLDAWSFADALRMDGQNWKALRPEEPLIKELRLLCRDEVTLIEQRTAFVNQLRHALAEYYPAALEAFEDWTSLSAWMFLQRFATPESLAQAGKRQWQKFLHSRRLWGSDQGPRRMEIFAHATEFTGTPPTVKAKSLLAQSLVQMLFAIEKQLAVYRQRIEELFARHPDHDLFGSLPGAGPKIAPRLLSEIGDDRQRFGGDPQNLQCLAGSAPVTKRSGKQRKYWPVHQRWACDKHLRHALHLFSEQSLSRCAWAEIYYQHHRQKNQSHANALRRLSHRWLKIIYKMWIDRTPYNAELHHRNQLQHGSWIFQLQKS

SEQ ID NO: 444750 - protein, 391 aa, unidentified
MSMYFIGIDISKYKHDCCIISAADQKVVSKVTIKNNKAGFNELLTIIHSLANPADIRIGFESTAHYALNLELFLENSLLTFMEVNPALISEYKKSKTLRRTKTDSVDCESIARWLMTVEYKPHSKGFYHAYSLKSLTRLRDKLIRQRSFYLVKITNVLDHTFPEFKPFFNERLSKTALYLLENYGSAEKMARMNSASYEKLRSVSRGKFSPQQFLRLKELAANTVGVNNSIFDVELNSLLSLCKSLVKEIDTIEKEINKLIEEVHPHYMSVPGIGPLSAAVIYSEYGDISNFTNPGQMLAFAGIEPGINESGTESHGGKMVKRGSSQLRYTLINCCLPLIRFDMTFATYYAKKREEGKPHRVAITHVAKKLIRVIYTLESQDIDFNAQKLR

SEQ ID NO: 444751 - protein, 388 aa, unidentified
MQIAADRPQASTAIRTDLGAIFVSLELSRSTWLITSLSPGGGEKMSKHSVRGCDVAGLLERFAHLREKARARTGQRFPIIVIHEAGPDGFWIHRMLNAEGIESHVVDPASIATSRRRRRAKTDRIDGEALVRALLAYKRGEPRVCSMVKAPTPEEEDRRRLCRERKVLTAERVLHVNRIKGLLFSQGITGYEPLRRDRRERLEQLQTGDGHTLPDHLKGQVRRELDRLELLLDQIKAVEAERDALLAAERAAARTPAAMLLDIKGIGPEFAAILWSEGLFRHFDNRRQVAAYAGLAPTPWQSGSVDREQGVSKAGNPRLRTTLIQLTWLWLRNQPHSALTLWFHERVRRNGGRLRKTTIVAVARKLLVALWKYVTAGVVIEGAVMKPT

SEQ ID NO: 444752 - protein, 444 aa, unidentified
MSRRRPYPAYECQYRADVWRGGLAYLAGGSCSLEESTAVVHQLFVGIDWAVEGHQVCLLRPTGKPRQVTVLHAADAYARFLADLRREVDGEAGLIAVAIETPLHPLVDALLEAGIPVYSLNPKQLDRFRDRHSPAGAKDDRRDAFVLADALRSDLPKFHRVEQPDPLTAQLIVTFRHYRTLREDLGCTTNRLWQLLQRCAPHLLALSESPDDDAVFWDLLDLSLDPEKARTLRLARVQAVLKRHHIRRFGASEALALLRRPRLQLTPGTLAALLCQAADLTAQARVTYAALRRARATLKRLLTQAGSRAEVVDSLPGADVVVTAAFLAEAPGALREQDLQALRTRCGTAPVTRRSGTSMHSVRMRRACVPALRDACWAMARTAVLHDPWARQYYRALIGRGHSHNRALRSVADRLLARLVVLLRTGTHWDPEKARSEDATATAA

SEQ ID NO: 444753 - protein, 376 aa, unidentified
MKIFVGIDIAKLNHFAAAISSDGEILLEPFKFTNDADGFQLLVSKLESFDKNSIIIGLESTAHYGDNLVRYLVAEFYQVCVLNPIKTCQMRKNNVRKTKTDKVDTFVIAKTLMMQDVLRFITFFDLDMMDLKALGRFRQKTIKQRTRLKIQLTTYVDQVFPEIQYFFKSGLHQNAVYALLKEAPSPKEIASMHMTHLANLLKVNSHGHFTKEQAKELRVLAQKSVGANDSAISIQITQTIQQIELLDSQLEKIEAEMTDIMKYNDSVIMTIPGIGYINGGMILGEIGDIHRFSNPNKLLAFAGLEPSVYQSDNFQAKTTRMSKRGSRVLRYALVNAAWNVVRNNATFKAYYDAKRAEGRSHYNALGHCTGKLVRVI

SEQ ID NO: 444754 - protein, 397 aa, unidentified
MKCPQGLQHRGSNAHSADGRVRERHIQHEGGTDMTTVHYVGMDVDKQKIVLARLGAGRDTTVIEHVIANTPSAVKKYFSALVGDSEVQATYEAGCFGFGLYRQLSAMGVSVVLAAPGLIPRKPSDRVKTDRRDAHGLALALRAGQLTGIYIPTEQDESVRDYLRMYDALRGDLRICKQRVLQFLLRRGIRYGGGGPWTVKHKHWMSSLEFVQARDRQTLDMYLSQMQELEARCSEAATEVESIAAQDCYRQQTKKLTAFKGIKTLIALSFVSDIGDFRRFATARQFMAYLGLVPSEHSSGNKRRQGGITKAGNSHLRRLLVEAAWHYRSYHPSSRDLTERRRGVDPGVLSYANRAGRRLNRKYLHMVLRGKRSQVAVTAVSRELAGFLWGVMTDHVA

SEQ ID NO: 444755 - protein, 369 aa, unidentified
MAVSVSMRSDDDRVVIAVDPHKASWTAAAVGATLEPLAITRVPVSRKGYRALRRFARQWPNANWAIEGAAGLGAPLTTRLCADQIEVIDVPAKLAARVRLLSTGHGRKSDDADALSVGIAALTSRGLNHAEIDSATTALRAIVEHRDDLVKTRTQTINRLHVVLTHLVPGGAGHALTAAHAAEFIRGVRTQDAAAKTLRALAVDLISEVRQLDRRISKAAHDIDAAVKASATTLTQLHGVGALTAGKILSRVGDINRFRSAAAFASYTGTAPIEASSGDVVRHRLSRAGDRQLNFCLHVIAITQVRHHTPARDYYLRKRSEGKNHKEAMRCLKRRLSNVVYQQMRCDAQRPKADPGGHSGAALSSRAAG

SEQ ID NO: 444756 - protein, 342 aa, unidentified
MKITTVGIDLAKNVIQVHGINEQGKKAFNKQLQRKHVLTHFAQLPPCLIGMEACSSAHFWARKLQSQRHTVKLMAPQFVKPYVKTNKNDAADAEAICEAVTRPTMRFVPIKNGEQQAVLSLHRARQGFVKARTAQANQIRGLLMEYGITIPQGISHIRKRIPELLEDAENELPGVFRQLLQRPGNHLKVLDHQAAELDEQIQAWHRGSEASKKLARIPGIGPLTASALVASIGDARSFKNGRQLAAWLGLVPRQHSSGGKPRLQGISKRGDTYLRTLLIHGARSVIRVATGKTTPVHCWAVNLVERRNKNVAAVALANKNARIVWALMTQNRECQSDFVQTV

SEQ ID NO: 444757 - protein, 415 aa, unidentified
MLKIVYPICCGIDVHKTFVVCSIATTDSHNITTYINKRFSTFTSDLHSLAQWLKKHQCYHVCMESTGKYWIPVYNILEPFCRITLAHPKYVKAIRGRKTDKKDSMWIADLFKHDLVPGSFIPDKPIRNLREIMRYRFKLVCFRSSEKNRLQNSLSVSNIQLASVVSDTWGKSAQAIISHLLDHPGDTGFDFLPLLHGSMRNKHEQIALAVEGTISDVQASKIKACQKHVGFLNQLIEQLEILADSLAQSYRPALKIIESVPGIRHLSALVILAEIGDDMSRFPSAKHLCSWAGLAPCNDQSAGKKKSTKISRAGVYIKPVLVQCALAAIKDKDFPYYRLRYEAIRHRRGHKKAVIAIARMMLSTIHAMLSQGELFNPQIYSESLQKPAYILNPQQQLEHLAKRLGYTVTKISESA

SEQ ID NO: 444758 - protein, 357 aa, unidentified
MRIIGCDLHTRQETMAMLDTETGEVVEKTLQHEGEKVREFYSALARPVQVGIEATGSMLWFLNLMEELGIDSQVGHPAKIRAAEPRKQKHDRRDADLLLKLLMENRFPSIWMPSKELRDLRALLWHRHQWVRTRTRVQNALQAMALTNGLRRGKSLWSQEGQHAIASLPLGPHAAHRRTALQALYRELDADINALDKRVLEQALERPEARRLMTHPGVGPVTALATDVFLGDPVRFEDAKALASYVGMIPSEYSSAGRQRLGGLSKQGNPLLRFLWCEAAVHAVRRDPLLQRFYRRKLVQKGMGKARVAVARKLGIRLYIMLRDQIDYEEFCRRGQMRQKSGAARAGIPEVGYGPSL

SEQ ID NO: 444759 - protein, 338 aa, unidentified
MYYTGIDLHKFTSYLTTIDSDGCIVKQANIKNVDYNFLQYFSDLSGEHQTTVESTCTWYWLNDLLTSINIPLTLAHAKYVKAIAYAKVKTDKVDSHILAQLLRLNFIPQAHKISNENRTLRDALRARLKIVQRCTSVTNSMALVLAKYNLTEPEGLQDIPKLQYDQLSAHASLLKEQMLTLEKSLYPYLIPNDDIQRLLWIPGIGKMNAFTILLEVDDINRFADVKNFFSYCRLVPSARNSAGKSKQRSSKDGNRYLKIVFTDAATHAVQYYSEIRKYHNSLLRKKNKQIAKTIIAKEIAEIVFHVLKNKTNFNNKFKGVELQHKKSLQWPRVVSPDV

SEQ ID NO: 444760 - protein, 368 aa, unidentified
MRMDLIGFVTFIGVDLHKCTVTLRAVRADGELLGQLKCDTKCIERIAEWIKSLPGPKWLAVEACPFVEWFIDRFTPCVDRLDIADATELSMRRGKRRKNDPNDALDIALRLARGECPLGYIADPQLMQLRKFGRHWRQLSRSLGKAKQGMKSMLNAANIRGPQFDGPRAHRWFLTFGGLLQPAQRLAFGNYLDQILLIERQREILRREMLTAARSPQFAATEQLLKSVPGIGPIWALIIASEIGPFGRFPNADALEFWAGMTADLKESAGRTQSGNITKAGSATLRWALCQAAVTLCQSDAKQEATRQRFIARMPRAKANVVMGRRLLRTLYAMVRDGKPYQCGERRDRTKTANKAKAKRKARTVQPA

SEQ ID NO: 444761 - protein, 383 aa, unidentified
MKAVCGLDVHKDSVYLCILSEFGELIEKVFGVLTYQLEEMRDLMLHHHVVEVSMESTSVYWIPIWRVLSPHFKLNLANPYFIKQLPGRKSDVKDAQWIAECTMKELIRGSFVPPETIQRLRQYDRRIFDLNEEIVRKLSKLDAVLQRCNIRLSNYVSNVDSKSYKAVVRAISQGITAPEELVKLIHGRIINHHGIDVITASLKGVVSLAEIDMISQLRDELDMAEAHKEKCQAKMLEICEREFPEELKRLQTIPGIKERAATSLIAEIGTDMNKFETANHLASWSGLKPRNDESNKKIKSRSITHGNVYLRKTIIECAWAASRTKDCFFSRFSYHQTQVRKKNKMKVLVAVARKMLIAVWHVLHDNTIYIDFTTDRKTSRTKG

SEQ ID NO: 444762 - protein, 392 aa, unidentified
MSHQDYHFDASRSLTALEQGSTIIAVIEMSQSKWLVAALVPGVERHPLKKFDAQEEGLLKLLHRWRNEAGQAGREIKRIVVAYEAGRDGFWLARWLRARDVEAYVIHPTSIAVSREHRRAKTDRLDTELLMRAFLGWLRGEKRHCSMVAIPTIEEEDARRPNRERQNLVTEQTRIVNQMKAIFVRFGIRAFRPTLRKVEGKLKDLRTAEGSPLPENTRAELCRHLARLRVVRDQIRAVEQERLRKLAAAPAAEKGSHVMVRLIARVLGVGIETADMLVNEVLSRRWRDHKAIARYAGLTGSPDESGKRRRERGLARAGSARVRCGMIQFAWRFVRFQKGSALAQWFAARTADRRASTRKTMIVALARKLLIALWRLATRGEVPPGIILRPAS

SEQ ID NO: 444763 - protein, 342 aa, unidentified
MELQAIGIDLGKTVFHLVGLDSNGKIVVRKKCSRTQILAYTANVRVRVIGMEACSGAHFLGRALRAQGHEVRLMPAQYVKPYIKTNKSDYIDAEAIAEAVQRPTMRFVPIKTEEQLDLQATHRVRERWVMRRTAVVNQIRGLLLERGLTLPKGRSHVDHALPEILTDPALRLSGSFRVLLGQLQLELEQLTARIEQMDAVIRQTARENEACQRLTAIPGVGPVTATALVAAIGNGAGFRRGKDLAAWVGMVPREYSTGGKQKLLGISKRGNSYLRRLFVQGARVVLQYRTKQAPGLSVWLSQLMARTHQNVVVALANKLLRMAWAVLCKNEAYRTPELAAAA

SEQ ID NO: 444764 - protein, 327 aa, unidentified
MNQPATIVGIDVSKASLAVCYQVQDKFQHTEVSNSKAGFQQLVRRCGVECCYVMEATGVYYLALAYYLVEHGAQVAVLNPLVVRRFIQMHLGKGKSDRKDAQWLLRYGQQQPLPVWQPEEPLLVECRQIEQVAEQFIRQRTMVRNSLLALQQQPVVSAVARKRLQQTLTSLDQQIQALEAELLTLLEQHYTREMPLLCSIPGIGRKTAAQLLLFAKGFAQVQNYRQLIAKAGLCPREYSSGSSVRGKTRITRMGGGLIRSKLFMCSFAAKQSNAACKALYDRLVAKGKNGKVALVAVCNKLLKQACAIVQSGVPYQAEFTSKLVPNP

SEQ ID NO: 444765 - protein, 387 aa, unidentified
MAQVDDLSYSLVPFEPHGTLVAVLEMSQSSWLAAAVVPSVERRPLKKLEPDPAALLRLVEKWRDQAAAAGGCVTRVVLAFEAGRDGFWLARWLRARGIEAYVIHSTSVAVSREHRRAKTDRLDTEMLIRVFLGWLRGEPRHCKMVAVPSLEEEDAKRPSRERENLVGERTRIVNRMKAALIRLGVRGFKPELLKAPDHLEALRTPEGVPIPPNLLAEMRRDMARLAWVREQIEAVERSRRERLEQAPADGPHALVRLLARVVGVGLETADMLVQEVLSRNLRDRRAVARYAGVTGSPDESGAKRRERGLAKAGNARVRRGLMQLAWRFLRFQSESALAKWYRERTEGGGKRKTTMIVALARKLLIALWRLVRLGEIPPGVRLRTALA

SEQ ID NO: 444766 - protein, 328 aa, unidentified
MKMYVGIDVAKDTLAVALPQTATSWKVRSIPNAPGAIRKLIKELPDQTHVVLEATGSYSVLLTYLLCQAQVVVSVINPKQSHHFAQLQLAVTKTDESDAVLLARYGQLVQPPRYNMESDVLLRLKQKRTLLRHYKKQQRSLANLQHAFSPLPVQDAQVGSSLQQVLSHFQTAITEVTAEIEQLTKQHFPDQLQRLTSIQGISTTIATALIEVTSGFAQFHSAKALAKYIGVVPVIYQSGKLQITKGICKTGDPHLRSMLYMASWSAIRYNKPCQELYQRLKAAGKAPKVALIAVVNKLLRQAFAVVKFDQDFDPNYQPVLRSLPCFLT

SEQ ID NO: 444767 - protein, 455 aa, unidentified
MKEKELSMQIVHPNAAGIDIGSKTHWVAVDQVPNNVREFGVYTRDHQRLIDHLKSYKITSVAMESTGSYWQTLFHALQKAGFEVILVQGNQTRNVQGKKTDILDCMWIQKLHSLGLLSSSFLLSDYLQTLRTYYSHREHLVEQTAMYINKMQKALRLMNIRLDVAIRDLTGKSGRAILDAILAGHRNPSYLASPAHFRVKKSPDEIAAALHGNWREDLLFELRSCLTFYDAYRKEILVCDQKIQSILSEYLPDAETLTLQKNPEKKIYKQVNRNSPSFNVRQLAFSHLKADLFQIPGVSHSTVLCMLCNMGSDIKKFATAKRFASWLRLVPNNKLSGGRIISSKTPKGKNAIALSLRQAANSIGNQKEHPLTPFFKRIAYRKGRNAAITATARKLAIIIWNMIIKSESYKQPNSQLLLEKRKYAQVKNIKLRLFRLNLSEGEMMDLFQKTSFPST

SEQ ID NO: 444768 - protein, 351 aa, unidentified
MMIIGVDYHPSDQYIAFVDTETGESGEQRLNHGDGEAEKFYRELKQRGVSVRVGMEATGYSRWFERLLAGLGIDVWIGDAAEIKTKRVRKQKTDRNDAGLLLKLLLENNFPRIWVPSPENRDLRQLLWHRHRLVQMRTRIMNQLQALAMNEGNRRKKKLWSEQGRAQLEKLPLATWASRRRQDLLELLDRMNPAIEALTTAVEQEAKKWPEALRLMTHPGVGPLTALAFVLIIGTPERFPCGKQIGSYVGLIPCEDSSAGHQRLGHITKQGSSLLRFLLVEAAQAAARWDADWRRRYMHLAMRRQNSIAKVAMARRLAVRLYWMWRRGWDYSQWVKFGSNAGQLGTGHGVN

SEQ ID NO: 444769 - protein, 344 aa, unidentified
MEISTLSIDLAKNVFQVAGFNHHHKRECNKRLNRPKLNAFMANTPPCRVVMEACYSSHYWGRVFASYGHTVDLIPAQHVTPFVRGNKNDSNDALAIYEASLRPHIKFVPIKTEAQQEILMLHKIRERLLQNRIAATNQLRGLLVDFGYVFPVGIKALEQGLIAFESDPELRPQLRIMVSDIYTEYKTLVKRIKAIEAMLTAHVERDTNAKILHSIPGVGVLNASAYAASIGSGQAFKNAKELGVWLGLTPKQYASGDKSKMSGITKRGNSYLRKQLIHGARALIARSHHKTDALSQWINQLREKKHFNCVVVATAHRLARLMWILLTKQTLYSPQYVQNTQKDA

SEQ ID NO: 444770 - protein, 319 aa, unidentified
MAQNDRIVVGIDVAKDKVDACIRRFTLRQTFPNTAQGHRKLVAWLRKYKVGKAVMEASGGYEREWRNVLHKAGIEVRIVDPRRVRSFAQSAGRLAKNDPIDAEMIAWFAETFSQAPGQIPDAAREELAALAKARTALVGVKIRLQAQDEHAAPEPARKAYARVLKSLAAEIDKLEAAISAKVKATPEFAERAEIIESVPGLAQATSAILVAGMPELGQVSDKVAAALIGVAPYDDDSGKRRGERYIKGGRRWVRNGIYMPCLGAATQCNPVLKAHYQRLLAKGKEPKVALVACMRKLIIILNTLLARRQKWNPGRHAMG

SEQ ID NO: 444771 - protein, 349 aa, unidentified
MAMVCGLDLHRRQITFDAMVTETGESWRGRVWQPDRARFRRWLREDVTARAHDGQVALVVEGCTGWRFVVEEITAAGFEAHVAETADTQAMRGRKRHAKTDRTDAALLRELLTCGDLPESWIPPEVVLEWRERVRLYKALVDQRTMWCQRIHAELYQHGVSVPEGSVRSERTRILLASDEVQLSAAARDRIRVGYQMIAATETEAQPLKRDLQRFGTKQPACRALVDAQYGIGGLIAVAVWSELGDCRRFARSAQAVRHSGLDVTVDASDRRRAGGRLSRQGPETLRWALYEAATNSSHRRSPDHDYYAKVKDRHGGKIAAISVARQLARRCYHVLRNLDPDLVYALPA

SEQ ID NO: 444772 - protein, 391 aa, unidentified
MRFAARRTRRTGRRSLIGVWPPASTEACSPTGPDITLTKEEIGIMMVVLGTDAHKRSHTVVAVDEAGAQIGELTVAATSDGHLRALCWAGQFDSRRWAIEDCRHLSRRLEADLLAAGEWVVRVPPKMMAGVRRSARTRGKSDPIDALATARAALREPGLPVARLDGPSREIKLLVDYREALVRERTATQNRLRWRLHELEPGFDPPTGSLNRYKTLDAIDQFLNGHDGVVATLAAREVARIRDITQQARQLERDIAALVANVAPSLLALPGCGTLTAAKLVGEAADITRFRDRNAYAMWAGAAPIPVWSANNERFRLNRGGNRQTNAALHRIAVTQIRMHPDAQAFMARRLANGDTKRQALRALKRRLSDVVYRTMIQNTQTLQAAQPQAA

SEQ ID NO: 444773 - protein, 430 aa, unidentified
MSTDSKRSKPAGLPIVHPFAAGIDIGSRFHVVAVSPDLCDEPVQTFQAFTSDLQRMADWLVATGTKTVVMESTGVYWVAAYEVLESRGLDVVLANAREARAVPGRKSDVNDAQWLQRLHACGLLRASFRPGRDIAELRAYLRARERHTDYAAAHIQHMQKALTFMNLQLHHVIATITGATGMKIIRAIVAGERDPSKLAEIRAVRCKESLETIRSALVGNYQPEHVFALKQALALYDFYQHCIDECDVEIASTVARLNAGRPLPEAPLPKAKHRGKAPHEPNFGVREAMYQLAGTDLTQIHGIGPFLALRLIGECGTDLSRWPTAKHFTSWLSLAPGCKISGGKVLSAHTKKTSNRVTVALRLAAVTATARKIAVLFYNAMRFGMDYRDPGADHYERQYRERVIKQLHRRAAQFGFALQPRNQAEAERVS

SEQ ID NO: 444774 - protein, 375 aa, unidentified
MRGSFSRRSCAGNHDAGSGRPVTSQEANHAELQPITPVLCRDRSTRKKHVRAYPQRQGNVFERDLPAEPDSFLDAVKPFRKNLVVGCECMFAWYWLADLCEDKRIPFVLGHALAMKHIHGGKSKSDKIDAGKLANMLRGGMFPLAYVYPRGKRQTRDLLRRRSFFVRQRAQLITHIVNTNSQFNLPPFSKKLSYAANRSAEIADRFADPSTRLMIHTDLNLIDAYDSQIAELERHLLKSAKVDDPVTFGFLRTIPGIGPILGLILLYEIDRIERFPEAGNFLSYSRLVRCAHASAGKVKGFGGKKIGNAHLKWAFSEAACLMLRTCIPVKAWMQRQESKRGKRKALSVLEAKIGRTVFHLWRKQQAFDVKKFLHV

SEQ ID NO: 444775 - protein, 394 aa, unidentified
MAFKIFRKNCCGLDVHKTWIYACMGITDTNGRTEYKQARFSSFTKGLQKLADWLAKYDCNDVCMESTGKFWIPVFNILEKTCWVTLAYPKYTKPQKGNKTDHKDAKWICDLYMCDMVNPSFIPPPDIRQLRDLMRYRSKLTNIMTSEKNRALNCLTVSNLKLDDVFSDVFGKSSRSVIRYILEHPGETFQVAPFIDRRCKHPVEEIQAVIDGTISHQQAVKLRECLQHLDELEVHKTNVEKEILCLVQQYPYQLELLQTVPGFSGNIMTAIALISEIGADMSVFPSAKHLISWAGCCPRNDQSSKKVKSTRISRAGVYLKPLLVQVAIHPFTANADELSTAGAVEIRCQICDGRFLSMWVALFIFLCCPLPSRPKSLHVHNGRIVILASVAWIF

SEQ ID NO: 444776 - protein, 400 aa, unidentified
MLSIGIDVSKGKSTVCGMKPGGEIVYTPFEIQHTREGMSDLVSLLRGSGEEVRAVLESTGSYHCPVVAALLENGIFVSVVNSLRMKRFCSQSIRKVKTDRIDAMQIALYGLAYWQELQPARLPEDTYRELQLLARQYYQMTSMLIKAKVDFNALCDQVLPGMQELMNDHAGRHKLSDFVLRYRHTTHILEMGETRFRKDYCKWAEKKGYRNRERMAALIFATAQNGIPVLPNAPSTQIVITEAIRVLHTVEASRDAILTQMQALAKTLPEYSLVREMPCIGDTLAPRLIAEIGDVRRFHSKRALIAYAGIDAPPYQSGKFCANNRHISKRGNRYLRKTGYEVMQSYVMHKPANDPIFTFIEKKRGEGKSGKLAMVAGLNKFLRVYYGKVTELYRSLSAIE

SEQ ID NO: 444777 - protein, 370 aa, unidentified
MLDTTTFVGLDVHARSIKAVSLDVMTGEVRCATFGYDAGAVAEWVRSVDPGARCVYESGVTGFDLQKRLSGLGVDCVVGAVSKMIKPSADRRRKNDRNDAEFLARMLSVGNVVEVWVPDDECEAARDLTRALEDARDDLSRSKQRLSKFLLRHGLVFGERTPTGRRKGNWTRAHWSWIESIRFAEGADNDALAYYVDAVRRAAEEKARLEGLVEAEARKPRWRKRVDSLRCLKGVDTASAADLVFEAGEFSRFRNARSFAAWVGLTPSEHSSGESDRRGAIAKAGNKHLRKTLVEAAWHYLTCSGRPKDLAKGQAPDRGARRHAAKGVRRLVERREALLARGVHGSKANVATARELACWVWAVGLMAEGA

SEQ ID NO: 444778 - protein, 340 aa, unidentified
MSKLTVYVGLDYHKDSIQACVMDRSGQILANRRCANQVEALVRLVTSLGDDVHAAVESCTGAAALADELATRHGWSISLAHPGYVARMKRTPDKTDWGDARVLADLVRVGYLPKVWLAPEDVRQLRALVRYRQQLVDRRRAIKLRITALLRDARVAEPHSRWSKAWFAWLPTAEGLGSQARWVINNHIKEYHHVTGLIVEAEHRLCAVTAGDPVIEQMVALKGVGLITAATIRAEVGRFDRFATGKQLARFCGLSPRNASSGQRQADAGLIPAGNPQLRATLIEAAHRLIRFDPRWAALADRLRGAGKPACVVVAAVANRWVRWLFHQVEGGAIELNDVA

SEQ ID NO: 444779 - protein, 402 aa, unidentified
MNNPTLCIDVSKSSSFATGFLSYNKPYSKPFDFSHTPEGMKSALHCLKELQYDTSNKPDVVLEATGNFYKPVTQYFISLGYSVYVLNPLQTSMEKRKSIRKIKTDPVDTYRIAQVYYTKDLKPFKEQSQYSQELRSLCRQWDGFNTLNTETQLRFRSMLTLVFPKYDTVFDHLCNPTSLRVIAYFPSPKSILSAKQEELFNLIKLSRHSNDWCNQKVDMLIAAARESISYDGAQQSNIRVLQSYVKSLLTHKEILADIRAQINEWTKLSPDFQLLLSIPGVGEVTAATILGEIGDISNFETAKQLVAYAGLDPSVYQSGNFRAKNTKISKRGTPYLRKALFQASSAAVRKRPKGPCNSVLYEYYTNKVNAGKPPKVALVATCSKLLRIIFGMLSSQTEFRAE

SEQ ID NO: 444780 - protein, 347 aa, unidentified
MDHYAGIDVSLECSSVCVVDASGKIVREGKVATEPEALIAWLGSLGFGLLRVGLEAGPFSQWLYAAMQKTGLAVELLETRHVRAAFEAMPVKTDRNDARGIAQLMRLGWFRPVHCKSLPAQEVRALLTARKLVQSKLFDVEMSLRGILRGFGLKVGRTTPKRFAGRIRELVAGHATLEVVAVSLLAVHEVMRREFGSLEKRVRSMAREDARARLLMSAPGVGAIVALTYVSAVDDPRRFTSSKGIGAHFGLTPKRYQSGERDVTGRISKIGDASVRAALYEAAHVILTRPVRGSALKSWAAKLVKRAGMKKAKVALARKLAVILHRMWVDGREFIFTTPRNAAAAAA

SEQ ID NO: 444781 - protein, 400 aa, unidentified
MLSIGIDVSKGKSTVCGMKPGGEIVYTPFEVQHTREGMSELVSLLRGSGEEVRAVLESTGSYHCPVVTALLENGIFVSVVNSLRMKRFCSQSIRKVKTDRIDAMQIALYGLAYWQELQPTRPPEDTYRELQLLARQYYQMTSLLIKAKVDFNALCDQVLPGMQELMSDHAGRHKLSDFVLRYRHTTHILEMGETRFRKDYCKWAEKKGYRNCERMAALIFATAQNGIPVLPNAPSTQIVITEAIRVLHTVEASRDAILTQMQALAKTLPEYSLVREMPCIGDTLAPRLIAEIGDVRRFHSKRALIAYAGIDAPPYQSGKFCANNRHISKRGNRYLRKTGYEVMQSYVMHKPANDPIFTFIEKKRGEGKSGKLAMVAGLNKFLRVYYGKVTELYRSLPAIE

SEQ ID NO: 444782 - protein, 424 aa, unidentified
MKVTYQTCCGVDVHKSFLVATIVKTTGGIEPSYQKKRFSTFNNSILEFKQWLLDNDCHDVCMESTGKYWVPVFNLLEDDINVVIANPKWVKAVKGNKDDTKDSKWIGDLFRLGLVKGSYIPCKKVRILREYTRYRYKLVSCRSSEKNRYQNALTVCNVALDSVVSDIFGKSSTSIIDYLLEQSGSSINHEEIASKLLRSLKSKEDAVIESVEGYQMTDAQKYRMRLVRAHMDYITAEINDVDKMIENMISSNTDFENAVQFLCTIQGVKRDSAITIISEIGTDMSQFSSSRRLCCWAGLTPGSNESAGKRKSVRFTRAGVYLKPALVQCAHAAVKSDKSPYYKKKYESLVKRRGKKRAIIAIARMILTAIYQMLSTGEQWNPSDLYKIDMPVALVEKQKAKAIKQAKKLLQREGLLPPDEPLAS

SEQ ID NO: 444783 - protein, 379 aa, unidentified
MTSIDATVEARKTVYAAIELSKKTWVLGIAAPDRDRPSIHRISGGNIAELVSRLRAAAKNNRRILVCYEAGYDGFWLARALGKIGIECRVLDPASIQVNRRARRVKTDRIDVLALVRALIATDRGERHVCAIVRVPSVEEEDARRSHRERQRLVRERTSHINRIKGLLFAQGIRDIKPKLRRTRIDFAALETAEGHPLPDRLRRELEREYARLALIEAQLREVETERDTADAQDPVVERKRQMLVAVQGVGGTSAAILAREVFARSFGSRRQLGSYLGLTPSAYDSGSVTRSQGISKAGNSWARRILIEVAWLWQKYQPASPLSVWYIQKTTGQSSRIRRIMLIALARKLAISLWRYVETGLVPEGVIIARAESRCAPA

SEQ ID NO: 444784 - protein, 344 aa, unidentified
MDHFAGLDVSVKETSICIVDEAGKIVREVKVASEPEALLAVLKNPAYHFKRIGLEAGPLSQWLFSALAEAGLPVICVETRHMQAVLKAQINKTDRNDARGIAQMMRAGLYRPVHVKTIRSQKLRMLLTHRKLLQSKAIAIENDLRGTLRNFGLKVGMVGKVKFEARIRELVENLPDLAVLVEPMLIVRRVLREQIVILHRRLLAIVRDDEVCRRLMTTPGVGPVVALTFRATVDVPARFRKSKAVGAVFGLTCAKYQSGEVDRNGRISRCGDEMMRVMLYEAAQSMLRSKKWSWLKAWAMQIARRRGMKKAIVALARRLAVIMHRIWVDGTEFRWTREQATAAA

SEQ ID NO: 444785 - protein, 361 aa, unidentified
MGKISRKDGKGKRNQINFAGKACWIGVDVHKSSYAVAILDEEGQRLEFSTVAEPKKLLGQLVHMGMTIKGLTYESGPCGYGLAWACQEMGIEVVVAAPSRIPRPVSKTGKTDRLDSMKLVEFLARGMLQGIAVPSREEFALREMERARQRLVKRRREARQNIRAFFLRNGLEEPPGLGNWSAMSLRELQDMFLPEYLRLSLDSYLEEHASILALLATITKQLAQATLEQGHGEQIKNLRTIPGIGETIAHTFTAEIFRPERFERAEAICAYVGLAPIISQSGSGKERARLRPVGQRYLRSILVESAWRLIAVEASYRDFYNRIRNKTGLSQKAITAVARKLLVLVWRIAIESRPYRPASIP

SEQ ID NO: 444786 - protein, 354 aa, unidentified
MNDAKYIGLDVHQATISVAVRDSAGKLVMEAVLETKAEAIIQFLRGVRGSLHVTLEEGTWAAWLHDLLLPHVTRVVVCDPRRNSLLRVGNHNDRVDARKLAELLYLDELNPVYHGEHGLRTLKELGRSYISITRDLTRVMTRLKAIYRSWAIPCAGEQVYAPRYRAEWLAKISEGGVRRRAEQYYQQFDALAALRQGVRRELLAESRKHQATSLLRQIPSIGPIRAALLIAIMQTPNRFRTKRQLWGYSGLALRTYTSGEYRFDKGQLKRSKKVLAIRGLNLNHNHDLKNIFKGAATRATAVGPFKDFYEACVARGMKPHLARLTLARKIAAIALLVWKKGVRFDAEHLKQQAA

SEQ ID NO: 444787 - protein, 380 aa, unidentified
MEWSGRAPAPASKRSWPGGTKVKEHAMSQKLNSAIAVIGIDIGKNSFHVVGLDERGAIVLRQKWSRGQVETRIANMPACLIGMEACVGAHHLSRKLRALGHDARLMPAKYVRPYSKGQKNDFRDAEAIAEAVQRPTMRFVATKTVDQLDLQALHRVRERLVSQRTGIINQIRAFMLERGVAVRQGLRFLRIELRGILATRCDVLSPRILRLIEDLAGDWRRLDERIEGLSGEIDALARQDAGCKRLMSVPGIGPIISSAMVAAIGAGDTFSKGRDFAAWLGLVPRQISTGDRTVLGKISKRGNRYLRVLFVQAAWVVLVRPKNWERHGLKPWLEAARKRLHPNVLAIALANKLARIAWSVLARCRTFEARRIDEAIVQTA

SEQ ID NO: 444788 - protein, 410 aa, unidentified
MRYYLGVDWADQTHAVWVVDERGTKITERAVPHTAEGLGEWGRELDEWRAQGIDLWAAIERPDGRVVDVLLDHGVVVYPVNPKALDRARDRFRQSGAKSDPFDARVLADFLRTDHAHLRALQPSSEAAQELKLLTEDCQRHIRQQTRLVNQLTATLKAYYPRALEVAELTSALAREFLPAYPTPAALTALTERQWQRWARAHRLPEARTAALWAVLQQPQLPVPAHVVRAKARLMRTLVEQLMPVVAAVAQYRKAIDDFFASLPAAQWARTLPIGKHGITAPTLWARLGDAPGRWESFRHLQAHAGTVPVTKRSGKQQRVVHFRFACDKALRHVVDQVAFLSLLSSTWARAYYDQQRARGHTHRQALRALGAKWLKIIFVMWERHVPYDEQYHLATMTRQQLRQRQEQIA

SEQ ID NO: 444789 - protein, 365 aa, unidentified
MTSMTSPTGPVTVIGGVDTHGQTHHAAVIDQVGRQLGDREFPTTPAGYRALLTWLRGHGQLERVGVEGTGSYGAALARHLRSVGAGVVEVDRPDRKARRAKGKSDPLDAYAAARAALSGTATGTPKTRDGRVEAIRVLRVARSGAVKARTQGTNQLKALLLTAPAELREQLRHLSTTTLIATCARLRPSSELTDPEQATKTALRRLARRHQHLSEEIAEADTELPTLVTAAAPRLLALPSVGIEVAGQLLTSAGDNPDRLHSEAAFAHLCGVAPVPASSGRTHRHRLNRGGDRAANNALYIVVLGRLRYDSRTRVYADRRTKEGLSKPEIIRCLKRYVAREVFTVLTAPAVKDPVATTPTMSTAA

SEQ ID NO: 444790 - protein, 450 aa, unidentified
MEEKEHGNYNLLRLVSVGNKNTLTGGVTAMHRKNDNRQVEKRQRITDATLVIGMDIGCEFNAMCLMSKEGTILGRYPKIYNSRKGFDYFHGIVESMKKKYGFTDVLIGMEPTGHYWRKIAYFAMDKQYEVRFIRTTALKHQRELDESSSAKNDIRDAYTIANIAREGKYIDTVIEDNIFRQLRTLAHTREKIQRISTGAKHALKGMLEDYFPELKHIFWSMKAKGLWALLEHCPFPEDVLKTDIDTVTELIAQSTRRKIQAHEKALQIYKAAQHSIGLQRVGDADRWRVAAYLSEIRHSETQLKEIEAQMEALLKKIPLAEYILSMPGIGALTCGVFLGELGNPCNFTNPKQIVKYAGYDPKEHDSGQRTGRRIISKKGRWLLRKYLYFMAMRVVHRSPFLKDYYENKQKTMTKKEALCAVVIKLIKVIFALLRDKRTFTEKQSCLKQAA

SEQ ID NO: 444791 - protein, 349 aa, unidentified
MGEVSTIGIDIAKSVFQVHGVDTDGTVVIYKRLGRTKILKFFADLPPCLVGMEACATSHQWARELKRLGHEVRLMPPTYVKAYVKRGKNDAADAAAICEAVTRPSMRFVPIKSAEQQSALMLHRTRDLLIRQRTQLINALRAHLAELGLVAAKGREGLHQLVTIVMESCDEKLLSGARFACQAIVMQLHAAQTQINGLDKCIVQAHRVNADSKRLDAIPGFGVILSTAVVATMTDPKAFKTGREFAAWIGLVPRQNSTGGKERLGSISKQGDRYLRRLFVVGAIAIVRTARMRPEKYPWVIKLLARRPAKVVAVALANKMARVAWAVLAKGESYRAPTRSSNAALAAAA

SEQ ID NO: 444792 - protein, 366 aa, unidentified
MKKTSTIRVNGNMIFKGHKLTIGLDLGDRWSCYCVLDEAGQVLLEQKLPTTPEAMKQTFERIPRSLMALETGTHSPWISRLLKEQGHEVLVAHAQKVQLISKSNRKDDRHDARTLARLARIDPELLGPVRHRSAKAQIHLTVIRARAELVSARTALVNAARGLAKSYGERLRKCGTQQVSRELAAALSVELREVIEPLLKEIESLNERIKEYDARMEKIARESYPQVELLKQVKGVGTQIALTYILTLEDAHRFPKSRDVGCFLGLRPGRRDSGESQPQMHISKEGDPYLRTMLVQGAHYILGPFGEDSDLRRWGLKLAARGGKSAKKRAVVAVARKLAVLLHRLWVSAEVYEPLRNSHQALRAVA

SEQ ID NO: 444793 - protein, 361 aa, unidentified
MTVHYIGADVDSKMTNLAVEKNGRFVKELCVPTTIPSLAAALESIPRPRKLTFEEGPMAHWLARNLVDLVDELIVCDPRRNALINRDGDSNDEIDARKLATLLRGDFLRSVYHSDNDQHVLLKQWVGLYHDRVKDAVRHINKIRALCWRHGVRPPRGALRKPAPRQAWLKSLGDEVREELEMLFLGYDSVAEQVQQSRGKMSSLARAHPIIDYWQELPGVGLVRATTLFAYLDTPWRFANEPHKLWKYCGVGLVRSSSGKDRFGQMKVGLLQLAWQVNRRLKCAIMGAAVSAIQQSNNVFAKIYERLVQHGLTPGNAKHTVARKILTVMWGMWKTGTRFDPKWAVAYGPATTTKRQRRGSR

SEQ ID NO: 444794 - protein, 355 aa, unidentified
MEEFIAFDSHKRYTLMEREDIQIGKTAHLRIEHAQGAILQSLLGREPGTPVAVEATGNWYWIVDEIELAGLEPKLVHPRKAKLMMGMINKTDKLDVHGLNRLQRNGTLPTVWIPPRGLRDLREITRGRMVMTSYRTRLKNRIQSTLSKYGWAGTDASDPYGKKARVQMIKAIQQLPSETSQMTAAFLNQLDFIQGQIAETEGRIRQLVRDTPEMELLRTLPGIGWILSAVVALEIGEIGRFASAERYASYAGTTPRVHASGDKTRYGRLRPDVNRYLKWAYVEAAHSVCLQRRTFPVRHASRLYERVRRRKGHPKAIGAVARHLAEATFHVLSRGEPYRDPAIRSIQGGVSAKMS

SEQ ID NO: 444795 - protein, 361 aa, unidentified
MFTERTSVGLDVHARSVVAAAIDGVTGEVFRARLTPSNDDVLGWVRALPGPSAVVYEAGPTGFGLSRTLTTAGIRCEIVAPSKIQRPAGDRVKTDARDAMHLARLLRLDEIVSVTVPTVEREAARDLVRARDDVRGDLMRARHRVSKLLLRQGIVYYGGRAWTGAHLVWLQAQHFDAPGLQFAYDAAHEAVLQAEARRGRLDKATTAMAADSEFTPVVHRLGCLRGVSTLTAFGLAVEVGDWDRLTGATIGAYLGLVPTESSSGQSRSQGSITKTGNTHARRLLVEAAWHHRKPYRSPGVAMKARWELAPAAARARGHAGNQRLHQRWLTFTDRKKKPVIANVAIARELAGWCWSLAVMDG

SEQ ID NO: 444796 - protein, 399 aa, unidentified
MFCGWDWGSTIHGVCLLDDDGVTIKTWMVKHTDIELAALFAELAQLGDPALIPVAIERGEGLVVGLIARAGHPVLMVEPAAFKASRPRWGAAGAKSDAADAFMLADYARTDGHRLRRVEPLAQATRELAALVRARTSLVEARTAASNQLWAILAGHWPGAALVFQKLTSQIALAFLADYPTPRSAARLGEGRMHQFCRRHSYRGGKSPAELVSRLRAAPASADPIAEKVLEAIVRSSLAQIGLLNAEITGLERQLADALATHPKTVLLKTLPRVATVSLAALIAEMGPLLERCENPEQVAAMCGAAPVTKASGKSRNVGFRYTANKPARVAITSFADNSRHCSAWAGDSYRRARARGARHPHAVRILARGWVRVIWACWTTDTPYDPSRHRGEQWFLAA

SEQ ID NO: 444797 - protein, 394 aa, unidentified
MEKIVIGVDPHKLSATIEVVDHHERVLASGRFATDKGGYAAMRRHVAGWPERVWAVEGSNGAGRSLAQRLLADGEQVVDVPAKLSARARMLDTGHGRKTDADDAHSVAVAAVRAKQLRTLALDPELEALRMLVDRREELAKQRTQTANRLQRLLAELTPGSAKKDITTAQAKAILAGVRPRDLVGKTQRRLAAEQLAELVVIEKKIKTLTTELKQMVAATGSRLMELPGVGPIVAARVLADVGDVTRFADRNRFASWTGTAPIEASSGEVVRHRLSRAGNRRMNHMIHIAAATQIRLDTEGRAYYRRKLAAGKTRMEAMRCLKRRISDALYRQLVADARANETGPGGHCGASLTSSAVDLPPHIDTSDQPLPGPAAPTLQPPRPARKTTALTPG

SEQ ID NO: 444798 - protein, 343 aa, unidentified
MVHYVGLDVSLKQTSICVVNHTGSVVREGVVDSDPESIAAFVRSKAPGALRIGLETGPTATWLWTELKQLGLPVICIDARHAKAVLKMQINKSDRNDAAGIARIMQTGWFKEVRVKDLDSHSVRALLASRALLVKIKRDLENQIRGLLKNVGLVIGRAKFNVFTVRAEELIEDRPELMAVVRPLLKARQAIEQQTDDLDRKVLKLARYDAQVRRFMTVPGVGPITALCFKATIDDPTRFKRSRSVGAYVGLTTRRHASGEVDWTGRISKCGDAMLRSYLFEAAGVLLTRVPKWSALKAWGIRLAKRSGLRKAKVAVARKLAVILHRMWIDGTEFNWSTKKAAA

SEQ ID NO: 444799 - protein, 343 aa, unidentified
MTRFVGLDVSQKLTTICIVDDTGRRVWRGQCSSEPEQIDRAVRRRAGDDARIGIETGPMTPWLVHELRGRALEVVCLDARHARAALKMQINKTDQNDAEGLAQIMRTGWYRSVYVKSFDAHRARALLGARAQLVGMTTRLSNHIRGVLKTFGMLPGAMRGLPFDRRVEALLAGRDDVALIVRPMLTAWRELREQIAVFDKAVRALAKASPACRLLMSVPGIGVVSVLAYVSTIEDPTRFARSRSVGAHLGLTPRQYQSGEMDRSGRISRCGDALARTLMYEAAVVILARVKRASSLKDWAQAIARRSGAGKARVALARKLSVILHRIWCSGEPFRWSEQLAAA

SEQ ID NO: 444800 - protein, 397 aa, unidentified
MYIVGIDIAKRKHEAAVIDGEGTVIIKPFSFTNNCSGYNRLLAMLTKAKLPLDEVSFAMEATGHYWLALFTRLQKEGFRVQVINPVQTNSIRSFYIRQAKTDPRDALLIAEVIRFGHFSESTLHPENIYELRELCRGRHAIVSMQADVKRKVVALLDQVFPEYETAFTNMFSDTSMAILQTCPTPKELSEIPLEELCHLIEVSSHKRFRMAKARELQELARNSFGFAMAGDVFSTMIRLYAKHLDFLKQQVREMDRKIAEIMDTLDTPITTITGIGPTLGAYILSEIGDISRFSSAAKLAAYAGIDPTMRQSGEYNGVRNRMSKRGSPYLRHAIWLAASSAVLHDPALKLYFQKKRDEGKPYMASVGHACRKMVSIIYAVMRGNKAYTPCIPNEISA

SEQ ID NO: 444801 - protein, 348 aa, unidentified
MLADQLDYVIGVDTHLDEHVLAVVAAPAGAVVARRAVAANARGYRGTLRFAEQNAPGSRAWAIEGTGSYGAGLARYLAGRGETVLEISRTPRPERRLRGKDDSLDASRIARAALASETLALPRSGERREALRLLLVARRSAVGVRREALAQLRGVIVTAPDRLREELRRLPTGRLLKRCSRLRRSSSASADEIATRLVLRSLARRIEAATLEAAELERELLGHVRALAPQLLDEPGVGPIVAAQLIVAWSHHGRLRSEAAFARLAGIAPVPASSGQTVRHRLSRGGDRQLNRALHTIVLHRRQHDPATQAYIARRVADGNSRRDATRLLKRYLARHLYRVLEQQPVMT

SEQ ID NO: 444802 - protein, 366 aa, unidentified
MKKLTTTTMQRIHKQSEGLTIGLDLGDRSSFYCVLDEKGDVLLEVKVSTTPKAMRETFGAMPLSRIALETGTHSPWVSRLLSELGHEAIVAHARNVRLIGESRRKDDRLDAMTLARLVRVDPQLLRPVKHRSAEAQADLTVIRARAALVRTRTLLVNAARGLTKAYGERLRGCNARGMKPKAAQDLSPELKSALNPLMREIESLSERISEYDQMLQSMAVNRYPEAERLKQIKGVGTLIALTYMLTLEDPHRFRKSRDAACYVGLQPGRRNSGQSEPQMHLSKEGDPYLRTLMVQAAHHILGPWGVDSDLRRWGLQLAEHGGKRGKKRATVAVARKLAVLLHRLWVSGDEYVPLRQNRSTTQLIAA

SEQ ID NO: 444803 - protein, 315 aa, unidentified
MANLKKRKTIINVGVDVGKHSLDICIHEKQLYWQDDNNVEGIKRILKRLAHYQVERLVMEATGSYEFELAQAAYSKGIPVCIAKPLSVRKYAGAVEQLAKTDKIDAGIIAQYAAVIQPRITPQKSKNLIAIKNLITRRRQLVNLRTQEMNRKGIMSKDLIVSCRRIIKHIDTEIKRIEKRLSNHVKDQAEWTEKQTILKSAPGVGDTLIYTLLADLPELGELTNREISSLTGVAPINRDSGRMRGKRRIQGGRAAIRTVLYMATLSATQCNPVIKAFYKKLVAKGKHKKVALTACMRKFIIILNTMIKNKTEWAY

SEQ ID NO: 444804 - protein, 339 aa, unidentified
MKLYTGLDLHSSNSYLGIIDESGKRVFKQKLPNERDRILEALKPYSEDIAGIVVESTYNWYWLVDLLMEAGYQVHLANPAAIKKYTGLKFADDQHDAFWLAEMLRLGILPQGYIYPKEDRPTRDLLRKRMHLVRLRTSLIVSLQNILCRNNGYRLKTADVKALCEDRVAPLLMGNEDLALAGMVSKDAIDFLTRQIKKIEIVIEDKVELKPSYAKLQSVFGVGKILALTIMLETGPISRFAKVGNYVSYCRKVSSKWISNDKVKGKGNKKSGNKYLAWAYSEAAEHARRSYKEARAYYNRKMQKTNFMAAHNALAHKLARAAYYVMRDEVLFMPGKIFV

SEQ ID NO: 444805 - protein, 341 aa, unidentified
MGQASTIGLDLAKHIFQAHGADASGRVVFRKRLTRAKVVRFFAAQAPCVVALEACAGAHHWARELGKLGHTVRLIPPAYVKPYVKRQKNDMADAEAICEAAQRPSMRFVPVKSEEQQANGVVFRARDLLVRQRTQCLNALRGHLAEYGYVVAQGSTHADAVIAHVEDPNTSVPESARSILAVLVGTYKALEAQIRALDAEITRRAKADPVARRLLTIPGVGPIAATATTALVPAPEGFRAGRDFAAWLGLTPLQKSSGGKQKLGAVSKQGERTIRRLLILGASAVVRWASQRGAPEGSWLARMLARKPKMLVTVALANKMARVVWALLVKGGVYRAPAVAA

SEQ ID NO: 444806 - protein, 372 aa, unidentified
MSNVNMYIGLDVHKDSIDISLVEGDRDAKVRFQGTIGGDLADVEKAVRKIRKSHSLAVFHFVYEAGPCGYDIYRHLTRAGHDCMVVAPSMIPKRSGDRIKTDRRDSIMLASLHRAGELTAVHVPREEDGAMRDLVRAREDAVKAERVGKQQLKGFLLRHGVKFAGSGDWKASYMKWLASVKMPNPAQQIVLQDYIDAVTNGTERIRRLTAQIRELLPSWEMEPVVNAFQAMRGVALIVAVTVVAELGDLNRFDNPRELMSYLGLVPSEHSSGKTRRIGGITKAGNGHARKVLVEAAHTYRFPARISKELLERQAGLPKEVRDIAWKAQVRLCARYRKMVAKGKKNQIIICSIARELCAFMWAIARELKTVTA

SEQ ID NO: 444807 - protein, 407 aa, unidentified
MEVVYPRCAGLDVHASTITACVRVATGQEVTYQHRTVATTTAGLLTLAEWLGAAGCTHVAMEATGVYWKPVWHVLEAEFTLVLANAMHIRNVPGRKSDVNDATWIADLLAHGLIRSSFVPPAPIQALRDLTRTRKQLVGEIARHTLRIQKTLEDANLKLTHVVSDILGTSGRAILRALIAGETHPERLADLTTGRLKASRAQLVEALHGRVTAHHRFLIELHLTQIDGLEAAVQKLEGHLGEVLAPFRAAIDLLTTMPGLSHTAARVLIAEIGTDMTRFPSPGHLISWAGLCPRLDTSAGKRHSTRIRQATPWLKTTLIQGAWAATRRKDCYLHAQFVRLKSRRGPKKAIVAVAASMLTAAYFMLRDGVEYHDLGGTYFDHRDTEETKKRLLRRLRELGVVVEVKAA

SEQ ID NO: 444808 - protein, 436 aa, unidentified
MRVMYERVAGVDVHKKTVVACRMRVTGDKRIEWEKRTFGTMMVDLLGLHDWLSEWEVEQVALESTADYWKPVFNILEDGFAVILVNAKHVQKVPGRKTDASDAEWLAELMLHGLLKASFIPAKPQRELRELTRYRTTVVRERVRIINRVEKLLESTNIKLSSVVTDVLGVSARAMLTELATGATDPQALAGLAKGRLRNKTRELEAALVGTISPNQRFILARQLSHIDFLDEQIEAFNEQISQHLQQMAASAVKDDGDDGSSGPEPTETLSWTEAVDVLDTIPGVDQRTAEIILAEIGLDMSQFPTADDLASWAGFAPGNHQSGGKRYSGRTTKGNRPIGAAINQAAWAASRTQDTWLKARYHRLAARRGKKRAIVAICRSILVSIWHMLSKQQPYHDLGADFYDQRRKESKVTYLTKQLARLGFVVQLDPLPAAA

SEQ ID NO: 444809 - protein, 346 aa, unidentified
MEHFAGLDVSVKDTSVCIVDDTGKIIREVKVASEPEALSAVLKSPAYHFKRIGLEAGPLSQWLLSALAEAGLPAICVETRHMQAVLKAQINKTDRNDARGIAQMMRAGLYRPVHVKTLRSQKLRMLLTHRQLLQSKAIAVENDLRGTLRNFGLKVGMVGKVKFEARIRELVDNQPDLAVLVEPMLIVRRVLREQIVILHRRLLAIVRDDEVCRRLMTTPGVGPVVSLTYRATVDVPARFHKSKSVGAVFGLTCAKYQSGEIDRSGRISRCGDEMMRVMLYEAAQSMLRSKKWCWLKAWAMQIARRRGMKKAIVALARRLAVIMHRIWVDGTEFRWTREAAAAAAAA

SEQ ID NO: 444810 - protein, 359 aa, unidentified
MLKYSMGLDISAKTIYACISVIDAAQKVTVKSSCKVDNTPAGFRQLAQWVNKHHKLKDIPLVVCMEATGVYYENCALYLFKQGYSVSVLLPNKAKSWMKAEGIKSKNDKIDAQGLSKMGAEKALELWQPAAEYYYELRAMTRQHQSLQEFKTAVNNQLHAEEHGMYKNKLVIKQLKQQIKFIEKQIADLETAIAAHVTSDKEVAERVHNICKIKGLGILTVAVILAETNGFVLFKNGSQLVSYAGYDVVENESGKHTGKTKISKKGNSRIRRCLFMPAFNMIKYKQTPFVDLYDRTLKKHGLKMKSYVAIQKKLLVLIYALWKNNMAYDIDYRNKYTKELEQALPLGLASIEASLADVI

SEQ ID NO: 444811 - protein, 347 aa, unidentified
MSKIKLVGIDLAKRCYQVCAVSDHNKVLYNRKYTAKKFAEAVQQLQPTTVALESCAASPYWGRRLQALGHRVLLVPPQHAKAFRRVHKSDEHDALSIAEAAQRPNLHCVPVKTLTQQDLQMLGGLRERCVAQRTSLINQARGYAREYGVNFPVSRPALMRELPLAIEAADNDLTPIAREALAELLEEIKQISARIDDLLFRMTTLAQEDPAHQRLQTIPGVGPVLAPTLLAKLGHAQQFDSGRDCAAWVGLVPKQNGTGGKIQLGGISKNGDRLLRTLLIHGARTVIRWADKHDHAQSRWIKQLVERGGKNKAAVALANKMMRMIWAVLTQGVVFDMKKAFRPQPAR

SEQ ID NO: 444812 - protein, 388 aa, unidentified
MSQVFEASKSLVALEQDSTVIAVIEMSQAKWLVAAVVPGLMRQPMKKLDADEETLLKLLHRWRNEANRAGRAIKRLVVAYEAGRDGFWLARWLRARDVEAYVIHPTSVAVSREHRRAKTDRLDAELLMRAFLGWLRGEKRHCSMAAIPAVGEEDARRPSRERENLVAERTRIVNQTKAILVRFGIRTFKPTLRKAEDKLTTLRTAEGMPLPRNTRAELRRFLDRLRLVREQIRAIEQERLHQLAAVPADKGPHAMVRLIARVIGVGIETADMLVNEILTRGLRDRKAVARYAGLTGAPDESGQRRREKGLARAGNARVRRGMIQLAWRFLRFQQDSSLAQWYSARTLDARGATRKRMIVALARKLLIVLWRLATMGEVTEGIMLRPAV

SEQ ID NO: 444813 - protein, 399 aa, unidentified
MAVTIGVDPHKGSHTAVAIDRDETELASVTVRATRRQVDELLAWAARFEDRIWAIESAGGLGYLLARQLVAAGEQVLDVPATLAARVRVLGSGRSNKNDSNDALSVAIAALHAPHLARVGRDDHAGVLRLYAKRNQDLGRARNRTACRLHALLAELVPGGIPKEINAGSAERLLAAVTPTMPVERARHDLAVEHLEDLRRFDDQLRASKKRLASVVRESGTTLTELFGVGPFVAAVVVGHTGDVTRFANRDQFAAYTGTAPIEMSSGGRVVHRLSRRGNRQLNHAIHIAAITQIRFAHSPGRAFYDRKITEGKTKREALRALKRRISDALYRQLLHDATSTGPGGQTGTALQSSVTGLEPQQPVLRKNHSRTRPNARTRRLAPATTRPSRASTSTNTRS

SEQ ID NO: 444814 - protein, 401 aa, unidentified
MSKKNTRNALDTSLSYAVIGLDLAKADCAVAAVLCSDDELGLIDRMDYESLFEQAEKLKPTLFAMEPCCGYSQISLRLQNMGHEVKVISGHAVKNWIATHKSNQKTDLNDATALAKLALYDHDLQPIRVKNVEECRIASVQAIRIQLRTQATKSLVCFKSLCQCWGIVIRRGSLNTKKMAEAVAAVEKLLGAEVASSLMILRDAYKFTMKQINALDKLLDALVEANEQARTMKTVLGIGTQTAARLAVTTGDIKRFPMPRSYAAYFGLAPRNIITGHSGTPSPSKRGALKPVSSRGQGKVSRRGDRVARSFIIQGAATIYMLYCKDMLPECQLRRWLHEQIKRGKPYGKIIVSLAAKLLRIVWALLTYGEKFDSHKAGVPRSVLAAMEKPLKHDAAAESAA

SEQ ID NO: 444815 - protein, 320 aa, unidentified
MMAQNDQIVVGIDVAKDKVDACIRSLSQRHTFPNTAQGHRKMIAWLHKHKVNKAVMEASGGYERDWAKVLRLAGIEVRIVDPKRVRSFALSAGRLAKNDTIDAEMIAWFAETFSAAPGQPHDAAREELRALVKARKHLLDLQTRLKSQNEHAAPEAVQKAHARILKSLATEIARLEAAISAKVKATPDFAERAEIIESVPGFAETTSANLIAGMPELGQVSDEIAAALIGLAPYDDDSGKRRGERHIKGGRRWVRNAIYMPCLGAATQNNPVLKVFYQRLIAKGKEPKVALVACMRKLIIILNTMIARRQKWDPSRYVLN

SEQ ID NO: 444816 - protein, 327 aa, unidentified
MNLSVAALGVDIAKLKFDVCLIKENGKAKHKVFANTTHGFEQLVVWLNSHTVAGLHVCLEATGTYGEALAVHLFDAGLTVSVVNPAQVKAFAASRLTRTKTDKVDAELIARFCLAHQPQAWQPPALEVRQLQALVRRLESLIEMRVSEENRLSSGVSIEEVKDSLEEHIAYLVAEIKQTELLIREHINNHPDLKQKSDLLDSIPGIGATTAARLLAEITDFTQYQSARQVAAYAGLVPRERRSGSSVRGRTCLSKIGNARLRKALYFPAMTALRSSGFFQQWASGMRERGKSKMAVIGAAMRKLIHLAYGVLKTGKPFDPEWTTKIA

SEQ ID NO: 444817 - protein, 410 aa, unidentified
MELLHRRCCGLDVHKETVVACLRLVSDGKVTTEVRTFQTTTADLLRLSEWLAANECTHVAMEATGVYWKPVWHILDDGEFALVLANAAHVKNVPGRKTDVNDAMWLAELLAHGLIRASFVPDAQTQEMRNLLRTRKQLVREQSSHVLRVQKTLEDANIKLDSVLTDLMGKSGRAMIEALIAGETNPAKLASLASRRVKASPEDLREALRGRVTKHHRFLLRLHLNQIDALDAAMATLDAQVEADLGPFRTAVEQIISIPGVKNLGAHVIVSEIGIDMSRFPSAAHLISWTGICPRNDESAGKRRSNRLRKGAPWLKTTLVQCAWAAVRKKDSYLQAQFYRIKARRGPKKAIMAVAASILTAIYHMLKDGTIYKDLGCNHFDRRSTDQQKKRLIKRLADLGYAVEIKPLTA

SEQ ID NO: 444818 - protein, 355 aa, unidentified
MDSAKYIGLDVHKESISIAVLNAAGKLVMECVIETKASTILQFVRGMHGELHVTFEEGTWAAWLYDLIQPHVTEVVVCDPRQNALLNAGNKSDRIDARKLAELLRGNQLKPVYHGEHGVRTLKELVRSYLTISKDVARVMTRVKALYRSWAIPCTGKQVYAPSHRAEWLAKITVPGVHRRAEFYYQQLDALRSLRQQVRRELLSESQKHPAWKQLCQIPSMGPIRAAVLIGIIQTPHRFRTKRQLWAFSGFGIETHSSGDYRLVEGQLRRTNRPVSIRGLNANHNHDLKNLFKAAAIVAAHKPGPFQEFYTALLAKGIRPEMARLTLARKISAITLHLWKKGARFDAQYLKSQAA

SEQ ID NO: 444819 - protein, 341 aa, unidentified
MEEYIGLDVSMKETSVSIRRAGARIWRGKCASDPRIIAELIRKRAPAVKRVVFETGPLSIWFYHSLRTEGLPAICIDARHAKAALDMAANKTDANDADGLAQLAEVGFFREVRVKGFDSMLTRTLVAARTRLVGITTELSNQIRGVMKTFGLLVPAGKGSTFEKNVRSLLADQDGLASIVLPMLEAWRGIRIRAAELGRQLVRDARQSQACRILMSIPGIGAITATAFTTAIERPDNFKKSRSVGAWIGLTTRRYQSGEVDYDGHISRRGDCHLRGLLYEAAAVILTRSSTDSTLRTWGLKLRERIGFKRAAVAVARKLAVIMHTMLKTGEFFNPNAGATA

SEQ ID NO: 444820 - protein, 468 aa, unidentified
MVDQHKKVNKNDRTRSLRSFKTIEPNAAGIDLGSREHWVAGPPRDDDRPNVARFGTTTPELVRLADWLKEQGVKTVAMESTGVYWIPLFEILDSLGFKVVLANARQLRHVPGRKTDMIDCQWLQLLHACGLLRGSFRPSDGICRLRSLIRERNTMVSQRSDWVRRMQKGLDQMNVCVHHAVSDITGATGMAIIRAIVEGERDPQVLARLRDRRCRKTEAQIAEELTGNWRPEHLFNLSQALKMYDQLCSVIDDYDREIITYISALHPEEAKDIIVPPPVSKNKAKNIVKLGQESLRQALCRLCGFDLTTIDGIGVDTASILVSELGPRFAMFPDEKHFVSYLRLSPNLSISAGKKVPDKHKASTCTRIGSALRMAASTLRKSRSALGAYYRSVAWRKGASVAVFATARKLAQLVYRLVRYGQAYIDTGAQAYEDRVNHRRLKFYSKILKAMGYNVEPAASGKELPALC

SEQ ID NO: 444821 - protein, 344 aa, unidentified
MGEITTVGLDLAKRVVQLHAEDGMGRVVLRRTLKREGVLTWFAQRSSCVVAMEACASAHYFARELAARGHMPRIIAAEFVRPFRLSGKNDANDAAAICAAVRQPQMRFVTMKSVEQQARLAVHRLRQGLQEERTAALNRLRGLLAEFGRVYANSATAALAGARGALADETLPTPLRQCVARQLTHLRELEVHLTDCDREVARDAQADARAQRLARLSGVGVLTASAVAATVVDPQQFRCGRQFAAWLGLTPRQYSTGGKTRLGRITRHGDAYLRTLLVQGARSALQAALRAAPPRRTRLAAWIVATYARIGYHKTLVAIANKHARLIWTLLMKDEPLRAHAAAS

SEQ ID NO: 444822 - protein, 419 aa, unidentified
MEQSTRFIGMDVHKATIAVAVTATGEVGKATAYGTVPNTTAALEKLVARLRQAGSGPMKFCYEAGPCGYCIHRTLTRLGEDCMVAAPSMIPRKSGERQKNDKRDAASLAVLHRGGLLTAVWVPDAAHEAMRDLTRARQAAVRAVRATRQQLSAFLLRHERIYPNGRKAWTKAHRGWLADQSFAHPTQQIVLEESIEVVRLGEQRRDRVEGHLRAQIPAWSLFPLVHNLSALRGLDTIASAGLAAAIGDPSRFASAPDFMAYVGLVPSEHSTGRKRRIGAITKAGDIHARTLLIEAAHSYRFPARVARHKLAAVDAVPEAVREIAWKAQTRLCLRYRHMMAKGKLRQVVVTAIARELAGFVWSIACITTDPPAKSVTVTMASEEICPPESTGPLSHAAPPATESRGRRAGRPEQSPYRSG

SEQ ID NO: 444823 - protein, 423 aa, unidentified
MTSMTLDPPLTNPLPPGSELVAGVDTHKNTHHVAILDLVGRPVADREFRADGRGYAQIVAFLHAHGDVVRIGVEGTGSYGAGLARALTTAGLTVIEVARQDRQARRRRGKSDPLDAHQAAVAVLSGTDTAIPKSGDGAVESMRILLAERRSAAKARAQVMNQIHALLITAPELVRQAFRALSGQRLVNTLAKTRPGTITSPDPAVVARQTLRRFAVRHLTMQAEIDLIEQQLEMLVRQVNPTLLSLSGVGPVTAATLLVAAGDNPERLGTRASFAALAGVAPIPASSGQRTRHRLSRGGNRHANAALHRIVLLRMRHREPRTMAYFERRRSEQLTDRDIMRCLKRHVANEIYAALLNPATDNPVGRELRARRQAKGIPISVLAATLGVPYQRLRRLEIGTRADPELEARATAILEQISPPLAA

SEQ ID NO: 444824 - protein, 346 aa, unidentified
MENIALDVHKHYTWARVENPEGKQLYENRLAHAHGTIKNFVRRWTPGSLVAVETVGNWYWVVDEIEAGGGKPQLVNARLAKLMMGSVNKSDKLDAKGMNRLQRTGTLPTVWIPSSSVRDARELPRTRMVLSEQRTQLKNRVHATLSKYGYVVDEVSDAFGKRGRQIIKELLTQLPSHTRQALQHVLDQLDHVMENLKAIEADMISTFAPCPQTTWLKSLPGVGEILAVVIWTEIGSIERFDRAEQLASYSGLVAREHSSGGKFHYGAVRRDVNVYLKWAFVEAANSSILNRERCGYHHISRLYQRIKARRGHNRAKVAVARHLSEASFWMLKKGELYREPVLSTQR

SEQ ID NO: 444825 - protein, 315 aa, unidentified
MKTSLVYLGIDVSKSKLHLASPSKFLGEFTNDAPGHRILVEKIKQLGPERIVLEASGGYERLVTEALQDAQLPVSVCQPGCIRHFALSIKQRAKTDQIDAQLIARFGEATNPDITPKTPENVRKMRALTDRRQQVIEDRVREENRLLTCIDREIRREIEASIDKLNAKQKELDEQIAQLEQTPAFCQKAEAMKAQKGVGDHTARVLLAQLPELGRTTRQEIASLAGLAPYPRESGQWRGKRTIYGGRATVRMALFMAARSAARWCPVLSVFYNRLRNNGKSFKAAIIACARKLLVRLNTIIKNLDQNTRPGAAAT

SEQ ID NO: 444826 - protein, 331 aa, unidentified
MMNASEMIFVGIDVSKDTLELALDDKSKTRCFDNDEKGIKQVMACIKAAEIGSVPVAVGAIVLEATGGFERQAAIALCEAGWPVMVLNPRQARDFAKAMGYLSKTDAIDARVLSHFARTLHQSDNRERLLMKLPDAQQVALQALLTRRKQLITMRVAEDNRLETSHKSQHKSIMAVRKVINKQLAMIDSDIDDLLHTHFVEKLSLLKNFKGIGVGTQASLMAALPELGTLSHEQISKLVGVAPLNCDSGKHKGKRMTWGGRADVRSMLYMAALSAVRYNPIIRVFYDRLISKGKAKKVALVACMHKLLVILNAIMKSGKKWNPLHLETIKA

SEQ ID NO: 444827 - protein, 346 aa, unidentified
MDIMILGIDLGKNSCSVVGMDAAGRVVLRRRLRRGTLESFVGELGSCIVAMEACCGAHHLGRIFAARGHEVRLMSPEYVRPYVKAQKNDDLDAEAIAEAATRPTMRFVPVKSQDQSDLQALHRARERLVSERTALINHLRALLLERGIVVPQGRRKLEAELETLAEDGGFAALSPRIRTLIEDLRAEWRSLDQRITGFDAEFVQLARDDVAVRRLTKIPGIGTINATALAAAVGEAHAFKRGRDMAAWLGLVPRQMTTGGKPRLLGISKRGNRYLRKNLIHGARAALPYLVERDTPLGRWARGLLDRAHKNVVVVALAAKLARIAWAVLAHGCDYDAQFEAAAAAA

SEQ ID NO: 444828 - protein, 397 aa, unidentified
MIAVGIDVSKSKSTVAILNSDGTPLAHPFNMAHTLQEMNSLVERLRALDAPVTILMEYTGHYHYPVLKKLQAEGFPVCLINPYQMKKYGDVEIHKAKTDKKDAVRIATYALEKAYKLTPYSAMEQKYEDLRFLSRQYGQRIADVSRLKTQLLDHLDQTMPGITSLLALKSRNPDNCVLMLFIKRFNSFDEIHRIGKSRFLSAYSSLVKKTTDHYAASKALAIYELALSSITTRGEDPYIWAVQNQCVDLLASAQNAADTIILQMQNIAETIPEYKVLRSMHGVGDRLGPIILAEIGDIRRFHSGKALNSYAGNDAPPYQSGQFESKNRHISKRGSPALRKACFEVMQALKLTKPQDDPVYLFMLKKEQDGKPHNVAKMAGINKFLRIYYARAMALYK

SEQ ID NO: 444829 - protein, 406 aa, unidentified
MGRAAEVVAPSSSIRTDGGCPVVQVNDLSRSLAAFDPISTLVVVVEMSKASWLVSSVVPGVERQPLKKLEPDATAVLRLIERWRNEAVRVGRPISRIALAYEAGRDGFWLARWLIARGIEAHVIHSASVAVSRERKRAKTDRLDAAMLMRVFLGWLRGERGHCGMVAIPTMEEEDARRPNRERESLVKERSRIINRMKSALARLGIRGFKPHLRKAPERLAGLRTAEGTGLPANIIEEFRRDMARLALVREQISSIEKTRAERLERAPDTGPHAMVRLLARVIGIGIETADMLVREILSRKLRDRRALARYAGLTGSPDESGLKSREKGLAKAGNARVRRGLIQLAWRFLMFQKDSALARWYRTRTEGPSGARKTTMIVALARKLIVALWRYLVSGTVPEGASMRA

SEQ ID NO: 444830 - protein, 412 aa, unidentified
MKIKPNKFLYVGIDLHKEKHVAVVIDCWNEKLGEMTFDNRPSAFPQFVQAVKKHLKRGQTAIFGLEDVGGFGRSLAMFLREQRFIVKEVNPKLSIGKRKNQTIIEKYDSWDAECVARVVRDEWDKLPDANPSDVYWAIGQMVKVRAGLAAHYASTLRRLHQQLSYHYPSYKKFFSEVDGKTALAFWEKYPSPRCLQDVSEAELAEFLKRESNRYLSLSKARQILNLIAEDGDTERQYQDQRDLIIQTLVRTLRSCSEEMQKLEGELSVLLREIGCTLDSMPGIDKVTAACFVAEIGAIERFASAEKLARFAGIATVRHGTGGKDKRYKSKQGNRVLHDLFRQLAIRQLVVAKKTKQPRNPYLLHYYEQKLKEGKSKRQAIVCLMRKLVNVVYYLLKYKAMYQMPVIPQQKAG

SEQ ID NO: 444831 - protein, 376 aa, unidentified
MLYVGIDVAKNKHDVTALNVPGKTVLKPLTFSNNKAGFELLDLSLRQLNQDCLIALENTGHYAFNLLNFLHEQGYKVYTYNPLLIKEFAKSLSLRKTKTDKKDAHGIALKLLSDPNREQFQHDNRQVELKILARHIHRLKKKQSDWKVQYTRCLDIIFPELDKIVGKHSEYTYQLLTRYPNPQKRLEAGFDKLIEIKRLTASKIQDILSVAPRSIGTTSPAREFEIIEIIKHYKRLIDKAETCVNDLMAEFNSVITTVTGIGGRLGAVILAEIRNIHAFDNPAQLQAFAGLDSSIYQSGQIDLAGRMIKRGSPHLRWALIQAAKACARFSPAFKVYLKTKLEQGKHYNVAIIHLAKKLIRTLFYILKKSCHLTNKK

SEQ ID NO: 444832 - protein, 357 aa, unidentified
MAPQLSNIVVGGVDTHKELHVAAVVDERDRVLDTEFFPTTRHGYKQLVHWLRSFGKIARIGVECTGTYGAGLLRYLHAQDIEVLEVTGPDQDLRRHKGKDDTLDAENAAHAAFARVRAVTPKTRDGLVESLRVLKVSRKTAVAARRVALQMIRMNIVSAPDDLRDQLRHLTRMKLIRMLAAWRPDLTRYRDVTGAYKIALKSLARRYLELTDEITDLDVMIKNIVDHLAPDLITKPAVGYESAAQLLITAGDNPERLTSEAAFAALCGVSPIPASSGKTHRHRLNRGGDRQANSALHIIAIGRLRTDPRTQDYVAKKLSEGHSKMEALRCVKRYLAREMFYVLKARTEVINQTQIAA

SEQ ID NO: 444833 - protein, 346 aa, unidentified
MSDVVTTVGIDIGKSTFHLIGFDGRGAIVLRQKVSRAQLERRFAALPRCLVGMEACCGAHHVGRQLAALGHEVRLIPARYVKPFVKTNKNDFRDAEAIAEAVLRPTMRFVPLKSREQLDLQALHRVRQRLVGERTAVINQIRGFLLEHGIAVRAGPPALCRALPEILANRGGALSPGMAQLLAGLADDWRRLDERIGEVTGTIEEVARQDEGCRRLMAVPGIGPIVSSAMVAAIGDGAAFAKARDFGAWLGLVPKQVSTGDRTLLLGISKRGNRYLRTMFIQGARSVLLRRATWANHSFGRWLEAAAPRLHHNVLAVALAHKLARIAWSVLTREDSYTRTLDARAA

SEQ ID NO: 444834 - protein, 526 aa, unidentified
MATATKKRSSKSSKSKSPVRRYIAKPAGVIQQRVEAVGPSRFGVISVDCAKRRSKWMLLDFYGQVLIEPTWVDHNASSFAVMTAQIKEAFAEFAIKDSIAAVEMTGVYHKPVQAALRKAGIDTRTVHPFASNHYRRPLHPNQKTDDKDLEAIFLAAINGYGLATLPVDETYQSLQRLTRHRTNLVKQRSKLQVQIRAMMHQSMPGYDCLFALHKFFKESVAIPVAKQFPSAAAIKRAGTKGIAKHLKQKKIRSHVSTLEKIVAWSQTAAEPAELARLMTDQWRGLLEVWELLTKQIATTEQKMAGFLVKTPYVLLLSITGINVVSAAGLAGEAGPIEHYANAGAINGRAGLYPLRYQSDTVDYQGGLSRSCNRRLRGAAMMVAKNLIKCHPYYRGLSAFWEKQKVDPRDRHCRIANRAMRMVFQLVSGRQVWRGKGVDRDAILSKLQRFHREHGTNISRVVADLNEAFLWLPKSTYAGEAKPLIELAAKKRRGPQRIGDLLVGLLIRLGVQLEDSVESKSSEALKS

SEQ ID NO: 444835 - protein, 467 aa, unidentified
MTPRAGKRFRTSPPSDDLTVQHPHAAGIDVHAAVHFVAVPPEDVPAGLVNPEPKLPAGVRKFGTNTGDLEALADWLTACRVTTVAMESTGVFWIPLFDLLASRGFQVLLVDPRQTAHAPGRPKSDVLDCQWIRRLHSYGLLTGAFRPADEIVRWRGFQRQREMLIRYAAQHLQHLQKVLEEMNVKLTEVVSDIVGQTGMKIMRDIVRGVRDPVKLAKHRHERCKATEEQIAAALCGNWRPELLFALRQALKLYDFYQEQLHECEGRIEECLRALEDKSKGAPLPPCPRQRKPEKNEVRFGARVLLFKMAGVDLTQIEGISETTALVILSELGADLSAFPHEKNFVSWLGLCPQHRGSGGKIRKRRTRRGSNRVARALRMAAQGCHHAKNALGAFYRRIRARCGGAKAVVATARKLAERVYRMLRYGQEYVRQSQEAYQEAYQLRLVKSLAKKAASLGYKLVPETMTP

SEQ ID NO: 444836 - protein, 354 aa, unidentified
MATTSKQNISALASVGIDIGKDVFHLVGFDGAGKIVLRRKIKRLALVSEFEKLAPCIIGMEACLSAHFVSRTLRKLGHEPRIIPAIYVKPFVKGQKNDYNDAEAIAEAALRPNLKFVTEKTQDQLDLQALHRVRSRLVSRRTATINQIRAFLIEQGITVRTGAHALRKSLFAILENRADEISPRMNDLIIGLYEDWLWLDERIETITGEIEEISKSEANCQMLMSVPGIGPIISTAVVAAIGTGEAFGRGRDFGAWLGLVPRQYSTGGRPILGRISKRGSKYLRTLFIQAAHVILMRPNNWHKFSFGPWLTQAATRLHRNKLATALANKLARIAWSVLANGKAFDANRNEGAAI

SEQ ID NO: 444837 - protein, 356 aa, unidentified
MRRQKETIQIAYLTSNSKEILKEQQIKHEEVQIKKFINRLKTEWNEIHCCYEAGVTGYPLYRYLKSLGVNCILVAPGKIPRQSTDKIKTDKRDAIKLARLMRSGELESIHVPSEEDEAVRDYLRSRDSLRLDLGRNRQRLMKFLLRKDIKYSTTKYWTVSHYKWLNNLHFNNEILQETFNDYYSRVRVQEENLKAMDKKIQEIAESEPYREKVGILRCFRGVDYLTAMFLLSEVCDFKRFKTAGSFMSFLGLVPGEYSSGSKRKQTGITKTGSPRLRRILTEAAWQHRFPGTGSKIITARRSGQPALVVALAEKASLRLHKKFRNLQLRGKTPQVMITAVSRELSGFLWAAMNLVA

SEQ ID NO: 444838 - protein, 458 aa, unidentified
MTNKPKGRTTRKKTRAEFETVNPNAAGIDCGSGEHYVAVPADRADNPVRVFPSFTADLHRLADWLIECDIDTVAIESTGVYWIPLFDILSERGLEVIVVNARHVKNVPGRKTDVVDCQWLQQLHTFGLLRGSFRPDLEITQLRAYVRQRDTLVQSAADQTRRMQKALIQMNLQLHNVLSDITGVTGLKILRDIVAGQQDPKHLAQYRDRRCKATLEEIEASLVGHYRPEHLFSLKQSLDLFDNYHDKIAECDEQIEVVLNVLAAKQPTTDKAVAKRQTRNARNTPKIKLAPLLLQMTGGHDLTAINSIDGYAALKIVSEIGIDMNRWPSEKHFASWATLAPQNKITGGKQISSKTPRSGNRVAALLRTCAATQARANSALGAFYRRLAYRKGKSKAIAATARKIAVMVYRVLAGKIDYKDPGADAYDNAHRERSIRALKRKADSLGLTILEPAAAEVS

SEQ ID NO: 444839 - protein, 410 aa, unidentified
MGQAAKQCTIDVANNLNGVRAMSQVNDLSYSPTAFDQDSTLIAVIELSLKNWLVAGLVPGLARRPLKKLAADRDALLRLLERWRTEAEKAGKVIKRVAVAFEAGRDGFWLARWLRRQGIEAYVIHAASIAMPRQHRRAKSDRLDTESLTRGFLGWLRGEKRHCQMCHVPSLEEEDARRPGRERDRLTREQTRLVNRIKALLSWLGISGFNAKLRGAEDRLAQLRTPEGLPLPENTAAELRHYVERLQLVRQQIKEIERQRAARLAAEPNQPNQPNQAIKLLQQIVGIGPETADTLTNEVLLRPLRDRRAVARYGGLTGAPDESGSKRREKGLARAGNLRVRHTMVQLAWRWLMFQKDSALACWFFQRTQNASPLVRKKMIVALARKLLIALWRYVTTGEIPQGVALRPAV

SEQ ID NO: 444840 - protein, 397 aa, unidentified
MYIVGIDIAKRKHEAAVIDGEGAVIIKPFSFTNNCSGYNRLLAMLTKAKLPLDEVSFAMEATGHYWLALFTRLQKEGFRVQVINPVQTNSIRSFYIRQAKTDPRDALLIAEVIRFGHFSESTLHPENIYELRELCRGRHAIVSMQADVKRKVVALLDQVFPEYETAFTNMFSDTSMAILQTCPTPKELSEMPLEELCHLIEVSSHKRFRMAKAQELQALARNSFGFAMAGDVFSTMIRLYAKHLDFLKQQVREMDRKIAEIMDTLDTPITTITGIGPTLGAYILSEIGDINRFSSSAKLAAYAGIDPTMRQSGEYNGVRNRMSKRGSPYLRHAIWLATSSAVLHDPALKLYFQKKRDEGKPYMASVGHACRKMVSIIYAVMRDNKAYTPHIPNEISA

SEQ ID NO: 444841 - protein, 391 aa, unidentified
MEARTVNNLPPAGTHDDAVRCLLAIELSKKSWIVAVNTPLSDKISRYTLKPCDGKELLDLCERIRTRVARETKQRVEIVSCYEAGYDGFWLHRLLEAHGIRNYVIDPASLQVDRRARRAKTDRVDVERLLRSLMAYLRGEPKVWSVVRVPSVAEEDDRRLNRERGRLINERIQHVNRIKGLLAIHGIYDYQPLRRDRMQQLERLRTADGRTLPPRLKAEILRELQRLVLVVGMIKTIEAERDAIASAKIETEQQHSSAKRIQDLAKIKSIGPEFATTLVGEVFYRSFDNRKQVGSYVGLTPAHFQSGAMCRDQGISKAGNGKARTVMIELAWLWLRHQPDSPLSVWFRDRVGKLKGRIRRITIVAVARKLLIALWRYLETGLVPKGAALKV

SEQ ID NO: 444842 - protein, 347 aa, unidentified
MKVLIGVDPHKASLAVAAVDEAKGELLKRAAFPQSRAGLRTLERWARRFPERRWAMENAGGLGRHLAGRLVAAGESVVDVPPKLSARVRLLSSGNARKNDELDALATALAASRNGRLAAVDPEAASEVLRLLSERREDLVAERTRALNRLHGLLRVLVPGGVDRKLSADRAARILRRIRPRGSASTRLRRRLASEVLRDIRTLDRKVADLDGRIEAEVEASGTTLTEIFGVGPILAARIIGTVGDVRRFPTKAHFASYSGTAPVEASSGEVVRHRLSLGGNRHLNYALHMVATSQARSDAPGGTYYRKKLAEGKSRKEALRCLKRRVCDAVFRSLTANSRAPSRATA

SEQ ID NO: 444843 - protein, 279 aa, unidentified
MSKISKKVTGVDVGAKFLTVSFNDFENRDQVFNIENTQRSILSFLKKLRIEDYCFVIEATGNYSSRILHLSLVQGFESSLINCMSVKYFSRMKNIISKTDAEDAKLIRLYGEMFKPDIYTSKSVDIEHLDQELKLLNDLEEEKRRYGVKLKSLRYNAQINPNTEKHYEKRLKQLDKEIREVEMRLPQLQDEEFREIKGLIQSVSGIGGKTSLQLMTATSGFKNFDSSKSLVKYFGLAPRIYQSGKKSYSPGKCRTSKTHIRSLLYVCSWTAIKHNTQCK

SEQ ID NO: 444844 - protein, 414 aa, unidentified
MALVRWVGRAIGLDVHRDFCVVAICEDGKVRSGGRVPSTPEGLAMLAESLLGTDRVALEVTGSCWEVARILEPHVQRVVVVSPDDTGISSARAKTDKLDARALATLLWRGELEAVWMPDERCRVLRRRLARRQQLVWSRTRAKNEIHAVLQRRLQGKPPCSDLFGVKGRDWLASLELPLEERESVDAGIRQIEFLNSEIAGVERLIAGQALSWPEIRRLMTVPGVNLICAASFIAAIGQPSRFLSSRKLVAYLGLDPKVRQSGESPARSGRISKRGSASARWALVEAAWSVVLQPGPLHAFYERTKARRGYGKAIVATARKLAVLFWCMLTRGEDYAHQQPSLTKKKLRRLEITAGAPKNSGRAAGVWATNEMMRDAERQLAQQAEASYRRMVTDQQAGAPARKVGASATPERA

SEQ ID NO: 444845 - protein, 343 aa, unidentified
MQNYAGIDVSLEALSVCVVDEKGGIVKEAKVASEPAALVALFGQLKIVPSRIGLEAGPLSQWLHAGLLAAGFSSVLMETRQVKDAFKSRPVKTDRKDARGIAELVRLGWYKQVHCKSLAAQEVRTLLTARSALGRKRHDLDMTLRGLLRGFGLKVGRTTKKSFATRVRELAGDNATLKIACEALLVAREALESEFARLDKHLRSLARKDERTRLVMTAPGVGPIIGLTYVNAIDDPHRFHKSRSVGAYLGLTQKKYQSGETDKTLGITKCGDHQARTALYEAANIILVKPVKAGALKSWAMKLAKRAGARRAKTALARKLGVILHRMLCDGTAFDALQGGASA

SEQ ID NO: 444846 - protein, 337 aa, unidentified
MRYAGVDLHKTQFSVCWKGEDGSSKFERYPMSAEGLGRFREGLDRETEVGVEATANSKYFYDQIVGSAKRVRVINPLQFKIISESVKKTDREDARLIVEYLSKGLLPEVRVMEKERRELRSLIQTRDKLVKLRSSLKNKIHGILLEHGIQSKREMFSSHKALQKVLEAPVSETSRFELEVIVKQINSLTEGIKELEGKIKDKGKGLKGHKNLQSITGIGELSSTIILCTIGDIADFENKKKLAAYAGLVPRVYESNEKVRRGRITKRGDKIFRTTLVQVALIAIRYNGYLRSFYERLRAKKGSGKAIIATARKMLEIIYDTLVNDWVFEDFNNFVLA

SEQ ID NO: 444847 - protein, 340 aa, unidentified
MKDTVIGVDLAKNIFQVHGASRAGEVMFRKKLRRQQFMQFMATQPPALVVLEACGSAHYWARELAGAGHEVRLIAPQYVKPFVKRQKNDAADAEAIVIAARQPEMRFVEPRTEAQQARGVLFRARQRLVHQRTELVNALRAVLYEFGLVVPQGIAHIRHIETMLDEAVLPEAVKQECLDLLRQISEQSVRIDVRTKKIRMLAQESENTCRLQSMPGVGPLTALAIEAFAPDLQSFRRGRDFAAWLGLVPRQFSSGGKERLGKISKAGQADIRRLLIMGAMTQVNWASRKAPAPGSWLARMLARKPRMLVAIALANRMARAIWAMATKQEDYRDPALSLAA

SEQ ID NO: 444848 - protein, 415 aa, unidentified
MALKIVYKICCGIDVHKTFVVACIASTNDKGITSYESHRFSTYTSGLKTLLQWLLDRNCKDVCMESTGKYWIPVYNILEPDCSIVLAHPKYVKAIRGKKTDKKDAKWIADLFKHDLVAGSFMPPADIRQLRDLMRYRFKLTCFKSSEKNRLQNCLTVSNIQLGNVVSDTFGKSAQAILDKLLENPADTSFDLEPLVYKSLKKKLPELRDAIDGYITPEQAGKLKVIKAHYENLESRKAELEELILALAAPYQQELTILQTAPGISCPFTAIGIISEIGTNMEAFPSAKHLCSWAGLTPTNNESAGKKKSVRVSKAGCYIKPLLVQCANAVVKSTKHPEMRNRYLRLKKRRGHKKAIIAIARMLLTALYHMLKNGENYNAELYQKSDLLPVDREITVEQALMIARNQGYKIKSATA

SEQ ID NO: 444849 - protein, 462 aa, unidentified
MNKNTRRLLSVSKGISQTAQSPKHLEHINRWAAGIDIGATSHFVAVPEGCSESTVLEFKSFTPDLYALADWLKQCGVQTIAMESTGVYWIPVYEILEEKGFEVKLVDARQVKNVSGRKTDVLDCQWIQQLHTYGLLNGAFRPDDEVCELRSYVRQRSMLVKSASRYIQQMQKALTQMNLQLHHVITDITGDTGLKVIRAIIKGERNPAILAKNRDPRCKSSNDDIEAALTGNYRAEHLFALKQSLELYDYFQEQMKACDHEIEKNLAEFSTNILVANVPVEQLNPNKKRVSKNSPDFNLGKELHRLSGVDLLAVPGINNLSAMQLLGEIGFDMTRWKSPKQFASWLGLCPGNKVSGGKSISGKTKPSNNRAAATLRMAASTLYRSQTSLGAYLRRLKSRIGPMKAITATAHKLAIIIYNMLRHGVEYVESGQAYYEEKYRDRMIKNLKRKATEFGLTLIEAR

SEQ ID NO: 444850 - protein, 403 aa, unidentified
MIFVGDDWAEEHHDVYLMGESGERLVSRRLPEGLTGIRQLHELIAAHAQEPTDVVVGTETDRGLWVGALTAAGYQVNAVNPLAAARYRDRHHVSGAKSDASDAKLLADLVRTDRHNHRPIAGDSADAEAIKVLARAHQSLIWSPTRHTNALRNALREYYPAALVAFDDLAHGDALGVLDRAPTPEQGAHLSRSAIHSALKRGGRQRNIDARAREVQAALGTDQLSASAPVATAFAATTRATVAIIAELNRQISELETGLAAHFETHPDADIYLSLPGLGVVLGARVLGEFGDDPNRYITAKSRKNYAGTSPLTVASGRKRAALARHVRNRRLYDAIDNWAFCALSVSPGARLFYDQHRAGGDLHHQALRALGNRLIGILHGCLHHHVPYNEHTARAHRTPAAA

SEQ ID NO: 444851 - protein, 354 aa, unidentified
MSQNPNAGIAIVGIDIGKNSFHIVGLDQRGAIVLRQKWSRGQVEARFANMPPCLVGMEACVGAHHLSRKLKEFGHDARLMPAKYVRPYSKGQKNDFRDAEAIAEAVQRPTMKFVATKTADQLDLQALHRVRERLVSQRTGIINQIRAFLLERGVAVRQGQRFLRAELPRILATPPNVLSPRMVRIIENLAGDWRRLDERVQNLSDEIEAVARQDAGCERLMSVPGIGPIISSAMVAAIGTGDGFSKGRDFAAWLGLVPRQMSTGDRTILGKISKRGNRYLRVLFVQAAWVVLIKPKSWERHGLKSWIGAAKKRLHPNVLAIALANKLARIAWGVLARGRNFEARTNTNATVQAA

SEQ ID NO: 444852 - protein, 331 aa, unidentified
MKKKEVIGMDISKSTIDAVLYSNKQHLQFENSIKGFKIFEKWMKKELKLTVEQVIVCMEFTGQYSYQVSVFLTSKNYYYSIIPGLEIKKSMGITRGKNDKVDAFKIAEYGFLRRDILKKHILPSVELVKLQRIISLRDLLVKVNRGYKNTLVEQKSVYKLSERKEITSILEKLIKTTKNEIKKLEKSMHELVKSSTKMKEQFELINSIIGIGPIVSCYFLVTTQCFTKFENSRKYACYSGSAPFIHQSGTSINRKSRVNHFANKKMKTLLHLSACVAIQRDPEIREYYERRIELGKSKLSTINIVKNKLIGRVFAVIKNKQPYVVLGKHAA

SEQ ID NO: 444853 - protein, 366 aa, unidentified
MSSITYVGLDVHKRTIAVAMLQTGTGEVQQWDVANEPTALKRLIRKLKPHAPLRCVYEAGPTGYALQRLLQKEGIECMIAAPSLIPVRQGDRIKTDHRDARKLAQLHAAGLLTAVHPPTEDEESVRDLCRCREDAQLDLVRSRHRLSKFLLRRALVFHDGNQWSQKHRTWLHGLKFSRTADQVVFEDYMLALEQHEARVAALDEQLVAVAAQEPYRAPVAQLRCFRGIDTVTALSLAAELHDVRRFPTAPSLMAYLGLVPSEHSSGDQRRRGKITKTGNRHVRRLLIETAWHYRHKPAVGVRLAKRRRGQPPQVIARADRAQQRLCTQYRRLVGRNKHHNTIVVAIARMLIGYVWETLREAQPSQI

SEQ ID NO: 444854 - protein, 347 aa, unidentified
MRFYTTQHPFYCGIDLHARMMYVCLLDQSGEILVHRNMKTDPDTFLKAIAPYRQGIVVAVECMFTWYWLADLCADEGIPFVLGHALYMKAIHGGKAKNDKIDSQKIAALLRGGMLPQAYVYPAKMRATRDLLRRRMHLAHKRAELLAHVQNTNSQYNLPAIGKKIAYKANREGVAERFADAAVQKSLAVDLALITSYDELLRDVELPIVKTAKHHDPNTLYLLQTVPGIGKILSLVLLYAIHDVNRFPRVQDFVSSCRLVKCARESAGKRYGTSGAKIGNAHLKWAFSEAAVLFLRDHPAAQKHLARLEKKHDKGKALTILAQKLARAVYDMLKRQGAFDQDKFFQR

SEQ ID NO: 444855 - protein, 385 aa, unidentified
MKKSTTAKMSRESKNLVKNNQVHELAAEQRLTIGIDLGDRTSRYCILDERGEIVSEERLATSKEGFNSLLKKMPRSRVALEAGTHSPWVSAQIASLGHEVIVANPHKLKLITQSAKKNDRIDAERLARLARVDAKLLSPIRHRGAEAQADLAVIRARAELMETRTALINSARGLAKPMGERLGKCEADQVKESLASGMRDEVREVIGPLLKSVEAISGQIAEYDKKIEKITGRYPETELLRQVHGVGPLIALTFILTLEDAQRFQQSRDVGPYLGLTPKQHDSGDSAPELRISKAGDGLLRSLLVQGAHCILRRNAPDSDLKAWGLGKQDNGGKKGGKTRKKKAVVAVARKLAVLLHRLWVTGEVYDPLYNRKSVQTARAQGKAA

SEQ ID NO: 444856 - protein, 428 aa, unidentified
MTVKDCTSVKEFWQLKKEIRGSKDHLIVGIDVAKDEHKAFFGTANGKTLLKRLTFKNDIKGFDKLLARVKEMKVKHSLNELVLGVEPTANYHKPLGDFLIKCSHMVVLVSGVSVKRNRELLNGRWDKNDTKDSANVADLISQGKCLYYEYAPLVLKDLRGLLSLKRRLKKQEHGLRIRIRNSLLAQYFPELDKYYSKWEPEVLSTVRWCLNPSVIAGLEYDQFVSLVCPGRKNIRQQDRLEWIWKKAVDSIGCDAGEAAEFEAKVMVEELGHIRGIIKETDAKIKHICIRFPEYNYLLTIPGFGPDVSSKVLAAIGDPFRFNSGKQVLKMAGMDLNANRSGKSSDTAVPVISKKGSAHLRYAIYQAAFIASVRNKYFIRYYTNTLRGREREKGIKTKMRVKLAAKMLVIAWTLMKQKEPFDPGYLKID

SEQ ID NO: 444857 - protein, 344 aa, unidentified
MTYYAALDVSLRLTHICVIDDDGEIVAEGKTDSEAADIVAFLDELKLEIARVGLEAGTLTQYLTYGLQFAGFDVVCMEARQVKNALSAMRNKTDKNDARGIAQLLRSGWYRKVHIKSMDSHHIRALLSSRKAVLDKCVDLENEIRGLFKVFGIKLPPRLGHGSFDAKVRPLIEADGAFRESLRPVLDARLVLYRTFRELDNRTRKAAHADPVCERLMTAPGVGFVTALTFKAAVDDPTRFKRSRTVAAHFGLTPRRFQSGELDLDGHISKCGDAGVRSTLYVAANAMMTRSSRWSALKAWGMQLAKTRGHRRAVIAVARKLAVILHRMWIDDAQFRWGTEPARS

SEQ ID NO: 444858 - protein, 450 aa, unidentified
MARRQKSTQNLPVIEPNAAGADVGATQIFVAVPADRDPEPVRCFDTFTTDLEALADWLEACGIRTVVMESTGVYWIPLFQILEKRGIEARLVNARHVKNVPGRKSDVADCQWLQYLHAVGLLRGSFRPNQEICALRSLWRHRDSLIQMASVHLQHMQKALDQMNLQIHHVISDIAGTTGLAIIDAILAGERDPKRLADLRDWRIRATEETIMKSLVGDYRDEHLFTLRQSLVAYRHYQQLIGEVDEKVKQLLSELPAQVDPAEDPIPKARNPRKTPWRNEPIGLREDLYRAFGVDLTQVPGIDSLTAQRLLTEIGPDLSAFPNVAAFASWLRLCPDKRVSGGKVLSSRTGPTKNRAALALRMAAQSLNRSETFLGEYFRRMRARLGAPKAITAAAHKLARIIYHLLTSRQPYDESIFIVQEIRFRKRKEARLRAQAHELGFQLVPVQAVP

SEQ ID NO: 444859 - protein, 428 aa, unidentified
MNCTQNEKLNQVTPHTLIVGVDIAKFKHVARAQDDRGKILGKALTFTNTKEGFEGFFAWLEEMQHKHEKSDVLVGMEPTGHYWLNLAYTLKERLVSFGVVNPLHVKRSKELDDNSPTKNDIKDARVIAQLIKDGRFSYPRLPMDQDAEVKAGITIRNQIVGDLQALQGRIHNWLDKYFPEFLTVFKDWSGKMALAKLEHIPLPVQLNQTTPERVAEIWSTYGGVQRPSHKRIQRLQEAAGRSVGLTVGLQMAQREIATNIKRYKMLKEELHALEKQLEDLVLTLPGIAEMLTVPGVGMVTVIELYSELGDIKNFENPRQILKYAGLNLRESSSGKHKGQTRITKRGRAKLRALLFRTVMPLVRHNRAFKALHQYYTTRQENPLRKKQSLIVLCGKLVRVLHTVGQKQCPFDEERMIRDIPHLSLALGA

SEQ ID NO: 444860 - protein, 345 aa, unidentified
MTSVATIGLDIAKSVFQVHGVDAAGQVVVRQRLARRRIPAFFEKLAPCLVGMEACSSSHYWARELMARGHQVRLMPAQYVKPYVKRGKNDAADAEAICEAVTRPTMRFVPVKTPEQQSVMMLHRVRLMLNRQRTQLSNSIRAHLSEFGIVAPIGRRGLDQLLGVVADEKDTRVAADARVCLQMLAVQLAVVKDQILENDRRVLASARSTELGRRLMDIPGVGPLLASALPATISDPAAFKTGRDLAAWIGLVPKQNSSGGKERLGSISKAGNRYLRQMLVVGAMAVIRYAERHGTRRPWLVQLMQRRTTKVAAVALANKTARIIWALMTSGERYREPAATDAMAA

SEQ ID NO: 444861 - protein, 417 aa, unidentified
MEKSFAWYLGIDWGTEEHALCLLDAGGRVCGTRAVAHTADAVQAAIQWVGQQTGVPPGDVAVGLERPRGVLVDTFLEQGFAMFAINPKQLDRFRDRFTVGGAKDDRRDAQVAADALRTDRRAFQRIQPDDPQILQLREWCRVLEDLQIQIGRLTNRVRDQLYRVDAAWLAFSPAADDAWLWALLAQRPHPDQWRRIGPGRLTTVLRAHRIRRVTAAELGAALRQPRLTGAPGVADAVATQLAILMPQLHLLHEQRLTAERQIDRWLQSLAAPDDAPGQPGEHRDVVILRSLPGVGRTVAATMLTEATSPLAARDYDTLRAYAGAAPVTKRSGKRAFFVHMRYACKHRLRDALYHWARTSIQHDTAARAYYDALRQRGHAHARALRSVADRWLRILIAMLRTRTLYDPSRFATAPPAP

SEQ ID NO: 444862 - protein, 335 aa, unidentified
MKKIFVGIDVSKSWIDVCVTIGKCILHHQFVNNIMGFKAMIKWIKEFSKQLNEWLICMEHTGIYALPLWNFLSEKNISYCVVSGSVITSGLEIRRGKNDKIDASDIAKFAMRYQDELKPHRLPIQVLQRLKMLFSYRERLVKAKVLISVPANEAKQFAAKESKEVRTDSSSLVQIIEARIKKAERLMLEIINSDKQTSKCYELIVSVPGFGLITACYLLIVTQCFTVLTRSRQLSNFGGTAPHPHKSGTSIKGKTRVSPIADKKLKALLSRGAGSLLQHHEETQYYAARMMAKGKHENLVRNNIKNKMLHTVCAVVKRGTPYIKNYVSPYQQNVA

SEQ ID NO: 444863 - protein, 411 aa, unidentified
MKIGTTETISCVGLDCHRNFSSVTARDSAMKVIWRRRLDHRNRLKLHQELSSWPRGMPVILEGTFGWGWIGWGWMSDELKRAELDPHLSSSTKVAAWRKARNMPKSNKRDADLLSELWGQQPRWWEVWCAPPEVRDLRELLPQRMSLVQMQTRLKNQIHATLHRHGLICEMSDLFGRAGRAWLSAMLADPATPLRETGRSTLRSYLDLLEQVRMRVAVATRQFRWIVRKDPAARRLMTLPGVSTILGYTILAEIGRIERFADGRHLSSYSLLAPMADDSGDDHPDQAPIGRHVGRMGRTTLKWAWIEASRSAVRKSPRMRVLFDRYTQGGKYNRNRGYIAVAHQLCLIGYVLWKKNQDYQETPPPRPGSRQQVQLENTDGQKPKSRRLKIKEDSRPGTGQPQAAMATQVAQ

SEQ ID NO: 444864 - protein, 443 aa, unidentified
MSRKQRTHLRGKRGQAFADQIRGIPLDRILCVSLDISKYFHVVMIHNALGEIVTPTFEIDIFQSGFDRLCQAIDQAVAQTQAQVVWVGMEPTSHYFENLARHLHARSRPVTLINSYAVKQNRDQQMMRREKTDEIDVAAIGDLLRRGEGTPFQPASGVYLQLQQLDRVRLSKVKMRTMLKNQILGHRDRIFPGLVLIGDEATQRYTPLFATDFWACKTLQHLIRVCPNPHHLIAMTPKDLVNAFHAQGFALGRLTAAKILAYAGKVLLPNAELAAIRCELLQHDLALLEEVERHIADLEDRLRDLLAQTPYTIWAKLKGLSDIQVASLAAAIGDPAHYAYAGQVFRRTGLVSGRNDSGIRQRKGRGKRVVKTGDGYLRRAVLNGLRSLILHQPALRRYDRRLQQSKPKGVAFVATARRAMGILWAPLRDQRPATLLLQRGATM

SEQ ID NO: 444865 - protein, 434 aa, unidentified
MAPVQAITGMVAGTQLVCPSTPMGRFLNRSSPGRVHPEFKEDDRMRMDKRVQGSARERKELARRLKCEDPGLEVVHPEAAGIDVGNEAHYVAVRRDRDSEPVRRFECFTADLYRMADWLRDCGVKTVAMQSTGVYWIPLYDVLEEFGFEVFLVNARHTKNLPGRKSDVQESQWLLKLHTYGLLNNSFQPPSDIRVLRTYWRQRAEHGVGMATCIQRMQKALTQMNLQLANVISDVSGRTGQAIVRAILGGERDPEKLAELADCRIRATKEEIAKSLQGNWRLELLFVLQQQVEMYDIYQRRIAECDQKLQQHLTTFANSSIPVTQESLSRATKNKSKQKNVPQFSLTEELLRITGVDMTRIDGINAMTAQTLISEIGLDMSRWKTEAHFASWLGLCPDNRISGHKVLSRGTRRVVHRAATALRAAASTLFKSPS

SEQ ID NO: 444866 - protein, 314 aa, unidentified
MSASPIFVGIDVSQQELVIAQHPHVTAWTVANDTRGIEQLVDRVRDLAPVLIVLEATGGLEIAAFASLTEAQLPVQVVNPTRVRGFATAVGSQAKTDTIDAQLLADFAQAIRPQLRPHNDPATLELQALVTRRRQILDMIAAEEHRLQRSHRSMQPDIRAHIAWLRQRVKGLDDDISRTIRSQPLWRAKQDLLMSVKGVGPAVSAALIAHLPELGSLTHKKIATLVGVAPFNRDSGKSHGKRTIRAGRSTIRSALYMAALVATRYNPAIRTFYGRLRTAGKPPKVALTACLHKLLIVLNAIVRDNVTWRPTLDN

SEQ ID NO: 444867 - protein, 428 aa, unidentified
MDEVDRNRLEEFRQLRQEVRHSEEYLIVGIDIAKDRHHAFLGTATGKTLLRRLVFSNDHEGFRKLLDQAEALRAQHGLKKVVYGMEPTANYHKPLGEYLITLGRTVVLVSGVTVKRNRESLDGRWDKHDTKDAANVADLISQGKCLYYEYPSAELRGLRGLLSLKRRLKKQEHGYKVRIRNHLIARYFPEMDRDYERLGTVGLSIVRWCFPASQITELDVEPFIQRVTSRRIRVETRRRLEEVWEKAGGSIGCEGVPGMEHEAKVMVEGLRQIREVIKETEDKIQQLCEQFPEYPYVLTIPGFGPDVSAKVLGAIGDPNRFQNGKQVLKMGGLDLSADRSGKDSDKAIPEISKRGKADLRYALYQAALIASVKNRDVMIYYTNKLRGREREKGIHVKMRVKLAAKLLVIAWTLMKKKEKFNPAYLNAE

SEQ ID NO: 444868 - protein, 331 aa, unidentified
MEQKEQMIIGCDVSKDKIDLCLLEKTTGRTIISKSYSNNSSGHQRIVKQLSDKDNCLVVMEATGNYHLRFAACLAAHSLCFAVINPLVLKRFAQMKMLRTKTDKFDAFIIAQYGREQSPKPYQMPSKEQQQLKALITVLNNLLKQRTQTKNLLHSQLLLPGNNIGSQKPIKKVLFTLNKQIQAIQKSIDEIIGNHFKHLKELITSIKGIGDKTAQGVIAYLGDLKSFSSYKQVTSYIGINPAIKQSGQSLNKTSGISKQGNAVLRTLFYMSALSAVRVNKACKAFYIRLLQKGKKKKTALIAVANKLIKQLYAIIKKNIFYLDDYYHPKFA

SEQ ID NO: 444869 - protein, 331 aa, unidentified
MNYSHFVGLDVGKKTFDASLMSADEKELSHKSFNNTPEGVQSLLNWIAGYHLSLSKLLFCAENMGSYVTELSVSSVSMGFSLTLVCPLTIKKSIGLQRGKNDRIDAKKIANYAALHYRKLELYKLPDEDLVRLRGWIIVRDNLVKQKVSSIKLLETFSHMVKLADVTESIAFLEEQLKSIKEKILKVEEAMEQLIAASSSLYTNYLLLRSIKGIGIINAIVLLCVTENFQRFDNPRKFACYCGVAPFEHTSGISIRGRTQTSTLANKEVKVYLTRAAITAISWDPQMKAYYKRKIAGGKHKASVINAVRAKIIARSFAVIRRQTPFVTLVA

SEQ ID NO: 444870 - protein, 346 aa, unidentified
MLHVGLDLSRTRMDVHVMDETGAPVLVTRSAPDSGGLASLVCRVGEFGQPVAAAIESMTGARFVHDQLELRGWEVEIADAVKVKGLAPLAAKTDKIDAWVLAELSRRDLVPAIWLPTPGIRGERERARWRLHLVRHRTALKNRIHATLLAFGHPCPVADLFGATGRRLLEGLALPEPWAGDVAAALRLIDSLDAEIDGCEAALRTAGADHPYVPLLMTAPGIGPVLGYTIAAEIGDIARFSTAKKLVGYTGLCPTVRQSGRKDHRDSLAKNGPKYLRWALIEAATHAARHPVYAERYQRTRVRLGKQRGARIARVDLARRLAEAIWYMLTTNKPFAPAGAAKPLAA

SEQ ID NO: 444871 - protein, 458 aa, unidentified
MSRSNTHPHPRVAEALPHLNPDAARLDIGAEEIWACVPADREAQPVRRFGTFTPDLHALADWLAQCGVKTVAMESTGVYWIPIYEELETRGFEVYLVNARHLKTVPGRKSDVQDCQWIQRLHSYGLLTASFRPAEEMRVLRAYLRQRALVVEHRAAHIQHMQKALQQMNVQLPQVVSDITGHTGLQIIRAIVAGERDPHVLAQLRHGRGHASQAEIATALSGQYRPEHVFALKQALALYDCYTQQVQDCDAYIEQHYAAIRPTYDDTTPPPPLGPAPKPTAHAKNAPSFDVRGCLYRILGIDLTAVHGLEASTAQTLLSEIGTDMSPWPTEKHFASWLGLAPHNDISGGKVLRSHPLKVRNRAAQALRLAAQALGRTQTALGAYYRRRRARQGPKAAVTATAHKLARIVYHLLKHRDPYHPLSPEAYEHHLRQRELALLKRKAARLGFTLLPRPATAA

SEQ ID NO: 444872 - protein, 411 aa, unidentified
MELLHSRCAGLDVAKDEVVACVRVPDGRGGRSQEVRTYPAFTSGLEALAEWLAGEGVTQVVMEATGQYWKPVWYVLEERSFDLLLVNARHVKILPGRKTDVCDAAWLAELLEHGLLRGSFVPPAPIRELRDLTRYRKRLIQAHASEGQRIQKTLEDAGIKLDSVATDVLGASGRAMLTALIAGERDPEVLAELAKGRLRAKLPQLRQALRGRFRGHHALLVRLAVAHLEQLEASIAELDTHIDQVLAPFAWARDRLDTITGVGKRAAETIIAEIGTDMTVFPTAGHLASWAGRCPGNNRTGGKRRSGKPTKGNRWLGEVLIECAWAAARSRDSYLSAQYWRLARRIGKKKAAVAVGHSILVIAWHLLTNDCDYQDLGGDYFVRRDTDRQRQRAVAQLQSLGYRVVLEPVAA

SEQ ID NO: 444873 - protein, 337 aa, unidentified
MKYSGIDLHSNNSVVVVSDEQDHVLEEKRVVNDLAVIVKLLEPHREELAGVVVESTFNWYWLVDGLMESGYAVKLANPAAIKKYAGLKHSGDETDARHLAQLLRLGILPTGTILPKELRATRDLARKRMQLVRHRTMHILSVENITARQFGARINSNQGKRLGLPDIEAMPLPEDVKLALQAHVAVIATLSRQIEVIEKRIQEQLVPLAEYRLLESVPGIGRILAPVILLETGPIGRFAGVGNYASYARCVESRHTSNGRKKGGGNTKNGNKYLAWAFIEAANFARRYHVPAQRFYERKKARTNNLVATKALAHKLARACYHILKEGKPFDVARCFV

SEQ ID NO: 444874 - protein, 355 aa, unidentified
MNQEKYIGMDVHQATISVAVMDAGGKLIMECLLETKAATIVEFIRGLHGTLSLTFEEGTSAAWLHDLLKPHVSRLVVCDPRKNALLKDGNKSDRIDARKLAELLRGNQLHPVYHGEHGVRTLKELGRSYLTITQDVTRVMNRIKALYRSWAIPCAGTTVYAPRHRAEWLAKIAEPGVRVRAERLYQQLDLLQPVRLEARRELLAESHKHSAVKLLRQIPSIGPIRSALLVALLQTPHRFRTKRQLWAYSGFAVQTHDSGEYRSVRGKLQRNRERMTVRGLNDNHNRDLKNLFKSAAISASTRPGPLRDFYVARVEKGMRPTMARLTLARKMAAISLTIWKKGVEFDAQQLQRQTA

SEQ ID NO: 444875 - protein, 435 aa, unidentified
MEKIRINVAGIDIGAKKVFTAVEGQPVVSHFTFTEDFRLLRDYLLKHKVKTVAMEATGVYWVILYEVLEEAGIDVWLVDGRQTKQVPGRKTDVKDCQWIQELHSYGLLTRCLVVDADIKELRSYLRLREDHINTSAMHINHMQKALTLMNIRLKEVLSQIHGASGIAIIEAILNGERDKNVLVSLCHLSVLKNKKELVIKALEGKYTEAGLFALKQAYDGYKFYLRQIEECDKRINIVMNRIGQSGKGQEVKKKRKAIRHHRPAVEKLAPNLINIFEGKDATIISGITDYTWMQLLAETGPDLSRWPTEKHFTSWLGLSPGQNNSGKMRRNAKKRGRPKAGQIFRTIAQGLINSKSIAIGSFGRRLRGRKGPGIAIKAMARKVAVLYWRVMAKGLDYAEQGIKRYDEQILANKMKIFNKLAKELEIEIPVNVHVA

SEQ ID NO: 444876 - protein, 366 aa, unidentified
MKKNNTVATGRKQIFKQAKLTIGLDLGDRTSYYCILDEAGNVILEGNLPTTSNGIRQAFSRIPRCRIALETGTHSPWVSRQLAQMGHEVIVAHARNVRLIGESSRKDDQFDARTLARLARIDPGLLGPVRHRSAQAQIHLTVIRARAALVGTRTALVNAARGLTKSYGQRLNKCGTEQMNRDSSQGLSQELRDALDPLLREIESLNERIAEYNGRIEQIAKEVHPEVARLKQVKGVGTLIALTYILTLDDPQRFRRSRDAGCFLGLRPGRRNSGKSEPQLHISKEGDRYLRTLMVQGAHYVLGPFGQDSDLRRWGLKLAERGGKNAKKRAVVAVARKLAVLLHKLWVSGEVYEPLRNNHKVVSAVA

SEQ ID NO: 444877 - protein, 352 aa, unidentified
MQIMNEEARCVIGGVDAHADTHHAAALDERGALLGSRSFPVSAAGYRELLSWLGSFGGVESTGSYAAGLTRYLLGEGVAVVEVNQPHPHTRRRRGKTDAIDAELAARHVLAHHKPVLPKQTTGIVESIRQLRVARESAVKSRSAAMLQLGDLILTAPSELREQLASAKTLKGKVGLCRRLRPDQGRLQDPTNAAKLALRSLARRIALLDEEIAELDGQLTPLVASAAPRTTALLGVSTGHAGQLLLTAGQNIERLRSEAAFAALCGASPVPIASGKRGRYRLNHGGDRQANRALHMIAVCRLRYCPKTRAYVERRTSEGKTKKEIIRCLKRYIAREVHTSLREDLGSLSLTP

SEQ ID NO: 444878 - protein, 383 aa, unidentified
MKYNTQNAKIESITEKTLIVGIDVGSETHYARAFDWRNYEYSKKPLEFSNNEAGFVTFKVWMEELAEKYGKDVVIPGMEPTGHYWFNLGAYLQDNGMKPVHVNPHHVKKSKELDDNNPNKNDRKDPKTIAALVNEGRFSYPYIPTGVYAEIRSLSNLRLQAQEEITRIKNRIARWFSIYLPEIKDVYKNPGAVSGLMILKVAPLPKDIVKLGVDGVNQIWRDAKLRAAGLKRAKTLVTAAEHSIGSQEACDSARIELKILLNDYEIYHQREEELMELIEEKLSEVPYIDKLLEIKGIGMKTVSGFVAEVGDIKRFDNPKQLQKLAGYAIVECSSGKHKGESHISYRGRKRLRYVLYEAAISLIARNTEFKEIHRYYQTRERIH

SEQ ID NO: 444879 - protein, 337 aa, unidentified
MVATLRDERGSIVMRATVPTEAKAILTLVSSAGPRVHVAFEEGTQAQWLHDLIVPHAERVMVCNVRGRSETTNKSDRIDADGLSELLRLGALKAVFHGAPEVLTLKELVRNYTNLVEDSTRVMLRIKAIFRARATRTPGVSVYRPSQRKQFLAKLEGGARVRAASLLAQLDVLLELRPKAKAAMIAAARRQPGWKILRTIPFFGPVRVAEILAIMRTPFRFRTKRNLWPYAGLAVVTRSSADEEFKGGQLRRRNRAPLTRGLNRNHNPILKAVFKGAANAATARPGPLRDYYEASLARGVKDDLAKVTLARKIAAVTLRLWKKGELWDPKKLTMQAR

SEQ ID NO: 444880 - protein, 375 aa, unidentified
MQKVTVLSELSVGIDLHKTQFTVCAILSDGEILLEKQYETKKEGYQAFIKNMHSFEKERSCTIALAVEATCNARFFRNMMIREFFRVVVVNTNRFELISKSTKKTDKHDAAELAYYLSKDMLPESHLCDEKEEEIRRLLKTRSILVSTEVKIKNQVHGMLLGHGEVTKSAQLQSKKKRQELIDSLGQDPYTKTVVASLKEMFTILDSLIVSVNDLEKYIKELVADDEDYKLLNTIPGVGFVTAATISCYTKNLDRFEGDYKKFCSYAGLTPYIHSSNKTEHIGHITKHGPVELRTSFVQMCMGLLRNTKKTGEWRLLVNYQNMKQTKGSGKSIIATSRKLARIVFVMLSRREEFNSSLMIKAVGHSLSVDEVIGA

SEQ ID NO: 444881 - protein, 360 aa, unidentified
MPKDRTRSKPSGLPIIHPFAAGIDMGSRFHVVAVSPDLCDEPVQTFQAFTSDLQRMADWLVATGTKTVVMESTGVYWVAAYEVLESRGLEVVLANAREARAVPGRKSDVNDAQWLQRLHACELLRASFRPVRDIAELRAYLRCRERHTDYAAAHIQHMQKALTFMNIQLHHVITDITGVTGMRIVRAIVAGERDPDRLAAMRDVRCKESLETIRSALVGNYQPEHVFALKQALALYDFYQRCIDECDVEIERAVGILNIAHRIPDAPLPKAKHRSKLPSDPNFDVRTAMYQLAGTGLTQIHGIGPFLALRLIGECGTDLSRWPTAKRFTSWLTLSPGCKISGGKVRHRTRAKQAVASQSP

SEQ ID NO: 444882 - protein, 596 aa, unidentified
MLPQHAPAPQSPRRIGVGIDTSRYGHYAVFLRDDLQPAADELSFAECAAGYALFRQRLQGIVQRYGPVAFAVRLDVAGPYADNLLHFLHRLATPSGDRPDALAPFVLTISCGDPQRNKNYRAALFGSQKSDPVEARAAARFALAERPQSDSRLSLELHILRQIAGRLQAIVRQRTRLINQFHHLLALTFPELALLTKDVAAGWVLELIHRYPTAPRLAEATPTDLAAIPYLPDAQVALLLEQARTSIASLTGEAIEELVRDHVRQLRDMGARQKRLESLLVSAYRALPQANQLDSIPGIGAVSAAVLTAFILDIDRFATPAKLVAYFGVLPIEASSGVDRDGQARSPRRWIMSRRGNDLVRRYLWMAALSAIRCNPAVRALYARVVAKHPQRKAIAVGHAMRKLLHLVFAIWKSGRPFDRDHYPWQTPAHIEMSDNGMSAESQTSDNDMSAGSQAAGHKPDMVPAAKVVTAACADSVAEASSVGEGTAVDFAHVKEQLLLTQVLDQLGLLARLRGSGSQRRGPCPLHRGDGRGRTFSVNLDAHVFQCFDKQCGQKGDVIDLWAAFHGLSLREAALDLVRTFGLEPCARPATEKRNG

SEQ ID NO: 444883 - protein, 332 aa, unidentified
MEHCAIDLGGRKSQVCVRSGQGEILSEFVVPTCSLPETLREMPRCRVVLETAAETFRVADAALACGHEVRVVPSTLVRALGVGARRTKTDQRDARALSEASCRMDLPSVHVPTLRSREWKAICGVHDVLISSRTKMINNVRGWLRGQARRPRSGAASTFAERVRKLELQIPPHIDAELRLVDVVSAEIKASEDKLESLASQEPVCVRLMTVPGVGASTAVRFLAALDDVTRFPNAHRVEAYLGLAPGENSSSERQQRLSITKAGPATVRWVLVQAAWVLRTCCRNAEARPLQLWAAEIEKRRGSRIATVALARKIAGILFALWRDGTTYTVR

SEQ ID NO: 444884 - protein, 377 aa, unidentified
MKAPSTRPAAVLGLDVGKSSHWACLIDRDGEVLDSAPVRNREAELDALFASAPAGTLVVVDQFRNIGSLAVRRARAAGLGVAYLPGLAASRAAGLFAGEAKTDERDAAVIARTALGVPDSLSGVPGRGEALEAARALSSQRDHVVACATRDKNRLRAVLLESCPALEAAVDLSDRRWLELLAGFGGAWGIARSGAEGPRAEAAGEAAAASTAPPPALVEAENRQVRFLAARISEALDEAGALEAETAALLEGDETYACLLTVPGIGPRTAAQLAVSVDIGRFPDHDHLASYCGIAPRVRSSGTSVRSVRASRRGDARLKSLLIFSCNSLVRSSGRYGEYYRACRARGMGHGRALKAVARKRLRAIYAVMRDRVPYRE

SEQ ID NO: 444885 - protein, 383 aa, unidentified
MAQCNTAKYVGLDVHKDTIVIAVAEAGRESARGLGTVPNEWKALSKVLDKLGPRSSVSCCYEAGPTGYGLARSLKAAGWSCDVIAPSLVPKKSGRRIKTDRRDAAKLAQNHRSGELVAVSIPDEKTEAIRDLERAREDAKKSERVARHQLSKFLLRHGRAYPGKTTWNDAHRAWVARQAFAEPAQKHVLEDGLAAVEAATLRCRQLTERLRESVEGWASAPLVKALQALRGVEFVTAVTLAAEVGDFRRFARASDFMGYVGLIPSEQTSGDRRRQGPITKTGNAHVRHVLVESAWHYRRQPRMGKALRERSAGVSPQVCAIAWKAQTRLHGRLSRLIGRGKNPCEAVTAAARELAGFVWAIAREEAESAARVQAPTKLHLNII

SEQ ID NO: 444886 - protein, 327 aa, unidentified
MIHYIGIDISKAKFDVAFINPSTNKVKTKVFNNNKAGFDLLLAWLKTNVSNHLDELHIILEATGVYHEHLSEFLDDNNIKQSIVNPNYVRKFADSLGVIHKTDKKDSIILSRYGYSHKPEIWVAPSIEAKQLKALLARLEALKEDLQREQNRQELLLSPNLPDLVKASMQTVISVLQEEIAKLTKDIDDFVDKQPSLKQDKTLLETIDGIGSVIAKEVVCLIHTKQFKKASQMASFLGLIPKQRQSGVFKGATKLSKQGQVSLRAKLYMSAMSAIRYNSTIKAFYERLQQNGKTKMQALCACMRKLVHICFGVIKTQTSFEQQVSLS

SEQ ID NO: 444887 - protein, 348 aa, unidentified
MVTIGVDPHKQTHTAAAVDGLGVEVAHRTVPARPAGNGQLLEWARAVDEQRVWVIEDVRNVSGSLERFLIDRGETVVRLAAHLMAGARRGARTRGKSDPIDALAIARAALREGVENLPTARLAGPEREIRQLALYRERLLDMRTRLSNELRWQLHDLWSDWEIPAKAFAQPGWQTKVTNRLARAEQSTQILLARDMIRRIRELTRATKDLYDKITVLVKQVAPQLLAEPGIGVLLAAKFIGEIAGIDRFTSDAQLARLAGCAPIPVSSGRSDRYRLDPGGNRRLNSAFYMLAIIRISHDPRTAVYLAKQRQNGKTKKEAIRSLKRHLVRRVYHLLHDPNSVPTTICLT

SEQ ID NO: 444888 - protein, 386 aa, unidentified
MATSTTSRIEQDSLPQPTLYLAFELGQNTWKLGFTIGVAQQPRERTIPAGALDTLQQEIARAKQRFGLPENARVVSCYEAGRDGFWLHRSLVAHGVQNHVIDSASIEVNRRQRRAKTDRLDVHKLLTMLLRHMAGERKVWSVVRVPSVDEEDRRQLHRELTTAKQDRTRVINRIKGLLAGHGVQLVLQGNVEAQLDQVHQWDGSPLPAALLRRLKRAWQQVGFLTTHIQTLEAERRALLRHRTDPVIAQVRQLFTLRGIGINSAWLYIMEFFAWRDFQTAKQVGALAGLTPTPYQSGQSRRELGIAKAGNRHIRAMAIEIAWAWRRFQPASALSQWYERRFGAGSARLRKLGIVALARKLLIALWRFVKTGVLPEGAVLKTATPSP

SEQ ID NO: 444889 - protein, 444 aa, unidentified
MRERSGGQRVEEVTDEPLYRDRVCGIDIGKAGLAATIRVPSDRDPARRMQETRGFGTTRREVLALADWLRCWQVPAVVMEATGDYWKGPFYRLEAEGFECVLADAKQVKNLPGRPKRDPADSRWLAACFERGAITPCFVATPEFRIIRLHTRYRRDLTEERTREKQRAEKLLESAAIKVSSVVTDLHGVTGRDIMDHLIAGERNPKVLAQLARAAARRKISQLEEALEGAEFFTPAHAALLAKVLARIDRLSADIDDLSQVIEQLLAPYEEQLQQAESMPGWGRRAAQDAVAETGVDMSRFRTGGHLSSWAGRAPQDHQSGKRKGRAKAKKGNRYLGAITGETAVAAGRTQTREGARHRRLARKRGAAKACVATGNTQLKVYHKLLSNPGMRHQDLGPDYYDRQRDTRRQIAHHVGKLGSLGFEVTLCRIPDPEPDATGPAQPA

SEQ ID NO: 444890 - protein, 315 aa, unidentified
MTTSAYSFYIGIDVSKPFLDVFVLPTNQYHRFENTESGIKKLIKKFKGRPECFFLMEATGGYERACKTALAQASLAVAVTNPRQIRDFAKATGHLAKTDKIDAELIARFGQKITPEPNVTLDDAQEELADFHARRKQLVDMISAEKNRLDKASPVIKKHIVRNIKSLERELAKIDKILTTKVAQDETFKQKSALLQTTKGVGEKVATGLLAHLPELGRLSKKEIAALAGLAPFNRDSGMSRGKRMIRGGRAPVRNVLYMAALVASKYNPSIKRFYERLCAAGKAKKLALVACMRKLLTVLNAMVKNNQAWQPSPV

SEQ ID NO: 444891 - protein, 343 aa, unidentified
MAKVYVGLDMGSSGFHQVGIDRDKTILVDRKFDTSEANLIRAFDDIKGEVHVHLEAGELAAWVRRVIKGRVTRIVVGHPKSSAWIAKDPLKRDRLDATKLAELLRMDQVHEVYYADEDQRTVFKQIVQHYDDVTSQEVRLKNKIKAAFREQGVIAKGAEVYTAAGRDKFLAAIPFAAAREAITQLYELLDVTLKAQKGAFRLMKQEAQKYPEIARFDRVPGLGLVSASRFSAYVQTPHRFSAKRKLWRYCRLGITDRQSDGKPLGRQALDWNGNGRLKEMSRTAFMGALQTTDDNLFKKTYRGALQRTHNETHARLTTQRKILAVLLAMWKGGTEYQDKIEKG

SEQ ID NO: 444892 - protein, 343 aa, unidentified
MQIRSVGIDLGKTTFHLVALGDNGKVLLKKKFTQKQLIAFTANLQTTLIGLEACAGAHFLGRALRSQGHDVKLIPGQFVKPFVKSNKNDFLDAEAIAEAVDRQNMRFVPIKTDDQLDLQALHRVRDRLITRRTSVINQLRAFLLERGLVFAKSPAKLRERMPEILENADEDLTPRMRNLLALLWNEWKDLEQQVVDLNHEVEQIASSDAACQRLRQIPGIGPLVATAIVAAIGNGAAFRKGREFAAWMGLVPKQYSTGGKAKLADISKRGNRYLRKILIHGARAVVLRSKRDRIAMGEWMTALEARAPRNVLIVAMANKLARIAWAVLSSGQDYRAVQEPVAA

SEQ ID NO: 444893 - protein, 345 aa, unidentified
MENMYYIGLDVHKKTISYCVKDGSGRIYAEAEIPATRLDLDMWMKTLPQPWTAAMEATIFTAWIYDHLKPHAAAVKVAHPLMLRAIATAKKKNDRIDANKIADCLRCDFLPECYMASTEIRERRRTLRYRNLLVRQAVQMKNKIAVLLMEAGVSYNKQKLHKVGYFRELLATNQDIDEGLKPLLRLCRETVVRLGKTESALVRSLQRDSLLMERVERLMTIPAVGPITALTWALEVGDVQRFSSIKKAISYCGLCGAENSSANIIKRTPLSKQRNKHLQTMLIEAAKMAPRNSVDLAVIYDREKQKGNANRATLAVARKLVAYLVAVDRRQKDFLIVERENRTAA

SEQ ID NO: 444894 - protein, 433 aa, unidentified
MPTNHPYDLVIGLDRSDRTADLHLIDTRTGTLQKQTVATSPEALQDWLAQLRQDHPQARVALCLEQPAANLIVFLETYSWINLYPINPISLQKFRETFVTSRAKDDGKDAQYLAELLLSHHDKLKPWQPDDSQTRQLQQLVLHRRAVVNERTGLTNRLIALLKQYFPQALDLCGEDLWRPLATVFLLKWPTLQSLQKVRKESLKQFYHLQGSRSQTLIEQRLERIEKAVPLTDEIALLQSYTLRVQLLCKELQLLGKTLDQFDRQIAQVFQHHTDRPIFQALPGAGPVLAPRLLASMGSERERFARPDNLQAFSGVAPVTKQSGGKCYIHRRYLCPKFLKQSFHEYAKESILHSRWAAAYYLQQRTKGSQHHTAVRALAYKWQRIIWKCWQSHTVYKEAIYEAALKKNKSPLVGLLDQIELGKSPVKSRAKKS

SEQ ID NO: 444895 - protein, 423 aa, unidentified
MDIMYERVAGLDVHKDTVVACVRIAADGKTKRECRSFATTTEQLEELRAWLEECRCTHVAMEATGVYWIPVFRILDEGKFALILANAAHIKNVPGRKSDMNDAMWIADLLACGLIKASFVPTEEMQELRGLTRTRKQLVREQTRHVQRIEKTLAEANIKLDSVISDIMGASGRRIIEAMIAGVRQPRKLADLASKQIKATPKELYDALHGRLTDHHCFLLQLHLRQWDGLDETIRKIDQAIDQRITRIDARVGAGNVPFRALIELMHTVPGVSTVAAPAILSEIGCDMNRFPTAGHLVSWSGLCPGQNESAGKRKPARLRKGAPWLKTMLVQCAWAAKRKKDSYYRAQFFHLQSKRGPQKAICAVAASILTAIYHILKNGTEHHDLGAGYFDRRPTELKAKQLVSRLKKLGFTVQMQPIAEAA

SEQ ID NO: 444896 - protein, 359 aa, unidentified
MTVTIVETRVQARAITGGVDTHADVHVAAALDPVGGLLGVQEFPATAAGYARLLGWLGGFGPVCLVGIEGTGSYGAGLARHIAAAGIRVVEVDRSDRQDRRRAGKSDPLDAVSAARAALSGRAAGEPKGRDGQVEAIRALMVAKRTARSERIQTINQARSLIVTGPDDLRARFGHHSADHLVAELASLRPRPGSMIRYHTLLSLRELGRRVAFLDGQLQRLDELIVPLVTARAPGLLCLYGVGHDTAAKLLIAAGDHPERLRSEAAWAHLCATAPIPASSGKVTRHRLNPGGAKKACPRRRSSAASSVTSPARSTTTCAQAPADAQTPGAAWPNNRLPHSAGLRTIRRPPPAPIPTCWA

SEQ ID NO: 444897 - protein, 416 aa, unidentified
MNAVGIDVSSRKSTVAVLRPLGEVVCLPFDVSHDADGLASLAEKLKALDGETRVVMEHTGRYYEAVAKALHEAGFFVCAVNPLLIKEYGANSLRRVKTDKADAVKIARYALDNWADLRDFTPMDAIRYDLKTLNRQFQLASKQRTASANNLIALLEQSFPGIRKCFDSPVRSDGTQKWVDFAHSFWHVDCVRKQPFPAFCERYRKWCKLHAYFFKLRNAEKVYALAKSAVVLTPKSKVVKVLVQEAANQLISISRSVEVYRAEMDRLAAMLPEYPVVMAMYGVGKSYGPQLMAEIGDVRRFERKQALVAFAGIDPMPNQSGDKNVRSNKSSKRGSPYLRKTLFNVIRTYLQCAPQDEPVFQFLNRKQAEGKPFYVYMLAAANKFLRRCYAKLRDYFASLNPLQPVAPIPTILKATL

SEQ ID NO: 444898 - protein, 367 aa, unidentified
MWEAPVRGQRTSVGLDVHARSVVGCGLDGETGELFERRLTPERGGVLSWVRSLPGPVSVTYEAGPTGFGLARFLAAAGVDCQVAAPSKLQRPSGDRVKTDARDARHLARLLHLGEIVAVAVPDAETEAARDLVRAREDVRGDLMSARHRVSKLLLRQGIVYSGGVAWTGVHDVWLRKQKFESAALQLTYDTAYDTMIAAVDRRDRLDKVIAAMAADSPFTPVVTRLGCLRGVSTLTAFGLAVEIGDWRRLTGRSIGAYLGLVPTEYSSGGSRSQGGITKTGNGHARRLLIESAWHHRQPYHRPSVDLRRRWDLADAASRARGQQANRRLHARWAGFDARKKRPVVANTAVARELAGWCWSLAVGENS

SEQ ID NO: 444899 - protein, 408 aa, unidentified
MLKRCCGADVHKALIVCCILAVGLNNKVRKELRTFGTMTKDLLEMVDWLNANEVRDVAMESTGVYWKPVFNILEREGFNVLLANAHHIKNVPGRKTDIKDAQWIAELFSKGLLSASFIPPLLVRELRTLTRSRRKLVEERSRVKNRIEKILQTGNIKLSSVVSNIFGVSGRAMISALSEHDHVSKDEIGHMAKGQLKNKIDELYSALEGRLMETDLFLLKQELTHLEFLEQQVEDFDAEIARKMTSLSKESEDVQSLPGIKCTAASAIISEIGVDMKRFPTEKHLASWAGICPGNNESAGKKKSGRTRRGNNYLKGILTECAWAASRTKNTAFREFYHRLVRKKGKNRALVALAHKMLIEVYRVLKSGEPYSERGSEITVQYPKKAEEYLVRKLVKMGYTVQKIPSSA

SEQ ID NO: 444900 - protein, 341 aa, unidentified
MKTSRTVVGVDTAKRVFQLHWVDMETGEIVDLKLTRAKFLEHFANLAPCVVAMEACGGSQHWARQLRELGHDPWLLPAKAVRPFVFGNKNDAHDARAIWTAAQMPGIRTVAVKSEEQQAILALHRMRQQLVKFRTAQINGLRGLLTEYGEVMPQGRAGMRRDVPQALARVSERLPAIVIDTLREQWARIGRLDEEIGEIERRIGVWHRGNADSKRVAEIPGVGVLTATAVVAAMGDPAAFRSGREFAAWLGLVPRHDGTGGRVRMLGISKRGDRYLRTLLIHGARSVLTNAKAPPEWAVRLAERRPANVVTVALANKTARTIWALLAHDRAYRANYVSQPA

SEQ ID NO: 444901 - protein, 375 aa, unidentified
MSLLGCGSKEARTQSTRIRSAHLGFTVNEKGIVMTMIGIDPHKATHTAVAVDDDEHVIDEFTLEASNSQAERLCDWASGFTKREWAVESANGLGYLIARQLVAAGETVFDVPPVLASRVRLMGSGRSQKNDPNDARSIAIAALRSDRLGVVEPDDHVVVLRLLVKRHRDMARLRNKHCSRLHALLIELEAGGIGTKINARNASELLDWITVTDETTRCRILIAREVVDDITRIDQTLKASKKRIAEAVQASGTSVTDIVGVGPIGAATIIGYTKDITRFPTKGHYATYNATAPIEASSGGHTRHRLNLRGNRILNHAIHIAAVTQLRHDTIGRVYYQKKIAEGKTPKEAIRALKRRISDAIYKSLVADTATTTTI

SEQ ID NO: 444902 - protein, 345 aa, unidentified
MELHTIGIDLGKTVFHLVGLDPRGEAVVRKKFSRTQLLRFTANVHVGLIGMEACGGSHFLGRALREQRHEVRLIPAQYVKPYVKTNKSDYIDAEAIAEAVARPTMRFVPIKTDDQLDLQSLHRVRERWVMRRTAVINQIRGLLLERGITLRKGRHHVDAALPLILEDADAKLSGAVRLLLAQLKLDLDQLSVRIDEADEVIKKIADENEACRRLVAIPGIGPVTATALIAAIGNGGAFHKGREFAAWMGVVPREHSTGGQQKLLGISKRGNSYLRRLFVQGARAVLQQRTKQSSGLSAWLAQLTSRTHRNVAAVALANKLARIAWAVLAKNEQYRPSVVPDVAAA

SEQ ID NO: 444903 - protein, 335 aa, unidentified
MHYLYYVGLDVSKETFDASLVAFEDANEMAHRKFANSRKGICSCLHWVEKRHGILLDDVIFCAEDMGSYISEMAVCASDRTLNFNFSLISPLVIKYSMGIARGKTDRVDARRIAEYAITHYRKIALYLPAEKELCQLRTWLILRAHLAKQRVAKLVLLEKLDYKEKFADVSIQRSMLQEEIAYAETHMKTIEREMKELIAADSNICRNYKLLTSIKGVGPITAIVMLCSTLNFTKITDLRKFACYCGLAPFEHSSGTSVRGGCHTSSMANRDIKVQLNRSALIAIRCDPQLKAYYERKAAEGKHKFSVLNAVRAKIAARCFAVVRRGTPYVALQI

SEQ ID NO: 444904 - protein, 342 aa, unidentified
MNISYVGVDLGSSKFQQVALNHDGVSRVNREFSTSEANLVKACSDLKGEIQVHLEAGELAPWAASVIAPLVTRVVCSHPQHNAWIAKDADKCDRIDAYKLAELLRLNRFKEVHYAPDQPRRNFKQLVQHYDELTAQQARLKTKLKARLRMQGVIVSGARLFSATGRKEVLARIESQELRTAIAQLYAVLDQSVVTQNQARLLMLRAAQAFPEIKLFRTAPGVGPIGACRYSAYIHTPNRFSTTRKLWKYCRLSVSHRSSNGKPLRRPRLDRCGCGRLKDVSRKAFDAAVRSRQDNGFKRAYQRALETTHDATHARLTVQRKIVSTLRAIWINQTPYCDELMP

SEQ ID NO: 444905 - protein, 410 aa, unidentified
MRLFVGDDWAEDHHDVELMDEAGRVLARRRLPEGVAGIARLHELTGEHLGADLDAEVVIGIETDRGPWVAALVAAGYTVFGVNPLLASRFRERHQVSGAKSDAADAHMLADMVRTDSHQLRAVAGDSAEAGGLKVLARMHKTLIWERTRQVQRLRHQLREYYPAALAAFDDLDAPDALELLGKAPDPGRAARLTRAQISAALKRARRHRIADRTTEIMAALRAPQLGQPPALTAAYAAAVRSLIAMIITLNEQAKILQEQVEADFGRHPDAEIYRSQPGLGAILGARVLGEFGDDPHRYATGKARKNYAATSPLTRASGKKKTVTARFVRNERLTDALMAQALSALNTSPGARALYDAERTRGTDHNAALRKLANRLVGILHGCLKTRTLYNEATAWPQQENTPQDSIAA

SEQ ID NO: 444906 - protein, 343 aa, unidentified
MYYIGLDVNKKTISYCVKDAAGCVHQEGKIGSTRRELDAWIKTLPQPRTMAMEATIFTGWIYDHLLPHAEKVKVAHPLMLRAIAAAKKKNDRIDAGKIADCLRCDFLPECHMASTEIRNRRRILRYRGLVQRQAVQMKNRVSGLLMETGVSYNKLRLHRMGYFAELMATNEEVSENIRPRLSLCREHIDRSIMLDTALLRSLERDPLLADRLRRLRTIPGVGPITALTWALEVGDTSRFRSIKQAISYCGLCSAEKSSADKVMRTPISKQRNKHIQQVLVEAARLAPRYSEELALLYERERQRGNGNRATLAVARKMVALMLAVERRNTDFVPAGEFRRSAAA

SEQ ID NO: 444907 - protein, 354 aa, unidentified
MPEDTMQHATQPEMTVGLDVGDRYSQLCVLDAVGDISETGRVATTPAALTRRFGAMPRARVVLESCTHSPWIDRLLTALGHEVIVSNARRVQLIAQNNTKTDAVDAELLARLGRADPRLLQPVHHRGAEAQADLAGIRSRDALVRARTLLVNHVRGSVKAMGSRLPACSTASFARQAAPALPRALVPALTPVLTEVTSLTTQIRHYDGHIEQLVATRYPEARALMQLAGVGALTALCFVLVLEDPARFPTSRAVGSYVGLRPKKKASSTSDPECHITKAGDVLLRRLLVGSAQYILGPFGPDTDLRRWGLGLAARGRKNAKKRAVVAVARKLAVLLHHLWKTQEPYRPLRSVAA

SEQ ID NO: 444908 - protein, 372 aa, unidentified
MNYNTVYVGMDVHKESFTLCSCKYEDEKASHYQRTPASYKNVLRYLAFLRTIYGEDTRFVCGYEAGCLGYSLYHQLENFNVECVILAPTTMLEQRSKRRIKTDKRDAEIIAKSLAQHNYSPVHIPTKMDNQTKEFIRMRDDHKAELKKIKQQILSFCLRQGYQYDGSGNWTAKHVKWLRSLKTEGLYKEILDEYLLTYTILTDKLNRLDQRIEELASKEEYKESVSKLTCFLGIKIHTALSVIVEVGDFQRFVSARKFAGYLGLVPGQHSSGDDRNGLGITKAGNTHVRRLLVESAQSYTRGKIGYKSRVLRSRQAGNSPQIINYADRANERLRRRYYKMVLKDGKKYNIAKTAVARELACFIWGMMTDNIY

SEQ ID NO: 444909 - protein, 461 aa, unidentified
MQVVYDRCCGLDIHKKLIVACVLSRTPQGVQKEIRTFSTMLSDLFRLRDWLKASDCQVVAMESTGVYWKPIWNVLEEELELLLVNAQHIKAVPGRKTDTKDAEWIADLLQHGLLRASFVPPRPQRELREVTRYRSKLVAERARLVNRIQKVLEDSNVKLASVATDITGVSGRAILQALLDGEDDPEVLAELARGRMRSKHDKLAQAVQGTLRDHHRFLLTSQLRQLDFYDLQIAELDQEIARRLGVQTGQDDPEPQGDGLASDNRTPSTDSLSDGGADPASRSPRPPSDPARSQAEVIRILDEVTGINQRIAQIVVAELGIQLDQFPSEGHVVSWAGLCPQAKISAGKRLSTKTGKGNRWLKQALIEAAHGAARSKNTYLGAYYQRLKKRMGSKKAIVALAHRILVIIYHLLKEQQSYRELGPGHADEQAAQSSKRWAIRRLEQLGFAVTLTPKDHEEEVA

SEQ ID NO: 444910 - protein, 338 aa, unidentified
MEVYAGLDLHSTNTYVAMIDKDNKVLYKQRHGNDVPTILSVLDPFKKDIQGVVVESTYNWYWLVDALMDAGYRVHLANVSAIKQYEGLKQIDDRRSSLWLANLLRLNILPTGYIYPKEERPTRDLLRKRLHLVRHRTSHVLSVKNILARNLGIRMKSEEVKKLNTSDIKILFSDSEMRVAVAASVGLISHLENEIKGIEAMITRKLKVRKEFIKLLTMPGIGQILGLTIMLEVGHIDRFPTVGDYSSYCRCVRSIRTSNGKITGYGNRKSGNKYLSWAYVEAANYARRFHEAVRSYYEKKLARTNRIVAIKAVSHKLARASYYVMRDNVDYDQARLFG

SEQ ID NO: 444911 - protein, 370 aa, unidentified
MIRLARAMQYLINTELSSHEETRFEFNRSTGAIKLGIDVHQDFYVVVEQVEGGNPKPPQRFDKQAFLHWASKLKQRGAEVHAVYEACGFGFSLQRNLRALGIKCHVVCPQKLDERNKRVKTDGLDAKALCLKLDRFVQGNRDALALVRVPTEEEERSRAIHRQREQLVGARKRLEAQGRSLMVNHGVDPVQNWWKPRTFATLPVPHWMRELLLNSQPILLALQEKIAVLTLQLQNAAAPNQPRGLGKMTSVVIDREIGDWHRFNNRRQIASYTGLCPGEYSSGNTRLQSCVTKHGNPRLRAALVELAWRLVRFQPNYKPIVKWRQILAKGALATGAARKKAIVAVARQLAVDLWRIKTGRLRAQELGLIN

SEQ ID NO: 444912 - protein, 317 aa, unidentified
MTESVKVNVGIDVSKDFLDVHVGNVALRRVPNRSSGLSVLKRILSRYSVSLVLCESTGGYENLAVTYFQSLGYDVCVINPRQARDFARSMGRLAKTDRIDAQILCRLADVIDVSPERTRFVKPLTDERRQRLVSMVRRRRQLCDLMISERNRRAKTDSYGSESINTVLDFLTAEIARIDRDISAHVGSCFSDISSLLQTFTGIGPVTASTLLGELPELGKLNRRQITALVGVAPFNRDSGYMRGRRRISGGRSGVRNVLFMAALSAVRFNPVLKAFFARLVAAGKPKKVALVACMRRMVCILNAMLRDGSRFEVALG

SEQ ID NO: 444913 - protein, 315 aa, unidentified
MGTPVFVGIDISKKNLDIFLTPPDTSFTVPNTEAGVLKLVARLRRVTPQIILLEATGGYEFRVVAALREAELPACCINPRQVRDFARSLGILAKTDRIDARVLAHFAEKLRPEPRPLPEAQQQELKHLMARRRQLLEMILMEQNRLQISPFPRVQQSIQAALQALKEQLQQLDRDIDDFFRRYPVWLDQDQLLRSVPGIGPQTSLSIMAWLPELGHLNRREIAALVGVAPFNRDSGAWRGKRSIRGGRPQIRRSLYMATLAALRFNAVIRTFYQRLLLNGKAKKLALTACMRKLLTILNAIMKNHQPWLPQEQTP

SEQ ID NO: 444914 - protein, 320 aa, unidentified
MSETSVVVGIDVAKDQVDVSVLGAELGAEQFDNSSEGHTALAAALKPLKVSLVVLEATGGYEAALVCALQAAGLAVVVINPKQARDFAKSMGRLAKTDRVDARMLAELASVLLRREDLARFIRPLSDTHQKDLAALVTRRRQLLSMLTFERQRLQLAPQLIRPGIEAMIKTIRAQIDDLEAQMERHLREHFAELDQLLQSTRGIGPVASATLIAQLPELGKLDRGAICALVGVAPMANDSGTTRGRRRVKGGRFEVRRVLYMAVVSAIRFNPLIKAFYRRLTAAGKPPKVAIVACMRKLLVTLNAMVRDSTRWDPNYSRA

SEQ ID NO: 444915 - protein, 400 aa, unidentified
MIDTGDIDVFLGLDVGKGEHHATAVTPAGKKAFDKRLPNTEPKLRELFAKLQAKHGTVLVVVDQPASIGALPLAVARDMGCPVAYLPGLTMRRIADLYPGEAKTDARDAFIIADAARAMPHTLRAIDGEDETIAELEMIVGFDDDLAGEATRVANRLHGLLTQIHPSLERVLGPRLQHPAVLALLERFGSPAQIRKAGRRRLVTLLRPKAPRMAERLVEEIFAALDEQTVTVPGTEAAALIVPSLAGSLTAVLDQRKLLAGRIEELLEDHPLSKVLTSMPGVGVRTGARILIEVGDGSTFPTAGHLAAYAGLAPATRSSGSSIRGEQPSRRGNKQLKRAFFLSAFAALGDPASRAYYDKKIAQGKHHTQALLCLARRRADVLFAMLRDGTFYEPQPVRSG

SEQ ID NO: 444916 - protein, 411 aa, unidentified
MPKHTPTRLGIKGQCIVLAVDVAKRNHMLMVQGPDGAREKPRRIGNSAAGFGALLQHAQTARRRWPGVPLVVALEPTGHYWLPLAYWLQARDLPVLTVNPAHTKRAKELEDNSPAKTDEKDVRVIADLAAMGRARPCRLQTGVYATLRALARLRARVAVDLTAVTNQLHQLCDQLFPELLPCFGGDLRRTSCRRLLAVAPTPAAVQALGVERLTVLLRGASRGRYGAARATQLLAAAATSIGLREGTAPLVTRLHYLLEEEARLRGYRRALEQQQAAALRLVPYAAGLLQFRGLGVVTVATLLGETGDLQGFRRARQLLKHAGLNLYELSSGEHQGQRRLTKRGRPGLRRILYMAALRLLKRGAPLHGYYHRLRARLAGTAAVVAVMRKLLRVVHALVHSGQAYDALRLAA

SEQ ID NO: 444917 - protein, 342 aa, unidentified
MYYIGLDVHKKTISYCVKDASGQVQQEGKVGATRWELDGWMKTLPQPWTVAMEATIFTGWIYDHLLPHAQQVKVAHPLMLRAIAAAKKKNDRIDAGKIADCLRCDFLPECHMASTAIRDRRRTLRYRHLLVRQMVQMKNRISGLLMETGVSHNKRRLHKVGYFRELLASNEEVNESIRPLLRVSRDSIVRLQKTEYALVSSLQRDPLLAERIKRLRTVPGVGPITALTWALEMGEVSRFPSIRQATSYCGLCGDEKSSADKVTRTPLSKQRNKHIQRVLVEAAKLAPRQDHNLALVYEREKQKGNANRATLAVARKMVAYLLAVDRGQRDFVPFADSQSAAA

SEQ ID NO: 444918 - protein, 355 aa, unidentified
MDKIIKQVVGIDCSKDTLDGSYGRLGADLTQQIQEPAKFNNDPAGVNKMLGWMEKRRQKDLDIVFVVEATGVYHEVLVNTLVDKGFKVCVVLPNRTSNFFRTTKIKTINDASSAKMIAQFGLEKQLELWKKPKDVYRQLKQLTRERCQLIDQRTVTKNQLHAEESGAFPLSSSIKRMKQLLRLVDKQILDIVNEIQSMVNSDPQLKHRIENVCTAPGVGLLTAVTAIAETNGFDLIRNKSQLVSYAGLDVVEKQSGTSVNKLKRISHKGNKHVRKSLYFPSFTAIKYNPHYKNHYAGLVSKHGIKMKAAVSVQRKLLVLMYTLWKTDKPYDPEYLKKESGQQSLATPTELTQGRS

SEQ ID NO: 444919 - protein, 373 aa, unidentified
MKKRSSSRQNPKRATKAKGAHRSVTIGMDLGDRNSRYCLLSDEGEILREGQVATTKTGMIETFSSLGRARIAIEVGTHSPWVTRLLQSFGHEVIVANPRQVKLITESSRKDDRLDAQTLARLARIDPQLLRPIRHRSEKAQTALMVIRVRAALIAVRTSLVNTARGLAKAMGERLPKCDADQMGVLQAESVPAKLRQLLEPLLKEVESLTERIKDSDREIEQIAREDYLETALLQQVGGVGPLIALTFVLTVDDKNRFQKSRDIGCYVGLRPRRSDSGQRQPQLRITKEGDPYLRTMLVQGAHYILSRRGPDTDLKRWGLRLAERGGKRAKKKAVVAVARKLGILLHRLWVTAEVYETLRNQNLRQLQKEVAA

SEQ ID NO: 444920 - protein, 376 aa, unidentified
MNYSTVYVGMDVHKETFSLCCFTNEKEEAEYPQKVKGHYSKVLNYIEAMRFHYGDNALFICGYEAGCLGFTLYHQLTAHGVKCIILAPTTMSQPKGKKKIKTDKRDAKLIARCLAHHDYSPVHIPTEQDEQTKEYIRMRDDHKLALKKVKQQILSFCLRHNYRFDGTSRHWTQTHLKWLNSLQPEGLYREILREYLLTYVQLVEKLERLDRRIEELASEETYKEKVSKLSCFIGVKTITALAVLTEVGDFKRFASAQQFSSYLGLTPGEDSTSDNQNRLSITKAGNRHVRLLLVEAAQSFARGQVGYKSRLLKIRQEGNLPEVIAYADKANERLRRRYYRMVLRNNKKPNVAKIAIARELACFIWGMLTGRITALP

SEQ ID NO: 444921 - protein, 478 aa, unidentified
MARARKQVVRRAAEAEPGKQVRPAAQGDLLITHRHAAGIDVHAAEHFVAVAPEDVPAGFVSPDRKLPAGVRKFGTNTADLEAIADWLKACGVTTVAMESTGVYWIPLYDLLASRGFEVLLVDPRQTKHAPGRPKTDVVDCQWIRRLHSYGLLTGSFRPGDEVVRWRGFQRQRETLIRYAAQHVQHMQKMLEEMNVKLTEVVSDIMGVTGMKIIKDIVRGERDPLQLAKNRHESCKRTEAEIAAALYGNWREELLFGLEQALELYEFYQQQLRACEAKIEKCLRSMKDQSDGRSLPPSLRQRKPEKNEVRFGARALLFRMSGVDLTQIEGISETTALVILSELGIDLSAFPHEKNFVSWLGLCPQHRGSGGKIFKRGTRRGANRVARALRMAAQGCHRAQNALGAFYRRIQGRSGGAKAVVATARKIAERVYRMLKFGQEYVRQSQETYEQAYQLRLMKSLAKRAAHLGYKLVPQTIGT

SEQ ID NO: 444922 - protein, 335 aa, unidentified
MPLYCGIDLHSNNHVICVIDDKDKRIFEQKLGNHSELTINALTKYKKRLKAIAVESTFNWYWLVDALMAAGFKVELVNTAKIVQYSGLKRTNDRYDAFHLAHIMRLGILPTGYIYPKAERGLRDLLRKRIQLVQDRSSHIIRYKSQIQMHTGKTIRADFIKAKKYQPPVIGDDNIQLALQSHIAMIKALSTQIALLEKSILTQVEPNPVFSYLKTTPGIGDILAEAILLETGDISRFKGPGNFASYCRCVDSRRESNGKKKGENNRKNGNKYLAWAFIEAANFAIRHSEKANRFYEKKKQATNMIVARKALAHKIARASYWVMRNQQDFNEDLVF

SEQ ID NO: 444923 - protein, 402 aa, unidentified
MNCVGIDVSHGKSIIVVMRPFGEVVVSPFEVLHTDSEPSKLAGLLKSLDGETRVVMESTGYHHTPVAWLLHDAGLYVSVVNAMLVHDYGNNSLRRAKTDKKDAVKLANYGLDHWLTLPRYIPEEDTRLMLKICYRQYQQYSKVQTMLKNNLISLLDTTFPDANRLFTSPPRADGSEKWVDFVATFWHCECVCGRSEKAFTTQYQKWCRKHGYNFSEDKALDIYASACRHFGVIPKTDTAKLLVEQAISQLQTTSSALAALKQEMQSLAASLPEYPVVMGMFGVGPTLGPQLLAEIGDVRRFHSKKALVAFAGIDAPPYQSGQIDVRSRSISKRGSASLRRTLFLVMSVILQCAPIDEPVYQFMDKKRSEGKPYRVYMMASANKFLRIYYASVKAYLESLEHD

SEQ ID NO: 444924 - protein, 459 aa, unidentified
MAKAPQRGQRGRAALPTVNPHAAGIDIGGETHYVAVPADCDPEPVRTFAAFTGDLYRLADWLRACGVETVAMESTGVYWIPVFQVLEERGFEVKLVDARQLKRVPGRKSDVADCQWLQQLHSYGLLAGAFRPADEICVLRSYLRQRAMLVRGVGQHVQHMQKALVQMNVQLQYVLSDITGATGLRIIRAILEGERDPQRLAALRDPGCTHPATVIARALEGDWREEHLFALRQALTLVEAYEAQIAACDARIQAHLQTFPDQSAGQPLPRGKPRRADRHDLHFDATAELFRLTGVDLTRVKGLEAHTVLKVLSETGLDMTKWLSAKHFGSWLGLAPNNRVSGGKVLSRRTLPTANRAAAALRVAAQALHHSHSALGAFLRRKAAQRGMPKAITATAYKLARILYSMLLHGLPYVERGQDYYETAYQERVVKNLARRAQDLGYTLVKHDPPAPNPALGAA

SEQ ID NO: 444925 - protein, 369 aa, unidentified
MRESITYVGLDVHKDCIDVALAEEGRNGEVRHYGTIGGELSAVRMLVRRLESLGKSRLLFVYEAGPCGYEIYRCLRQWGYECAVVAPSKVPRASGDRVKTDRRDSMALARLHRSGELTAVYVPHAEDEAMRDLTRCREDAKHAERRARQRLNAFLLRHGFRYSGKSHWSGPHFRWLAGIGMEHPAQQLVLEEYVDNVRCCTERVERLTGQIREFVPQWRMREVVEALQSLRGVSLIVAATTVAELGDLSRFDNPEQLMAFLGLVPSEHSSGGRRRRGGITKTGNGHARRVLVEAAWAYRFPARVSRRLLKRQEHLPRSVCEISWKAQLRLCARFRRLGARGKSKQVVTTAIARELSAFMWAIVQLVPVS

SEQ ID NO: 444926 - protein, 356 aa, unidentified
MSRDVKYIGMDVHKEATVIAVRNSRGELVMESMVETESSTIVQFIHGLRGELHVTWEEGTWAAWLYDLLKPHAHEVLVCNPRRNALLKEGSKTDRIDARKLSELFHAGMLGAVDHGENGVRTLRELACMYQTVSQDLTRVMNRVKALYRGWGIACAGTQVYAPRYREEWLQKIEPAGVRRRAELLYEELDGLQALRRKVRPELLTESQKHKAAKLLRQIPCIGPIRAARLIALMQTPHRFRSKRQLWTYSGLGIETRDSGQYRFVDGQLQRSKKPQQVRGLNRNHNHEMKEIFKGAAIRASCGVGPLREFYGSLLDKGRKPEMARLTLARKIAAITLTLWKKEERFDAEQLKTQAA

SEQ ID NO: 444927 - protein, 382 aa, unidentified
MFCGIDVAKNKSQVCILKEDNIIFKEFEITHTKEGFDELEQNITPETTIAMETTGNYSKAIYDYFKSRYKTIYVDNGQMHMFNKLHFSHMKNDKIDARLIAKYLSFGLKKVDPIREDSMKDLGRLYNKTCMQLSNYKHMYKNQINIIFPELETHFYLSKGKAITSLLMKYPSPEQIAKLSDEELFNVLTSDFKNKNQSLPNKQKYMTLIRELASKSIGIKDYPTVGFVQTIKILRFYEETINSIKSQIKIAVLNSPYSRLVNEFGYNDLTLASIIGEVGDIRRFSNHKKFVSYCGLDISEKQSGKSMSQNCYITKRGNKILRHTFYLQVLVHLSHRKEEPFAQFFNKLKAKGKHPKQGVTAVARKLAIKCYYDLWKCHNENK

SEQ ID NO: 444928 - protein, 499 aa, unidentified
MSLQNKKSLGISGDSPLMGPLVTETTNNNSIIQYGVGFDVHRDTISVCVAAQLVTGDTLEVKSHIFSAMPKGIEEITHFLAKYSPISRYLMECTGVYHLPLYHALKAAFPDQSEKVIAMNPLLLNRRITDLGKKTDHVDAKSLAFLTFFQSLIKPSYIGSVRFFRLRDMVRSYHKTQTQSTGCKNRIHRLLCSINAKMDLDLNAEWCLLYIDWLANSEGTIGEIYEQLFAEQKKQGYATGVLEKQRAMVEQISEIRLNEEDRFVLRMELQRMLREQVVAVEYLQRAEQYLLQEPALLHAYISLTLIPGLGSMGALSILLELGDYTRFKDWKAFLKFCGTIPIIEESGTHKVKGHVNRFSNKHIRYILTQSAGVVINRCDRQCDLGEFAFKQFKIKGLPFKKACIKVASKLAKTIYNVLILGVDYQPNYEGYERKRKKHEQYLKKNQTLLESYRTRALRRDINQFIGASSQYLNSSSRFQIVTGCHKMLQKAHHLESDKT

SEQ ID NO: 444929 - protein, 346 aa, unidentified
MKKIFIGIDFSKEKFDATVIKAVGVEECAERMHEVFDNKVSGFRRLLRWVKSVADEQDTGLWLFCGENTGGYSKALCNYLYGSGYDMWLENALSIKRSSALQRNKSDKADSNIIAEYAMRNYDQMRLYKPLGKNLERLREVFLYRHNLVKLKASMTVRKGEKSLTQNKSDISRFMAMSSKHLISEFNKKIAECDMRIEKIISEDDELRRNFEIITSVPGVGMQNAVCLMVYTDNFNRFDYNSRKIACYYGVAPFGRQSGTSVNTPPHVSPFANKLIKTLLSQAALASINFCPHLAMYYHRLIESGKKSPVALNNLKNKMLHIITAMVRKGEKYDPDHDYYAAIKAA

SEQ ID NO: 444930 - protein, 433 aa, unidentified
MSLSLYVGIDIGKFSHVASLISPKLLFKHHRYEACPTLAFEQSRSGFEKLLSALTEHAPAPACHVLLENTGHYGRAIEQYLQEKGVQVYRISVSTEKRGKQKSDKRDAQALAVLLYNQIERHIIVTDKSQIAHKLVPPSDTARLLHGLVQHRLELVHETTRRKNKLTAICDELFPELTQVYADPNTPSALQLREKYPTPQAVASADLEDLCNTRKHHRPSKAKLAELQDLARSTIGTKDQSRLTCLLIEQRQLMKELALLNEHIEALNIEISKAVSTSREGRILTSFPMIGPIHAAVLIAAIGTIANFESIAKLRGYCGWSPLQQQTGTSKDSMVLQQAGNRLLKHTIYLITLQAVHMDTPFKVLYDRLIPIKCHYDERTGRYRGKMKVIGRVAGQIIKLIYVLLRRDHDLIAGGGQVPDPELYDPLKHKIKR

SEQ ID NO: 444931 - protein, 354 aa, unidentified
MQNDRQSSETVILGVDTHLDIHVGAVISQAGKLLGTHIIQTNQAGYLELLDWARSFGSLERAGIEGTGTYGAALTRYLIKNSIYVVEVNRPDRSKRRLEGKSDPLDAENAARTVLSGSSKAIPKMQSGACEALRIISVARRSAVKACTQAINQLRVLLVSAPQDVRDKLWKSKPHECVTACINSEVSEHSPLRIALCSTLRSLAKRWMALTEELNELDESLDKLTRKYASNLRSQFGVGPQTAATLLAVAGDNPERLKNEAALASLCGVNPLPASSGKTVRHRLNRGGSREANNALWTIALVRMRSDPRTRIYVDRRTGEGLSTKEILRCLKRYIVRELYPLILSDLAYANRRS

SEQ ID NO: 444932 - protein, 385 aa, unidentified
MEEYNCKTIPNEFFTESREVTTLKFSCFVGVDLHKTTVTLRAVNPSEKVISSLRTNTRCVNKIEDWLNELPEPKWMAVEAVGFSEWFIDRYRDCVDRIDIADATELARRRGKRRKTDRKDALDIAVRLVRGNCPLGFIADESLMYLRKLGRHWRQLSKILSRAKQSMRSIFDAANIRGPKISGTTAQAWILGHGYLLKDVQRESLENFTDIISLIERQRETLRRKIIFANRNEEFSARISMLKSIPGIDEIWSCIIVAEVGPFERFPNADTIEFWAGLTPDNKESAGRTQSGRITKAGSATLRWALCQAAMSLCRSDVHQDAVKQRLVKRVGKVKANVAMGRRLLRIIFAMMRDGTLYERSEPTDRLRKSIKKATYVRRNKKEVA

SEQ ID NO: 444933 - protein, 346 aa, unidentified
MIIVGCDFHPAWQQIAVFDSEAGEITEYKLINGNGEAEQFYRQLPSAGLIGIEACGNSQWFVDLLQRLGHEIWIGDAAQIRASYVRKQKTDRRDAAHILKLLMEGRFPRLWMPNAEERDLRQLLVHRHKLVSIRTRVKGGLQHLALNRGLQKRSKLWTEAGQKALRELPLGTWAACRREDLLGLLADLDKQISKLDAAVAQAAEDHPQARLLMTQPGVGPITSLAFVVTVGDVSRFKRGKQIASYLGLIPRERSSGGRQRLGAINKQGNSFMRTLLVESAQSVTRLDEGFRKQYVHRCHRMAKGVAKVAAARRLAVRLFWMLRTNTKYPEIVHIESSPALAVVGES

SEQ ID NO: 444934 - protein, 359 aa, unidentified
MQHKEDSETRYCLGIDVSMDKLSVCLMTTKGTNRIIKGTTNFTNDASGHQKLLQWTKKHVEIKNNKENSCLFLMESTGSYHEDIAWFLHLKGENVSIILANKTKHHAKSLNTKTKNDKSDSKVIADYGLVHTCPLWRPISAKIYQLRLCTRQLQDLNKMKNQIGNKIHAFQHGGYNNDSAISNYEKILTEIKASIHNLEKELLTIIENDVILKAKYDKINKIHGVNIKVFSVIIAETNGFAGFNSIKQLISYAGYDVREHQSGKFIGQRRISKRGNSRIRRILYMPAFVAVGGENNALKDLKDRIFERTKMKMKGYVAVQKKLLCLIFTLWKKDVEYDVNYQHPQSIKKEAKEVENATA

SEQ ID NO: 444935 - protein, 388 aa, unidentified
MIYVGIDIAKLNHFASAISSDGEILMEPFQFSNDADGFHMLLSRLDSLESDNIIIGLESTAHYGDNLVRYLVASSFHVCVLNPIKTSSMRKNNIRKTKTDKVDTYIIAKTLMLQDSYRFVTFYDLDLMDLKQLGRFRQKAIKQRTRLKIQLTSYVDQAFPELQYFFKSGLHQKAVYALLKEAPSPQDIASMHMTHLSHLLTTASHGHFKKEQANELRVLARKSVGANDSALSIQVTQTIAQIELLDSQLKKVETEMTEIMKFHDSVIMTIPGIGYINGGIILGEIGDIHRFSNPSKLLAFAGLDPSVYQSGNFQARRTRMSKRGSRVLRYALINAAHNVVKNNATFKAYYNKKMAEGRTHYNALGHCAGKLVRVIWKMLTDEVEFNLD

SEQ ID NO: 444936 - protein, 389 aa, unidentified
MLRQSFPIFQSKEGFRQLYEAIQEARQAFGKPQVIVAVEPTGHYWLNLAYFLEENGIPLVMVNPAHVCRSKELDDNLPTKHDAKDSLVIARLAKDGRFLVPRLLHEIEADLRVGSTLKEKLREEQTAVKNAIVRWTDRYFPEFWTVFRDVGKTALSVLEWTPLPADMAGQSAEELIEVHRQSEGLKSPQKTKIQALIDAAKDSIGVTEGATMARFEIAALVRRYRQLEAEIAALDAELNGLVQTTMEDPWLKTVDGLGDATIIDLLAEIGSFAHYRDPRQLVKLAGLTLKENSSGQRKGQKHISKRGRKRLRSVLFRAVIPLIRHNEAFRELHEYDTTRPVNPLTGKQSIVALCRKLLNVLFAICTKKQAFDAERMRQDVLSQVQNRAA

SEQ ID NO: 444937 - protein, 344 aa, unidentified
MTTIDYIGFDIHKKTISFCVKAQDGTILEEGTIPALRNKLLAWAKARPRPWIGAMEATLFTGWIYDLLKPLAQELKVAHPPMLKAIAAAKKKNDKVDARMIADLLRCNLLPQCYMAPVAIRDLRRMLRYRNLVVRQTTRMKNRIAGLLMETGTPYTKERLHGKAYFNELLGSLQEVPRSVVELLQLSRGQLEFFATIQQRLLKGLREHADLKERVMRLQTIPGVGEILALSWALEVGEVKRFPSIAQAASYCGLTSAQHNSAGKEQRGPISKQRNHHLQTILIEAAKLAPRYNTGLAAVHERELKRGNRNQATLAVARKLVAYLMAVDKSGKPFAMRACMEVAA

SEQ ID NO: 444938 - protein, 357 aa, unidentified
MTKRSQDILRKEKVFVGLEDSKKTWQLCVRSGGVIVNETSMPAKLDVLSNYFNNKFPECQIQVIYEAGFKGFGLHDELEAKGWDCIVTPPHTVTEEKCQRKKNDRTDCRRLAKNLENGDYHSCFVPDKELREDRQISRTYEQVQADIRRECNRIRRTLEFHGLDQGLSPGSWNRAMYTRVKLYLEDLEISTSLRFSLKVMFNELEHLRQLRKELLQQLRTLAKSDRYKERVEILQSAPGIGMFTAIRLVLEWGDVSRFKRKEEFASFLGLVPSDYSSGETERQGHITKQGNSSVRSWLVECSWMAIKYDPVLLDKYRRVLKNCGSKKKAIVAVARKLAIRLRWILLNGEPYVIGVVE

SEQ ID NO: 444939 - protein, 474 aa, unidentified
MARTRSRPASPPVPGDAGAEVTDEPVQVISRAAAIDVAKGSGMVCLRLPHESRAGRRTQKVQEVTATFASVVALMDHLVCQGVERLVLESTSDYWRIWYYLAEAAGLEVWLVNARDVKHLPGRSKTDRLDCVWLCKLSEWGMLRRSFVPPEPVRDLRALTRLRANLTHDRVRHQNRIEKILENALLKVSSVISDLMGGSGRRFLQALADGERSPAALAALGDYRLHASKAELKEALTGRFRDIHGFEIGMLLELIDDLSAKISELDERIEAQLENVPGLGGVCTSCGQPGPDGPCTGCGEPVLGVIARLDEITGIGRGAAQVIVAELGTDMTQFPAPGHAASWAKLTPRAIQSGATSKAGRTGKGDPYLRGATGVAVMTAARTGTFLGARYRRHARRRGKQKAIVAGSRTIIEIAWRVIADPGFRYIELGPDYHDQLDPGRKTRDKIRQPEKLNPGMTITLTPRPERGEQSPAA

SEQ ID NO: 444940 - protein, 335 aa, unidentified
MQIYGIDLAKEKFDVSFFDLTSKKVSNQPSYKVVTNNLKGIGKFFKGLPSDAVLVAEHTGVYGDTLLKCCMDSNVKIAFVGGYVIHRYRATPDRAKTDVLDCALLRDFGERYPDKLKYKTFPEEALYELRQLARHREMLVEQRKQLITADKSEDCRPIRSLAVKRSMDRLKEMLDTEIAETEKEMLKVINGHESIHHNYELVKSVDGVGLITAVELLVKTENFTKITTARQYAAYAGTAPYEKSSGKMDKGAHISKIGNRRSKTLLYICAESARLHNKEIKLYYERRTLIDKKPRHYVLNAIANKLLRIIFTLVEKGEYYDANFIRQDPRVVKYN

SEQ ID NO: 444941 - protein, 356 aa, unidentified
MSRDIKYIGMDVHKEAIVIAVLNGSGKLVMESVIETQASSILQFIHGLRGELHVTWEEGTWAAWLYDLLQPQVEQVLVCNPRRNALLKEGSKSDQVDARKLAELLRTGMLRPVYHGENGLRTLRELARSYQTISKDLTRVMNRLKALYRGWGIACAGTQVYAARYREEWLSKIPQAGVRRRAELLYQQLDGLQALRRNVRPELLAESRKHKAAKLLRQIPCIGPIRAARLLALMQTPHRFRSKRQLWTYSGLGIETHDSAQFRFVRGQLQRSRKPQQLRGLNRNHNHEMKEIFKSTATRASCGTGPFHDFYAALLAKGMKPEMARLTLARKIAAITLTLWKRGERFDTEQLKAQAA

SEQ ID NO: 444942 - protein, 400 aa, unidentified
MISVGIDVSKGKSTVCILKPYGEIVSKPFNITHTQKDLSELSSMLFRLNDEVKIVMEATGIYHLPVLTYLQEKGFFVSVVNPYLMKSYRNESLRKAKTDKIDSRIIANYGIDHWFKMKEFQTSGEIYEELKLLGQQYRHYMKLHLLSLAELTHLLDLTMPGIKNLLASWNETNRKDKRSDFVERFWHYDVITSMSEQEFTEEYILWAKEKKYVPSQEKAKVIYALAQESIPTLPSETSSIKMLVTEAVRVLKEVDATLGLILSRMQEIAKTLPEYSVVREMGGVGNTLAPKLIAEIGDVRRFRNGKALVAFAGIDPPPYESGQFVGCNRKISKRGSASLRKVGYETMRSLKMRSRPEDPVYRYVVKKESEGKSKKSAKIAGLNKFLRIYYARVTKLYKNI

SEQ ID NO: 444943 - protein, 427 aa, unidentified
MSPNRLNRQRVKDGFRLQIQNNGGKIINAVGIDVSKGKRMVCVMRPFGEVVLEPFEVLHTAQNLNDLAGKLKALDGETRVVMEATGNYHKPVAFVLHDAGLFVSVVNPVLIHDYDNNSSRRVKTDRKDAAKIANYTLDKWTRLRQYLPEDDTRLALKNCYRQYQQAVAIRTMLKNNLISSLDLTFPDANKLFVSPPKSNGCEKWVDFIGDFWHSECVSSLSADAFAKKYLKWCQKHGYIFTRSKSDEIYACAVNSASLPKSPTSKLLIQQQVAQLKAVSQSVAALQQEMLRLSQQLPEFDTVMEMYGVGPSLGHQLRAEIGDVRRFSVKKSLIAFAGIEPLPNDSGKVVGNDKGISKVGSAVLRRTLFLIMSVILQTQPQDEPVFQFMNKKHSEGKPYKVYMMASANKFLRIYYARVKAVMDSERSQ

SEQ ID NO: 444944 - protein, 349 aa, unidentified
MRHFQPPADTRFYAGVDLHARSLYLVVLDRDGQTRLGRNLPAHPEPFLRAVQPFRDGLLVACECVHPWYWLADTCRDHAIAFVLGHAWAMKAVHGNKTKCDRQDAEAIARLLKGGNFPPAYAYPKERRGLRDLLRARLRLVRQRAQLYGHVHTARRQANLPPVSNDVKYKSKRAAITADIADPFVRRRVETDLALLEPLDTTIRRLEAEIEEAAQAFYATELAVLQTTPGVGLVLSLTILLEIDTIDRFDTRQQFCSYARLCGAVQQSAGQRTGAGNRKAGNAWLKWAFSEAAVLSAQKDERLAGLLQRLASKLGKPKALSALAHKLGRAFYHMLHTKEVFDIDRFVRH

SEQ ID NO: 444945 - protein, 380 aa, unidentified
MITTSKKKINKKRTAPQSQPAIAAVAEPAPRKVKTIKLGVDVHLGIYVVVRIIDGGTPQPAQRFTPAEFLVWCAKQLTLAEQVFTCYEAGPFGYILHRRLKEMGITNYVIRPRDWDEYGKKVKTDKRDALAMALCLDRYVSGNREAFCVVRVPTEAEEQKRSVSRQRESLQQEKQRLAAQGRSHALYYGGHLQGEWWREAAWKKTSQKLPAIVVNLLEPLRRLLAVVEAELKVRTQELEAAAPEALPVGLGELTSQILEREVADWSRFQNRRQVASYTGLCPREDTSSDRRFQGAINKHGNRRLRPVLVEGAWRLVVFQPEYRPVKKWRAVLLDKKSGSGRRKKIIIAIARIFAVDWWRIRTGRCTAEALGLKLQPAPGA

SEQ ID NO: 444946 - protein, 352 aa, unidentified
MNIYIGCDAHKRYSMFASMNERGQTGRPVRVEHTRAMYREFLRGLPPGSPIAIESVGNWYWMIEEMEKAGHEPQLTNARKAKMMMGQMNKTDKLDATGLATLLRNGTLPSVWIPPRDLRDARELPRMRMSLVSVRTMLKNRIHATLAKYMIEIDEVSDVFGVKGRELLKTRLEELPPYTRESVETQLQLLDEVEAHLDHCEQEIREVVKATPAMTLLKTIPGVGPILAVVIALEIGDIARFPSPEHLSSYAGTVPRVRSSGGKTSYGQVRPDVNRYLKWALVEAANIVVINQGRWPSRHVVRLYGRIKEGKGHAKAVVAVARHLAEAAYWILRRNEPYKEPGTTNSISSTRK

SEQ ID NO: 444947 - protein, 430 aa, unidentified
MKKNNSNSQTNSDRAGKPGKARGPVQRDAKEVMAELVARLSQKLEPRSAAARAGEGRQQDLPGPNRDRLTVGVDLGDKWSNFCIVGLDGEKLTEGELRTTQEDFAEFFQSLAAARVVMEVGTHSAWARDVVAGCGHEVLVANPRQMEGPKRRKRKNDRIDAHKLARIGRMDPQSLFPVEHRSVKVRQDLVAVRARDALVAARTQLINTTRGLVKSMGGRLPKCSSPSFPHKVEESLPAEVREALLPLVRLVETLSDGIAAYDKKMEKLGSEKYPQTKLLRQVKGVGPITALAYILTLENPERFAQSRDVGPYLGLVPKQEDSGDSQPQLRITKMGDMMLRRLLVGSAHYILGPFGPDTDLRRYGIRLSERGGKNAKKRAVVVVARKLAVLLHSLWVSGEVYEPLRHALPKATEEEAVRHAPAEATEKEAA

SEQ ID NO: 444948 - protein, 429 aa, unidentified
MNQKLDCAAFVGVDWADQEHAVCVLPAEGGPAQHCLVKQQPEAIAAWVAGLRQQFGGRPIVVCLEQSRGGLIYALMAYEFLVLCPINPSQLAAYRAALHPSGAKDDPTDAELLASFVRDHGDRVRVWLPDDEVTRGLRLLSEQRRTWVEQRVALEHQLRQRLKETYPQALELIVGDLHSEYMLAFLAKFPTLKELQRASPRQLAKWLRLPRRRPDDLPAEQLQTMRIAAIRQAIPLTKDPAILEHARLVICSVVAQIQSLNRAIVDCEQRIAELFARHPDHDLFASFPGAGTSLAPRLAAAFGTDREKYATALNIQQLSGIAPVTRSSGKKKVVRARWARSKFLHQTFYEFARCSTKYSVWAKAYVEMRRSAGAGYHVIIRALAFKWQRILFRCWQNGECYDEQKYLQRLLVNAPRLARFLRPPEVETP

SEQ ID NO: 444949 - protein, 317 aa, unidentified
MDVETTADRFVGIDVSKARVDVHVRPDGTAFGCATDPEGLSALVARLKPLSPCLVVLEASGGYERVVAAALAEAGLPVAIVNPRQVRKFAGAIGRLAKTDTIDAAVIAHFAQAVRPTARPLPDDLSVRLAELMARRRQLVVMINAEKQRLAKAQDRIAQRSFKAVLKSLEAERARIDKAIDKPIEASPVWCAQQDLLKSVPGIGDVVARTLIAELPELGRVDRHQIAALAGVAPMNRDSGRYRGKRKIQGGRVEVRAPLYMACLVAIQHNPALKSFYRRLREGGKPARLALVAAMRKLLTILNAMLRDRKPWASAQS

SEQ ID NO: 444950 - protein, 316 aa, unidentified
MSETTLAVYVGIDVSKERLDIANGADGETWWVENSSEGLLSLKEKLGELRPELIVLESTGGYEALALAELYGAGLRVARVNPGRVREFARSIGQLAKTDKLDAHVLARFAQAVQPEASILPDEDTQWVADLLTRRRQLLEMHVAEHNRLSTAPKTLRERIRNHLKWLKSEIRDLDKDLDNFIQSSPLWKEKGDLLRSVPGVGNVTAFTLLAELPELGSLDRKQIASLVGVAPFNADSGRHSGKRHIHGGRPAVRSTLYMATLSASRFNPVIRSFYHRLLQAGKLRKVALIACLHKLLTILNAMLRSHSSWRAPSPC

SEQ ID NO: 444951 - protein, 343 aa, unidentified
MAIVILGIDLGKNLCSVVGLDEAGVVVIRRTMRRQTVLGFTSKLPACTVAMEACCGAHHLGRLLEAQGHTVKLMSPEYVRPYVKAHKNDDRDAEGIAEAASRPTMRFVELKSQEQLDIQTLHRVRSRLVGARRTLLNQLRAILFERGHAFAPGRRNLELAVDAILADPEYPLGSRTRRLVAETRVEWQSLDRRIEALNGEFVALAKADEAARRLVTIPGVGVLNATALVAAIGDGAAFRRGRDLGAWLGLVPKQHSTGGKPRLLGISKRGNTYLRTLFIHGARAAMPSLSKSQSPLGEWLRGMLARSHRNVVLVALANKLARIAWATLRREQGFELGHVAVAR

SEQ ID NO: 444952 - protein, 380 aa, unidentified
MTEIRRLVIGGVDAHTDCHHAAALDERGRLLGDAAFATSVEGYHDLLAWLESFGQVGRVGVESTGSYAAGLGRFLAARGVAVVEVNQPHAHTRRRRGKSDPLDAEAAARKVLAGEATAIPKHTGGIVESIRQLRVAREGAVKANTAALNQLYELVITAPDELRQQLAGRKTSRGKASLCLRLRPDRARLHEPLQAAKLALRTVAERVRELERQIGVLDRYLAQLVATAAPRTTSLLGVSSQHAGQLLVTAGQNIERLANDGSFARLCGASPIPASSGRTSRHRLNRGGDRKANRALHLIAVCRLRYCARTRAYANRRTAEGLTKPEIIRCLKRYIAHELYHTLRADLADLGPPTMPPQRTVTINCGAGPIGTTRTRRTRT

SEQ ID NO: 444953 - protein, 395 aa, unidentified
MFIVGIDVAKRSHEVCMITSDGQTVQRPFSIRNNCTGYNLMLEKIRKHTNIKSQIVFAMESTAHYWLALFTRLRKDGYHVILLNPIQTSAMRDMFIRKIKTDAKDSFIIAELIRFGRYAESNVAQDRLLALKELCRNRFYLVDMAGDLKRKLIALIDRVFPEYEAQFDTIFCKSSVAVLKKYPTPQKLSNAHLDKLTELLWNSSNGHFGEWKARELRELARNSFGVEDCDGAYSTLILLMLDQIQSLSGKADALEKEISRLFQSFDTTVTTIPGVGPIIGAVILSEVGDISRFSSADKLAAYIGVDPSVNQSGEFQAAHAHMSKRGSPYLRRCIWMASQVAVQRDPMFRAYYEKKAAEGLKYMTIIGHVTRKMTAVLFAILRDHKVYEPVLPTAA

SEQ ID NO: 444954 - protein, 347 aa, unidentified
MAIVGGFDIHRRQVTFDYLDTVTGQVRRGRIEPACRETLRVWLARFAGRDDVSFAVEGCTGWRFVVEELQRAGITALLAEPAETAHQRGPKRRAKTDKADSRHLRTLVAEGRVPVSWIPPEQVRELRVLLQLYRDLREEHTAWAQRIHATLFHQGVPSLAGRLSDPQARAVLERGQDIGLSPAGAQAVAAALRRMDDLEAEMVPVHAQIAAFARRQAGCKALARELYGVGPLVAAIVWAFLGDTRRFSSSAQAVRHTGLDVTVYSSDDKRTPGHLSHQGPPILRWALFEAGHQGSRASSPDHRYYTDVAARIDANRAALSVARKLARRSHHILRRLGDQAYTPLPGW

SEQ ID NO: 444955 - protein, 339 aa, unidentified
MVPLTFIAQKLIKTMTIMNWSHLGIDVSKHKLDVALLTPQGVHTKAFDNTPTGWRALHRWLAGFTDPIRVCLEATGIYGLGVARFLHQHQKTVSIVNPLMIHHFARTALSRNKTDQHDAELIARFSQHYQPRLWQPPGPAQEQLQALVRAREQLLDSRVLAQQHLESAAPTVAKFFRLQFRQLNRQIQKIEQEIQCVWKKQPALAQAVQWLTSIPGVGEITAVTVLAILPPLDQLESARQLAAFAGVTPSQKQSGSKTGKTRMSKLGHSRLRRALYFPALAALRCNPRAQTLAQRLKQKGKSKMVIVGAVMRLLIHLIFGVLKNRASFDPNYLNGHAAA

SEQ ID NO: 444956 - protein, 341 aa, unidentified
MRKFIRIGVDLAKNFFQVHGIEHEGGLALTRKLTRAKFREFCSRLAPCSVGMEACGSSHYWARELRAMGHDVVLIAPAYTKPYVKRGKNDAADAAAICEAMSRPEMRFVPIKSADQQAVLMLHKTRDLLVKQRTMSVNALRGHLQEFGLIAAKGIHRVKELVALALADEGLPQEAKQAAILLAAHGDELDEKIDALEKKIARASAKNPTSRLLDEVPAIGPLIASAMTASFPDPSAFKSASDFSASLGLTPSQHSSGGKEKLGGITKKGNRYLRKMLVVGCTSVLRVAHKYKGALADWIAAMKTKKPERVVAVALANKLARICWAIMSTGESFRTELYTRA

SEQ ID NO: 444957 - protein, 347 aa, unidentified
MNFYNNTHPYYCGIDLHARSLYVCIIDQAGNTCLHKEISASPDNLHKLLDPYIGDIVVGVECMHCWYWVADFCDDIGVDFILGHALYMKAIHGGKAKNDRIDSFKIANLIRGGNFPLAYVYPKAMRATRDLLRRRMKIVRHGADLKAHVANTTSQYNLPPNKVNLKNLDAREQLRKTFSEQSVQKNIDLDMAILDCYAGELSKIEWYIQQQAKQHKPNHFHLLKSVWGIGPILALTIIYEIGDIDRFASVQKFASYARLVKCKAESAGKTYGTQGNKIGNAHLKWAFSEAAVLYLRGNEKAQNYLFKLQKRMTKAKALSALAHKLGRCVYFMLKNETVFDETRFLKG

SEQ ID NO: 444958 - protein, 389 aa, unidentified
MLLDHPSDGLAAIRTHIAAIFVSLELSRSTWLVTSLSPGKGEKMSKHSVAAGSVAELLTLFAELRRKAETRRGESFPILTIQEAGLDGFWLHRVLQQQGVESHVVDPASIAVPRRRRRVKTDKIDGETLLRTLLAYKRGEPRVCAMVVAPSPEEEDRRRLCRERRTLIEERVRHGNRIKGLLFAQGVCDYAPLRRDRRTRLEALRTGDGRELPAHLKAQIGRELDRIELLLEQIQSVEAAQETLLAAARKPASESAAPDPVTMLLALKGMGANFAAVLWSEAFYRQFANRRQVAAYAGLAATPWQSGGIRHEQGVSKAGNCRLRTTMIQIAWLWIRHQPRSALTHWFKERSPQGRKRAIVALARKLLVALWKYATQGVLIEGAVMKPAA

SEQ ID NO: 444959 - protein, 359 aa, unidentified
MRLLRSQTRELSVNQITRIGMDTSKYIFQVHGVDASEQPVLRKRLGRKQMLGFFAELPPTVIGMEACGSSHYWARELKQLGHEVKLIAPQHVKPYVTRNKNDGRDAEGLCEAMSRPTMRFVAVKTPEQQAALMLAGLREQMITRRTQISNAIRGYAAEFGITVAQGLNQIEPLLARLAQDESVPELARDLFALQGRDYAQLQMELKAIEARLMAWHRANADSRRLAKIPAIGPIGATTLVMKTTDPGAFASGRHFAAWIGLTPKDHSTAGKTRHGKITRAGDERLRSVLVAGATAVIQQAKQGRGHPSPWLIALLKRKPPKLAAVALANKTARIAWKLMVTGESYDGARMSKAPLIAAT

SEQ ID NO: 444960 - protein, 413 aa, unidentified
MEIVIERCGALDVHKETVVACVRVPDPAGGRQQVIETFSTTTPGLLALRDWLGAYAVTVVGMEATGVYWKPVYYVLEEAFTCQLVNARHSRQLPGRKTDVADAAWLCQLLEHGMVRASFVPPKPIRELRNLTRYRTAQSEERTREAQRLDKVLQDAGIKLSSVASDVLGASGRAMLAALVEGTRDPAVLADLAKGALRKKLPQLRAALLGRFSAHHALLVGTILAKLDFLDEAIAALSAEIEAATRPFAAEVDRLRTIPGVDRRIAEGLVAEIGVDMTRFGAAARLASWTGMCPGHHESAGKRARGTTRKGSKWLRSYLRQAAKAAGRSKGTYLAAQYARLRGRRGPAKATVAVGHSIIVAAYYILERRQPYHDLGPDYFLRRHAREHHARRLARQLQALGYKVTLEPVEAAA

SEQ ID NO: 444961 - protein, 458 aa, unidentified
MARRLRRPTRPVTMPTLHPNSAGIDLGATEIYVCVPLDRDPEPIRRFGTFTEDLHALAGWLRQCSATAVAMEATGVYWIPLYQILETRGFAVCLVNARHGKHAPGRKSDVQDCQWLQYLYAVGLLRASFRPPEAVCAVRTLLRHRDSLVELAATHTLHMQKALTQMNLQLHHVLTDITGVTGLAILDAILAGERDPQVLARHRDHRVKASPETIAKALVGDYRSEHLFTLRQSLAGYRQAQGLIEACDKEVQSRLAAFASTIDPATHPLPPTAKCRRKTRGTPATPGFDLRTELYRILGTDLTAVPGLNTPSVFTLFAEVGAELSAFPASDHFASWLGLCPDNRISGGKVLSVQTRHGKHRVAQAFRLAAQGLSRSPSGLGCFFRRMRAKLGAPKAITATAHKLARILYHLLPTHEPYDESQLVAAEADHRRRTESRVRAQARALGFPLIPVTEGSAS

SEQ ID NO: 444962 - protein, 482 aa, unidentified
MASKQKPQYQEKQAEARIPKGGRRRRKGMCLEDRPLQEENAAGIDIGAREVFVAVPPDRDEHPVRAFATFTASLQELAGWLVRCGVTTVAMESTGVYWIPLYDILEEHGLKACLVNARNMRNVPGRRTDWHECQWLQYLHSVGLLRPAFRPEAEVCAVRSLIRHRGELVQAASQHTQHMHKALTQMNLQIHHVISDLTGVTGLAIVDAILAGERDSVKLAQLRDPRVKASQEIICQSLVGNWRREHLFTLKQSRELYGIYQQHIVACDQEIEKLLEEFKPRVDPNEKPLPPDHKRNRSDKKKRKKNGHPETGFDLRTEAYKLFGVDVTQIPGVETIALPLFSEVGRDLSKWPRAAHFASWLALCPDNDISGGQVLWRGMRKVKNRAGHLFRLAAYSLHRSQTPLGGYLRRMKSKIGPAAATTSTAHKIAIIFYTMVKKQVEYDETIWASRDADRQKRFETKLKRQAQELGYKLVPVEEKPAA

SEQ ID NO: 444963 - protein, 483 aa, unidentified
MKSKPEEQNKRATNHPTQHHWHEMNRKQRREMMRKMQNEDLSLEVIHPDAGGIDIGNESHYVAVPPSRDSQSVREFGCTTAELKAMAVWLKQCRIRTVAMQSTGVYWVAVYDILEQAGLEVYLVNARDTKNLPGRKSDVQESQWLMKLHTYGLLRNSFRPSPEIRVMRTHWRQRNDLVQSAGRHIQRMQKALTQMNLQLANVLTDISGATGQAIIKAILAGERDSHKLAQFRDPRVKASEEQIAQSLEGNWQEDLLFVLKQEHEGYEFCHKQMAECDRQLKQYLQQREDRSQGAPLPEEKRKGRLKKKRANKPQFDLREGLFRMTGTDLTRIDGIDVMTAMTIISEAGWDMSKWPDEDHFVSWLRLCPDNRISGNKVIGKGRLPTNNPISIALKMAASTLRQSKTYLGAQFRRFRTRLGAPIAIKAMAAKLARLVYRMLRYGMKYVDQGAAFYELRHRELQIKRLKAKAEKLGYRVTPIPAAA

SEQ ID NO: 444964 - protein, 345 aa, unidentified
MPIVGGLDVHRKQITFDYFDTVTGEVQRGQVAPADRAHLRAWLARFASCGDAAFAVEGCTGWRYVAEELAAAGVAAHLAEPADTAAARGRKRHAKTDQTDSRHLRTLLAEGRLPECWIPPAQILEYRALLETYHDLRAEHTAWVQRIHAVFFHQGAPRLGEAALRTGQGLAAVRAAAAAHLSPAGQLQVATALDMLAAIDGRLQPLRLQLLHAARHLTGARVLAARLYGAGPVTALALTCWLAGAGRFSSSRKAVRFAGLDVTVYSSDSRRSPGRLSRQGPPVLRWAAYEAGKTHARAAAPDHAYYAAVKDRCNGKRAALSEARKIIRQASHILAELGDDALTVG

SEQ ID NO: 444965 - protein, 345 aa, unidentified
MAVFVGLDVSLRTVSICVVEADGTVIWEGKTASEPVPLVERLAEWRDRIKLVGVEACPLSEWLHGALVESGFETVCIETRHAQRFLSSRPNKTDRSDARGIAEMMRLGHYRAVHVKSKASQLLRTTLIARKRFVDHMLAIEGTIRGLLKVHGLKVGAVHRSRFGERVEALLAELPELRLAIAPLLEARNLMRRQKAILDRQLAQVARQDAVCARLMTIAGVGPIVSLAFKATIDDPKRFKNSKAAAAHLGLTPRIYQSGELDRSGNISKCGDKLMRHALFEAANSHLRISRKWSALRAWGIKLAKRVGMKKACVGVARKLAVIMHRMWIEETTFRFSREPAATAA

SEQ ID NO: 444966 - protein, 418 aa, unidentified
MGKRKNRVCGADVHKDIIVATIPDSDDTEFQEKFGTTSIELGRFREWLIAHNCEQVAFEATGVYWFPVYDALSPSIDTIVANPWMIKGIPRNKSDTLDSKWIAGNCLDGKIKRSRVLPKDGRDLRTLTRARSAYTKTRTQLRNRIHKYLGLCGITLSSYISDIFGKSGRHILAGLIESKDIDTIMDGIPSGKVKKKQESIKASLGNGLDDVSRMLIRDTLELLDHLEETINGTSLKILGRLQEKAKDLAIVMSVPGIGFVSASIILAEIGDYHDFQTPEQLVKWCGLAPGLNESAGKKSPCSITKQGSKSLRTILVEIAQVLAKMGKNKLSRFFHRLRAKKNYNVAITALARKLISIIFHLLINQEFYQEKDCTTAKTRPIKKDLLCLSKEEQLKDGVAAIVDAFYHSKKKSSLDGGV

SEQ ID NO: 444967 - protein, 460 aa, unidentified
MKVRVGIDIACRAAHQAACADETGRIVWSGHRFHTRAEELEVLWARLPGDATEVMIVMEPTRNAWVPLAAWFRRRGATVVMVPSEQSADLRAYYAKHAKSDRLDAELLARLPLLHPDGLHPETANGPGDPLKRAVKLRSGLVRRRSACMQRLDALLEILGPDWVAALGSDMTQTTFKFLAAWANPHQVKRLGRARLARWFQRQTRKAWGERRADAVVSAAEATLALWSPTGLDYEALAADIAVEASLALELARQIAGIDERIFDLYCDADPDQILLSVPGVGKILAAQIRGRLGDPHRFTSLAAARAFSGLIPRQNSSGLTETTGGPTKQGDACLREALFLAADHARKTDPTLAARYQRLMCDTGRHHTSALCTIATVLLTRIVACLRTSTPYQLRDTDGSPIIPEQGRAIIAERYQIPPEIRAARRAVSNARSHQRGWDERTKQGVAERSTMPPVPPAA

SEQ ID NO: 444968 - protein, 456 aa, unidentified
MPEKEKRTRARLSSGLSTINEHAAGLDVGSTFHVVAVRADQDYEPVRTFRSFSGDLHQMADWLTSVGIKTIAMESTGVYWIPVFEILEARGFEVLLVNARAVKNVPGRKTDVNDAQWLQQLHQYGLLRGSFHPRAEVAQLRAYLRLREQMVEYAAAHVQHMQKALMQMNVQLHHVVSDITGATGLRIVRAIVAGNHGPEELARYRDVRCGASEETIREALTGNYRAEHVFGLKQALELWDFHQAKVAECDFEIEAVLKSLNETRVEPGRPIPAVRHAKARNEPKFDVRSALYTLLGADLSQIHGFGPYTVLRLVAECGDDMNKWPTAKHFTSWLTLAPGNKISGGRLLSSKTRRSSNRAAALLRIAAVNIGKTQTSLGAFYRRLSARVGKAKAVTATARKLAVLFYRALRFGLAYADPGAEYYEERYRRRVFENLQRRARGLGFTLVETTKSSGVS

SEQ ID NO: 444969 - protein, 328 aa, unidentified
MKKEKEQKQYCGIDVSGDTIDVCYIQMDGTMEWRQFENNRMGFKQLLKTCGIDYHYIMESTGVYHLPLAFFLQAQECMYSIINALQIKRFIQMNLERNKSDKKDAFHICNYGIMNDPEVYEMPERQYFECKSLNNAIEGLTQEITSFKNKLNALSKLEIDKKVIEKSYKQIIKTLSAELLKLETELNVKLASWQPELVKLVGSVVGIGKRATSLLIVSTQGFKHTTSYQQLISYAGLSPKEYSSGTSIKGKVRICKQGGGRLRHVLYMCALNAKETNKECKALFDRLVAKGKNKKLAVIAVCNKLLKQVFGVVKNRTPFDRNYLQKTD

SEQ ID NO: 444970 - protein, 347 aa, unidentified
MLIIGCDFHPGFQQVAIFDNRTGEIQEKRLQHRAEAEQFYGWLAGQEVRVGMEACGHYPWFERLLAELGIELWFGDAARVRASVVRKQKTDRRDAEHLLDLLREDRFPRIWVPSLEVRDVRQLLVHRHKQVQARTRTKNQLQAMALSCGVQKKRKLWSKAGREELEQLPLLPYAAQRRKRLLEALDSLEAEIVELDQRVHEEARQRPEAVRLMTHPGVGPVTALAMVLTLGPAERFGSGKQVGSYFGLIPSEDSSGGKQRLGKISKQGSSFLRFLLVEAGQTAARYDPQLKRFYRRLAARKNRSIAKVAVARKLATRLYLMLREDWTYAQLCQAVMQVSPSHSVAGE

SEQ ID NO: 444971 - protein, 362 aa, unidentified
MRIIGCDLHARQQAVAMLDTETGEVVSMTLKHEGNNVREFYSSLPRPVRVGIEATGSMQWFVNLMEELGIECLVGHPAEFRAAEPRKQKHDRRDADLILKVLVENRFPAIWLPSKELQDLRSLLRHRHQWVRMRTRIQNALQSIALANGLRRGHSLWSHDGQNTIASLPLAPHTAYRRSELQALYAKFEEEIEKLNQRVEEQACGRAGARLLMTHPGVGPVTALATDVFLGDPARFADSKALASYVGMIPREYSSGGRQRLGGLTKQGNPLLRFLWGEAGAHAVRRDPELQRFYRRKLIQKGFGKASVAVARKLGIRLWIMLRDQIEYNEFCRRGQKQQKSSDACAGMPETRYGANSHRPVD

SEQ ID NO: 444972 - protein, 354 aa, unidentified
MGHRPNQEGESVMNRNATYVGLDIAKSVFYVVGKDDIGREMLKRKLKRDQVLEFFANLPAAKVGIEACGGAHYWAREINRLGHEARLIAGQHVKKYISGNKNDYRDAQAISEARSRADMRYVPINTEAQQELQMRHRIRQRIMTQRVALICQTRGLLGEFGVVLPKGVKAFQDGVQRWLRENPANLSGGVLEMLLELRQQLDDLDNLLVRYDARLAHTAQTDERGKRLMAVPSIGPMIATSLIATLHDPRHFKSGRSFSTNLGLTPHEHSSGGRQVLLGISKRGDRYLRTLLIHGARSALRTAAGKTDRMLIWALKLKQAKGFNVAAVALANKVARIAWALLAHDRRYQPQWNA

SEQ ID NO: 444973 - protein, 418 aa, unidentified
MKKHSKSSQRSEPTLKRTKARGPVQRDAKEVMAEVLGKLTGELDAPTVSTSAQENRRGNTVGPNRDRLTVGVDLGDRWSQYCFLGLEGERLAEGQLQTTQEDVREFLQALTMARVVIEVGTYWAWVQDVITEWGHEVLVANPRLMEGSKRRKRKSDRIDAHKLARLGRVDPQSLYPIRHRSREVRQDLVVLRARDALVSVRTELINTTRGLVKSMGTRWPRCSNPSFADKVKDAIPVEVREALLPLVRLVETVNDCIARYDQKIEELGREKYGHTTLLRQVKGVGPITSLAYVLTLEDPQRFASSREVGPYLGLVPKQEDSGDSQPQLGISKTGDRMLRRLLVGSSQYMLGAFGPDSDLRRYGLRLCERGGKNAKKRAVVAVARKLAVLLHRLWVTGDVYEPLHHSGAETRTAQATAA

SEQ ID NO: 444974 - protein, 355 aa, unidentified
MQKYNISFKGQNIFVGIDVHLKTWHVTTLTESGYKYSFAQHADARELFERLNKKYPEAHFKSAYEAGFCGFSVHYALTEYGIENIVVNAADIPTTGKEKAMKTDAVDSEKIAWSLKRGELSGIYIKDKRFMDDTNLMRLRQRFIKDLSRQKNRTKHLLYTQGVIYPKRFLNSRTHWSRNFMQWLREEVELLSEEKLTLTLLCEQVENTRKAILKVTREIRRLSMTEKYKGNFDLLISVPGFGLIMAMTMLTEFDNNIKRFPNERKFVSMLGLIPTCHDSGEKKTNGEKTFRGNKQLGPLVVESSWVAIQRDCELASYYSKCCQCMRPPRAIIKVARKLACKAYAVLKNQKAYVQP

SEQ ID NO: 444975 - protein, 382 aa, unidentified
MDVLHACCAGLDVHKKTVVACVRRVGPDGAVSREVRTFGTTTAELLALSDWLKVHDVGHVAMESTGVYWKPIYNLLEGDFEVMLVNAHRIKQVPGRKTDVKDAEWIAQLLQYGLLSPSFIPPPEIRKLRDLTRQRTQIVRDHADVANRIQKVLEDANIKLSSVASDVLGVSGRAMIRAIIDGQDDPDELAGMAKRRLRGKIPELKQALHGRVTEHHRFLLRALLDQIELLEGLIARYDARIDEAMAPFVEAEERLRGIPGVGEKAAEVIMAEVGPDMTPFPTAGHLSSWAGLCPGNDQTAGKQRSGKTTKGSQWLRTTMVQVAWAASRTKATIFSACYHRWVKRMGKKKALVAVAHKILVVVYHLLKNGTDYREDWKPAKVA

SEQ ID NO: 444976 - protein, 343 aa, unidentified
MHFIGVDLHKQVISVCVLVRAGDQRQVAARRTLRCDQPEQIQAYFAGWAPFQVVVEATSSYEWFVQLLEPLAQRIVLAHPKKLRIIAESTKKTDKLDAQVLAEFLSLDMVPSAHRPSPRLREYRALVRQRQYVQRRITSLKNRLRHLLSHYNADVKHLFSQEGQVYLDQLAISAADRIVVEQLREAWRFFDGQLVAIDKQLRQFARSAPVAEREARQVLESIPCVGPVTIDVVLSELGDVRRFRSQKQVAAYAGLAPGIRESAGRGKQLSITKEGSGLLRWVLIETSWRLVMKTRRWGLIYEKLKQRIGSKKAIVAIARRLLVVMVALLRSGRAYRLSSEVRV

SEQ ID NO: 444977 - protein, 396 aa, unidentified
MTQLYVGIDTSKDKHDVCVKNEKGSVLLGNLKIRNTHSDTKRLYKKLDQLKKQNNGCTIVFGMEATGIYYLPLYHALTSGGYAVKLFNPIQSHGYRKMEIRKTKTDKIDAAIIADMLRYSEVPMMGEIDLELYTLRELCRVRHRIVQKSTDCKRQLYRDIDMLWPGYHRYFSEIFGKTSCAILKRYSVPTKLIKQPFEDFCAFLIKTSNAQFKRNKAKDIYEHAKDTLTIPELEVVGSIEIRMLIAQLELLDEHKKRLEKRMQKIMQKRNSKITSISGINEILGAVILGEIGDIRRFSSSRKLMAYAGLDPSINQSGKMDGTGGRISKRGSPLLRHALYLAANIARNCDNSFRVYFEKKMAKGKHFKAALTATAGKVLRVVYYVLKEDKEYDMAKN

SEQ ID NO: 444978 - protein, 342 aa, unidentified
MTTKYFIGGDISKSKIDFALLNGSLDLKSEQIVSNRKPTLLKFLKKEIKSLKITATDLVVCCENTGIYSTPLIQACLELGVFLWVENALKIKRASTDMRGKTDRQDARRIAEYACRYLDKAKAYQEPSDTVKELQRQSKIRETLISQRVGLESQIREAKTHDKALYDALKKGYASVLKQIERSLAKVDERIKELSNAEEAIKHNIELLTSIQGVGLQTALGFILYTNNFENYENAKHLACYSGVVPFANESGTIQKRARVSHMSNHRLKRLLHLAAMSAIRANKELKAYYLRKVKEGKNKMSVLNAVRNKLVHRMFAVVQRQTAYIQELNVPIKMEQIVLAS

SEQ ID NO: 444979 - protein, 361 aa, unidentified
MRPISAGYRPRVAEPHAKEPVVAKDLTYVGLDAHQETIHAAALLPGVEKAAEDPFANTPEVIRRWARRLVQRAAGPVTCCYEAGPLGYGLTRELEGLGVRCVVVAPALIPVKPGDRIKTDRRDARKLAELLGAGLLTEVYAPTAEQEAVRDRAREAVKRDQIRMRHRLSKLLLRRGVRWTPGRRAWTQAHHGWLRGRRLEYAADQAVPDDHLLGLEQIESRLAALGAKLEAVADEAPYREPVGWLRYFRGFDTLTALALVAELHDWRRFASPRALMAYLGPVPSESSSGDKERRGAITRAGNVRLRRRLVEAAWHYRHRPGVSYRLRERRAGQPARVIAIADRAQHRLHARYMNPPGSSCF

SEQ ID NO: 444980 - protein, 412 aa, unidentified
MNYQDYLFVGVDTHKNQHTAVVINCFHQKLGVVETHNNPSNFDELIKELETLTPNQETLVFGLEDTQGLGRSLAQWLIKRDYQVKEVNPALTKRERQHSPNPDKSDQVDGEAIANVLLAQWDKLPTIHEDGNHKAIKQLNNHLRGLVKQRTQIKNQLHNLIHQQYPNYEKFFSNPFKVKTALAFWKKFPHPNKLKHYGEKRLQKFLKKQTKNISNDKASKILSLVDKDQEQDVSVRARNKLIVMLIEQLRLINQQLEKIKTELQEAVDNSPYQLTTMPGISYNLAAQFIAEIGNISRFNSANQLARYSGLAPTEHSSGKSSHTSRKKYGCRNLNNAFYMLALQQISTTRNGKPKNPVAYNYYQKKLAEGKSGKSALVCLQRRLVDIIFAMMRDKTAYKLPETPDYDVLNKAG

SEQ ID NO: 444981 - protein, 389 aa, unidentified
MKIFVGIDIAKLNHFAAAISSDGEILIEPFKFTNDADGFQLLVSKLESFDKNSIIIGLESTAHYGDNLVRYLVAEFYQVCVLNPIKTCQMRKNNVRKTKTDKVDTFVIAKTLMMQDDLRFITFFDLDMMDLKALGRFRQKTIKQRTRLKIQLTTYVDQVFPEIQYFFKSGLHQHAVYALLKEAPSPKEIASMHMTHLANLLKVNSHGHFTKELAKELRVLAQKSVGANDSAISIQITQTIQQIELLDSQLEKIEAEMTDIMKFNDSVIMTIPGIGYINGGMILGEIGDIHRFSNPNKLLAFAGLDPSVYQSGNFQAKTTRMSKRGSRVLRYALVNAAWNVVRNNATFKAYYDAKRAEGRSHYNALGHCAGKLVRVIWKMLTDEVEFNLE

SEQ ID NO: 444982 - protein, 453 aa, unidentified
MESKTKTVFEEIRRNVAGIDLAWRADHYVCGPRLENGGYEIVSFGTTTPELYRMLKWLQDRQVESVAIESTSIYWIPTADLLESKGIEVVLVDAREVRMITGRKSDVKDCQWLQRLHSCGLLRGAFRPAETIAAVRTILREKDTMTAMRVQSIQQMQKSLDQMNIRVHHAVSDIDGKTGTAIIKAIVEGERDPFKLAMLRDKRCKKSVKEIADHLTGTWRVEHLFNLSQAFKTLQFLDERIAEYEFQASNMFQSISESDNTEESGNLPPEAPQSKKQSAKERTDTKGKAVLQKIMKFDLTLIPGIGYDTAAIIVSELGSKFDCFPDENHFASYLGLVPSLGKSAGKNVRQRRCKNTSRAGRALRQAASSLYRSSSELGAYFRNVARHTDRKTAVKATARRMAHMIFRGVKYGKEYVDRGSEAYEFRMREKALKTVNRMIKSFSINNSEIVVCA

SEQ ID NO: 444983 - protein, 343 aa, unidentified
MARLYCGIDLHATSMQVCIIGPDLVKVLDRTIRNDLPSVLSVLRPFGPDLSIAVESTFNWYWLVDGLQDAGYDVHLAHTLGLFLITRAKVKTDRRDAYALARLLATGMLPEAYIYPKETRPIRDLVRQRTRLVAARAQGYAALRLRLYQHGIHDHSRNDTKGWALQDIEEVTGHPIVRMLCGQELERIALFSVQIAAIEDRILEAARPESGYLRLTALPGVGQALSAIIFYETGRVSRFPSARHYSSYCRLVPGTADSGGSSHRGRGAKQGNPHLKAAFTQAAQCAVRHYPTMKVFYERHAAHHPGRGSKLIATNILGHKLALAVYHILKEGIDYDENRLLTA

SEQ ID NO: 444984 - protein, 422 aa, unidentified
MLAESHDEEQIIARVAALDIGKAELVCCVRVPAPGGGQRRLQDVTTHSTMTKALTELANRLVELGVERVVMEATSSYWKPVFYLLEAHGLDPWLVNARDVKHLPGRPKTDVLDAVWFCKVAERQMLRPSFVPPWPIRRLRDLTRYRTDLVAARTAEKNRVEKLLEDACIKLSVVASDIFGVSGRAMLAALVAGERDPKVLAQLARARMRAKIDRLEQAFDGHFADHHRFLLARMLSRIEALDEDIAAVDAQIEAQLAPFAQAAARLDEIPGIGPVAAAAIVAEIGVDMSRFPTAGHLCSWAKFAPGINSSAGKTKGSASSGHGNPYLARVLGEAAVGTSKTNTFLAARYRRIARRRGQPRAVVAVGRSILVIVWHVLRDPDARYQDLGADHYTRHVHPSAKKRSHIRQLEALGYTVTLTPAA

SEQ ID NO: 444985 - protein, 408 aa, unidentified
MNPLYVGIDVSSKSNVVYLMLPDGSKHSNFSVANSHDGSAQLVKRILSAITSLSLDTVIIGLEATSVYGDNLVYFLREDASLVPYDRKIHVLNPKQVKNFKEAYNDLPKNDYVDSYVIADCLRFGRINKEVYQGDYRYKALQNLTRARFFAVQNLVKEKQRFINVLFKKYSTMAQEKVFSDTFSTTALAIYGEFESAEALASMDLQELTDFIMEKGKKRFPDPDAVAKAIQKAAKSSYRLPKTVNDSVNQVLSISITSIKALDAQIKEFDKAIKAQMELLPNVLTSIPGIGPVYSAGIIAEIGDINRFPSQAQLGKYAGLAWTQNQSGDFESENTKLIQSGNRFLKYYLCEGALSLVRCDTEYSNFYHSKYKEVNRHQHKRALALTARKFVRLVFRLLKDNRLYRAAE

SEQ ID NO: 444986 - protein, 318 aa, unidentified
MSENVTAFFGVDVSKKSCDVAGWDGNQVRPFPNTLEGCRELLAQLPAPGTCLVTFEGTGGYERTFAGELMAAGHFVAIINPRQVRDFAKALGILAKTDKIDARVIARFSRQVEWTPKVYHEGQEQFRELLIRRRQLVEARTAELNRQKQAHSALVVQSVQRTLATLKDEIRRIDQSLAEKAKADDQWQRRIEILTSAPGVGPQTALALVAEVPELGQLNRQEIAALVGVAPLNDDSGTRSGRRSVWGGRAGVRSVLYMAALSACKHNPVIRAFAARLKAAGKLAKVVLTACMRKLLVILNTMVRDDRAWAPRLASAAP

SEQ ID NO: 444987 - protein, 330 aa, unidentified
MKNYVDVVGIDVSKLTIDAHIHYLSKHRVFSNSHKGYKALLLWAKKYLKEQDYFFCFENTGLYSANLSVYLSENEIDYVEQSALAIKRSVGIVRGKTDRLDAAMIARYAWLHKEELTLSTPKQKDIQELGRLLATREQLVRDRTGKLSSLNEMKNLLSSPSTDECCKVLTKSIHYLTKQVGALEQSIRALMQREGSLERNFKLLNTIKGVGLILASQIIYHTDNFNRFENWRQFSSYCGVAPFEHSSGTSIKRKNRIHHIGDRKMKTLLTLASVSAIQCDKELKHYYKKKVAEGKPKMVALNNVRNKILSRAFAVVKRGTPYVELQKFAA

SEQ ID NO: 444988 - protein, 357 aa, unidentified
MKIVGCDLHARQQTIAMVDTETGEFTEKTLSHEGNAVRTFYAGLEGPVVVGIEATGSMQWFLELLGELGIQCRVGHPAEIRAKETRKQKHDRRDARLIWELLIEDRFPEIWMPSTEERDLRTLLRDRHQWVKMRARLQHTLQAIALNHALRQGHALWSAAGQSALQALPLPPYTSQRRTELLSLYVQLQRRIQELDKEVEAQARQRPQARRLLTHPGVGAVTALATEVFLGDPSRFATANQVASYIGMIPCEHTSGKRQRLGKLTKQGNSLLRYLWTEATMHAVGKDPDLKRFYRRKLIQKGMGKARIAAARKLGIRLWIMMRDQIDYEEFCRRGKLRQKGEAHAGMPDFNSGPARQ

SEQ ID NO: 444989 - protein, 362 aa, unidentified
MKGRVAVEKSIRAEVETVVGVDLGDRSSQICCLNRETGAILEEKRLSTATAKFQRYFEGRGPCLVIVESGTHTPWVRRLLASMGHQVIVANASKVRAISASLRKTDERDARCLAQLGRVDPELLSPVHTRSEEAQQALAVVRSREGLLKARTMLINQVRGMVKSFGARLPGCSAKSFARGASKALPEELKAALKPLLEVIADLSERLRGFDRDIEVWAKRFPVTERLRQIKGVGALTALVFVLTLDDPSRFARSRSVGAYLGLVPASRSSGSSTPQLPITKHGDSLLRRLLVQAAHYILGPFGQDSDLRSFGLELARRGGKNGKKRAVVAVARKLAVLLHRLWVSGEDYEPHRQAVSSSAAA

SEQ ID NO: 444990 - protein, 339 aa, unidentified
MEITTIGFDLAKTVFQVHGADDEGRPVLRRKLRRGKVLAFFAGLPSCLVGMEACASAHYWAREIQALGHEVRLIPPQYVRPFVKTNKNDAADAEAICEAVTRPTMRFAPLKSAEQQSVLMLHRARELLVRQRTMLINALRGHCAELGLIVAQGASKVEELVAIIEDRGDTRLPPLARQALGMLVAQLRSAQARIKELEVALLAWHRSSEASRRLATIPGVGVITATALVATIGDGAQFRSGRQLSAWLGLVPRQHSSGGKDRLGRISKRGDGYIRRLLVHGARTVLRWRRAKPDTRPGWTDQLLARRPTNVVLVAMANKTARVAWALLRYERIYQPVSA

SEQ ID NO: 444991 - protein, 396 aa, unidentified
MKTTRIGLDIAKQIFDLHGVDGRGKVVLRKTLRREQVSEFFAQLKPCEVGMEACGGAHYWHREISRLGHSVRLLSAHKVKPYLDGNKNNRHDAAAICEAMSRPSMRFVQPKSVAQQDLQTLHRTRALLVRELTALSNQMRGLLQEYGVVIRKGVAALRRVVPQLLAGDDQRLSAVLRQVVAEQFERFKYLEQRLASYDRQINRSCKQDQRCRRLLQVEGIGPLTASALVAAIGNGQEFKNGRHFSAYLGLVPGHSNTGDKTVMLPITKRGNRYLRTLLIHGGRAAVYAARRRTDPRSIWLNRLREGSCHNVAAVALANKNARVAWAMLRYGEDYRPGRAHRRAPDPATARTAQASQNHAGLRRAPRPPRPAEQRAFFRPALRSNEGRGEKMLRQRS

SEQ ID NO: 444992 - protein, 416 aa, unidentified
MKLFIGLDVSSQKLDTCFLTDSKEILFEGSLSNDLIGAGEIKQRILEYQETFGFCQIVIGMESTSVYSFHPAMFFYLDEDLKLLPVEVTVENPYRIKQYSRMFDQDKTDKIDAQIIADYLRVDLHTLSPIKEEVYIGLQRLTRSRYQLVTQMVEAKQHFLENLTYKCNTLSKELANEDNKTSVFGATIMNLLTEDITLDEFSEMPLEAAAELLQKLGKGRFKNPEQLVKSIQKAVRSSYRLGKVTKNSIDLVLGIIANEIKFLKKQIKEIEKAIISLLETIPEAQCLLSVPGLGPVYTAGLIAEIGQIERFDDQSKLAKYAGLTWTKNQSGNSQSENTPLNRSGNRYFRYYLIEATNRVRSTLPEFKEYYQKKKNEVPKHKHKRALVLTGRKFVRLIDALLRNGQFYQPTKVVIEK

SEQ ID NO: 444993 - protein, 423 aa, unidentified
MEVLHECVAGLDVHKDSVVGCVRTVSGDKTTREHRTFDATTDGLLALLEWLTSCRCELVAMEATGVYWMPVWRILSDGAFKLIVVNAAHIKAVPGRKTDMKDSTWLADLAAFGLLKASFVPDEEQHELRALMRTRKQLVREQTRHVQRIQKTLTEANIKLDSVISDIMGRNGRRMIEAMITGMRDPRKLAALADQRLKATPKQLYDALHGRLTDHHRFLLQLHLGQWDTLDATIKGVDREVATRVFRMDTEVTADKANFSDLIDQLVTIPGVSRLSALTILSEIGTDMSRFATAGHLVAWAGMCPGQNESAGKRKRTRLRKGAPWLKTMLVQCAWAAKRKKDSYYKAQFFRLQSRRGPQKAICAVAASLLTAIYHMLKDGTIHQDLGSGYFDQRPPEIKVKRLVNQIAKLGFEVTLQPIAKAA

SEQ ID NO: 444994 - protein, 405 aa, unidentified
MLYLGIDLHRVQMTVSLRNESGDVILRRQVSTRWAKLEEFRGQLQQAGAAGEKFIAIVEVCGFHDWLVKWLQQDDSCQRVLVVQPLGRSATKTDRRDANALSELLWVNRERLLRGDRVQGIRTVLVPGAEEQADRHLTQLRDRLVRKRTQTINQIHKILRRHNLAWERPTKSFQTRKVAEWLQTLPLGPMDRLALNQLLVQWRLWEEQLAVTDSGIAERFQANQHAQLLATIPGVSMYIALAITCRIMPIERFPRGRSLANFLGLTPGCRSSGETERLGSITKEGSRLVRCLLAQVVLHLLRRDQTARAWYQRIKRRRGANIARVAVMRRTATILWRMLSKGERWRPGAANSETPAAASDPRPARLWRPRQTMLSALTAREAEAAGSSTGSSSLLAGGEVTRCPA

SEQ ID NO: 444995 - protein, 415 aa, unidentified
MYYIGIDVAKSFHIVTVINENEEKVISKPFRVENLNEGFTKLLTIINSISSDKREFLIGLEATGIYGENLWEYLNSNGYSVKLLNPFQTSRYREQTTMKKVKNDNIDSLVIALFIKDGKYSSGYVADDEYQSLRTLYRNRVSIQSDMKAIKKRILTQITVTFPEFEGFINPFTISGLALLDKYPTAHHYKRSSVDRIMKLFRHIQGNNFNNAKALKLLSLAKDSIYSGKAKDARAIAIRSSIRLLKTYQSELDILESEISSLLQTHKMSAPIDEAGQEIEHNDRLIDNLKSIPGVSDKTIAAVISECGDLTRFPSVAKFIGYIGLFPTENSSGNTQRTGHLSKRGSAISKHALYMSASSCLIHNKQLKQLYDTKRSQGKSKKESLIAVSRKLATIIYSIFKYNIPYDPSRVFAKS

SEQ ID NO: 444996 - protein, 442 aa, unidentified
MAMRKREDSPEVFPNAAGIDIGGSSHWVAVPKGAAEEPVREFGTMTDDLHEMADWLLACGVDTVALESTGVFWIPVYEVLEQRGLTVWLVDARQMKYVPGRKSDVMDCQWLQKLMSLGLLRAAWRPGDEVCVVRAVARQREVLLTEQAGWVQRMQKALVQMNLQLTEVLTDVMGVTGQAIVRAIVAGERNPKVLASHRHGRVRASAAEIERALTGNWRDEHVFVLGQALAMFDSLGERILECDAKIEALLKPLGVHEVELSGPGKRGGKNTPHFDARTALARWAGVDLTRINGLSVTTVMTILSEIGPDLSRFASVKHFCSWLGLCPGTKISGGKVLSARTRRSTNRVRQALKLAAMSLSRNDSALGAFYRRLCARMDKPRANTAVAHKLARMVYFMLTRGEAFVDEGQQRYEEQQRQRNIAALRRRASALGFEITPAGQVA

SEQ ID NO: 444997 - protein, 356 aa, unidentified
MSHDVKYIGMDVHKEAIVIAVLNGSGKLVMETILETKASSILQFIHGLRGELHVTWEEGTWAAWLYDLLQPQVQEVVVCNPRRNALLKEGNKSDKVDARKLADLLRTGMLRPVYHGENGLRTLRELARSYQTISKDLTRVMNRLKALYRGWGIPCAGTQVYAPRYREEWLGKIPQTGVRRRAELLYQQLDGLQTLRRNLRPEFLAESRKQKAAKLLRKIPCIGPIRAGLLIALMQTPYRFRSKRQLWTYSGLGIETHDSAQYRYVGGQLQRSKKPQQIRGLNRNHNHAMKEIFKGAATRASCGTGPFRDFYAALLTKGMKPEMARLTLARKIAAITLTLWKKEERFDVEQLKTQAA

SEQ ID NO: 444998 - protein, 334 aa, unidentified
MEKVTTLGIDLAKSVFSLHGVDGAGRVVLRRTVRRDQLFGAVAALPPCLIGMEACSGAHEWGRRFQELGHTVRLMAPKFVAPYRKSGKNDGNDAEAICEAVTRPSMRFVPVKSAEQQALLAMHRVRQGFVVERTATINRLRGLLCEFGVVLPLRSVTVRRQAAQAAENLPELARRAIGDLLEQLRSLDERIDGYDREIEAQARLCEPAQRLMKIRGIGPTTALAIVATVGNAREFKNGRQFAAWIGLTPSQYSTGGKPRLGHISKRGDAYLRNLLVQGARSVLNSAGRHQDRMSRWILELQPRRGYYRTLVAIANKNARIAWALLAKNETLRAA

SEQ ID NO: 444999 - protein, 409 aa, unidentified
MERVIERGCGLDVHKKTVAACVRVPGPMGERAQHVRTFSTTTAELLALRDWLEAHGVTHVAMESTGIYWKPVFYVLEEAFTCLLANAAHIAQVPGRKTDVQDCVWIAQLLEHGLVRGSFVPPAPMRELRDLTRYRKALIQERTREANRLHKVLEDAGIKLASVASDVLGVSGRAMLEALVGGTTDPAVLAELARGSLRKKLPALRQALAGRFRAHHAFLLSQLLAHLDYLEEVVETLGGQIEEMIAPFAEELTRLDTIPGVNKRTAEVIIAELGVDMNVFPSADHAASWAGLCPGNNESAGKHKSGKTRKGNRWLRGALTEAALAATRASNTAFAARYRRVMRHRGHKKAVVAVAHAILVTAYHLLARKTTYQEPGTDYYDRRHAERVRHRAVHTLERQGYRVILEPVA

SEQ ID NO: 445000 - protein, 415 aa, unidentified
MTMEMEVIVERCAFLDVHRDTVMACARTPDGAGGRSEEVAEFGTTTSQLLKLADWLAERRVTLVGMEATGVYWKPVHWVLEGSVPEVWVINARHMRNLPGRKTDVADAIWGASLLEHGLVRPSFIPPEPFRALRDLTRYRKSVIEERARESQRLHKVLEDAGVKLSSVASSVLTKSGREMIDALIGGQRDPEALAEMAKGRMRSKIPQLRDAMAGRFNEHHALLCQAMLARIDQADATVEVLGARIEELLGPYEAAVTLLVTIPGVAHRSAQVILAEIGADMSRFPTAGHLASWAGMCPGNNESAGKHRSGRTRHGSKWLRKALVEAGQAAGRTKDTYLAAQYAQIRGRRGSQRAAVAVGHSILVIAWHLLSTGEPYNDLGGDYFDKHRNNAARQRRLVAQLEALGHRVTLEPAA

SEQ ID NO: 445001 - protein, 322 aa, unidentified
MRYIGIDVSKATFVVAYSSDKGGEIRTFNNTTTGIKQFIGALPKDSSIHCVMEATGNYSAMLLYLLNVAGIAVSMENPLKIKNFARAMLSTVKTDKIDARLIALYGEKMNPQPFKIQGEAILRLRQKRTVIRQLTKQITAMSNLRGSLACLPVPDKGATHTVDETIEFLEKRRDRLQSELTDLVEVEFSRQLALLTTIKGIGITLATALIITTGGFTFFQNAKQVSRYLGICPTYEQSGTSVNIRGHINRNGDTYTRGLLYVAAWTASRFNTQCGETYTRLRQNGKPGKLAMIAVANKLVRQAFAVVTHDKEYVDGFVSNRP

SEQ ID NO: 445002 - protein, 370 aa, unidentified
MKSSTSYVGLDVHKSTISVAIAEDGRGGDVRDYGVVENRADILVKLVERLGRRGQLLHFCYEAGPCGYGLHRLLSGLGQDSTVVAPSLIPKKAGDRVKTNRRDAAMLARLHRAGELTAVWVPDAAHEAMRDLVRARATAARVLGKARQHLTGFLLRHGQVYAGQRAWTVAYRRWLTTVRFTHPAQQIVLQDYIHAVEDAEKRIAMLVEQIEQLLVHWSMAPVVTAIQGMRGVAFINAITLVAEIGDFARFTNPRQLMAYVGLVPSEHSTGDSVRRGGITKAGNNQARRALIEGAWTYRMQARISRKLHDRIDGLPKGIRDIAWKAQVRLCARYRRLVAAGKKTVVVTTAIAREMIGFIWAIARQVQPQST

SEQ ID NO: 445003 - protein, 370 aa, unidentified
MKYVGIDLHTNRFTCCYLYDNSKEKKIETFDLNEEDLCRFFKTIDKDTYVLVEATINTFAFIVLFKDLVKEAIVANTYQLKSVGLPGKKTDKLDAFKLAEKLKAQVISGVQQIVPVSVPSKEIRDLRALFATYQVIRKEIGRTKNRIHSLLKENLYPFTKEYIFGKKTRTHIRSISRDHLLSFQINLLMDTLENMEDQFDRLVDEIKKSGSSFMRHVDILTSMSGISVITALAIIADIIDVSRFKNSKHFTSYLRSAPRVESSNEKTVIKSTTKAGRKLSITLLSQSLNHFRDENQKLNRWYNHIISHKKNGIIRMALCRKVFTEIFQMLKKEEYHYFRNPVLHGKKMAEYRKFLEKEHCIIPQEFILAA

SEQ ID NO: 445004 - protein, 408 aa, unidentified
MRIIALDVHRTFAQVAVLEDGKVRNAGKIDLEHSRLLQFAKRLKPDDEIIIEATGNTNVIVRLLSPFVGRVVIANPILVRAIAWAKVKTDKIDAAVLAKLHASGFLPEVWMPDGETETRRRVVAERAQLVSQITRLKNRIQSVLHANLIPPYKGVLFSQRGRTWLKAQPLPEDQRRVVLRHAGELDRLGGELAEVDKSLAQMALEEPRVKRLMTITGVNATVAMSLLAAIGDIRRFSSQEKLVSYFGLNPRVRQSGDRPAYHGRITKQGRAHARSMLVEAAWVISGAPGPLRAFFIRIRDKRGKHVAAVATARKLAVVVWHMLTKEEDFAWSRPALGQWKLRKLELKAGHPSRRGGHEKGSAAAYSNKSVRDGEREAIGNAEEQYRRFVMAWKQQPPKGRSDATNEVR

SEQ ID NO: 445005 - protein, 347 aa, unidentified
MNHVGVDLHKEHSWFHILDANGNKLNSKNISNNHESLKQYFEQIPKPFELAVEATYNWYFFVDIAQNYAQRVYLANSYELKAFAKRHKKTDKIDARLIAYLLHKGFLPVVTIADRQTRQIRELLRCRLSMVTDRSRNIFRLKALLDKLGLDSTGDFTTYKRLNEMQNHNVLGIYSTIINNYIAEVIHLSEKLYTLRKEIIALVDKDTEILYLMSIPGISYFSGALIKSEIIDISRFKSFNRLCAYAGLAPRVSCSANKTFHGPLNNNRRKNLQWILLENVYHYIRGIPQKRLRYEEVKQRKGHNTAKVVLARDMLKIIYHILKEKRPFYYDKEKQIQSVATSALCGV

SEQ ID NO: 445006 - protein, 394 aa, unidentified
MLYVGIDVAKRSHEVILLDDAGEARGKPFSIPNSHAGLSRLIDRVEQANPEQQPVVFGLEATSHYWLALYSHLRKCGHEVIALNPLRTSAYRRLQIRPVKNDRRDAWCIAEVLRLEPIVRTTLASDAVLGLRHLSRLRSEMVDQIADQKRRVVGVLDQVFPEFETLFSDIFGTTAAALLQEHPTPEEMAELDLDQLTSLLHKHSRGRFGRAKAEQIQEAARTSFGVTLALDALTAGLQMLLAQIRFLQEQVAELEERIAGYLEQVPQHLTSIPGIGSVLAAAILGEIGDIRRFKNGSALVAFAGIDPRVFQTGQFVARSTRMSKRGSRYLRRAVWQAAQVAARDDPALKPAYEEKRRAGKHHFAAVGAVANKLVHIIYAVLRDNKPYEPAVRQM

SEQ ID NO: 445007 - protein, 340 aa, unidentified
MENVTTIGLDLAKSVFQVHGVDADGAAVLRQRLTRGRMLKFFAKLPRCLVGMEACASSHYWARELIALGHDVKLMPAQYVKPYVKRGKNDAADAEAICEAVTRPTMRFVGIKSPEQQSAMMLHRVRLILSRQRTQLSNALRAHLAEFGIVAPIGRNGIDQLVGVIADTADDRVPTDARTCLTMLVAQLHIVKQQILENDRRIMASARETELGRRLMEIPGVGPLLASAIVATVPDPAIFRSGRNLAAWIGLVPRQNSSGGKERLGSITKAGHRYLRQMLIVGAMAVVRYAERNGTKRPWLVQLLARRKAKVAAVALANKNARMIWAMMASGERYREPQVA

SEQ ID NO: 445008 - protein, 451 aa, unidentified
MEKKKMEMDIVNPNCAGIDVGSKSHFVAVGQALEDVKEFGVYAEDLTEICKWLKDYGITSVAMESTGSYWQNLFVELVRYGFSVTLCNGKFTKNAKGKKTDVKDCRWIQKLHTLGLLTSSFLPDEITEKLRTYCRQRGNWIDLSSEASQKMQKYLRLLNFRLDVVVNDICGLTGLSIIADICKGNLDAEKLSEHRHGNCRKSKEEIAKALKGNNREDYLFGLKQECESYLFYQKQIGNCDKQINTFVKSQINSNPEKKKLKTENKSHKRINKNTVKNLDLNQASYQYFGGVDLMRIEGLSHSTVLTIMSEIGHDGFAKFETAKQFASWLRLAPNNKISGGKILSNRIPKGSNRLKIALRQAANAIGNLKDTHLSNFFKRVAYRKGRQSAVSATARKLGVIIWNMITKKMQYQPPTDYLFLDQKRKMKLVSRMKNNITKFELKPEELGFVIN

SEQ ID NO: 445009 - protein, 335 aa, unidentified
MNKIYVGIDISKEKCNLCYRRGLEIVREEECSNDVKALKKAFKVALKVLGASVDEVLVCAEYTGRYIYPLTVACQELDIFLWLDDPTRIKNSMGLTRGKNDVIDAARIAEYAFRYSDKAVRYCIPDAALVSMKNLLADREFLLIDRKRYQSQLTDQKKYMAPGDFKHKSGRWKKVIKSIDEQIAAIDTEIETLIAADPVLTRQKELLVSIDGIGERIAINMIAITGGFTRFQNARQFCSFAGLTPYKYDSGTSVRSKAKISKRANQTMKALLHLAAVSAATHMKEGEYKDYFERKTKEGKHVMCVLNVIRAKLVHRMFSVIKRDTEYTKEYKPAC

SEQ ID NO: 445010 - protein, 407 aa, unidentified
MDLLKTVFGIDVSSRKSNVCIMVNGQKVNDYAISNDMVGFNQLLGDLKQVTNPQIIFEATGVYSRRLQAFLDMHELRYVMMNPLEAKRKTKDDLHQNKTDKLDALYLAKLQSEHPQRLAYVQSEEYQELMANNRIYEQASHDLITNRNRLHKAIQLTFPEIEHLMVNPRGKNYWSIVLRFPHPDIVLETKEADIIDFLKGLTGIGKKRANDIAQSLIRLAKVACPAVKKNSAHIRGLKMAINNILSAEEECQTALQEMAKLAPKRDLEILTSIPCIGENTALRIISELGDIRRFNNPSQLNAFVGVDPQVYESGNLTAHLSISKRGTAIGRKVLYLAINQIQSAKKAGNPCHIADYYEKRKRSSETASHKKAAIASIHKLLRTIFALIKNDQLYSYDVAKHNQRLLS

SEQ ID NO: 445011 - protein, 341 aa, unidentified
MSDYSYFCGIDLAKNHFSLHAVDQNGKVILHKSVTRSKLLTTIANMPLMRIGVEACGGAHYWARTLNKLGHDARIMAVKYVIPYRTKGKNDLNDAVAICEAVQRSSTRFVPVKSPEQQAILSVHRMREHWVRERTALMNRMRALLSEFGLIIPVGRSSLMKHVPLMLEDAENELPHLARTVIAEAYHHLGELNQRIADTEQVFDSFAKVSVNVQRVMKVRGIGPQTATAILASIGNGSQFDKSRDFSAWLGLVPKQYSTGGKPRLGRITKHGDKYLRTLLVHGARTVIANLGDKQDKLSQWCRGVLERRGMNRAIVALAAKNARIIWSLLHNQTEYENYAA

SEQ ID NO: 445012 - protein, 381 aa, unidentified
MSKGSKLFVGLDVHKESIAVAVAEEGGGEPRFLGTISPEPAQLTQLVRRLGRTRELVCCYEAGPCGYGVYRQLTALGVNCLVVAPSLVPRKPGERVKTDRRDALKLARLLRSGELTAVWVPDQDQEALRDLTRAREDARHDLMRARHRLSKLLLRLDLRAPTGVHAWTQRHRHWLRQVQCPHHWQQQVLEEYRQAVVEAEERAARLDAEIAAAAQEGAHAPAIASYQALRGVAVLTAVTIAAEVGDITRFESPRQLMAYAGLVPSEASSGGRVRRGGITKTGNSHLRLVLIEASWHYRHPPAISATLRRRQQEQSVVVRGISWKAQQRLHRRFRRLLGRGKVKQEAVVAVARELIGFLWSVGQAAGAPIPAATPRAALVGA

SEQ ID NO: 445013 - protein, 323 aa, unidentified
MRQNVVSIGVDIAKSKFDAAFRYEGEESLVDTFENTEAGIKKFLRSVKKQKTALAVPCVLESTGLYHLNLALRIHSAGYQVNVINPIITKKYQQSSIRNAKTDTIDALRLAEIGIKETKLPVFSGNIQCIETKKLVCYMGKLEEIKQQLKASMDQVVMMVEITGMKTNLRPTETAIKNIEKQIICLKARICMLAPKSAKTLADNVYGLSHEKVAVILAMLGDKQFTNRDQIVAFAGLDVIPRQSGTWHGKGRLSKRGNPYLRKILYQVAWGLKQNNLAFKAHYMKLREKGMNYVTTLIVLARKFLRFLYTWYWKNNACPQMSF

SEQ ID NO: 445014 - protein, 341 aa, unidentified
MKPELSVVGIDLAKNLFHLVGLDERGKIILRKRLARGEVLPFMAKLPRVLVGMEACGGAHYWARQLRAQGHEVKLMAPQYVKPYVKTNKNDLRDAEAIAEAVTRPSMRFVPIKHVAQQDLQALHRVRERLMGARTALVNEMRGLLAEYGIVLPTGVNAFRNALAEKLEAEHAKLTPLSQELFGKLCAEFRKVEAEVAYYDEKLQALATTHPESQRLLTIPGIGPITATALIAAVGDVGGFTNGRQFAAWLGLVPKQHSTGGQTRLLGISKRGDRYLRKLLIHGARATLRWARTKTDSRSQWIRGLLERRGWNRTAVAVANKNARIVWAVLSRGGVYGESTH

SEQ ID NO: 445015 - protein, 321 aa, unidentified
MSHIHVGIDISKDSFNAAYRDAESKWHEESFKNTVAGRRKLLRWAGTNAHFTMEATGYYHNETALFLQKVSTVHVCNPMVVKRYSQLRLNRGKTDRADARLIAEFARNNEDMLRVWRPLEGRLGEARALLTVAKQIKKQIQQTANAIHALKLTEAGKLAAELLKPLQQTQKKALAEVERKLTKIVKTEHKAMYNAIVSIPGVGDKTASALIVCTNGFVDFENPKQLCAYVGLSPRVFESGTSVKGKGHICKLGNPYLRQCLYMCAVSAMTCNPVMKAFKESLVARKKQNTVALVAVANKLLRTVFALAKKNQRWNPEVKAA

SEQ ID NO: 445016 - protein, 338 aa, unidentified
MAIVMGLDQHRAQITAEWIDTETGEVSRGRITPADRQGVVRFLERFAGLELEVALEATTGWRFVVEELRRVGAEVHLAELAQTSALRGNKQHAKNDRADARHLRELLMARRVPECWIAPGHLLDLRARVRLRHTLVDERGEWQQRIQAVLYHHGLPKRAGLLTGENRAWVGQLALTGAARGQITVALAMIDAIDAQVAPLDRELRCYARRQAGCKAIQAHYGIGPLTSVVILSELGDARRFSSSREAVRYGGLDITVHASDKRRAPGHLSRQGPPVLRWALYEAAQTARRKTSPDHAYYQQAAERLGDNRALLSVMRKLLKRSYHTLRELGDDALAPA

SEQ ID NO: 445017 - protein, 360 aa, unidentified
MQTQRNELNFEGQNIYVGMDVHLKSWTVCILTEKLEHKKFTQPPQANVLYNYLTRNFPGATYYSAYESGFSGFWAHRQLEALGIKSMVTNAADVPTGQKEKIQKDDLRDSRKIARSLRSGDLEAIYVPGESTLEERSLLRMRTSLIKDMTRFKQRIKSFLYFFGILYPERFNKSGSHWSKNFLKWLKEEVQLTEESGRDTMNMLIREVEEQRELLLLVSRKIKQLSESEKYASNVKLLKTVPGIGLLTAMHFLTEMETVERFADPDHFAAYVGLVPDRHNSGEVKNDGEMTFRGQSILKKCVIESAWIAARKDPALSLSYNKYAARMEPNKAIIRIARKLLNRIYFVLKNKKEYVTCIAK

SEQ ID NO: 445018 - protein, 353 aa, unidentified
MIILGVDPHKSSHTAAAVDTPATMTIDTLTISSSEADYRRLLNWAQQWPERYWAIENADGLGHHLAQWLISRGETVVDIPPTATAKIRTLSRGGRRKNDPIDAAAAACAAAIRGESRPVSAEDHTDALALLDERRHTLSRHRTKLLNQMHALLRELIPGGVKRSLTANAAEKALHTVTAVTIADQVRAQLIEDLIDDVRRCDRQLADNTARMKRILDEHATSLTGIVGIGPVLAARVLAGTRDPRRFPTAAAYANYTGTAPVQVASGDYNRHRLSRYGNRDLNSALHSIAVIQIRTRTSAGRRYYDRKIAEGKTPREAIRCLKRHLTTALWKTMVKDVRSREITSATPHSNAA

SEQ ID NO: 445019 - protein, 489 aa, unidentified
MKSQPPKKAPKDKPESKKTNGKPTPGKWEEMNRKQRREMMRQMQSEDLNLEVVHPHAAGIDIGNASHYVAVPPSRDPQPVRCFGCTTAELKTMAEWLKQCGIRTVAMQSTGVYWIAVYEILEEAGLEVYLVNARETKNLPGRKTDVQESQWLMKLHTYGLLRNSFRPSQEIRTLRTYWRQRHDLVRSTGRHIQRMQKALTQMNIQLANVISDLSGVTGQAIVKAILDGERDPRELAAYRDCRVEASEEEIAQALEGNWQQDQLFVLRQEQAGYEFCQKQITECDQQLAEYLAQLKDRTQGATLPEETRKGRRKKKKGNPQFNLREELFRMTGTDLTQIDGIDVMAAMTVVSEVGWDMSKWKTENHFVSWLKLSPDNKISGGKVIGKGRLPTNNRATTVLRMAATTLRESDSYLGAQFRRFRSRLGPPVATKAMAAKLARLIYRMLRYGMKYVNQGAEFYETQHRKQQVIHLKRKAAQLGLQIIEVAAAA

SEQ ID NO: 445020 - protein, 310 aa, unidentified
MKAAWVGIDVAKDTLAVCVLPDKRQHSYANTAEGWAHVLDELSGYEIQRVLLEATGGYEAGVLRYLAAAGLPVVRINPRQARAFAEAMGSQAKTDALDAVLLARQAQVLEAPLYQPQTAQAQALQELVKRRTHLVAQRDDDRRRLAQATLPKVQANISHCLAFLNQQIASLNHDITQACRELDNERTQRLSSVSGIGPVSVANLLAYLPELGHLDRRQIAALVGVAPYNADSGPKKGLRRISGGRSAIRRVLYMAAWSVVRHQADFKRRYEDLRQRGKPAKVALIACLRVLLIRLNAMLRDGTPWRSEPA

SEQ ID NO: 445021 - protein, 342 aa, unidentified
MFFLGVDVSKKTLSVVLSDHKDKILWSNKSIPNDETGFKKLVETVIKNTSKKAGKEEYSIAAGMESTGVYGERLAYYLNGNSHNGRIVTYVLNPAAVRAFGNSVMAPNKNDSADAQLIASYLSMAVTKEQISPWKAPSPEGRALRELSRRREELTELHASECNRLEKLECMQEPPEAIVRNVKEHICYLEDSIHNLEKEIEEHIDDDPGMREDIELLRSIPGIGDVTSVTLQGESDGLINFASVKGLVSFVGIAPREHTSGTSVFKKSKISRRGNSRIRHHLYMATLVAARVNPVIKEFYERLLNRGKCKKLALVACMRKMLHIIWGVMKNRKRFDPCYSLK

SEQ ID NO: 445022 - protein, 400 aa, unidentified
MRAVFGIDVSKASSEVAILVNGEKVHGYTMSNDAIGFARLLGDLRTVHKPEIIFEATGVYSRRLQTFLEDNGYAYTRLNPLEAKKQLDSLRVRKTDQIDAEKLAQSQFVLNRKPTYVQEEVYQNLRALSRFYQNLTEDIVRAKNRLHKVLQVTFPELETILSTPSGQQYWNLVIDFPCKDFVLELSKDELSESIRQSTSKRISDKRVAYLVEKLTALANQSYCAVKKTSPIMEEVRYYGRELLRLSEQRQTVLDQMVELAQPLPEYDILLSIPGIAETTATSIIGELGDIRRFQSANQINAFIGIDLRHYESGNFLAKEHITKRGNPYARKILFKCIHNIASASHTNPCHIADFYEKRKRQSQTTSTKPHTIASIHRLIRTMYYLITHNKLYDYTSTQNR

SEQ ID NO: 445023 - protein, 418 aa, unidentified
MQVETDEPEVIERVAALDVSKAEVVCCARIPGPGGRRMQEVRTISTMTSALLSLGDWLAGLGVTRVVMEATSDYWRAPFYLLEDRFETWLVNAHDVKHLPGRPKTDRLDAVWLCKVAERQMLRPSFVPPPAIRELRDLTRYRVDLLAVRTAEKQRVEKLLEDALIKLSVVASDAFGASGRAMMAALIAGERDPAVLAELARGRLRTKSAPLTEALTGRFTDHHAFLLAQMLQRVDAVTADIATVQARIDAQIGELAPAVARLDAIPGIGPVAAQMILAEIGTDMSRFPTPAHLTSWARFAPGVSESAGRPKGNAGTGKGNRYLARVVGEAAVSAARTETFLGERYRRIARRRGKKRAIVAVGRSILVIIWALLSDEQAQFIDLGADYYASRTNPERKIRQHVRELQALGYAVTLNPAA

SEQ ID NO: 445024 - protein, 381 aa, unidentified
MYVIRVGMDTSKSVFQLHGVDAAEQAVLRKKLRRSQVLDFFGKLPPTRVGLEACGSAHHWARALGALGHTVVLLPPQLVKPYVPRNKNDAADADGICEAMSRPRMRFVPVKSAEQQAALMLLGVREQLVARRTQLSNMMRGYAAEFGLVAAKGLDKIEPLLMRIADALELPELAKEMFATLAADYAALGMRLSRIEARLAAWQRQDETSRRLMEVPGVGPIGAALLVMKVPNPRAFRSGRDFAAWLGLTPKDHSTAGKQRLGVITRAGDEALRRTLVVGATAVIQQIKRGRGRASPWLMALVARKPAKLAAVALANKTARIAWKLMVSGERYDHNRAAAARADRRTARVHQEDGRHPTSATAARLGRRASDGGSEGMASRS

SEQ ID NO: 445025 - protein, 424 aa, unidentified
MKVTYQTCCGVDVHKSFLVATIIKTSSGIEPSYQKRRFSTFNNSILEFKKWLLENECLYVCMESTGKYWIPVFNLLEDEINVTIANPKWVKSVKGNKDDTKDSKWIGDLFRLGLVRGSYIPCKKIRILREFTRYRYKLVSCRSSEKNRYQNALTVCNVALDSVVSDIFWKSSTSIIDYLLEQSGTSIDHEVIASKLLKHLKAKEDAVIESIEGYQMTDSQKYRMHLVRAHMDYITAATNDVDSEIESLIAFDPDYENAVELLCTIPGVKYDSAITIISEIGIDMSQFCSSKRLCCWAGLTPGSNESAGKKKSVRITRAGVYLKPALVQCAHAAVKSDKSPYYKKKYESLVKRRGKKRAIIAIARMILTAIFQMLTTGETWNPCDLYKIDMPEALLEKQKQKAIKQAQKLLIREGLLPPTEPIAS

SEQ ID NO: 445026 - protein, 344 aa, unidentified
MELYVGLDISQSMTHLCVVDSKGKRIWEGKFSTAAEAIAKTIRAHAPDVQLIGMESGALSPYLWHELTATGLPVVCIEARHAHKTLSEQLNKTDKHDARGIAQLVRTNFFKEVKVKSMKSHQVRTLLGERAQLVGMRTDLKNQIRGALKTHGFVVSHSAEKGFKAKVGGIIRDSPTLAKMVAPLLRVLEAVEREIQGLDKLFRECAENHAVRRNLMTAPGVGPITAVAFTTAVDDPKRFRKSRSVGAYFGLTNRRDQSGKRDIAGRISGRGDKLVRGYLFEAAASVLSSRTKSWSALKSWGLRIAKRSCMNKARIAVARKLAVIMHQMWLTGEPFRWSETEAAA

SEQ ID NO: 445027 - protein, 311 aa, unidentified
MTDHNIGADISKSHLDAFLLEDGAAQRFDNSAMGFRALTKWLGKAPVARIVFESTGPYHKAFEAKLGETFPLVKVNPLQARQFAEAHGTRAKTDAVDARMLARMGVAFDLVPQVPCSKEILVLKDLNVARTGLIKDRTRLRNRAQTQDIAVLKRQTKARLAQVERHVVELDAEIAALIAAGQTPARNCDILCSMPGIGTVTAAAMLTLMPEIGTLERKQVASLAGLAPITRQSGQWQGKAFIGGGRKPSRDAIYVPAVVAMRCNPDLKAKYEQLRAAGKPAKVAIVAVMRKLIEMANALVKADRTWTPKTA

SEQ ID NO: 445028 - protein, 341 aa, unidentified
MEKTVVIGIDFSKKTLDVSCFKVSNSKNSYYQQFINSEQGCLGMISWVKGHFNDTQEWLICGEYTGIYSMTAAMVFNDNGLSFWLENPNQIKLSSGVCRQKSDKVDSMQIALYASRFMDRVKLYRPKSTVLLKARELVGFKDHLTKVKTQLGVAAKELKTVRKTWKEADYINDSSEVIIDHVNVQIADVERKMIQLLENDPELKQMYKLINSVVGVGMQTAIYLIVHTWGFNAFETPRQLACYCGIIPFSKRSGTSLKGRPHVSHIANKKLKSLLHMCALNAVRYDPQLKLYYQRKVEEGKHKMNVLNNVKNKLRHRIYAVISTGQEYDKNYYLRNTSVAA

SEQ ID NO: 445029 - protein, 313 aa, unidentified
MSYIHFIGIDVSKEWFDVALHGAKPAKPERFPNSGEGFAGFARRLKAELPDALVVMEATGGYETALLGFLLARRVAVHRADPRAASYFIRSLGKRAKTDQLDALALAAYAHERQQSLRLARIPDPAQAKLGQMLMRRADLVAMRMAEQTRLLHPNYAGMKASLGAILKPLNAQLLKLERQITALIEQSPVLSAKLAVMTSVKGVGPQTAFTLLACMPELGTITRRQTASLAGVAPHPKDSGKTSGYRRTIGGRSSVKRVLFMAAMAARRFNAGLREFYERLIQNGKKPIVAITAIMRKLIVILNAKLRDHAYA

SEQ ID NO: 445030 - protein, 327 aa, unidentified
MSIQLPPLGIDIAKATFEVDLLMNERHIHRGFKNTAEGHAKLATWLKQQKADKVHACMEATGRYGESLALFLFQQGHVVSIANPTAIHHYGLSKLARNKTDRQDAYVIACYCASERPRAWSPPAPEVLKLQQLVTYLDTLKVERARQYNRRAAEPPLPEIQQSIQQQITLLDEQIHQFEKAIRDHIGNNPALRQRRDLLESIPGIGEVTASHLIAINLQNFDSARAAAAYAGVSPSIHESGSSVHRKSRLCKIGNTNLRRVLYMPSMAAIRFNPLIKALTGRLIKRHKCDMVCIGAAMHKLLCLAYGVLKSGIPFDPKYALNPHLAT

SEQ ID NO: 445031 - protein, 346 aa, unidentified
MKVLIGVDPHKTSLAVAVVDEATGELLERASFPQDRTGLRTLERWAKRFPERRWAMENACGLGRHLAVRLAGSGESVVDVPPKLSARVRVLSTGNARKNDGLDALATALAASRNEQLAQVDPEAASEVLRLLSERREDLVAERTRALNRLHGLLRDLVPGGVARTLSADRAARILRGIRPQGAAGRLRRRLASEVLRDVRTLDRKIANLNERIEAEVEASGTTLTEIFGIGPILAARIIGTVGSVERFPTKAHFASYSGTAPLETSSGEVVRHRLSLAGNRKLNYALHMVATCQARSDDQGGAYYRKKIAEGKSRKEALRCLKRRVCDAVFRSLSADSRAHSQRAA

SEQ ID NO: 445032 - protein, 346 aa, unidentified
MVLIGCDFHPSWQQVCWLNLETGETEENKLVHEPGATEKYYRQFAVPSRIGIESTGNCQWFVDLLTSLGHEVWIGDAAKIRASDERKQKHDRRDAALLLKLLVEGRFPRIWTPSSEVKDQRQLLIHRHKLVRVRAQVKNELQHLALNQGVQRKRKLWSEAGQKLLREIPLKPWAGRRREDLLKLMSMLDGQIESLDVAAKKAAEQNENARLLMTQPGVGPITSLAFALTMGDVSRFPRGKHVASYLGLIPGEYSSGGHQRFGPISKQGNRFLRMLLVEAAQVAVRCDPEFRREYLHRCHSKPKGVAKVAAARKLAIRLYWMLRTKKRYPEIVHIESSSRVPLASAS

SEQ ID NO: 445033 - protein, 457 aa, unidentified
MAQRRKKAKSRRFKITKLPAELQHINLNAAGIDVGSERHLVAVAEGRDEISVREFGAFTADLEALARWLKKCAVTTVAMESTGVYWIPLFEVLERHGFEVKLVDARQVKNVSGRKSDVLDCQWLQQLHTYGLLAGAFRPADEICVLRSYLRQREMLTQAASMHIQHMQKALQQMNLLLHNVVSDITGVTGMKIIKAILAGERDPQVLSRHRDRRCQHSSTTIAKSLVGNYRAEHLFALRQAVDLYETYQAKIADCDEAIIKQLEKQPNVSDDEPPPADRDTQTRSRVRGGVDVRDLLYQKSGVDLFAIPGLAADTLLTLASEVGFDLTAWKTEKHFASWLGLCPGTKQSGRKVLDSKTKRNPNRAAQAFRLAANSLYRSPTALGAFYRRIKARSGGQQAVTATAHKIARIYYAMLTKGASYVELGQQAYEQRYKQRRIDQLKSQAKSLGYQLVPCAI

SEQ ID NO: 445034 - protein, 459 aa, unidentified
MNRRERREMIRKMQSEDLSLEVVHPHAAGIDIGNESHYVAVPPTRDPQPVRRFGCTTAELKTMAEWLKQCAIRTVAMQSTGVYWIAVFDILEEAGLEVYLVNARETKNLPGRKSDVQESQWLMKLHTYGLLRNSFRPSRQIRMLRTYWRQRQDLVRSGGRHIQRMQKVLTQMNIQLANVISDISGTTGQTIIKAILAGERDRHELAAYRNARIEASEEEIAQSLEGNWQDDLLFVLGQEQSAYEFCQKQMMECDRQLSHCLAQLEDRSQGATMPQETRKNRLRSKKGNKPQFDLRAELFRRSGTDLTQIDGVDVMTAMTIVSEVGWDMTKWKTENNFVSWLKLCPDNKISGDKVIGKGRMPTNNRATSALRMAASNLRLSGTYLGAQFRRLRSRLGAPVATKAMAAKLARLIYRMLHYGMRYVDQGAEFYEAQYRKQQVSYLKRKALKLGLQVIEVVAA

SEQ ID NO: 445035 - protein, 348 aa, unidentified
MNATSQLPVIGMDIAKNVFQLHSVDDETGEIERRKLRRAKVAEFFANRQPLMVAMEACGGAHHWARVLQQLGHQVKLLPPKHVRAFVLRDKTDALDAQAIWVAARQPHIREVPVKSEQQQACLSLHRIRSQLMKVRIMQTNALRGLLYEFGIVLPEGHKKLLLTVHEALAKAQQLHQVPDVLVVSIQEQLHRIDALQLDIDQLDRRLAAMVKQNQQMAAVQAIPGIGPLSATALVATATDITAFKSGRQFAAWLGLTPRQVGTGGKTQQLGISKRGDAYVRSLLIHGARSIVSRSVAESWIGRLKQRRHFNVAVAALANKMARTAWAVLAKGSAFDGLKWAPNAMAAT

SEQ ID NO: 445036 - protein, 355 aa, unidentified
MDNVKYVGMDVHQHTILVAVLDACGRLVMESIIETQAATILQFIHGLKGRLCVTFEEGTYSAWLYDLLSPHAAKVVVCDPRKNALLKVGSKSDRIDARKLAELLRAGLVSPVYHGDRSMRTLKELARCYLTLTRDTTRTMNRLKALYRSRGIRCAGRQVYRLRDRGEWLEQLRERGACRRAERLYQQLDFLQVLRQGARRDLLIESRKHSATGVLRRIPFLGPIRVALLAAIVETPHRFRTKRQFWAYIGLALETHISGEYRVIAGQLERSGKTLALRGLNPSHNHDLKNIFKSAATQASLRPGPLRELFMAKVAHGIRPALARLTLARKLAAITLTIWKKGDFYDSERLKSSAA

SEQ ID NO: 445037 - protein, 394 aa, unidentified
MFIVGIDIAKRRHMVRVIDSEGRTVYKPFSIRNSCSGCSVLLERLRKLTNNKSEFLFAMESTAHYWLALYTRLRKEGYQVVVLNPIQTDAMREMLMEDNKTDEIDTLVIAETIRFGRYKASSVPQEKLLALRELCRNRFYLIDMGSDLKRKITALLDQVFLEFESQFSSIFGKTALAVLRQYPTPEKLSRAQAGKLTEVLQAASNGRFGEWKATQLKELARDSFGILDCEGAYSALLLMYLDQLQSLQDAAAALEKRIASLFSQFDSTLTSITGIGPVLGAVILSEIRDISCFASADKLAAYAGLNLKVKQSGDMKSSAVHMSKRGSPYLRRAIWMAGAIAVQFDPMFKAYYEKKSAEGLRYMNIIGHVSKKMTAVIFAVMRDNKIYEPVLPAA

SEQ ID NO: 445038 - protein, 340 aa, unidentified
MQVITVGLDIAKNVFQVHGVDGDGRAVLRRKVRRDQLLKLFGGLAPCLVGMEACATAHHWARELGTLGHEVRLLPPAYVKAYVKRNKNDAADAEAICEAVTRPTMRFVPIKSAEAQSVLMLHRARHLLVRQRTAQVSAMRAHLAEYGVVAAKGISRLRDLLPVLDAGTGILPELARQTLLLIAQLIEALTIQIRKIETELLAWHRSNPASQRLETIPGIGVITATALAATVLDAKAFRSGRQFAAWLGLVPRQNSSGGKDRLGGISKMGDRYLRHLLVVGATAVVRYTRRKATTISIWANRLLDRKPARLVTVAVANKMARIAWAVMARQENYRATSAAA

SEQ ID NO: 445039 - protein, 352 aa, unidentified
MGIVVALDVHRNQITYKALDGDTGELRRGRIAPATRSELRAWLGRFAGDAVEFVLEGTTGWRFVVEEIERAGHRAHLADPAETAARRGRKRRAKTDNADCDLQLRLLLAGELPESWIPPAQILELRTLVRLRKTLIDQRSAWQQRIHAQLFHQGVPAGLRLRTEAGREALRRAELSPAGRELVALGLRMLEVFDLELAPLDQRLRAFARRQPACRALIERLYGVGPVSATAILAELGDCRRFSSSDDAVRHAGLDITVYQSDAKRAPGHLSHEGPELLRWALYEAAVSAARAGSPDHAYYLQVAQRLGHTRACLSVARKLCRRAHHLLRELGEQALAPIEQPADEETIAAAA

SEQ ID NO: 445040 - protein, 359 aa, unidentified
MKYIGLDCHKQYDFATLIDSETGEIRSKKLAHRKEEFKSFIGGRSNSKMVIESCWNWSKTYELAKDLVDEVILAHPLKIKAIASAKIKTDAIDSRTLAQLLKADLIPQAHLREADNRLKQKVIRHRAFMVAMRTRVKNKVNDLVSNRLLSPTVEETKPKNLFSKSGKGENGVAWLKSLEWSVEEDKKIFESAMRLIEQFSLEISASNRMMDEIFKKDKDAQLLYTIPGIGKTLAVLISTEIDGIGRFSSPSRLCSYAGLVPSTHSSGGKTYHGKITLEGNRWLRWALVEAVVPASYSDIEVRTRLNTLRKIKSANVAKTIMARWLLKVVYHVLKENRPYVPADPADASPGRLLKALASS

SEQ ID NO: 445041 - protein, 368 aa, unidentified
MSEIIRIGVDTSKSVFQLHGVDAAEQPVLRKKLRRRDMLGFFERLPATKVGMEACGGTYYWARELTALGHEVKLMPPQHVKPYVRRGKNDRNDADAICEAMSRPRMSFVAIKTAESQAAQMLMTTRERLVAYRTQLINTIRGHAAEFGLTAAKGPAHVEPLLTRIAEDGRMPELAKELFAMHGVELSRLKIELREIEAKLKAWHRQNEMSRRLAEVDAIGPIGGCLLAIKAPDPQAFRCGRDFSAWMGLTPKDHSTAGKVRLGVITRAGDEALRRTLVVGATSVIKQVSNGKGHPSPWLRDLVARKPPKLAAVALANKLARIAWRLMVSGERYDAARAGIVSPTARVAPCSRRQGRGAPPAAVACGQP

SEQ ID NO: 445042 - protein, 372 aa, unidentified
MQSTTKFVGLDVSKEKISVAIADASGETPRYYGSIPHTPAALRKLIKELGPAETLSFCYEAGPTGYETYRWITSMGAHCVVIAPSLIPKRPGDHVKTDRRDAEQLARPFRAGELTPVYVPEREDEALRELVRAREAAKEDTHRARQRILKFLLRHHIEPPATIKRRWTRKYRSWLEQLTFPYEPMQVAFDEMLHTLNEIEQRMGRLEKALVQQATVGSKATLIRVLQSLRGIGLLTAVTLAAEIGSFTRFRSPAQLMAYLGLVPRESSTGLSTRRGSMTKAGNGRLRRSLVESAWSYRHRPAVKGDLAKRLDGMPADIQLLSWKAQERLHYKYRHLIFGKNKHKNVAVGAVARELTGFIWAVARTVEQPVAN

SEQ ID NO: 445043 - protein, 349 aa, unidentified
MRKTICVLGVDIGKNLCSLVGLDDSGKVVLRRRAKRETLITLAAKLPACIVAMEACCGAHHLGRIFAARGHEVRLMSPEYVRPYIKAQKNDERDAEGIAEAATRPTMRFVELKTQAQLDVQTLHRSRDRLVGERTALINQLRAILLERGIVVAKRKRNLEKFVAGLLEGPDDCGLNGRIRTLIADMRAQWVELDRRIRTFDAEFAAFLRENADARLLASIPGVGPLIASALIAAIGAGETFEHGRDLSAWLGLVPRQATTGGKPKLLGISKRGNRYLRRILIHGARAALPHIAEYDTPLGRWLKGLLARAHKNLAVVALANKLARIAWAVLRRKEEFVAMRPAGVVAAA

SEQ ID NO: 445044 - protein, 415 aa, unidentified
METTYNLAGIDVHKSMLAVVITDAAREGEFLFERRKFGATESELRQLAAWLAEHEVREAVMESTAQYWRPVWQQLEGQCELHLAQAYSNRAPRGRKRDFADAERLLRRHVAGELILSFVPDPEQRLWRTMTRTKLQLTRDRVRIHNQLESLLEDARIKLSGCVSDLLGLSSQRMLKALAKGETDAARLAAMADPKLRATPERLRDALHAAATLSALHRQILGLFLARLELIENQMEILDKSIGEALHGYHDAVLRLAEVPGYGIDSAQQVIAEVGPTAAVFPSAEQLSSWVGTCPGREESAEVSKNNRSPKGNRMMRRVLNQVANAAVKSKGSVFQTLYRRFVVRLGHNKAIWAIAHRLCRLTWKILHQGVRYIEYGNRTNPKAVKTRMNKLIRELRSLGYQVQVAPLPTTPSTP

SEQ ID NO: 445045 - protein, 345 aa, unidentified
MDEAYDGRQVVGMDLHRRRSVLVRMTMDGRKLETARIENSPAALRRELAKAGKHPLVVLEATYGWYWAADVLEEAGAEVRLAHPLGVKAFSYRRVKNDERDASDLADLARMGRLPEAWIAPPQVRAVREIVRYRHKLVGQRTSCKDQVHAVLAKCGVPVTHSDIFGRGGGLWLDQLVLPAPYGAKVASLRALIGVLDGQVAALGAEAAAMLARDKGYAAVRELPGIGPVLGAVICAEIGDITRFGKPGQLCSWAGLTPRHHESDLTVIRGHVSKQGSRLLRWALTEAIQHQPEGTRPRAAKEAIIARRGPQARNIAKTAAARVLLTQVFYAMRDGHVRRASDPAA

SEQ ID NO: 445046 - protein, 410 aa, unidentified
MFKVAIRSPGDKPWTRKTEVLEYRTFYGVLQHMAIELVRRGVTHVVMEASGVYTEPVYYALAEQDFTEVAVINPAHAKALKGHKTDAKDCARLAELFECGLLRGSYIPAPELKEVRDLTRYRIKTVQARTSEIQRLGKSLESAGIKLGSVASEITGVSATAMIEALIDGERRGAVLADLAMGRMRTAGKLADLSQALAGRFTSHHALMCRLHLDRIAVFNTAVGGLQDQITARAAPWQREQDLLKTIPGFGDTVAQAWLAEIGPAPHAYFSCHEKLASWVSLCPGNNISAGKRKHGRTGDAGTYIKPMLVQAAWSAIKGRGRLQARYNRLVRRFGGEKNPAAKKKAITAIAHTLLKIAYQVLKSGTPYQDLGADFYTRRESPAQRQAYLLRQLEKLNPGCTITIRPPEAA

SEQ ID NO: 445047 - protein, 373 aa, unidentified
MPRYSTAFGMDVHLRSTTVCALDAETGEAVTRRFRGNPWGEVAEWMSGFPGPSLAAYESGYLGFAPQRELSGLGVDCVVAAVSRVPRSAADFSSKNDRNDAARMAKAILSHDISPVWVPSPEIEGLRDLAGAHDAATARLAAAKQRLLAFLARRGYAYGGTTPAGNPRRYWTYDFLRWLDKVRPADDGGIRALAALRSEVEAAAETRDDLLAEYRAAVAAGPLSAEVEALQSIKGCGFALAAAFASEVGDFSRFRSGRQVTSYFGLAPKQRSSADSVRLGGISGAGNALVRRLAVEGSWSYVQASHQPKLMPKGSGVPLEVRMHGRKGSERLLRRREEMLARGMPQAKANAATAAELVRWLWALGAMCREATE

SEQ ID NO: 445048 - protein, 399 aa, unidentified
MMYQQFCGIDISKDSFDITLLNSNGEIKLQDKLLMNRDGFNTLLKYLSSYSKENLLVAMEATGIYHLPLLSFLLENSFKCVVINPILIKSFIGSTTLRKTKNDKKDATSIALFSLKSYQSLHLATTDAIENIRPLIRERETLSKEIARLKTEIKAILTQLFPELSKNTNIFTRSILNLLLKAPSRKAIRNLKKQKIQKILDNTSGNKVRISADEILSLAKNSIAISDKYLEKVLTSKIRRLISIQDELSFLDEELQNSLEDTDINNDIEILQSIPGIGSVTSKNFMIEISSVKKFNSVKQLCAFIGIDPSVKQSGTSINYRGKISKRGNANLRRTIWQMAIGVIRSCDKFNAYFSKKREEGKKFKQAVIAVANKLLRTIFVLLKNKTKFNENLASGVSK

SEQ ID NO: 445049 - protein, 345 aa, unidentified
MSMVGSVVGGVDTHADIHVAAAVDGNGGLLGIESFPASETGFEELLGWLVSFGPVTQVGVEGTGSWGVGLSQFLTDQDVMVVEVDRPNRQKRRKVGKSDPTDALAAARAALSGEATVTPKARYGPVEQIRVLLVARRSARQQRIQTLNQLRHLVFTAPEEIRIRFKDRPKTGLITEAANMRPRKGSDPVIFTTYLVIRNLARRIRGLNAEMRNIDELITDLIEETAPGLLDLYGVGVDTAASLLVTAGDNPDRLHAEGSWAYLCGVTPLPANSGKVTTRFRLSRGGDRQANAALYRIVLTRMSSHQETRTYVARRREEGLNTAEIMRCLKRYVARQTYKHLPHMI

SEQ ID NO: 445050 - protein, 460 aa, unidentified
MSRKRNTRTKSEQQEWSLNLEVVHPNAAGIDIGNESHYVAVAPNRDPNPVRQFACFTEDLHRLADWLKSCGIDTVAMQSTGVYWLPVYETLAEKGLEVYLVNARHTKNLPGRKTDVQECQWLLQLHTFGLLNNSFRPPEQICVLRAYWRHRGEHVAAAGACIQRMQKVLTEMNVQLANVISDISGLTGTAIIQAILNGERDRYKLADLADPRIQATREEIARSLEGNWRKELLFILQQERNLYQTYQQQIAECDTALAAHLQTLEDKVEPGSQPPAAKPSKKAGSNAPTGFDVRGELYRISGTDLTQIDGINIMTAQTIIAELGVDMSRFPTEAHFASFLGLCPDNQITGGKVRHRGTKHVQNRAATALRMAASTLWRSKTYLGAKFRRLRARLGAPKAITAMAHMLARLVYRMLKYGEQYVDKGMQYYEEKYRAHEILSIQKKAKQLGFEVTLSPAAAA

SEQ ID NO: 445051 - protein, 348 aa, unidentified
MAHFVGLDVSVKETSVCVVDDAGKVVCERGVPSEPDDIAVLLTSVGGDYVRVGIEAGPLSQWLVNGLSEAGYPVICVETRHMKALLQAQQINKSDRNDARGIAQMMRVGLFKPVHVKTLAAQEQRMLLTSRKLVQRKLIDIESDMRGTLRNFGLKVGVVTTIGYEARIRQLVEGFPRLAAIIEPLLTVRRVMRQQLATLHKMLLDTVRHDPVCRRLMTAPGVGPVVVLTYRASVDQPQRFLHSRAVGAHVGLTPRRHQSGEIDYDGGISKSGDTMLRTMLYEAAQILMTQSRHWSWLKAWGMKVAQRRGMRRAIVAVARRLAVVLHRMWTDGTDFRWGSEPATAVAAA

SEQ ID NO: 445052 - protein, 442 aa, unidentified
MKQKKVLKKVVRGLPKNLQHINVHAAGIDIGSRSHFVAVPEGIDEMPVREFSTFTGDLEQMAAWLISCGVTTVAMESTGIYWIPAFEILERHGIEIKLVNARHVKNVPGRKSDVLDCQWLQQLHTYGLLRGAFRPDAQVCTLRAYVRQRAMMVRSAASYIQRMQKALSQMNLQLHNVVTDITGMTGMRIIKAILSGERKPEVLAAMRDRRCKNSVATIARSLHGSYRPEHLFSLQQAVEFYEFHQEKISACDLQILEHLKSFDSQNDKPPKNVEEALQLMSGVDLTSIDGIDTNTALKILAEIGTDMSRWKSAKHFASWLGLSPGTKVSGGKVVSSATKPVANKAAAALRIAAFTLLNSKSALGAYLRRQKARLGAPKAITATAHKLARLVYMMLKQGTAYVDAGQEYYEKRYRGRVVQNLKRRAQELGFELVAIQEAMTPA

SEQ ID NO: 445053 - protein, 323 aa, unidentified
METPQVSFKQVVSRGCGLDVHKKVVVATIDGEGLKKQTREFGTVTSSLKELREWLLENGITHVAMESTGVFWKPVYNILEPAGITVWVVNAAHVKYVPGHKTDKKDSAWLCKLLLAGLLKPSYIPAKEQRELRDLTRYRTKLIQSNASNKNRIIRILEDANIKLSSVLSSTNGVVGTKLTDKICDGQEITMQDVDEVYHKKLMATKEEIFEACQGFITDHHVYMLQIIRQEIANTNLTIENMNQRIKEVLSPYENALELLKKVPGISSKSVEELVAEIGLDMGVFPTEKHLASWAGMSPGNNESAGKKKADGQPGETNKLKLC

SEQ ID NO: 445054 - protein, 357 aa, unidentified
MVTGLKHQKEKRSMEHFAGLDVSVKETSICIVDDTGKIVREVKVASEPDALLQVLKNSAYCFKRIGLEAGPLSQWLYSAFAEANLPVICVETRHMRAALQAQINKTDRNDARGIAQMMRAGLYRPVHVKTLRSQKLRTLLSHRKLLQSKAIAVENDLRGTLRNFGLKVGIVGKLKFEARIKELVESHPDLAVLVEPLLVVRRVLREQTAVLHRRLLAIVRDDEVCRRLMTIPGVGPVVALTFRTTIDGPARFRNSKAVGAVLGLTPCKHQSGESDRTGAISKCGDEMMRVMLYEAAQSLLVRSTKWSWLKAWAMQIARRRGMKKAIVALARRLAVIMHRIWVDGTTFRWTRQEVAAA

SEQ ID NO: 445055 - protein, 339 aa, unidentified
MKITTIGLDIAKKFFQLHWVDMTTGEVHRKQLKREQMAEFFATCEPSLVAMEACGSAHYWARKLQAFGHEVRLVAAQFVRPFVKTNKTDAADARAIWEAAQRPEMKFVAIKTEAQQSVLALHRLREQMVKFRTMQGNQLRGLLYEFGVALPPGRAKGMPAALEALGVLEETLPAMVIDALHQQMIRIQKLDEDIADIEKKLTLWKKEERSAMNLMEIPGVGILSATAAVATIGDATAFKSGREFAAFLGLVPKQSGTGGRVRMLGISKRGNVYLRTLLIHGARARINFQKQRDPWIEQLLARRPFNTVVVALANKMARTIWAMMAHDRTYQKNYAANIA

SEQ ID NO: 445056 - protein, 334 aa, unidentified
MNINPQGGAAERSQRPNAGIDVSKQHLDACSGARELRVVNDASGWNELIAGLKADDIDLVVVEATGGYERGLVLALQEAGIAVARVNPRQARDFAKSLGVLAKTDTLDARTLRDFADVLARHKERARFVTPLVDKQRELLVGLMTRRRQLVDMRVAETQRLEHASAPAVKSIRSVVRLLDRQIAEIDGDIDAHLERHFKAQRKLLDSVKGVGAVTTLTLLAALPELGRLGRKPIAKLVGVAPLADDSGKRKGTRRIWGGRAPVRAALYMATLSALRYNPAIAAYYQRLLATGKPKKVAMVACMRKLLIILNAMLRDRAVWDALRHVQAPQVLDR

SEQ ID NO: 445057 - protein, 353 aa, unidentified
MKDKYVGLDVHQSSTMAAVHDEKGKAVMESIVKTEAEAMRDFLKGLSGTIHVTFEEGTQAGWLYEIVKPLVAETVVCNPRANKLLAVGNKGDRVDANKLAELLRGGQLKSVYHGGSSSRQLKELVHNYDSLVSDTTRVMNRIKAIYRGRAIRCAGRDVYYTRHRDEWLEKLTEAGVRRRAEFLYQELDMLRRLRREAKQAMLRESRRHPADPTLKQIPVLGPIRIAEILAKVVSPHRFRTKRQFWAYCGFAVVTRSSADYEFVEGRAQKRQRAPMTRGLNPNFNRRLKYVFKSAAVDGMRQEPFQSYYLRRVAMGMRPEMARLTLARKIAALTLTLWKKGEGFDELKVSEPVA

SEQ ID NO: 445058 - protein, 411 aa, unidentified
MIKENYIYVGIDLHKETHTAVMIDCYNQKLGEITFPNRPADFPKLVAKVKKCNTDGKTIVFGLENAYGYGRALAVWLIDKGYLVKDVNTAISHRQAKHRGAMYRKSDSDDAKAIALATLNMLDKLPDACPNDAYWSLGQLVHRRDNIMKQRTRLVNQLHEQLCIAYPSYKQFFNDISRPTALYFWEHYPSRKYLKGKSVEDLRAELVPVSHNKCSTKTCEKILDAVASDKVKNNAYQDARDMVTLSIVSDLQHYDKQLAEVDKMLEQMYKMLGCTLTTIPGVNVITAVKILSEIGDIERFANANKLAQFAGIAPLHLSFSGKGKDVATKQGNRRLQATIYFLAIQMVQVSSKGTPRNPVVRAYYEKRKAEGKTSQQALICISRRLISIIYGMLKHGTEYRMPVVENAGEKL

SEQ ID NO: 445059 - protein, 430 aa, unidentified
MKSNTQNAKIEAITEKTLVLGIDVGSETHYARAFDYRGIEYSKKPFKFSNTEAGFVTFKEWILDIKERHEKDKVVLGMEPTGHYWFNLGKFLQDNEMKPVLVNPHHVKKSKELDDNNPTKNDRKDPKVIAGLVREGRYMIPYLPDGVYADLRTASNIRFQLQAELTRIQNRISRWFNIYFPEYKTVYGKPDAKSGILILKAAPLPEDILTLGIDGVNQIWRDAKLRAVGKARAKTLIEAAEHSVGSKEGAVAARMEIRMLLEDYESRSIRLQEVMTLIEGLVKQIPMAEKLLEIKGVGIRTVSGFLAEVGDISRFNNPKELQKLAGLALVENSSGKHKGETTISRRGRKRLRYLLFEVAMSLVAKNPEFRELHNYYTTRRLNPLKKMQSLMAIAAKLIRVFFAMLTKGVDYDPKKMVSDIKRPAVYLQAA

SEQ ID NO: 445060 - protein, 405 aa, unidentified
MGIVIALDISMGKSYKVVYDDQICLSEGEIVHNQAGFQKLMTEIQTLPNDLMLVFESTGIYSKPVETFCQKNQIRYCVLNPLEAKKQLEQGTLRSWKTDKHDAHKLAQVHQQNIRSEKIQQPDIYHEMRDLSRFHQEIEDDIKRTRMHLHNTLQLCFPELEQFFSSRVTPYALSLIELFPHPEFVLQTSKTKIKNLLIKSTPKKISENRAKQKAIDIIEYAKESYPAVSSGSIQTQKVQYYSRQLLQLLKEKENISKQMIEKAKQLPEFELLISFPGIGEISAALFIGEIGDISRFSNHKKVNAFIGIDIRRYQSGKYAGQDRINKRGNPKGRKVLYFIVRNMIRQQKSAPNHIVDYYYKLKKQPHPKKDKVAVVACMNKLLKCIYSVVRNNTKYDYSHTVSTDQ

SEQ ID NO: 445061 - protein, 312 aa, unidentified
MIHDLSFVGIDVSKHHFDVHIHPAGESLRCGTSSDAIAQLVRRIAGLGPVAVGLEASGGYESRLADSLHAAGVEAHVVAPARVRSFARGIGQLAKTDRIDAAMIARYLVAVRADLTPYAPDRDRRRLSAISAHRRRLLAEKSGLISQLDTIDEPLVRSMIEKRLATIAQDIATLDAAITDLLAKVARLRQCHARLRKVTGVGPVLATALLADMPELGKVSAKVAAALVGVAPYARQSGTCERNGRCTGGRKHLRDIAYMAVLSAVKVKDPVLAGFYQGLRARGKPFKLAMVATMRKLITILNAIARSDPAFA

SEQ ID NO: 445062 - protein, 388 aa, unidentified
MDRVVIGMDPHKRSVTIEVMTAEETVLGGGRYRTDPDGFAAMRRYVSRFSDRVWAIEGCSGIGHHVAMRLLEAGEEVVDVPPKLSARARVFATGQGRKTDATDAHSVALVGTRMAGLRPVVNDEQLAVLRILVDRRRSLGEDHTRMVSQLHQLLLELIPGGAKKDLSAAQAKALLAKVRPRDAVGRTRRRVAAELVGDLERIYKRKKAADKELVELVEATGTSLLDLKGIGPSGAARLLVEVGDITRFPDKNHFASWNGTAPIDASSGDHVRHRLSRAGNRQINRVLHIMATVQLRNPTEGREYFDRKKAAGKTSMESMRCLKRRLSDIVYRHMVNDAITNAVTGPGGQRGNDSDSSATGSHPHAGSSDKPLPGPATAQPTTPLQSAS

SEQ ID NO: 445063 - protein, 342 aa, unidentified
MQHSIYGLDLAKRVMQLHWVDWETGEIHRKQLRRGKLLEFFVNREPGIVAMEACGSAHYWARELRKLGHEVRLIAAQFVRPFVKTNKTDAADAAAIWEAVQRPDMRFVAVKSVDQQSVLALHRMREQLVKIRTMQINAIRGLLYEFGADIPQGRQKGGKIIPQVLEQLEDQISKVTLDAMRGQLERLKALDRDIADMEKSLALWKKDQEGVSRLMAIPGVGLLTATAIVATVGDMKAFRSGREFASFLGLVPRQSGTGGRVRLLGISKRGDTYLRSLLTHGARAVIGRQIRNRNPWIDRLLNRRPYNVAVVALANKMARMIWALLARNRSYDPRYQGTKAIA

SEQ ID NO: 445064 - protein, 409 aa, unidentified
MLFVGDDWSEAHHDVEIVDEAGRVLAKRRLPEGVTGLSGLHELVAEHLGDDDELASVVVGIETDRGPWVSALVASGYSVFAVNPLQVARYRERHSVSGAKSDRGDAHTLAEIVRLDRAHHHRLVPDSTLAEQIKVLTRSHQTMIWTRRRQGNLLRSTLREFYPAALAALGNDLTDRDAVAVLAAAPSPEKGKALTQSRIATLLRRGGRKRNIAVTAERIQTGLRTAQLGLAPELADAYAVTVSALVAVIGELNRQIEVLDEAVGSHFGQHPDAQILLSQPGLGKILGARVLAEFGDARGRYADAKSRKNYGGTSPITRASGTRRVVMARYARNRRLADALYRQAFASLSSSPGARAYYDRHRAAGATHHQALRALANRLVGVLHGCLEHRTSYDENLAWAHQTPAKRAA

SEQ ID NO: 445065 - protein, 453 aa, unidentified
MPQKQKIRGRAAGALSTIHPHAAGLDVGATFHVVAVAADRDEQPVRTFRSFSGDLHRLAGWLQTMGITTVAMESTGVYWIPVFEILEARGFEVLLVNARDVKHVPGRKSDVNDAQWLQQLHQFGLLRGSFRPRDGVARLRAYLRHRERLVEYAASHIQHMQKALMQMNVQLHHVVTDITGVTGMRIIRAIVSGIQEPEALAEFRDARCAASPETIRAALTGNYRPEHVFALRHAVELYDVHQTKIAECDTEIETVLHTLNTERATPETPLPAVRHAKARNEPTFDARPALYTLLGADLTQIHGFGPYTVLRLVAECGDDMSKWPTAKHFTSWLSLAPGNKVSGGRLLSSKTRRSTNRAAALLRIAAVNIGRTHTALGAFYRRLAARIGKAKAVTATARKLAILFYNALRFGLAYADPGASYYEQRYRQRVLDNLRRRAQQMGFTLVADAASHE

SEQ ID NO: 445066 - protein, 449 aa, unidentified
MVRKKNTTFSLTVLRPNAAGVDIAATTIHVALPPDRDQTVREFGTFTCDLNAIANWLIEYGITTVAMESTSVYWIPLFQILEERGIEVFLVNAHHVKAVPGRPKTDIKDAQWLQYLHSVGLLNASFRPEAEIAAIRSLMRHRDTLIQSSSQQILRMQKALTQMNVKLHNVISDITGVTGLAIIDAILSGQRDTHTLAQLKDRRIKCTKETIAKSLEGDYRPELIFTLKQTLAAYRFIKKQVEECDAEIQRAINSYNREKGLAKIEKKQRVNSGKKLRLRDARDWTIHAEMYQAFGIDLFELPGFATNTVLSVFTEVGTDFSKFRTAAAFASWLALCPNNQISGGKILRTKARHTKSRLSEALRQAAYSLASAKSHYGQLYRRLRAKFGAPKAVKAMANKLARLLYHLVTTRQEFDETRIGKAEAHQLERDFERLKRKARAHGFELTPAI

SEQ ID NO: 445067 - protein, 423 aa, unidentified
MSKKSRIAGLAALYGRVCGLDVHKKLVVACVRILDAKDGTVQSTLRKFGTMTADLLELRQWLGELKVTHVAMESTGVYWQPVFNLLEGHFQVWVVNAQHIKKVPGRKTDMKDAEWIAQLLQCGLLKPSFVPDRQQRELRDLTRQQTKLVQQRNAVDNRIQKVLETANIKLGSVASDVLGVSGRKMIEALIAGEKDVTVLAELAQRKLREKIPELQRALEGELTEHHRFLLHQLLGQYDFLEKEIASVSERLGAVAPPSFRAAVEQLDAVAGVGERGARALLAETGIDMSRFPTHKHFASWAGRCPGNHESAGKRRSGKTPAANRHLDAVLTEMAHAAVRTKTSYFKSQYHRLAGRRGKKRAIGAVKHSLLVTVYFMLRDDKPYKDLGVDYFDKLNPQQRIRYHVRKLQELGQEVEFSPMADAA

SEQ ID NO: 445068 - protein, 349 aa, unidentified
MSVDPVYKVARSGARVEEMRWRDRTVIDGILGIDVCKNTLDVSISSYTKVRTKSFTNSPDGWRHLLDWLIAQKIQRVHACLESTGRYSLGIACALYEADHVVSIINPAQIRDFVRTKLGRNKTDGVDASHIREYCELFKPSPWAPPSEAHRRLGELQTIRSGIIAGLTEWKNRKNSGIVDAEAQALADATISHFTSQLGAVDKAIALTIDNDCDLQSKRDLLLSISGVGETLAGVVLAELPGPDVLRSSAEVVAYAGLNPRQHQSGTSIDRATRISKIGNAVLRAALYMPALSAMRYNSAIVALVTRLKSRGRLKPKQIVVAAMRKLLVLCFGVLKTGRPFDAAIAMGG

SEQ ID NO: 445069 - protein, 346 aa, unidentified
MEHYVGIDVSLELLSVCVVDGRGKIVKEAKVASEPEALVYFLKELGFPVNRIGFEAGPLSQWLHAGLTQAGFEAVLLETRHVKAALSAMPVKTDRKDACGLAQLLRMGWFQQVHAKSIGSQEIRALLVARKQLLGRLLDVELSIRGILRGFGLKVGQVTRKTFEARIRELVTGHTTLERIAEAMLSARATLKAQYEKLHKAVLAIVREDAVCRRLITVPGVGPVVAVTFKSAVDDPSRIAKSKAVGALFGLTPRKYQSGEKDVTGGITRTGDEMVRTALYEAANVLLSRITRFSKLKRWGMDVAKRRGSKRAKVALARKIGVILHRMWIDGTTYRWAEAKPIAAQA

SEQ ID NO: 445070 - protein, 365 aa, unidentified
MKIIYWIGIDDHADKWTIAHYRGDEERPGKEFELVPDEKGYRRLLSYLKGLEGEVRMVYEAGPCGYELHRRMTKAGFKCQVAAPALTPRKPGERVKTNRRDAAKLGRYLRGNDLTFIVVPDEERESLRDLIRSRQTVQKDVGRLRRQIIHLLLRYGHRYRDGQAWTLRFWSWLKKIELDGVHSRFVLAEMTGELEHRINQLERYDEQIELAAQKPEYQPYLDGLRTLRGINTLSAMTILSELGDLRRFATAPSLMAAVGVVPSEYSTGDKTSRFSITKTGNAHVRRVAVEASWQYRRRPTQGRTIKARRKDQSKAIVEIAEKCEKRLSSRFHRLTSRNKKSTVAAVAVARELLGFVWAIGQIVHP

SEQ ID NO: 445071 - protein, 523 aa, unidentified
MPVTRSRKRASSRRPEVLQKPRGVIHPRVQKVGPEHFGIVSVDCAKARSKWMLCDFYGNVLLPFTTVEHNRVALAAATTQLREHMTQHDLRDVIVAIERTGRYHHATQQAFAAAGFEVRIVHPFATKQFRQASDPGIKTDDTDLVAIQRAAVNGFALIEPPRDDTWKELQLLVRHRRDLVFKTSALCAQIREHLDAALPGYAACFYNLWIRACAFPLVRAYGSAQAMLQAGLRGLAEVLRQQGVRFQERTLKRVLAWAEQAAPSDQAAALHQRVALSLEDDRQRKSLEIQGLEREIASRLVHTPYVLLLSFPGINIVSAADFAGEMGPISNYANSRCITGRAGIRPSRYQSDQVDRPNGPLVRCANRKLRAAILGIADNLVCCNRHFNVLAVRWRGEGKDPRHTRVKVALRFCRIAYQMVAGRQVFRHPCLQHRSYILDKLNGFYRDHEGTVPQIMADLQAAIEQLPRSAYAEEAKPLAEELQRIEQGRRRGPQLLGDILPIVLARLGVGALQSKESGEQDLT

SEQ ID NO: 445072 - protein, 450 aa, unidentified
MGSRFAGIDWATEKHDVLVSNELGEKLLAATFAHDENGLSALCRTLVKMEVVLVAIERPDGVVVERLLDAGLRVLALHPNKVAAARDRFRVSGGKSDRFDAFVLCELARTDSHRFRVLEPDSDQTKALRAMTRAREGLVENRTGVMNQLRAELDRFWPGPLRLFSHMDSEILLAFLERYPSPADARGLGIGRMQAFLRREKYSGRQQPAALMVKLRSAPEGRVGEFEHAARRQLVLSFVAMIRALNAQIKGLERQIRTAVRAHPDGPIFLSLFKQAASVITAAELLAEMGDCRARYPARDALAGDAGQSAVAKESGKRKDANFRWGCNKRLRVAFSRLADSTRHWHPWAQALYAQARQRGHEHPRAIRTVGRAWCRIVWQCWQHRTPYDPTRHRSLQRHITVTIPSPSGAVTDVAATQRMAAALAPPAGTLEPSAQHLTTSLHPLTQTGG

SEQ ID NO: 445073 - protein, 343 aa, unidentified
MQTITTIGLDIAKSVFQVHGVDAGGQVVIRRQLKRRSVLAFFQKLPPCLVGIEACASSHHWSRELQALGHTVRLMPPAYVKPYVKRQKNDMADAEAICEAVTRANMRFVPTKTPEQQSCLMLHRTRHLFIRQQTAVINSIRAHLAEFGIVAPVGRRGVTELLHVVADPSDKRVPEIARACLAALGTQLLRLKEQILEFDRMILAWHRSNQTSKRLHYIPGVGPMLATALVASVADPKTFRSGRNFSAWIGLVPKQHSSGGKDRLGSISKQGDRYLRSLFVAGALAVIRYAKIHGTKRRPWLTALLMRKPTKVAAIALANKIARMAWAMMARGERYKEPVALAR

SEQ ID NO: 445074 - protein, 457 aa, unidentified
MMETKRRREQRSMLPVHPDAAAIDIGATVHVAAVGPARDPEPVRSFGTFTGDLHRLADWFAQCGIKTVVMESTGVYWIPIYEILEQRGFEVRVVNARDAKHVPGRKTDVSDAAWLQRLHEFGLLRGSFRPQGAIAALRAYLRQRERLLDYAAAHIQHMQKALTQMNLQIHHVISDITGATGMRIIRAIVAGERDPDTLASYRDIRCHSSAETVRQALIGNYREEHLFALAQAVELYEVYQAKVATCDEKIEGVLERLKQPGRAPAKPLRAARHKSRQPNAPAFDARGALYAVLGVDLTQIHGLGPYLALKLISECGTDLSAWPSAKHFTSWLSLAPGNKISGGKILSSRTRPSGNRAAALLRLAATTVGRTETALGAFYRRLSARIGKAKAVTATARKIAVLFYNAVRHGMDYADPGASYYEERYRQRVLTNLQRRAKAFGYVLQPTEIKVVSMAVS

SEQ ID NO: 445075 - protein, 381 aa, unidentified
MSAATRRIECNGETVLFMAVEVSDKTWKVGTTVSPAQKARTKNVPGGDVEALRREIQRAKKRFGMAEETQVVSCYEAGREGFWIHRWLESEGVINAVVDPASIDVNRRKRRAKTDRLDVFMLLSNLMRWWAGEKKTWSVVVVPTERDEDARHFHRERGTLKKERTAHTNRMKCLLKLYGISQQKIDGNFVEQLGKHRLRDGSPLPPQIRQRLEREYQRLAFVESQIELLARQRSEALRHSKDERIAKVRKLTQLKGAGEVGSWTLVMEIFGWRKFDNRRQVGSLAGLTGTPSDSGATNREQGIDKAGNAQVRALLIEMAWSWVRYQPDSEITIWFNRKFGGAGKRHRRIGIVGVARRLLIAFWRYLEQDIEPKGAIIFKTP

SEQ ID NO: 445076 - protein, 410 aa, unidentified
MKMAGIDVHKKVLMVVVVDASVPEEKPVRRRFVTLPSELQRFRIWLQEQGVEEAVMESTAQYWRSVWLELEPHMSLHLAQAFSNRAPRGRKHDFKDAERLVRRLMADELILSFVPKGEQRIWRSLTRMKVQLTRDRVRLQNQMECLLEEMRIKLSIVVSNLLGASGLRILHALAQGETDPKRLAELGDERLQCTEEQLVDALTGRVQPMHRGMLALQLQRLQLIDQQMAQLNSMIAQAMKSHQDAVIRLAEVPGLGVDSAQQIIAEVGAQASTFSSAAELTAWVGTCPGKEESAEQNHSSRSAKGNKYLRRVLNQAAHAAVAKKGSYFQVVFRRLMPRLGYKSAIWAIAHRLCRVVWKILHEGVRYIEQGREVGPREKKQRAQMLARALRKLGYEVTITPINQLAPKPAI

SEQ ID NO: 445077 - protein, 333 aa, unidentified
MSPLSSNHKEEYPMKPAVTTAPAAVTYVGVDIAKRTLEVSPNPAWPSGEFANDPAGHRRLVKRLKKLSPPAHVICEATGGYERDLLASLHKAGILVSLINPRNARDFARAQGLLAKTDQIDAALLADYGVHLGPSPTPKAEPSQERLQALVGQRADLVGLRQQEANRAEHQRDPFVLRQTKSILEFLKKQLAALEEEIASVIAQDDKLKHKCQRLQEIRGVGPATAWVLLADMPELGSLESGQPAALAGVAPYNQDSGPWRGQRHICQGRPLVRRALYMAALVAARRNPVLRPVYERLRAAGKAPKVALVALMRKLVELANDLLKKPDLKLVE

SEQ ID NO: 445078 - protein, 379 aa, unidentified
MDDTIRFVGLDVHKRRTVVAIADSGRDGEVRQYGAVETERSAIAKLAGKLARGGKTLRFCYEAGPCGYSMHRWLTGLGHECEVVAPSLIPRRPGERVRTDRRDAVKLARLHRAGELTAVWVPDPAHEAMRDVVRARAVAVSAVRRARQQLSGFLLRHDRIYSRKAWTGAHRRWLAELKFEHAAQRVVLEDYIDAVGAAERRRDGLTEQIREQLPRWSLAPIVEAVQALRGVAAIAAIIIVAELGDPRRFDNPRQLMAYLGLVPSEASSGEKVYRGGITKAGNRSARRALVEAAWTYRFPARRSRHLLARCQAASPAIQAIAWKAQLRLSSKYRKLVGRGKLATVAVTAVARELIGFIWAIARELPAIPPEPVPSVSSQR

SEQ ID NO: 445079 - protein, 351 aa, unidentified
MVLYVGGDLSRKRIDWQAVWPDGSECSAGAAPPDGDGLRALAGRWLGLSAEVVVVIESMTGARFVHDELERAGVEVRIADARKAKVAGELLGQIGAKTDRLDARLLAELGRRELVPEIWLAPPEVGGARERSRFRLHLVRHRTMLKNRIHQTLISHGVACAESDLFGRGGRARLAQLSLPEPWRSNVTLSLALIDHLDEQIHEQERLLRQQGADHPYVPLLTSAPGIGWILGYAIACELGDIARFASPQKLVGYSGLCPRVEQSGDSDRRGPLRKNGPKWLRWALIEAAVHANRHSAYHDLYHSTKKRLGKQRGPRVAQVVVARKLAEAIWHMLSRNEPFAPAGAKRCLAS

SEQ ID NO: 445080 - protein, 453 aa, unidentified
MGEKTTGGHPELKMVNPGAAAVDIGSTMHMAAVNPDSTDMPVRAFGTFTRDLHDLADWFRSCGVTSVAMESTGVYWIPAFEILEQHGFDVILVNARYAKNVPGRKTDVSDAGWLRQLHSYGLLRGSFRPDAEIATLRAYMRQRERLIEYAAAHIQHMQKALMEMNLQLHHVVSDITGATGMRIIRAIVEGERDPDVLASFRDFRCHSSVETIRAALVGNDRDEHIFALTQSLELYDTYQAKVADCDRKLEAAVAALTVKASGAVAPLPKARMKRKQVNAPSFDVRTALYGVVGVDLTQIHGLGPSLALKLVAECGTDLKAWPSAKHFTSWLCLAPGNKISGGKLLSSRTRRSSSRAAALLRLAAVTIGRSDTALGAFYRRLSSRIGKQKAVTATARKIAVLFYNALRFGMTYLDPGAAAYDERHRTRVLANLQRRARSFGYVLAPTPDAEAVS

SEQ ID NO: 445081 - protein, 317 aa, unidentified
MAKAIPVFVGIDVSKAQFDIALCPSGTMESFPNDEVAIGNLVKNLRTIKPVLIVLEASGGIERSLVRALVAAGLPVTVANPRQVRDFAKATGKLAKTDVLDAQILARFAEAVRPTLRPLPDETTLELRALVSRRRQITAMLTAEKNRLSRAPRRVQTHIEAHIHWLQSELERYDEELDQAIRQSPIWREQQDLLKSVPGIGSVISRTLLAELPELGCLNRKQIAALVGVAPLNWDSGLMRGRRIIWGGRADVRTALYMAAVTASRCNSVIRDFYKRLRAAGKPANVALVASIRKLLVILNAIIKNRVPWRPVLTQTP

SEQ ID NO: 445082 - protein, 349 aa, unidentified
MDFIKVKKQYYCGIDLHADVMYACVMTKSGKVVFHHEMPTDISRLLMHLKPYLSSIAICAESTFNWYWLSDACTNHKIPFFLGHALYMKLIHGGKAKNDRIDAKVMAELLRTGFFPPAYPYPETMRATRDLLRRRNYFVQQHAELLRHMKTLLYQHGYMNLPSFNHTNAADLRKTCSAYKLSKDAEYSLLSNIDAIEHLDAITSNLEQRILKTARNHDNHSLTLLRSLQGCGPIISLTILYEMHTIKRFKNAKCFSSYARVVKVERSSHGKRMASANNKIGNPNLHWAFGQLAISAQRFYKEIKDYTDKLIKKFGVSKAYTLLSHKFAVTVYYMLKNNTTFDVKKFVGA

SEQ ID NO: 445083 - protein, 436 aa, unidentified
MRSPPQESVLSIDFSLDRLDVGLQDAGGEWLWPHRAYPNNWPGFLALKQELLAALGQQAASLTVLGESTGLYWWHTYQQVAHDSELAAFDPQLLFLNPAHVKHFRKALPERDKTDMLDVALIARYYQATGSQEPQTMDNRYGRLRFLSRAYNRLIHTLAAEKAFCQATLYIAASEYQRRRPFSNVFGATSQKVLEGYPDVAMLADMPLHELVDQLNVFSQGKLSDPRDNAQKLQQVAQDSFPLPDELANIVQTILQHTLELVRFLENHKKTYRHLLEQELARFPEAKVALAEPGLGPVLVAGCLSEIGDTRRFTTGSKWDQRRKRYRPRTYRDGQAAVAKLAGLWWPRRDSGRSQAEERRLSRERNPYLRFWFVQAANSLRRYRDDYAAYYHRKCRESNKHAHKRAQVLTARKAVRLVFALLHKGQRRCLEEVADR

SEQ ID NO: 445084 - protein, 336 aa, unidentified
MSVYVGIDVHRKRSQVAVVTEDGKVQLNKNVVNGSEPMLRLIGDLPSGTPVAFEAAFGWSWLADLLEDYGFDAHLVHPLRCKAIASARLKNDKVDAAILAQLLRADLLPEAWIAPADVRQLRALIRHRISLVRLGTQLRNRIHAVAADHGYDRSASYWTGPGRGWLAELDLPPSSREIVTDCLAVIDGLAPVIDRLDGELHARAKADPRVKVLRTLPGVGEFTALVILAEIGDITRFPSARKLASWAGLTPTVRGSDLTVRHGHISKQGSAWLRWAMNQAAQTAKRSPEFAATYSAIAKRRGKKIATIAIARKLLTRAYHLLADMEAIDPATPPRP

SEQ ID NO: 445085 - protein, 367 aa, unidentified
MKKVSTVAVKASRKISPSKLTVGLDLGDRCSWYCVLDEAGRVLLEQRVSTTPKALREVFGGMPGSRIALETGMHSPWVSRLLSEVGHEVIVAHARKVRLIGESRKKDDRLDAQTLARLARIDPELLCPVKHRTAKAQADLTVIRARAGLVRARTALVNTARGLAKSYGERLRGCNVRNMNPEKAEGLSPELQAALQPLLGALESLSEHITEYNERIEKLAKESYPQVALLKQVKGVGTLIGLTFLLTLEDPRRFRKSRDVGCYLGLQPGRRNSGQSQPQMHISKEGDPYLRTLLVQGAQHILGPFGMDCDLRRWGLKLAERGGKGGKKRAIIAVARKLAVLLHRLWVSGDVYEPLHNSRQSAMPAAA

SEQ ID NO: 445086 - protein, 410 aa, unidentified
MGLYCGIDWATDHHDVAVVDGDGRVVARGRVGNDAAGFIQLLTLLAEAGDTAKHPIPVGIETDHGLWVAALRETGRVIYPINPLAASRYRTRYVVSGAKSDATDAVLLANIVRIDRDAHRPLPADTELAQTIRVLARAQQDAVWARQQIGNQIRDLLNDFYPAAIVAFAELPGGGLARADARAILAAAPTPAQAVKLTPARLRRLLVKAGRRRELDRDIERLRAVFADTYLHQPPMVENAMGIQLAALLRQFDAACAAAEELAEAAIAHFEQHPDAEIITSFPGLGNLAGARVLAEIGDDRARFADARGLKAFAGSAPITRASGKKTIVLHRHIKNRRLAAVGPIWALAALRHSPGARRHYDARRAAGDWNHQAQRHLFNRLLGQLHHCLQTGQLYDENKAFPPPLLHAA

SEQ ID NO: 445087 - protein, 385 aa, unidentified
MTFAATVPSIIPAHFDIFAGLDVDKKSMATTFIDHGTLFKSLRLPYSSTQLLNYVDKHFPGQRIAFAYEAGPTGFGLHDDLVAQNRTCLVVAPSMVATAPGNRVKTNRLDSKKLSVQLRGGELRGIHVPGRSYRELRHLVQLRDTQTRQLTATKCRIKALLLYEGIAFPETSERWNAQAIAGLRTLPCSSEVRFKLDHLIGTLYFHFNSAAVVQKRIRQFCQNDPELRQSISLLTSLPGVGWITAAHAVARLGDWRQIKNVRQIAGFLGLVSSEHSTGDKENRGAITRSGDSRLRNKLVQCAWVAINKDPELRAFYRSVFVRQPKKVAARKAIVAVARKLTIRMYVVLKEQRPYIIRPDSSIAPSTAEETVGPRERLDGAQNEQR

SEQ ID NO: 445088 - protein, 406 aa, unidentified
MDVVYSHVCGLDVHKKNVVACVITPEGKEIRTFSTMTDDLIALKEFIKSKGCIIVAMESTGSFWKPIYNLLELENLKILLVNAKHIKNVPGRKTDVKDAEWIANLLRHGLLKGSFVPNREQRELRDLVRYRKSLIEEKSRELNRIQKELEGANIKLSSVVSDINGTSSRAILQAIINGEEDPEVLAELSQGKLKNKKEDLKRALKGLINDHLRKMLEIQLRHIDYLDEEIQRLDEEIKNRMLPFEEDLALLDTIPGVGRRTAEQIIAEIGTNMDQFPSAAHLCSWAGLCPGQNESAGKQKSARTRKGNKKLRSVLVEAARAASRSKDTYLSSQYHRIAARRGSNRAAVAVAHSILTIVYHILKRKQPYIELGPNYYEEKRRDMVIRQSLKKLESLGLKVTVEMVAS

SEQ ID NO: 445089 - protein, 345 aa, unidentified
MKNTTQIDTIPETFLGIDVGKAELFCHLLCSSSSQSAKFTNTLPGIKSLLNWLKKNTELSTTSACLEQTGHYGKLVSKALYESSLEAVYLVNPRRIKAYGNQKLRRNKSDTADAKLIANFLRSEHLELIEWVPQSTDREKITEFNRYVESITQDAAKLKTKCEAISDPSLLRSLKRRIKFLEKERADIRKRINVLISKSEELTSQQTLLASIPSVGEVTQHTLIAELPDIKQFKNARQLAAWSGLTPQHYESGTSGRTQTPITKIGSSALRRALFMPAMSACTKNPILREFGDRLQKNGKKPKQIIIAIMRKLLHQIYGILKSNQPFNPNKKGFISAAISQEIRA

SEQ ID NO: 445090 - protein, 387 aa, unidentified
MPQPNDLSRSLVTLEQDSTLIAVIEMGQSSWLVAGIVPGIERQPLKKLAADQDGLLQLLHRWRKEAAQAGHPIKRIAVAYEAGRDGFWLARWLRAREIEAYVIHPSSVPVSREHRRAKTDRLDTELLKRAFLGWLRGEPKHCSMAAIPTVEDEDARRPSRERESLVGECTRIVNRVKANLARLGIRGFRPRLAHAPKRLETLRTPEGTAVPANTLAELQRDMAHLRFVKQQIKEIETARAKRLEQASGGGRDAMVRLLARVVGIGIETADMLVQEVFSRKLRDRKAVARYAGLTGAPDESGQKRRERGLAKAGNARVRHAMIELAWGHLLHQKDSALAEWYQKRTVDARGGTRKTMIVALARKLLIALWRLVTTGEAPAGLLLRPAA

SEQ ID NO: 445091 - protein, 395 aa, unidentified
MFIVGIDVAKRSHEVCMITSDGQTVQRPFSIRNNCTGYNLMLEKIRKHTNIKSQIVFAMESTAHYWLALFTRLRKDGYHVILLNPIQTSAMRDMFIRKIKTDAKDSFIIAELIRFGRYAESNVAQDRLLALKELCRNRFYLVDMAGDLKRKLIALIDRVFPEYEAQFDTIFCKSSVAVLKKYPTPQKLSNAHLDKLTELLWNSSNGHFGEWKARELKELARNSFGVEDCDGAYSTLILLMLDQIQSLSGKADALEKEISRLFQSFDTTVTTIPGVGPIIGAVILSEVGDISRFSSADKLAAYIGVDPSVNQSGEFQAAHAHMSKRGSPYLRRCIWMASQVAVQRDPMFRAYYEKKAAEGLKYMTIIGHVTRKMTAVVFAILRDHKVYEPVLPTAA

SEQ ID NO: 445092 - protein, 416 aa, unidentified
MDIVFPCCAGLDVHKNTVVVCVRRLRTGAQRKTDSVVRAFGTMTEQILALADWLAQEGVTHVAMESTGVYWKPIWNLLESGPYEMLLVNAQHIKQVPGRKTDVKDCEWIAQLLHCGLLRRSFVPEPPQRDLRELTRQRRQLIQAKAAVANRIQKILEDANIKLGSVATDVLGKSGRAMLRAIIAGQDDPVVLAELALRKLRAKIPQLRAALRGGVTENHRFLLKLLLEEVTQMEAWIEQLSQRIVAVLPVPFAETVQRLATIPGIEERAAENILAEVGVNMEQFPSVGHLASWAGMCSGNRQSGGKRYSGRTTKGNLWLRATLVQVAWAASHTKGTYFAAHYRRLAGRRGKKRALVALGHTILTVIYYVLKRKTTYEELGADYLERHDKDRVLASLVRRLERMGHKVTLEPCEPAA

SEQ ID NO: 445093 - protein, 484 aa, unidentified
MVKSKHQAYKKRQHIQKVKGRRFTDEIRNLDLEKVLVVPIDGGKNSHKALVANYFGDIVKSPFEFTNSANGVKIFDSILKQISSSIAAQKVIIGLESTGHYHENLYRKLIDLGYDVAIVNPTSVYAQRQGQLNWCKTDEIDLCAIGQVLIDNQATETRLAEGLYYNLKHLSRLHRDEVRKRAQLKIKIRVLCDHIFPGLQGAGIFSDFWSKSLILLLENYPTPCSVIRLGTKRLARFFKKHNTKLGIHTAERLVIVAKNALSVRDVNLEAHLLNLKFKLSDLKRANEKIQKLHVELARYLVQTPGILLLSIKQVNVPSAAEYLAEVGPLEQAGSAKKIIARAGLNPSRFQTSQYEREETPITKHGSNFLRNICLIISQNLIGVNPHSLQPHNPYFREFFDRLIQKGKNKQVAKVACANKFVKVSWAMMREKTLFTPPTWRKNNVSDDPLSKLQRFLSLNQAEELFEELAQIAKEQLPPLYHALL

SEQ ID NO: 445094 - protein, 410 aa, unidentified
MERVIERGAALDVHKKSVTACVRVPGPEGGRRQEVQTFGTTAAALLALRDWLSAHGVTHVAMESTGVYWKPVYYVLEELFTCLLVNPAHVSKVPGRKTDVRDCEWLAQLLEHGLLRGSFVPPVAIRELRDFTRYRAVLVQDRTREANRLHKVLTDAGIQLASVASNVLGKSGRAMLTALVEGTTDPEVLADLAQGKLRRKLPALREALAGRFRKHHALLVSQLLAHLDYLDEALEDLTAQIEEALGPFASEAARLDAIPGVGPRTAEVVIAEIGVDMRQFPTARHLASWAGLCPGTHESAGKRRPVRTRKGNRWLRAALIEAALAAVNVRDSALAGRYRRLVRRSGHKKAIVAVAHKMLTTAYLLLAAGRTYQELGAGYYDAQRKDRDVRRALQALERHGYRVSLEPVAA

SEQ ID NO: 445095 - protein, 351 aa, unidentified
MLIIGCDYHPSVQQIAWVDTETGETRERRLKHSDGEAERFYRELKEKGFRVRVGMEATGHARWFERLLAELDFELWVGDPGRIRAKQVKKQKNDRRDAEHILQLLMKDDFPRLWMPTPENRDVRQLVLHRHRLVGMRTRVMNQLQAIAMNEGVRRKRGLWSKQGRAQLESLSLPPWTSRRRQELLELLDRFDPSIDQLSQAIEQEAEEWPEVKRLLTHPGVGPITALAFVLVIGTPHRFRCGKQVASYLGLVPSEDSSADRQRLGHISKQGNAMLRHLLGQAAQSVARCDEQWRGQYVHLAQRRNRAIAKVAMARKLAVRLFWMWRKGWDYQQLKKFGSHVGQLVKSHGVE

SEQ ID NO: 445096 - protein, 347 aa, unidentified
MKLFIGLDLGLNKTAICAIDEDGSNVLQVTARSEPAEIIAKLSKLKGEITQVGLEARPLSEWIYGALQDAGFPVFCLETRHTQRFLSTRPNKTDRNDAHGIATMMRVGHFKPVHVKSRRSQFVRSLLIGRRQFMTAMLQIENTIRALLRTQGLKLGKVHRCQFSERVKELCNEEPMLLPAIEPLLTARDEMRTQMRKLNNALERASRADPICKLFQTIPDVRPLTALAFKATIDDPGRFKRSKLVPAHLGLTPRVYQSGEIDRSGHVSKSGDKLLRYLLVEAATSMMLVSKKWCSLKAWAMKVAKRSGTAKAIVALARRIAIVMHQMWVTGECFRFGKDDQPGAVTA

SEQ ID NO: 445097 - protein, 353 aa, unidentified
MNESTTIGLDLAKNVFHYVGCDRGGREISKKQLKRKALLSHFANLPSCLVGMEACAGAHQWGRQLQAMGHQVRLLPPQHVKAYVRGNKNDYNDARAIAEAVSRPGLRPVALKTVAQQDVQALHRLRSGQVGARTALGNQLRGLLAEYGIVIPEGLAALRRALPEILEDAANGLSDVFRPLLERGLQQLRELDGHIAYYTGLIERQGREDEAVRRLQTIPGFGPIVASAFYSLVGDGQGYRRGRDVAAALGLVPAQHSTGGKAVLLGISKRGDRYLRCLLVHGARAVTRQAADKDDPLSTWLNRLVATVGFNKATVALANKLARIGWAVLRHRTAYQPAKACAVAEPTAVAAAA

SEQ ID NO: 445098 - protein, 415 aa, unidentified
MLKIVYPICCGIDVHKTFVVATIASTDSRNITTYQTKRFSTFTRDLRALDLWLSDNQCVDVCMESTGKYWIPVYNILEPSCRITLAHPKYVKAIRGKKTDKKDSIWIADLFKHGLVPGSFIPPADIREIRDLLRYRSKLVSFASSEKNRVQNSLTVSNIMLASVVSDTFGKSSSAILQHLLKHPGDQDFDFRPLLHGSMLKKQDEIALAIDGTINETQAEKITLCLRHMNGIEGYIAQIEATALRLAAAYSGALRIIESTPGISRLAALIILSEIGADMSVFHSAKHLCSWAGLAPSNDQSAGKKKSVRISRAGVCIKPMLVQCALAAIKDKSFPHYRARYEAIKLRRGHKRALIAIARMMLTAIYCMLSTGELFNSVIYEQAKCKPGFVASSEEHAVKLLQRLGYSVVKMPESA

SEQ ID NO: 445099 - protein, 363 aa, unidentified
MEHIAIDLGAKESQICVRSADGEILEERRIATRPEKLRCYLAGRPNSRVILETGAEAFWVAEIARECGHDVRVVASMLAPSLGVGRRGLKSDLRDARVLSETSCRVDLPSVHIPRVETRRLQSRLAMREALVRNRTQLLNVVRGYLRTIGERAPKRTAEGLIVELREKLAYAAEQLQPVLESIEVLNRSVKTFDEELKRLASKDKLAKRLQTAPGVGVVTSLRYMATLDVANRFANGAAVGSYLGLVPSDHSSGQSQRRGSITKAGSPAMRAVLVQASWAALLSRRHRNDPMMIWAREVARRRGKKIAVVALARKLSGILFAMWRDGTDYDATRAAKVIPAAPRRLVLNEDSRRSRHPESVPA

SEQ ID NO: 445100 - protein, 408 aa, unidentified
MIYCGIDWAERTHDVALVDDDGKLLAKRHITDDAAGYKILLDLLAEHGDTEDIPIPVAIETSRGLLVAVLRTGKRQVYAINPMAAARYRDRHSVTRKKSDPGDALVLANILRTDRHAHRPLPQDSDLARAIAVLARAQQDAVWNRQQLANQLRSLLREYFPAAIDAFLHWQNGLCRPETRVLLELAPTPSRAARLSLAQLRSALKRAGRQRRIDADAERIREVLRADYAHQPPLVEDALGKQMLGLLRQLDAACTAADQLAEAVEEAFPQHPDAEVILSFPGLGTQLGARILAEIGDDHARFTTARGMKAYAGASPITRASGKKSSITRRWVKNDRLNHVGYLWAFASLTASPGAKAHYDRRREAGDWHAAAQRNLFNKMIGQLYCCLQKHILFDENLAFPTQLLEAA

SEQ ID NO: 445101 - protein, 397 aa, unidentified
MMVDYAVFCGLDVGKDTHHATALNEAGDRLHDGELPQDEARLRALFTGLQKHGPVLVIVDQPATIGALPIAVARDCDCQVAYLPGLAMRRIADLHPGQAKTDARDAYVIADAARTLPHTLRRVDVGEEALAELKVLVGFDDDLAGEVTRLSNRIRGLLTQVHPALERALGPHVRQKAGLALLARFGGPDGMRSAGRRRLVSTASKASARAGAALAERVWEALGEQTVTVPGTGAAETVLPRLARSLAEVLDQRRQIAVEVEKVLDAHPLAGVLTSMPGVGVRTSARILLEVGDGSSFPTAGHLAAYAGLAPVTRRSGSSIRGEHPPRSGNKQLKRAFFLAAFAALRDPASRAYYDRKRAEGKKHNAALICLARRRCDVLFAMLRDNQPYQPQVPTAA

SEQ ID NO: 445102 - protein, 318 aa, unidentified
MPGTMTYVGFDVHARSTHAAAIDVMTGELTRMRFGAGVEAPVEWLTKLAGPVRACYEAGPTGYGLYRAAVAAGVGIDVIAPGLTPRGRGDRVKTDRKDAELLARCLIAGSLHPIAVPSMQVEAARELTRAHDACRRDLMNARHRVSKMLLRHGRVYPNDSTWTQQHRRWLAAQQFREPMSQLTWADLIASVDGLTARKKTLAERIGVLATDPAWWPTVARLRAFRGVDTLTALAVHLELGADWARFEKAHRVGSWLGLTPSRGQSGEHDYHGQITKTGSQLARRLLVEAAWHKCATRRSVVSPVQPGRTRRKVRGSDG

SEQ ID NO: 445103 - protein, 401 aa, unidentified
MKDSGKRYIGLDVHKHYLIAVGVDDNLNVVLPVRRVEFPYLEAWMKKTLTKQDEVALEMTTNTWQLYDELCAYAGSVLVVHPPHVALITRSLVMNDKIAASILARLLAKGLLVGVWVPPQEIRELRGLVAQRKKMTGLATQAKNRLHAVLQRHHWLPPEGNPFHALQKKWWLTLPMGPLEKVNVQSDLDTLQFAEKQLMQLTSMMAEIANQNEEVTRLLQLPGFGVVTAVTVWGAIGDIHRFEDAQHLAGYAGLGTKVHDSGMTTRTGRITKAGRRDLRVVLTEAAQVAANSHPHWKAELARLQPRLGRNKAIVAIARKLLVAVWYILAQRKTDRFAQPEAIAQKLLKFAYQLGKETRPKGQSAAQFVRQRLEALQLGQELTSIAWGSKKPIPLPPSTKTK

SEQ ID NO: 445104 - protein, 272 aa, unidentified
MKKLFIGIDFAKEKFDAAIIEACGLKEFGNREYGTFTNDKKGYRQFFKWVKTNADKSVENEWLFCGEDTGSCSLGLSKWLYGKGLDIWIENAYSIKHSSGIQRVKSDKADSSMIAEYAWRHQDKAVLFEPLSESLSQLREVFLYRHKLVQQHIAMDVRKQDKEAAEPSKAISFIKRKSKHLMSEIDNAIKECDLMIDRIIESDAELKENYAIITSIKGVARQNGACLLIFTNNFRRFDLDARKIACYYGVAPFGKDSGTSIRLKQAISPTSS

SEQ ID NO: 445105 - protein, 404 aa, unidentified
MYYVGIDVAKEKHYVCILDDTNEFAVKPFWIYSDVLGLRELLKRLADLSLDNDDFIIGVESTGAFSENLYAYITDADYKVILLNSYQTAKYRDFSTMRKVKNDAIDAYVIAELLSSKKYKESHISSEDYHSLKVLGRLKRSLDDKIKTVKREISTVMATVNPEITLVFKNIFTKTALEIIKAYPTAVELQKATPKKLTQLFRHIQGNNFNDEKAKYLIELAKSSIYGGRANEARALMIRTNIKILELLSQEKLQIEAKINALIESGISKELDAPIENLKSIPGVSDKTIAAILGECGDLRRFTSAKALIGYLGLYPTQYQSGNSLSVGTLAKRGIPIAKHALYMAAVSSVLHNQELKKIFRDKVSAGKSKKEALIIISKKLATMMYSIFKYNQPYDAKRVLISK

SEQ ID NO: 445106 - protein, 411 aa, unidentified
MELLVARCAGLDVAKDEVVACVRLPDGRGGRAQEVRTFQTFTSGLEALADWLTAEGVVQVVMEATGQYWKPVWYVLEEAGLELLLVNARHVKILPGRKTDVCDAAWLAELLEHGLLRGSFVPPAPIRELRDLTRYRKRLIQAHASEGQRIQKTLEDAGIKLDSVAAEVLGVSGRAMLAALVAGERDPGVLAELAKGRLRAKLPQLRQALRGRFGAHHALLIRLGVAHLEQLEASIAELDTQVDRVLAPFAAARDRLDTITGVGKRAAECMIAEIGTDMTVFPTAGHLASWAGRCPGNNLTGGKRRSGKPTKGNRWLGEVLIECAWAAARSRDTYLSAQYWRLARRIGKKKAAVAVGHSILVIAWYLLTDNCDYRDLGGDYFARRDTDRQRQRAVAQLQALGYRVVLEPLAA

SEQ ID NO: 445107 - protein, 394 aa, unidentified
MKLVGIDVGKNSHHFCVMDKETGEFNVAPSSFSNNKEGFDFLINSLKTYSKKSILIGMEDTGHYHVALLKFLLSNGYTVALINPKTTDLTRKMEGGIAKNDKLDTITICDVLDTPERKKQYRITKVDRFDLYEQRQLTRHHHNLKEELNVYCNRLQKSIDLVFPEFNTLFSSKYSIVYMNLLKTFGSAEAIASTDIRTIRKCFEIKGRGNRISLTPEKLKECAKNSIGISSEVETIQIKHLVSQITLIKEQIAEIDKKIEEFSITNNSPILSIPGISHFSGTSILAELGDIGNYSKPSQIIKFAGVAPYHYESSQYNAQHTGITKKGSKYLRKTLYQIILTVINNNPVFKKYYRLKISQGKGHRCAHGHCIRKLLRIIYHLLETGQSFDPALLR

SEQ ID NO: 445108 - protein, 322 aa, unidentified
MQGKVPPEQSAPRVYVGVDVCKDWLDVYLHPIGHQFRIASTPDGLKRLKRHLAGLQVVVIVMEATAKYHRQPHRTLSAAGFAVAVVNPLRSRLFAEATGQLAKTDRLDARVLAILAESLEPAATPPVAEALAALQELVRARAAAIADQTALTNQRAASQTAFLKAELGRRLKAIATHIARLEAEIDRRIASDPALKRRYEIVRSIPGIGPVAAVALIIGLPELGTCSGKAAGLLAGLAPLACDSGATAGQRRIRGGRAHVRTALYFAAIAAARFNPGLSGFYRRLRAAGKKPKVAITAVMRKLVVLANVLIREDRLWQAHQA

SEQ ID NO: 445109 - protein, 372 aa, unidentified
MLHAGLDLSRKRLDYCLLDERGRRVEVAAAPPDLDGLAGLARRVEQRHGRVPVRAAIESMNGARFVHDTLERLGWEVEVADAQKVKGLAPLACKTDKIDAWVLAELSRRELVPAIWLPDFELRAERERARFRLFLVRKRSALKHRVHAQLLAFGHACPVSDLFGRQGRELLERLEFPEPWRSGVLAAVAMIDDLERQIAAIDRELRELGADHRYVPLLQSVPGVAWVLGYTIAAEIGDIRRFDSPAKLCGYTGLCPRVYQSGAKDRRGQLTHAGPRYLRWALVEAATHACRHPAYRERYQRNKRRLGRQRGAKVAQVDIARKLAEAIWHMLTRNRPFAPAGATPPLTAYRRSFMRCATGASSHSTWSSPTRR

SEQ ID NO: 445110 - protein, 327 aa, unidentified
MFYLGIDVSKAKLDCYLLIDPDAPKRKNKSVANSRSGVAELVSWLARQGAPATDVHAVLEGTGVYHEQAAMALYDAGVTVSIVNPAQIRNFAQGLAVRTKNDGVDSLVLARYGVMVRPAAWEPPPPEARMLQALLSRREAIAQDLQRERNRQEKAHATETPTIVCRSIDEAILFLEKQLKQLQQDIDDHIDRHPGMKEDLRLLQSIPAVGPQVGNNMLAVMATRKFDSAEQLAAYLGLVPVERQSGTSVLGRSRLSKAGPARIRAVLYMAAVVATRHNPHVKAAYQRLLTRGKSKMSALGAAMRKLVHLCFGVLKTRQAYQPDYAGT

SEQ ID NO: 445111 - protein, 410 aa, unidentified
MENCKVIVGIDVSSKDSTVCVLMDKVRQGKTFKISNDMVGFQQLYKRLRLYSVIPLIVFESTGVYSLSLQAFLEKKHIQYLKLNPLKAKKLMDNNLRHNKTDQVDAYRLALIQFNAPQKLLKPQSRAYHEMQNASRYYEELNKAMVVAKNQLHRNLQTTFPQIENLMCHPTGKIYWSVVALFPHAQAVLDSNKEHILGELETISGLSQKKAEYLTQRLISLARLTCAYDNKDSIVIRAIQRNIACLFSLDQEKKEALAYLYKLASKNQADTRILTIYQSIPGIAKTTALRLLAELGDLRRFDSPNQIDAFIGIDPGIYQSGELDSHLSITKHGNSIARKIMYLSIGQMESVKTTQPCHITDYYDRKKSSQSRGFKKIAIASVHKLIRTMYALVTKNQLYDYNVATRNQRL

SEQ ID NO: 445112 - protein, 424 aa, unidentified
MNLTQNDRLKQVTSDTLIVGVDVGSQTHFCRAFDWRGFELSRRVFKFSNTGMGFLTFLRWTEELMNKTEMKKVIVGCEPTGCYWLTFQKFLQDHDILLVTVNPFTVNRSMELDDNSPEKSDLKDPKTIALLVKDGRFSTSYLPSGVYAEIREASVCRDQIMKQHVRLSNQIQGWIQKFFPEYFECYADWDSTSGLMLLREAPLPQDILKIGAGGINQIWRNAKVRAVGIKRAQTLVEAAQNSVGLEAGEAARLEIWVLVNDYILKAEQLKRLDEYLEEKVKEVPNVEKLLAIKGVGMSTVIGFIAEVGDIGRFTDPKQIQKLAGLEIVKKSSGKKKGQPRISKRGRRKLRRTMYESVRALMTWSPAFQDVFLYYRNRTKNPLGGMQAKIAVACKAIRIFYVVLQTGCDFDEEKFRKDIIRPEAA

SEQ ID NO: 445113 - protein, 443 aa, unidentified
MIELHLGGCKQNNQTRRFIMNLTQNDRLKQVTFDTLIVGVDVGSKTHFCRAFDWRGFEISHRVFKFSNTGMGFLTFLRWTEELMNKTEMKKVIVGCEPTGCYWLTFQKFLQDHDIQLVTVNPFTVNRSMELDDNSPEKSDLKDPKTIAHLVKDGRYSTSYLPSGVYAEIREASVCRDQIMKQHIRLSNQIQGWLQKFFPEYLECYADWDSTSGLMLLKEAPLPEDILKIGAGGINQIWRDAKVRAAGIKRAQILIEAAQNSVGLEAGEAARLEIWVLVNDYILKAEQLKRLDEYLEEKVREVPNVEKLLAIKGVGMSTVIGFIAEVGDIGRFTDPKQIQKLAGLEIVKKSSGKKKGQPRISKRGRRKLRRTMYESARALMNWNPTFQDVFLYYRNRTRNPLGGMQAKIAVACKAIRVFYVVLQTGCDFDEEKFRKDIIRPEAS

SEQ ID NO: 445114 - protein, 333 aa, unidentified
MKILKQSIGVDVSKNDFKVCLGIINDGLEKTIVYESSYANDKKGIKKFIKDAATKTSHPIPSLFIMEATGVYHQELAYALAANHLSVAILLPNKAKSFAKSINIRAKSDVIDAKLLCQMGLERNLSTWQPPEAIFATLKTLTRERETIVLQRSKLKNQLHAYKTAFIKTDKTISRIKKHILFLDKQIKDTEIDMKLLIKHDQRVETKIKKISKVKGLSFLSIVTILAETDGFNIIMNQKQLIGYSGLDVRVDQSGEKNTKGRITKKGNSHLRKALYMPALNACRTNKTMQVFYTRLNERQKAKKQGIIAVQRKLLLLTYSLWKTDQDYLENCA

SEQ ID NO: 445115 - protein, 340 aa, unidentified
METRYIGIDLHRNRFTCCIRLENERTYVTEWELEDLGKFIKKLRPSDEVAVEITGNTRLFYDAVVEHVARVVVVNTNQFQVICQSVKKTDPHDARALALYLSKDMLPEVRMKDKEHGQLASLTQTRDTLVKLRTALKNKVNNILSARGLNLAKEALSSEKKLAEVLELPFDEIVRIELRVIVEQIRSLNKSIAELEKTIGEEGSKLEGHKGLSSIKGIGKITGAILLSVIGDVNDFADEGHLASYFGIVPRVSNSNETERSGRIHKRGTKLGRTALVQSALIAANYSPYLKRFYEQVKARRGAGKAIIALARKFLGIIYRTLKNKWVFKDFPNFVLAEEA

SEQ ID NO: 445116 - protein, 343 aa, unidentified
MTKLNVIGVDLAKNVIQVSVLSPTNRELRNSALTRRKFSEFLGRQRASLVAFEACATSHYWARVALRHGHEVKIIPAKAVFPFRQGHKTDENDALAVAEAARRPNVKLAPLKTVEQQGMQAVQRSRELLVHERVSLSNHLRGLLMEFGIVIPQGFASLYRLLPEILEDGENELPDLYRPTLNLLYGRLCDLREDLERLNGEMESLVQNNPMCQRLTALEGIGPIGSVLLYATLGTGEAFANGRQFSAYLGLTPKQFSSGGKVNLVGISKRVANRRLRAVLIQGARAYVYHMKEPKTTKDRWLWAIVERSGKCKAAVALANKNVRTAWAMLTQNTEYQRYPLAT

SEQ ID NO: 445117 - protein, 425 aa, unidentified
MLAVGIDWSEEFHLVALGRPGEGVFELRRVEHSPKAVDALVERIAALEPDPAEVRVVLETRHGLLVERLLDAGFVVVPVNPDLVARRRGPAKKKDDAEDARIACLLALDRFERLRPLIPHGELAGELRSIARDDERAARDQRRLLNRLRQDLLATFPAALAIAGDDLGAPTFLRLLERWPTAEALGAVSHDELAAFARERRHGWPDRFADTIAQALTGDHFQPRAYLVRAKADTIRLSASQLLAIGSQRRAWERRMGELLLGAPRRGRARKPLEGERGQSFPGGEVYLSFPGLGDRLAARVAGEIGDHPSQFESPNALQCYAGKAPVTRRSGKSEFVVSCRLAYNHHLGDAVHQWAFCSLRSSPWAREFYDSKRTAGKGHNAALRTLGNRWLEVLWHCLQNGLQYDEAVHAANRNRALQPLPKAA

SEQ ID NO: 445118 - protein, 410 aa, unidentified
MEVIVERVSALDVHKAQVTACVRVPGADGVREPHLAEFQTTVRGLLALRDWLAAHRVSQVVMEATGVYWKPVWAVLEDDFELMLVNARHVKQVPGRKTDMSDAAWLCQLAEAGLLRANFVPPKPIRALRMLTRYRKTQVAERQREANRLHKALEDTGIKLDCVASDILGGSGRAMLGALVGGTTDPVMLAELAKGRLRAKIPALREALEGRFDALHSLLIGAILAHLDFLDEQIDSLSDAIEEQLVPFAPAVELLCTIPGVGRRTAQNVLAEIGTDMTVFPTARHLASWAGQCPGNNRSAGKQRSGKTRKGSKWLNEALKDAAIAATRTKGTYLQSQYQRLRPRIGHGRAIGALKNTIICACWHMLSTGETYRDLGADFLARRNPQQATRRLIAQLERLGHNVTIQEAAA

SEQ ID NO: 445119 - protein, 411 aa, unidentified
MLYIGIDWAEKAHRVCIRDDKTVHAEFEIPNSPEGVAQLLKKAAAIEPDKRDVLFAIEATDGPFVDAILDAGYTLYPLNPKAVERYRDRFHLARTKTDSIDARVLADILRTDRQVYQPLKPDSDATTMIRLLTRDRAELEKTQTMLVNQLRATLLHYYPVAIDLFSDLASPTALAFLKAYPSHADARRATVEELEALLRQQRYPGAAKKAEELYNVLQSPGFAVRPAMVAAKEMLATALIAQLQALNEQISDYKKEIEALLKEHPDSNLFTSLPGAGTYLAARMIGDLGDDRDRYPDVRVVQTRAGTAPVTRQSGKSRVVVFRRACVKPFRETMHQFAFCSTRWCSWAKDYYLGKRAVGKTHNEALRALGNIWLKIIFAMWKNHVPYDEVRLMAARLAAPQPNTSPAQNVA

SEQ ID NO: 445120 - protein, 436 aa, unidentified
MSPKTLFVGVDVAGEGLDVFFMDQDERALSSPHHYPNLLEGFRLLRQDTLAFSHLLGKSVPIVVGFESTGNYHKNLEAFFKRRKGKRFTVRTLNPYQVKQFRKAHFTLSSTDRINAKAIAKFLKVFPSSSSFSPSPVQLRLRNLTRFRRTLVEERTRYVNRLRKNLRLSYPGYRKLVGKNFPFSFLAFLCSYTSLEDVRKDPPKKTSWRKYTSLFLLSKKEEGYPSFQEEVKWVAERIIELREQIKSLEKEIEKVIDTFYPDHILLSIPGIGKITCATILGEIGEKVDRFFTPKDFIGYIGLYPVVFQSGKNKIFFKMTWKGNKHLKMALLLATASARCNNPHMRNFYNRLRARGKSKKAAGGALARKLATLVYAILCSGKRWDEGIALEGIKKGNEMAPQNFPTIGGERAGRPSFNSTLKSTQRCKGKSRSTCQR

SEQ ID NO: 445121 - protein, 468 aa, unidentified
MSRRSRAVPPAETAPASVPLPPESSPLAQAPVLLGLDVSQANVVACLLLPDGREVTPRFVVSNNQPGAESLAERLADLAEQHRFGRVRIGLEATSLYWWHLASFLKDTPRLSHLRPEVYLFNPKLVHGLKKAYSDCGKTDYVDAWFIAERLRIGRLPAPFAVDLVYAPLQRLTRFRSHLAQTLAREKNYFLTLLFLKFSAFTQVEPFADSFGVTSAALLEEFTAEELVQAPLEQLVTFLQAKGRGHFAHPDELAETLRRAANDSYELEHALKEPVSLILAMTMATIRTLKGQLQALDKTIAQELAALPAERRIIESIPGLGPVYTAGILAEIGNIHRFNNEAAVAKQAGLVWHPYQSGEFTAEDTILAKTGNAYLRYYLVEAANNVRLHCAEYRAYYQTKFAQSPKHAHKRALVLTARKLVRLIDALLRAGMAYRTPERRQDREEAHILPYAGRSGMAQHARLGGAIR

SEQ ID NO: 445122 - protein, 400 aa, unidentified
MRAVFGIDVSKASSEVAILVNGEKVHGYTISNDALGFARLLGDLKTVHKPEIIFEATGVYSRRLQAFLEDNGYAYTRLNPLEAKKQLDSLRVRKTDQIDAEKLAQSQFVLNRKPTYVQEEVYQELRDLSRFYQNLTEDIVRAKNRLHKVLQVTFPELETILSTPTGEQYGNLVVAFPCKDFVLDLSKDELSESIRQSTSKRISDKRVAYLVEKLTALANQSYCAVKKTSPIMEEVRYYAKELLRLSEQRQTVLDQMVELAQPLPEYDILLSIPGIAETTATSIIGELGDIRRFQSANQINAFIGIDLRHYESGNFLAKEHITKRGNPYARKILFKCIHNIASASNTNPCHIADFYEKRKRQSQTTSTKPHTIASIHRLIRTMYYLITHNKLYDYRSTRNQ

SEQ ID NO: 445123 - protein, 381 aa, unidentified
MIVIGTDTHKRTHALSAVDEGTGKVRGARQIDADEPGHLAAVKWARGLDDERVWAIEDCRQVSRRLEQALLAAGERVVRVAPHRMGASRRGERQPGKSDQIDSLAIARAVVKDGVEQFPVAYLDEQAMEIRLLFDHRNDLVIERTRVINRLRWHLLELCPELERSLKRGSLNQSRVLDRVNRRLRQLGTGARVRVAREQVARIRSLTGQIDGLKRELRVLVEAHRPELLAEVGCGELTAALLIGRTAGAERFRSDASFALQSGSAPIPCSSGQRTQYRLNRGGDRQLNHALHIIAITRAHHDPATKEYLARKEREGKTKKGALRCLKRYLARRFHRILSLPALPPQCDRGELGEISPDPRRAEHSNVKPITAAPCPMPCLA

SEQ ID NO: 445124 - protein, 365 aa, unidentified
MSRSSSFAAIATLGIDLGKNTFHLIGQDERGAIVLRIKLSRTQLTQRLANIPPCLIGMEACAGAHHIGRQLQALGHDVRLIPAQYVKPFLKGHKNDYRDAEAIAEAVQRPTMSFVAIKTPEQMDLLALHRVRSRLVSQRTGVTHQIRGFLLERGITVRQGLAPLRQALPGILGSSSDALSLRIVHLIADLAEDWRRLDARMTDVSAEIEALAAQDEHCQRLMSVPGVGPIISSAVVAAIGTGAGFKQGRDFGAWLGLVPKQESTGDRTILGKISKRGNKYLRTLFVQAAHIVLVRRPHGARLGLWPWIETAGGRLHRNMLVIALANKLARIAWAVLARGHAYQPRSASHAVRGELAREPFRNGFG

SEQ ID NO: 445125 - protein, 368 aa, unidentified
MKKSNTCRQSSKGGKKPRNGSTTIGMDLGDKTSRYCLLDNDGEIVREGSVGTTKKAMNQLFGPMKHCRIAVEVGTHSPWVSRLLGGIGHQVIVANARRVKLISDSSRKDDRLDAQTLARLARVDPQLLRPIRHRSEEAQGHLMVIRVRAALVETRTSLVNTARGLAKSVGERLPPCDCDQMGVERMESLPVELQQALRPLLEQIESLTEKIKESDSRIEQIAGTKYPETALLKQVSGVGTLIALTFVLTIEDRERFRKSRDVGCYVGLRPKRSESGESQPELRITKEGDVYLRKLLVQGAHCILGRRGPDTDLKRWGLQLAGHGKNAKKRAIVAVARKLAILLHRLWVTGEVYEPLRNSRIRERQRAA

SEQ ID NO: 445126 - protein, 344 aa, unidentified
MYFIGVDHHKQASVMTILEADGRELKNGRVLNLREKVERVLAEYHPFTAVLEAGRSSYVMADLLRELGGEVKMANAAQVKAIAHARIKTDKRDSRVLAHLLRADLIPEVYQRGEWNRRAQRVMRLRAYWVAKQTEVKNKIRALLAQQREEIRLEVEKHEAGLFTLKGIGFLRTLRLEDPEQMVLDDLMRGYEEAQTHIRRTDGVVRALYGEMEEAARIDTVPGFATTLSVLVAVEIADIKRFPTVSDLHSYAGVIPSTYASGERTHHGRITKQGSAWLRWAALEAAYPAIKKDLSLRVLYNRLAKRKGANVAKIVVARRLLTIIYRVLTEKREYYPDKMKQSAA

SEQ ID NO: 445127 - protein, 382 aa, unidentified
MQASTVDTPTADYCGTIFVAIELSQKSWLVTLHSPDRDRISRHKLEGGDHAGLLGLIEKVRSRAEQKLGSPLRVASCYEAGYDGFWLHRLLLAAGIMNFVFDAASIPVEQRGRRAKTDRIDGELLLRTLMAHLRGEPRVVRIVKVPTVEQEDARRTSRERERLVKEQTAHTNRIKALLRLQGMAVGYPRRRDWLKWLAQQRDWQGQPVSPHLLAEVTREHARLLLVREQLATLEHAQAAQAAPVPEAMAARRDQLQRLKALGPSFATTLTSELFYKDFDNRRQVAAYCGLPPSPWRSGGIDREQGISKAGNPRARLKAIELAWLWLRHQPESELSRWFNTRTAEAGKRARRIAIVALARKLIVALWRYLTTGLVPAGATMKA

SEQ ID NO: 445128 - protein, 348 aa, unidentified
MNYYTGIDVSLECSSVCVVDASGKILREGKVASEPEALIAWFGSLGLPIERIGLEAGPLSQWLCAAMREAGLAVELLETRHVRDAFKAMSVKTDRNDARGIAQLMRLGWFRPVHCKSIEAQEARAVLSGRKLLQSKLLDVENSLRGILRGFGLKVGKTTARSFGGRVNELVAGHPALEVVAQALLAAHAVLLREFNGLDKRAARMARSHPRAKLLMTTPAVGPIVSLTYAFAIDDPKRFKSSKAAGPHFGLTPKKYQSGQTDISGRISKVGDASVREALYQAAHIMLTKPIKNCSALKSWAMRIANRAGMRKAKVALARKLAVILHRMLADGQPFNPAARTTTMTAAA

SEQ ID NO: 445129 - protein, 409 aa, unidentified
MERVIERGAALDVHKKSVTGCVRVPGPDGGRRQEVQTFGTTAAALLALRDWLRAHRVTHVAMESTGVYWKPVYYVLEELFTCLLVNAAHVSKVPGRKTDVRDCEWLAQLLEHGLLRGSFVPPVPIRELRDFTRYRQVLVQDRTREANRLHKVLTDAGIQLASVASNVLGKSGRAMLAALVEGTTDPQVLADLAQGKLRRKLPALREALAGRFRKHHALLVSQLLAHLDYLDEALEILTAQIEEALGPFATEAARLDAIPGVGPRTAEILIAELGVDMRQFPTARHVASWAGLCPGTHESAGKHRAVRTRKGNRWLRAALIEAALAAINVRDSALAARYRRLVRHRGHKKAIVAVAHKMLTTAYLLLADGRTYQEPGAGYYDAQRKDRSVRRALQTLQRCGYRVSLEPAA

SEQ ID NO: 445130 - protein, 430 aa, unidentified
MKSNTQNAKIEAITEKTLVLGIDVGSETHYARAFDYRGIEYSKKPFKFSNTEAGFVTFKEWILDIKERHEKDKVVPGMEPTGHYWFNLGKFLQDNEMKPVLVNPHHVKKSKELDDNNPTKNDRKDPKVIAGLVREGRYMIPYLPDGVYADLRTASNIRFQLQAELTRIQNRISRWFNIYFPEYKTVYGKPDAKSGMLILKAAPLPEDILTLGIDGVNQIWRDAKLRAVGKARAKTLIEAAEHSVGSKEGAVSARMEIRMLLEDYESRNTRLQEVMVLIEELVRKIPMAEKLLEIKGVGIRTVSGFLAEVGDISRFNNPKELQKLAGLALVENSSGKHKGETTISRRGRKRLRYLLFEVAMSLVAKNPEFRELHNYYTTRRLNPLKKMQSLMAIAAKLIRVFYVMLTKGVNYDPKKMVNDIKRPAVYLQTA

SEQ ID NO: 445131 - protein, 391 aa, unidentified
MIYVGIDVAKDKHDCFITNSNGEVLFKAFTISNNQDGFNFLYQRIESVMEDVTKVKVGLEATGHYNYNLLGYLIDKSLPTYVINPLHTTLYRKSLSLRLTKTDKVDARTIAYMLMSDVNLKSYSNTSYHNEELKSLTRYRFDKVKERAKLKTSVSRLVCILFPELEKLVPTLHMASVYALLSEFPGAKHVAGAHLTRLTNLLSDASKGRYGKDTAITFREAARASIGSNMPAKSLELKHTIKLILELGSEIDEIENEIKFIMDEINSPILSIPGINYRMGAMIIAEIGDFSRFDSPDKILAYSGFSPSTYQSGQLDSAYSHMEKRGSKYLRYALYNAAKYVCHWDSTFAGYLAKKRAEGKHYNIAISHAVKKLVRVIYHLVKSNQQYIKVA

SEQ ID NO: 445132 - protein, 339 aa, unidentified
MKVYAGIDLHANNNYLGVVDANGKRIFKKKLPNDPEVILGTLDPLRDRLAGTVVESTFNWYWLVDLLMDEGYRVHLANPSAIQKYKGLKHSNDVHDAFWLAEMLRLDILPTGYIYPKEERAIRDLLRKRGHLVKLRTSLSLSLKNIVARNCGQSVKQNEITQLKQDLVTPLFEDNEDLALAGKMSKEVIDCLTNRINHIERFVENKLGLKDSYQYLTTMPGVGLILGLTIMLETGDINRFPNVGNYSSYCRKVPSQWTSNGKVKGKGNKKNGNKYLAWAFSEAAEFARRYSPEVQAYYNRKFQRTNRMVAHTALAHKYARAAYYIMKDHVPFDPKRLFA

SEQ ID NO: 445133 - protein, 427 aa, unidentified
MEVIHPRCAGIDVSKKDAKVCVRIQGRGRKATSSTVTTWTSMTSSILALREHLLAERVTCVVIESTAAYWKPFYFLLDEALNVMLVNARHARNVPGRKTDVSDAAWLAELGAHGLVRASFVPPEPIRVLRDLSRARTTIAQARTKEIARLETLLEDAGIKLSSVACEITGVSGRAMLEALIEGQHDPGELADLAKRQLRKKIPALTEALQGRFTAHHGFMVRLYLDRIDAHEADIARLDARIEEAIGPFRAARELLVSIPGWSQVVADVFIAETGADMSVYPTAEHLASWVGVTPRANESAGRIKSAKTMPGNRHLKAALGVAALSASRSTNTYFGARFRRIAGRRPVRPGTKKSRRQSAAGQTAIVALEHKMLTCAWHMLVNGTFYQDPGPDYYTRNHPAQTKAKAIKQLQALGYDVTLQPHTDAA

SEQ ID NO: 445134 - protein, 429 aa, unidentified
MTRISVGVDVSKNRSTVCIMDQDGKVIMRPFLVWHSTEELDFLADTLKRLNGEVRVIMESTSIYQYPIALHLKEKGIFISIVNAYKVKKFANTDFRGGKTDKKDSRTIASYGISYWDKLVEWQIPKDTYFNLDLLNRTYMNAKKHRQIILQELQHYIDCAMPGMDKELHSLNLNTKKDFMLDFVEKFWHRDEIVNMTEAEFTEVFTAWAKKKGYRPVEGKAAKIYAIAKSCIPYYPANPTVKTILQCIVDKLSGVNRTLVTIVTQMIEEAKKLPEYQIVREMPGVGDPLAARFFGSVGDIRRFKNSKALVAYAGIDSPPDESGDFSSTHRHITKKGSKVFRDTGYEIMMALRAQKRTWEKVRKNPEVYDHMLRKKAEGKPRKVAKIAALNKFLRIVYARIKELYDNMALAERAKTKTRSKTRAKTKVTA

SEQ ID NO: 445135 - protein, 343 aa, unidentified
MTFVGCDLHTRQQQVAVLDTTTGEILEQQLPHEGTTVEDFYAALPRPVTVGIESTGYAIWFHTLLQRLGHTVLVGDAAKIRAMVVRKTKTDRRDALHILDLLRHDRFPSIWIPDPATRELRALLMHRLRLVRIQTMLKNGVHALALNQGLARGSKLLRRAGLAQLQALPLPPYTAQRRDQSLDLLGTLRTHLDHLDDAIAAAARAHPDAPRLLTHPGVGPVTALATVVVLGAVSRFPDSKHVVSYVGLAPALNASADKYRLGKITKQGSALLRFVLGQAAAHAARLDPDLTRTYRTLAQRRGRSKAKVAVARKLLVRLFIMLRDHIDYDEFRRRGRAPAVAPG

SEQ ID NO: 445136 - protein, 405 aa, unidentified
MQVYIGIDWSQNKHDITFLNELGAVMATLVMPHSQDGFAKLDATCRRLGVGPGECVVGLETAHNLLIDFLWARRYCEVYVVPPNVVKSSRTRYRQSGAHTDRSDSFVVADVLRTDRGRLQPWHPDSLLTRQIQARVSLISFLTREIVRLQNRLTAALLRYYPAALHVFNPSTQIGADFIRTYPTPQRATALTFEQFEAFARAHHYHRTQKLATYFANLHADHPEASPETVAVYEAEAPVLASTLAEMVKTKTRALSELNGLFAQHLDYPIFSSLPGAGEFLGPALLAKFGDDRMRFPTPASVQALAGTCPVTEQSGKGSWIHFRWACDHEFRRIAQQWARASLSYSVWAVAYWRQVLPRSGSESHAYRCLANRWLAILWSLWQKRQPYDEAYHFNQRVQRSKPRP

SEQ ID NO: 445137 - protein, 398 aa, unidentified
MLAQKTLEIRVSIDVGCYQHSVAVGLSSGELVDEFEIYHNQLGFDQFFTKIHHLESRYLAPVSVAMEGYNGWARPFDQHILSHGYKLFNINNLKLSRFKEVFPSAAKTDAIDARKGLELFTLSDHLPLAKNCLQQVEQPNQTNAQLKRYSRRRRRLVDEKVRLKGAMHSDLQAISPELLAITKNIDQIWFLNLLISVDTLNQLANKQQRSLAKIKGVGARYLARIKEWQTNASFSEETSWVSPMIIEDARRMLKLKALIKSLDSIMEALCSQSEIGKTLSSIPGFGKTSCAELAGEIDDIGRFESEASLAMYLGMAPLDNASGTYRGSKTPKQINRRAKMAMMTAIDRHRINVDESQIFYDKKRKQGKKHNQAIRSLGRYLARVIFKMLIENRDYEIR

SEQ ID NO: 445138 - protein, 311 aa, unidentified
MGTAIGIDIHKASLVVAVEDTSTWTVARTEAALTTLAIKLQTLRPAVIVLEPSGGYEQLVIEVLQRHQLPVARVHPRQVRAFIRGLGVQAKSDRLDARMLARFGTMTTPRLLPVPTLVQQRVAALSGWRRTLRADITAKTHQLQNQPAEIVASIERVIHELEAECAAITATIAELVATAPEWARTRAILRSCPGVGPITVALLLAELPELGQRPARQLASLVGVAPFTRQSGPGAGRAHISGGRRPVRTGLWMPTKTAIGHNPVINAFAARLRADHKPDKVVTIACLHKLLTILNAMVMHDECWHPRPLAA

SEQ ID NO: 445139 - protein, 355 aa, unidentified
MGTISLGVDLAKCIFSVCEMDGIGRVLRRREFRRDAFATYLAQLPAGTVVAMEACSGAHHWARRCREYGLVPRLIAAQFVRPFRKNPVAKNDPNDAEAIATAARQGNMRFVPVKDIDQQARLSWHRVREGYKAEHLAIGNRLRGLLAEFGIVVPNRDAALHRVLGDLDAYSELPGELKELLRSLSEHWVQVHAAMAACDARIERHARQDSRCARLRAIVGVGPLTADAMVASIGNAREFKNGRQLAAWLGLVPTQHSSGGHARLGAISCRGDGYLRTLLIQGARSSLERAKRVGLDKATPEQVWIQSLACRMPFGKVIVAIANKHARQLWAMLAHDLDYDPTASLNRTMQQRTAA

SEQ ID NO: 445140 - protein, 344 aa, unidentified
MEIRTVGLDLAKNVFQVHAIGDTGEVIVRRSLRRAQVIPFFSKLPPCLIGIEACATSHHWARELVGLGHEVRLMPPAYVKPYVKRGKTDAGDAEAICEAVTRPTMRFVPIKSVEQQAALALHRTRDLLVRQRTQLVNMIRGLLAEFGIDIPKGITNALAFVRRAVAGKANEVPDLATKVIGALAEQAIEVQGRIRQLEPDLLASYRSNELARRIATVPGVGLLGATAIAATVTNPTQFRSGRQFAAWLGLTPLNNSSGGKERLGRISKMGDQYLRRLLVTGMTSLVRRNKHHPDSADPRINALLARKPLRLVTVAMANRAARAIWAIMVRGDVYRKPALGSATA

SEQ ID NO: 445141 - protein, 376 aa, unidentified
MMTMPRPSESTAVPSCLLLAFELGERIWKLGFTTGVGQRPRLRQIPAGALTLLWAEIAEAKRRFKCDPATPVISCYEAGRDGFWLHRALTAHGVTNYVVDSSSIEVNRRARRVKSDRLDLAGLLSLLARYLAGDSRCWRVVRVPSDADEDARHRHRTREAVQQDRTRLLNRLQGLLATAGVRVAVTATFLANLATARRWDGSPLPAGVVARLTQTWEQLTFVTTQLAALERTLVPDPATSAGRLATQLQTLRALGPVGATVLATEIFDWRRIRNGRELGALVGLVPAVYQSGETARDSGITRAGNRHVRRVMVQLAWGWRRYQPASALTQWYQRRFHDGGPRARRIGIVALARKLLIALWRYLDQGVLPAGAVLKA

SEQ ID NO: 445142 - protein, 360 aa, unidentified
MQTQSTELNFEGQNLFVGIDVHLKSWTVSIFTEKLFHKTFTQPASAETLFNYLKRNFPGGVYHSVYEAGFSGFWTHYRLKEMGMQSIVVNAADVPTSQKEHLLKDDPTDSRKLARSLRSGDLKAIYVPDPSTLGERSLVRMRATLVKDMIRFKLRIKSFLYFYGITYPQEFEKSGTHWSKRFMKWLNEGVSLQNESGNQAFKILLQEAEQQRKLLLEVTRKIRLLSRNEKYLNNIALLRTIPGIGFITSITFLTEIEKIERFEDADHFAGFVGLIPNRHSSGENDKNGEMTFRGSEALRKMLIESSWMAARFDPALNMSYHSYVRRMEPNKAVIRIARKVLNRMYFVLKNKKEYVSGVVK

SEQ ID NO: 445143 - protein, 353 aa, unidentified
MPALAAPVTVGVDTHLDVHVAAVVDQTGRLLSTKEFAASTRGYVALVTWAERFGTVKRIGVEGTGTYGAGLTRFARAYGLPVVEVNRPDRSLRRRRGKSDPIDAQAAARATLAGVAATAPKTREGQVEMIRVLRVARRGAMKARVAAAHQLYGVLYSAPEELRQPLLGLKTKALVGVCAAMRPGPLTSPPAATKASLRTLARRWQQLQSELTQLDTQLQQLVTSIAPTLVALPGVGIDTAGQLLVTAGDNPHRLRSEAAFAHLCGTAPIPASSGRTHRHRLNRGGDRQANHALWRIALVRMRCHAPTRAYVERRTKQGLSKLDIMRCLKRYIARQVYHHLTSQTPSAAAACPK

SEQ ID NO: 445144 - protein, 341 aa, unidentified
MHITTIGLDIAKNVFQVHGIDAAEKVVISKQLRRGQVLKFFASLRPCLVGMEACASAHYWARELTKLGHEVRLMPAKDVKAYVKRNKNDAKDAEATCEAVRRPTMRFVGAKSAEQQGRLMQHRTRDLLMRQRTQVINALRAHLAELGIVAAQGREGLKQLLAIIADEKDARLPIDARASLVVLAAQLQALQTMIGLIERRLLVQHRANEASKRLESVPGIGLIGASAIAATVTDPNAFRSGRDFAAWIGLVPRQDSTGGKQKLGPISKQGDRYLRRILVVGAHSVLRRAKKTPEKYPWLAQLLARRPFKVVAIALANKMARVAWALLARGGSYRVPALAAA

SEQ ID NO: 445145 - protein, 343 aa, unidentified
MDIIYDKCCGIDVHKKLIVACFRCGKKQDVRNFGATTRELLELADWLKDGGCEMVAMESTASYWKPLYNILESSDLNAMVVNARHMKAVPGRKTDVKDAEWIADLLQHGLLQPSYIPDKDQRELRELVSYRKSLVGERTRELNRLLKMLEGANIKLSGTVSDINGKSARSILEYLLTVEFIDAAKYNETYEKKIIAHNLKANKEQIIDNLNGVMSPLQRRMMKELLAHLDELNKHIKNLNDEIDNFMKPEEKQASQAIQDVTGIGNTSAQAIISVIGSDMSRFPTDRHISSWAGLCPGDNESAKKRKSGKTRKGNALLRTTLITCAHAAVKNKVSILKVRVNG

SEQ ID NO: 445146 - protein, 339 aa, unidentified
MELYAGLDLHSRNTYIGIMDNEFNRVFKKRVPNHLEQILQTLEPFRDQMKGFVVESTFNWYWLVDGLMDAGYSSAHLANPSAIKQYEGLKHSDDQHDAFFLAQLLILGILPQGYIYPKKGRPVRDLARKRMFLVQHKTAHILSLQSLIQRSCAMKVRANDMRHLTVKELEMWLEEEYLVLSAQANLDSINFLKQKVKQLEKAIIQKVKLNKEFKYLLTVPGIGNILAMTIMLEVGDIKRFPKVGNFTSYCRCVPSRRLSDGKSKGQGNRKNGNRYLSWAFTEAAQLGRRHNERFRRYYNRKVAQANTSLATKALGNKLARICYYIMRDQVPFREELFCH

SEQ ID NO: 445147 - protein, 329 aa, unidentified
MDIIFIGIDIAKDHFDVVVRQAGENGPAKRFDNSAKGIAALLRWLPSQPPATIWVCLEATGQYGEGVAESLHAQGCRVSVVNPLCIKRYAAAASVRTQTDPVDAGLIAQFGDHLRPRQWLPPSAAHKLLRSLSRRLADLQEMRQMERNRLAASKRLPQELRTSLQVVLKALQAEIQSVTRQMIALLQEDAELARQKKLLMSIPGVGELTAVRFLADLGNLRDFRSAKQLAAFLGLTPESKTSGSSVQTKPRLSKKGNPGIRQMLYMPAVVAMRFNPLIQALRTRLAARQKCNMSIVGAAMHKLVHLMFGVVHSGKPFDPNYLSNGLSTP

SEQ ID NO: 445148 - protein, 352 aa, unidentified
MRRPRHQVRTEEELFIGIDLHKHRWHVTIRTFDVELFSGSIPGNWEAIHRILARYAGHQLQAVYEAGYFGFRLHDRLVAHGIPCIVTPPSLVPQEYGNRVKTDRRDSSKLAHLLAKGLLKRVWVPSEEELYHRQVIRRRRQLVRDRVRIQSRIKAELRFYGIHLEEPRGRWTEIYFETVRSVRFGNRWMQESFNRLLEQYEFLSAQISKQTQLLRELSETAMYRDRMAILQTLPGIGVISAMELLLELQDVSRFRRAEQLAAYVGLTPSQYSSADKVRMGRITGIGKNTLRSLLVEASWTLIRKDPAMRDKYDRIKIRSGGKRAVVAIARTLLLRMRRMLLDKQAYALQRAA

SEQ ID NO: 445149 - protein, 357 aa, unidentified
MNSVYHTELSSHEGTRCQFNGGRCAIKLGIDVHQDFYVVVMQEGGSNPKPPQRFHKEAFLQWAAKLARSGAQVYAVYEACGFGFSLQRQLSALGIECYVVCPQKLDEQNRRVKTDGLDARALCLKLDRFLQGNRHALALVRVPSIEEEQARALHRQREQLVKVRKVLEAQGRSLMLNHGIEPVQQWWKQRAFATLAVPQWIKELLGNSQPVVLSLQQKIDQLTLQLQSAAQYQPPRGLGKMTSVIIDREIGDWRRFNNRRQIASYTGLCPGDSSGQKRLQSCVTKHGNPRLRAALVELAWRLVRFQPNYRAVCKWKDQLTSGAARKKAIVALARQLAVDLWRVRTGRLTPEQLGLEI

SEQ ID NO: 445150 - protein, 421 aa, unidentified
MHVLYQRCAAVDIGKDVIAVAVRLPGDGPEHRQTIKRTFKTFYGVLKHAAGWLTAQQVTHVAMEATGIYSMPVYHALIEHGGFEKVLVCNAGHVRNVPGRKTDLSDAEWLVHLLECGLLRGSFIPPAQIKAARDVIRYRTKLTESRTSELQRLGNVLQDAGIKVDSVASTITTRSVRAMVEALIDGERRPVLLAELAKGRMRARIPDLQRALEGRFDDHHALMCRLHLDHLDHLEEMIARLDTQIQDMMQPFRAQRELLTTIAGIGPFAAAAIISEAGADIGETFPSAGHFASWIGVCPGNHESAGKRHSGKPRKGNQHLQHVLVECAWAASRTPGYLQSLYRWHVRKFGGSRNPTAKNKAIVAVAHKLAIIIWHVLATGKPYTDLGADYLDRRIDPAKETRRLIARLQALGHTVTIEPAA

SEQ ID NO: 445151 - protein, 339 aa, unidentified
MNSMAVGVDIAKHVFQVHYVDQATGEIVNKPLKRAKFLEHFANRAPCVIGMEACGGAHHWARQLTKLGHKVRLMPAEFVKAFNIRNKNDAADARAIWLAVQQPGKPVAVKTEMQQAMLALHRMREQLVKFRTMQINGLRGLLTEYGEVMSKGRASLDKEIPAALGRLAERLPATLIDTLREQWNGLTRLDEQVAEIERRMREWKKEDKAVKAISEIPGVGLLTATAAVALMGDPKAFSSGREFAAWAGLVPKQTGSGGKVNLHGISKRGDTYLRTLLIHGARAVLTHAKEPGPWVEQMKKRRPTNVVIVALANKMAWMIWAVLAHDRPYRKDYVSVKPA

SEQ ID NO: 445152 - protein, 484 aa, unidentified
MKAQRAKASRSIQQSYSNKKGPIRPAGSMPVVNRHAGGIDVGSIEHYVCVPEDAVPEGESNVRSFGAFTEDLDKLVEWLQARGVRTVAMESTGVFWIPLAQKLESVKIEVVLVNARHLKYVPGRKTDVKDCQWLQQLHSYGLLNGSFRPSEDIGCVRSLMRHRQNLIENCGREVQHMQKALQLMNVHLHHAVSDLVGATGLRILDAILAGEREASKLVELRDSQCSKSTREELEKALKGDWRQEHLFVLKQALETYRHLLKQVAQCDGQVEKALAAVVVPVRAQPESLAPKNPAAKEHASPKKKRFHHRKTGTSLKRDLSEELKRICGVDLTQIIGLNVLSVLMILSEIGLDMSRWRNAKAFCSWLGLCPGNRISGGKVLNSRTAHVVNRVAILLRTLGTAVGKTDTWLGIFHRRMRARIGPAAANTATARKLACLIYHLLKYKEEYIDVDHLVLLEKIQRHRIGRLRKQAEELGFEVVERKIA

SEQ ID NO: 445153 - protein, 341 aa, unidentified
MELKRIAIDTSKHVFTLHGVDFQDRVVLRRELKRAQVEPFFRKLLLTEVVLEACGGSHHWGRLLASLGHTVKLIPPQYVKPFVKRGKNDRNDAEAINEAASRPSMRFVPVKSAEQQAGIMILKTRELLVRQRTQLINAIRGHAGEFGVIAAKGTVRVEALLDRVAGDETLPEAARDMIALLGEQIKDLDIRITALETRMKQAHKANPVSQLLETIPGVGPIGALSLALTVDPGHFHSGRHFAAWLGLTPKERSTGGKQRMGGISRAGDERLRHLLVIGATAVIRHVKPGSRNASAWLLSLLERRPRKVAAVALANKMARVVWAMMTSGEAYRAARAVPVRG

SEQ ID NO: 445154 - protein, 395 aa, unidentified
MEYILSFDIAKGKSVYCFIDSNKEIIIEPTSINHLKNEFDDLFIKVKDYDNLTVIMESTSIYHLPVENYFRVKDINTIVMNPKLVKQYKDTLNKSKTDKLDCFKIARCYLGTIDTLYQKNDEYLIYEPLTRQYWSLIEGQTRLKNRYKQLIEVVFPEFNLIFNDLYDDLALNFIHDFPHPELFINRRTDYLLNYLKDKNGTTQAFRFRNKVSKMKNIASNSLCFVAFDSLQVQNLVQVIEMIQYHKKEIDKIKNQLIKELKDTKLFKIINTIPGFGEFSTALFLSEVGDITRFNDSHQFISFIGIDSVTSQSGVSAYHGPISKTGNKFARTILFNIVTTIIQISAHSNQTNPIYLFFRKKQSEGKHHYKCIIACETKLCKIIYKLCTSDCIYINK

SEQ ID NO: 445155 - protein, 356 aa, unidentified
MKELTTVGIDLAKNVIAACVMDARGAIVERRVLRRDAFERWAEQLPASNIAMEACGSAHHWGRWFAARGHTARLIAAEFVVAFRKGGKNDTADAEAVAIAARQPTMRFVPIKSVDQQAILAWHSVREGWKEERTALLNRLRGLLAEYGVVIGRSADRLLAALPKLSEDRRLPDAVRALLLEAREHFAALHARLARCDAQITAHARISPAAQRARELLGVGPVTASALAATVADANAFRSGRQFGAWLGLTPRQHSSGGRTRLGRISLRGNVYLRTLLIQGARSTLQTAINTEPLRASRLQRWIIALYGRKGYYKTLIAIANKHARILWAMFAKDSHYDASAWQRHPMSQLPLASNT

SEQ ID NO: 445156 - protein, 420 aa, unidentified
MNEGCISGVLDRFSVADSMGILLSPQSVMKGMGRKRPSRSKRNRARVADWSKCEGSRVLGTPARLTRGTSVGKARRGGSLYHASALRRKRMYLGIDIHKRNSQVAVRNEDGEVIREVRVKNANLAEIAQQYAGSEAAIEATGNYYTIHDTLDEYLDVTVANPGRLKLIANSDRKTDRVDARELARLVRLGSVPESYVPPEEIRECRALVRGRKGFVEDRTEYANKIHGLLDQQGITRKVKPLSVGGREFLEELSLEAPWETLLETYLETIDALTEQITSLEEEIEDRAASLPETQLLMTIPGVSFYSALLIHAELGEIERFDSSKQMVSFAGLNPVIRESGDSRFEGGISKRGSGQLRWILVQSAHTAVHTSHDEYLSRFYDRLAGRKSSKEAIVATARKLLVSIYHMLDREEVYDPPGV

SEQ ID NO: 445157 - protein, 367 aa, unidentified
MKKVSIAATRQSRNISQQKLTIGLDLGDRNSWYCVLDEAGQIQLEQRVRTSAKEWREVFGAMPRSRMAVEIGTHSPWISRLLSELGHEVIVANARKVRLIGESRKKDDRLDAQTLARLARIDPELLCPVKHRSAQAQADLMMIRARAGLVRARTGLVNTARGLAKSYGERLRGCNVRNMNAEKAEGLSSELQRALEPLLSAIAELSQRISEYNDRIEALAQASYPQVALLKQIKGVGTLIALTYLLTLEDAHRFGKSRDVGCYLGLQPGRRNSGQSEPQMHISKEGDPYLRTLLVQGAQHILGPFGADCDLRRWGLKLAERGGKNGKKRAIVATARKLAVLLHHLWVSGEVYEPLHNSSRMTVAAAA

SEQ ID NO: 445158 - protein, 359 aa, unidentified
MINVGVDVHKRICQACLKDERGSIIEEFRFPNNHEGASRLAAIIKKHGEAKVALESTGNLWVKLYDRLDEEEDIDVILTNPKKTRMIAEAKIKTDKLDARILADLVRADLVARSYVPPKEIRMRRALLRERISLVESRTMIKNRIHNLLDKYEIQPTYTDMFGKHGREWLRSLKLPSIDQTILEVNLQRLEELEAHIDAFTSKIAQEAYDKPEVKLLMGFTGIDYYSAMLLASEIGDVTRFSSAKKLVRYAGLAPGIRQSADKTVHGHIVKEGNKRIRWILVEAAQHASRHDPRLRGFYLRLMKRRGYQRAIVAVARKMLVSMYHVLSKNEPYHGERTELLERKLKRLEWKATHSLQAI

SEQ ID NO: 445159 - protein, 427 aa, unidentified
MSINLIDRRCQAVPDRDRGVVFGLDISKDTITYRAHRPEACSNAFTVSQDMNGFRKIEAALEEFKGRGYDVWVGYEPTGPYSCCILEYLVDNGWRVVQVNPKHTSRFNDIMDNVPGKSDPRDPRGMAGLIWQGCYRHPVHLTGPYAELRAASVEWSMLSVDGTRLRNQLHSLMQLWCPELGMVFKDTLCKSARGIMRKYWSADAISNAGVARVRSVLAKASRGRTTARAEALLEAVGQSKALRSGQKTRYRSILHLLARLELLEQHKSQLKADMAQMLSLLPESGRLLGVRGIGVVTSAILLGECGNIGEYDSRQLEKLVGLNLHEFSSGKHTGKRKISKCGRANVRYALCVAATRMTSKNGIYHDVAQRMRAQGKKFGEIRIAVARKLLKLLHAVVHGDQDFDLRRFVARRGTGDDLKVHQDRRAA

SEQ ID NO: 445160 - protein, 448 aa, unidentified
MKEKTWYAGLGIAACVGLDWAMDKHAITEKDLESGQRERCQLGNTPEAVEHWAAALAVRFGGRPVAVALEQSRGAVIGMLSKYAHLILFPVHPKTLADYRKALHPSGAKDDPTDADLLQEFLQLHGDRLRMWQPDTEATRSLQWLSEERRKFIGDRTRYGQRLQAMLQLYYPQMLQWFDDIDAPLVLDFLRRWPGLEEAKKARPATLRRFFHQHNCRQEVKIEQRIQAIATAVAATHDAAVILNARLAVTALVAQLEALHASIAAYDRQLAEITLAHPDYALMASLPGAGPVMIPRLIAAMGTLRDRYESAEEIQRCSGIAPLIERSGQHCWVHWRWACSKFMRQTFHEWASHSIAFSAWAREYYQAQRDQGKGHHAGVRALAFKWIRILFRCWKDHTPYDEAKYLRALAARQPKQSPDRKSSFGRGRQPNFVWTSCNGFNKLVGLDY

SEQ ID NO: 445161 - protein, 348 aa, unidentified
MVHFVGLDVSVKATSVCVVDDAGKVILEQKVPTDPADIIAILTSLGVSFGRIGIEAGPLSQWLVNALTAANLPVICVETRHMKALLTAQQISKTDRNDARGIAQMMRVGLFKPVHVKTLVAQEQRMLLTSRKLLQRKLLDVEADLRGTLRNFGLKVGVVGSSRYEARVRELVEGFPRLAAIVEPLLSVRRVMRQQFAVLHKMLLDMVRDDLVCRRLMTAPGVGAVVALTYRATVDQPQRFVHSRAVGAHVGLTPKRYQSGETDYDGGVSKCGDALLRTMLYEAAHSLLIHGRQWSWLKAWGIRVAQRRGMRRAIVAVARRLAVILHRMWVDGSEFRWRKDSAAVPAVA

SEQ ID NO: 445162 - protein, 351 aa, unidentified
MTILAEQFVHVIGVDTHKLTLSAAVLNASGGLREVCEVGASAAGHRQLMTLASRYAGPVLWAVEGTGSYGASLTEHLLAAGQTVTEVDRPKRGARKRGKSDEIDAIRAGRDGLAMSHLNPPRRRREREQLRVLLTTRAELVKTRTSLSNHLQQLVVTSSEGLRGHLLETRDQAHSSERLSHKCLSLRVGHQLTTEEQTRVRTMREVAQLIEELTTRADAYQTQIKALVEQLAPGMLGQPGLGPLTAAQVLLSWSHAGRLTNEAAFAALAGVAPIPASSGQTVRFRLNRGGDRKLNAALHIVVLNRCRYHPPTRDYMARRLSQGKTTREIRRCLKRYLARQLFRFLGRLDKG

SEQ ID NO: 445163 - protein, 338 aa, unidentified
MAIVTLGIDLAKNVFALHGVGPTGKPELVRPEVRRSRLLELVASLPPCLIGMESCSGAHHWAREFEKLGHTVRLMAPKFVAPYRMAGKRGKNDANDAAAICEAVTRPNMRFVPIKTIGQQADLFIHRARQGYIEERTALINRIRGLLSELGIALPLKTSAMRREALAVLEDLPGWCNTAIGDMLNHLGRLDERISEYDKYLAQIVKQNDRACRLMKLAGVGPTTATAIVASVGNGHDFKNSRQFCAWLGLTPGQHSSGGKARLGSITKTGDSYLRTLLVMGARALLMKAAAHSDPVSRWALQLKQRRGFGRAVVAIAAKNARMCWAALRLGDAFKVPV

SEQ ID NO: 445164 - protein, 422 aa, unidentified
MVQVETTKEKERRKAMISVGIDISKEKFTICALEEGSKIIWKPFDVLLNKTKVEEFLEKLKNLKEKVKITMEATGKYHLPILYELKDRGYFVAVINPLKMKQFCRALNFRKAKNDNIDAKQIAEYGLMYWKELEEYKVDEENYRVLKELNRSYQHYMDLRINQMNYIDQTIHQTFPGIKKLIPHNSGDFSKDKLIDFLEKWWHKDLVLEKTEEEFIEEYKTWAKEKRYHPNANKAKAIYKLAEDSISTQPSHNSKIETNIREGINLIKQINQILNSILSQMIEISEPLEEYQEAKKFSGISEKLAVQIVAEFGDLSKFKNKKSLISFIGIDAPPYESGNFKADQRKISKRGNTILRKVGYQAMKCMMSAKDPENEIYKYMIKKEKEGKAKKVCKFAGLNKFLRIYYARVMESKAEKKELKAA

SEQ ID NO: 445165 - protein, 381 aa, unidentified
MEKDTRHVGLDVHADTIAAAVAEPDGEVRPLGIIPNRPEQVRKLMKRLGLAAHLRVCYEAGPTGYVLYWQLTGMGIHCDVIAPTLIPVRAGDRVKTDRRDAVKLARSYRSGDLTPVWVPNAAHEALRDLVRAREAAKGDHLRARHRLQKFLLRHGRRPPEKIKPWTERHLEWVRREVQFEALAQQAVLTDYLAEVEHARERIRRLERSIDEAVEGAPATMRAVIEALQALRGIAKVSAVTIVAEVGQLSRFARPRQLMSYGGVVSREDSSGGRIRRGAITKTGNAHLRRIVGEAAWAYRYKPSVQGALRARQQDLPEPVKEIAWKAQHRLHGRYRRLLGKGKPKQQVITAIARELLGFIWAIGVHVEQTMVATDGKKQPAA

SEQ ID NO: 445166 - protein, 323 aa, unidentified
MNKYSETFGVDISKDVFDVYGSVCGYFQFKNDEQGFKLFVKTIALDSLVVMEATGYYHYRLAQFLYKNDITVSVVNPLSVKRFIQMKLAKVKTDKSDSKAICNYGLSNEVPLYNALTDVQAECLQLFRLMDSYLKKRTATKNKLHGEEVLGTPSKYVYRSLKRDLKHLNKEVKGIEDRLLELVKQDQQQQLTLLTSIPGIGIRTALFLVVITDGFSKFEKASQLCSYVGITPTIRVSGSSVRGRSRISKVGNKKLRNLLFLCAFNACKHNRACRALYERIVAKGKSKKLALIAVANKLLKQAFAIARLGLPYDENYVSVLAKG

SEQ ID NO: 445167 - protein, 346 aa, unidentified
MNEAAVYWMGIDVAKKTFDAALVAPGQHFPQTPLREIPVQTFARDPQGVKKCLAWMRGLLAPTSAPLTVRAVMEATGVYSIELSAWLRQECPMLAPAIANPERTAAFIKSMGARNKTDRLEARALAFYGLERQPAPDEPLTPEHQQLRELSRYRDALIAEKVAESNRAEQQPQTKLIRKLQARRDQQRERDIAKLEAEMKCVIEAAPQLKKDFDLLVSIPGVAFITATVILAEMGDLRRFGRARQATAFAGVTPRQTTSGTSVNGRPHLCKKGNPRIRQALYMAAMSAVRSDTQLRQTYERLIQHGKVPMVALGAIMRKLITLMRAILLTETPFQPWWKTLVKTAA

SEQ ID NO: 445168 - protein, 409 aa, unidentified
MDVLYERCAGLDIHKDEVVACVRVGTGRATQRDQKRFGTTTRALVELSEWLSSRGCTHVVMEATGVYWRPVWHVLDGHFELLLANARDVRNVPGRKTDINDATWLADLLAHGLVRSSFVPPEPIQELRDLTRTRKQLTREVAQHTLRIQKVLEDANVKLSSVVSDTLGVSGRRIINAIVEGKAAPNELAALADPRVKASRGELAEALRGRVTEHHRFMLKVHLAQIDSLDALISTLDARIEDKLGPFHHAAERLATIPGVSSTAAHVIIAEVGPDMSRFPSAAHLVSWAGLCPRMDESAGKRRSTRIREGNVWLKTLLVQCAWAGSRRKDSYLRAQLHRIKARRGAKKAAVAVAASILTTVYHLLRNEQAVYRDLGATYFDQRDKNRVTRRLLRRLADLGVEVELKNAA

SEQ ID NO: 445169 - protein, 441 aa, unidentified
MKLQYLETKRHYVADKFVIGIDPAKNKHQAMVLDPKGIPIGNTFSFTSSYNGFHFKLWQKLKTMPFEVTPENTAFAVEISINFWQKICHYLSEKGYTVLMVRPITTKHERPRLNNFSKTDPKDALCIASSARQGYFNFYQKYADKIMGIHRLGITYDKLKKQIVISKQRLRSEVEMLFPEFPSVLKIDTDTARYLLSKYLTAKDFSEINIFYESIELVAISRNHHGAKTLKCLKDEASKSIGLPLDQVSYMAHRMTVNMWIEQIKMLKVQQYNILKEMSALAQETPWFKLLTSIKGISEITASRFIAEIPQLGNDLHFKQVEAFAGLNLRLSDSGKMTGYRRISHWGNNRLRAVLYKMTEETKNHIPEVRIRFLKRQMKKANYTKNITACTSNLLKIIIAMIRENKCYEYNPEKVKEMESLDKQYLEYKLKRKCKSFIKVA

SEQ ID NO: 445170 - protein, 347 aa, unidentified
MDQIIIGVDTHKSNHVGVAISRQGARLGTITIPTTRQGYRDLEAWASELGTIKAFGIEGTGSYGAGLSRDLLAKGHTVLDVMRPNRQLRYLHGKSDSLDAESAARSVLNGQATTLAKTQAGASEMIRHLKIARDSAVKSKSQAMITLKTLIINAPAELRDTLDLIKGPITLIRHIAALRPGKITSPVASAKAATRAIARRWLVLHEEIQAHGNELERIVSENAPGLMRSHGISTMTAAEMLILVGDNPERIKSEAALAKLCGVCPIPASSGKTNRMRLNRGGNRQANAALYIIAITRMRDHEATKNYVVKRTAQGKGKREITRCLKRYIVREIYRELCVPNGAKATP

SEQ ID NO: 445171 - protein, 344 aa, unidentified
MDHYAGIDVSLEYSSVCVVDTTGKLVRETKVASEPEALIGWFGSLGFGLARIGLEAGPLSQWLYAAMKKAGLAVELLETRHVSDAFKAMPVKSDRNDARNIAQLMRLGWFRPVHCKSITAQEIRAMLTARKLVQSKLQDLENSLRGILRGFGLKVGKTTRTTFAGRIGELVKAHPNLQTIGEALLRVRAVLLAEFNGFEKHVRATSRLHEKARLLMSTPAVGPIVSLTFACAIDDPSRFTSSKRVGPHFGLTPKRYQSGETDYTGRISKHGDASVREALYEAAHIMLTKPIKGCSELKSWAMRIARRAGINKAKVALARKLAVVMLRMLKDNVPFNPAAKAAMA

SEQ ID NO: 445172 - protein, 402 aa, unidentified
MAYDFVIGMDVGKYFHHACVLDPQGSQVLSKRINQHKGSLRKIFGQFLADNASVLVIVDQPNNIGRLTAAVAQAMGAEVRYLPGLAMRQLSRVHVGNSKTDVRDAYVIAHAGLNLPDALRSVDRVEEVFIQLKVLNGIDEDLARAYTRLINQMRSALVGTHPAFEHVLRGQMIHRKWILHLLAKYGGPTKIRRVGKARLAAFARSHRARNPEPVIDAMLAAIHAQTVTIAGAEDAELGVAMSAKDALAKLEHRKEIEAQVLELIQDIPQTEILLSMPGIGPRSAAQILMTVGDMSDFPDAAHLASYAGLSPRTNQSGTSIMSNSPNRAGNKKLKNALCQSSFASIRFHERSRQFYERKRKEGKRHNAAVVALARRRLNVLFAMMRSGECYRDISIVQETAAA

SEQ ID NO: 445173 - protein, 412 aa, unidentified
MDVMQPRVAGLDVHEAFVMVCRRLVRPDGQVDKVVQRYSTMTRDLLALSDWLAEAGVTHVAMESTGVFWKPIWNLLEAQFTIVLVNARHVKQVPGRKRDVSDAEWIAQLLQHGLLRASFVPPEPIRERRDLTRHRTTLVHERTRVVNRIHKILEDANLKLSAVVTDIMGVSGRAMLRAIVAGETDPYQLADLAQRRLRAKLPALAEALTGRVRPHHRLMLTTLLDHVTFLEQQIAEYDGHIAQAVAPFAPALTRLQTIPGVKGRTAENLLAEIGPDMSVFPSDRHLASWAALCPGHDETGGKQRSGKTRKGNRWLRGVITQAAWAAARTNGTYAQAQFRRLASRRGKKRAVVAVAHSLLIAVYHILRDDVPYHDLGADHFNRLTPHALTRSLVTRLQRLGYDVTLQPTNAVA

SEQ ID NO: 445174 - protein, 483 aa, unidentified
MAERKKNTFQRLKKGQLNRKERRDLERQLNTEDPGLEIVNRNVAGVDVGNETHYVAVPPGRDPQPVQEFGSWTADLERMADWLKTCGIETVVMQSTGVYWIALYDVLETRGFKMCLANARHTKNLPGRKSDVQESQWLLKLHTYGLLRNSFRPPDEIRALRSLWRLRDRHVKEAARTVQHMQKSMITMNVQLSNTISDLSGTTGLAIIRAILTGERNPEKLAKLRDWRIKASQEEVARSLEGNWREDMLFELRQSVDAYDFIQKQVAECDQRLQTLMAELPMREAPAAVPAVEDGVKLPVRKKKSIRNKKNVPRFDLKAELRRVCGVDLTSIDGIDVMTAQTVVAELGTDFSRWKDEAHLTSWLGLAPCRDISGGKVLKQATLRVKNRVATALRGAANALLHSDSYLGARFRSLRTRRGAPKAIKAMARYLACIIYRMFTRGQAFVDRGVQEYENGRAQRELAALQFKAAARGFRLVNVQNPA

SEQ ID NO: 445175 - protein, 365 aa, unidentified
MIVIGPDPHKSQHTAAATEAATGELLDDLTVAAKPKGHAELLRWGRALGADRLWAIEDCRHLTGNLERYLVAHGERVVRVAPKHMAGARRSVRERGKSDAIDALAVARAALREGPERLPSAFLDEQAMQIKLLLDHREDLEQESTRIVGRLRWHLVDLWPELELPARAFERNVWLDRIGRRLARAEQSTRVRICREQIRALQALLRRSRELERELTVLVKAKNPALLELPGCGPLTAAKLIAQTAGAERFPSEAHFARLAGVAPIPVSSGRTDRHRLDKGGDRQLNCALHRIAVTQKRVHAPAQHYLARKQAEGKTNREALRCLKRQLVRTVLRLLRPVSSDRTDPLAMNKSTNIRKPLQVAALT

SEQ ID NO: 445176 - protein, 522 aa, unidentified
MPRPQNARPRRSRRKTFVLQKANGQLVPRVQQVGPEHFGIVAIDCAKARSRYFLADFYGRTLLEPTTLPHSRGDFQAAIDRLRQAALQHDLKDVVIAIERTGEYHRPVQLAFRQAGYETRLVHPFTSKQYRQPADPGNKTDDTDLAAIFRAATHGFGLAEPAWPDDYLTIQLLRRHRRDLVDKNAILQCQIRELLHAAMPGYAECFCHFWDDSPAPMIFARHTTSPAAVRQAGLAGLQQIAAQAQLRCRRATLHKILAWAEQAPPGHAHALDLRRILGTLDDDRLAKTQQILELERSLASLVVRTPYVLLLAIPGINIVTVADLAGELGPIALYLNANAITGRAALMPSRYQSDQVDYANGPLCRRGNRRLRAVLMQTANNLVQSNHYFAARAERWSRAGKDPRWIRVKVAKIFSRLAFAMVAGRQLFPHPCRQPHHYVLGKLLEFHAEHGTDPETMRRDLAAAVEQLPGRSRAAEARPLQEQLDQLAHRRGPQPLAQILPLVLARLAGRMVQSTPNESAGP

SEQ ID NO: 445177 - protein, 412 aa, unidentified
MTAKDQFAAHVGLDWADKKHDVCVQFKNGDRIFHVIEHTPEALDIWLNELRQRVKGRIAIAVELKKGPVVYALQKYPFVTVFPIHALSLARYRQAFWPSGAKDDPQDAELALDLMLRYPHKIKAIEADNPDIRLLQQLVEQRRLLVEDKRRFVNRLINTLKQYYPQPLEWFSHRDSSLFCELIIRWPSLQQLKRARSDTVRHFMNAKGGPAVAYTEQRVASIASAIPLTTDKTVIEANALMATALASQIKLAGDLIRTYDERIESLFDTLPDAELFKSLPGMGPCMGPRMLAALGDNRDRFNSAEEIQNYAGIAPVTERSGQKSWVHWRWQCAKFVRQTFVEWAAKTVNSSYWAKLYYQGLREKGKSHQSAIRALAFKWIRIIYRCWKTRTRYDEAKYLLALEARKSPLLKP

SEQ ID NO: 445178 - protein, 402 aa, unidentified
MSPKLNNEIAVIGIDLGNSSFCLVGPGSALHRCQRSTLAGTPKTKEHAMSQKLDSEIAVIGIDIGKNSFHLVGQDRRGSIVLRQKWSRGQVEARLANLQPCLIGMEACVGAHHLSRKLQALGHDARLMPAKYVRPYSKGEKNDYRDAEAIAEAVQRPTMKFVATKSADQLDLQALHRVRERLVGQRTSIINQIRAFLLERGIAVRQGLHFLRAELPTILAKRTDVLSPRMLRVIEDLAGDWRRLDERIDALSDEIMTLGRQDKGCERLMTVPGIGPIISSAIVAAIGTGDAFAKGRDFGAWLGLVPKQMSTGDRTILGSISRRGNRYLRKLFVQAAWVVLAKITPEGWERYGLKSWIEAAKQRLHRNVLAIALANKLARIAWAVLHKGRAFQCVKTNAPRAA

SEQ ID NO: 445179 - protein, 310 aa, unidentified
MQTICGVDVSRAWLDAFVAPGQYQRFANDTDGVAALAGFCRDHGAELVVMEASGGFEQPAFLALWQHGQPSAIANPAAVRHFAKAMGYLEKTDRIDAGIIARYAEAKRIVPTPPPSSDQQKLTAIAARLRQVIADLSVQKQRLHFTRDPQALASLQEAIAFFTRQAKTLTGEIAGLVDADPLWHALDRTLRSVKGVADRSVAIILADLPEIGTLSNKAIAKLAGLAPMANDSGKRQGHRPVRGGRASVRTILFLVANIARKFDQSLDDFHRRLTDQGKPKMVVRIALARKLLVRLNSKARETRAQLANAL

SEQ ID NO: 445180 - protein, 352 aa, unidentified
MEIIALDAHKRYSQVCVQKQNGQFLCEKRINHSKGAIKQFLSNWTAGANVALETVGNWYWIVDEIEQAEMQPKLVHAHKAKLMLGSINKTDKLDARGLNKLQRTGTLPTVWIPPGDIRDNRELPRTRMVFANLRTRLKNRTHSVFDKYGLHTDFEGISDIFGRRGREQMALTIKQLPSETRFTLRCLLRELDMVVSQIQRIEKRMKKVFSKTEQVKRLMTLPGIGFILAVAIANEIGDISRFATPQRLASYAGTVPRVHSSGGHTRYGKLRNDVNHYLKWAYSEAGNSTAVNHKRFPLRHTSKLYKRIRERKGHPKAVGAVARHLAEASFWVLIRNENYKEPEVKSVSPTAV

SEQ ID NO: 445181 - protein, 406 aa, unidentified
MLVERNDLILFYLFEFEQNVRNTVNLYIQNIQPGDKTKGRFSLFSFSVHQIIDMKKIVKQVVGIDVAQKELVVSLGRMYDDWTPELYAGKSFANTQKGFEKLMQWVNKQMDEFVCIGYVMEATGVYHEPLAYFLDEKSQQISIILPNKMSNYMRTLDVKTITDKTASEAIAKFGLERKLDLWKKPKEIYRSMKQLTRERDQIVEERSMVKNHLHAEESEAYPNKSSIERINERIRMLNKQEKAIKNEIAALIASEKEVKGLVEKMTSIPGIGDLTAAIILAETNGFELIRNKRQLASYAGFDVKEKSSGTSVKGKARISKKGNRHLRKAMHLPAFSAIKYDERFKAIYARIVAKQGIKMKGAVAVQRKLLEMCYTIYKTNDLYDREYLKKREQKGTVVDLNQESGQ

SEQ ID NO: 445182 - protein, 387 aa, unidentified
MQSVTSATAVATTARANNITLFASLELSKSKWVVTINSPGSEKFSKHVVEGGDGAGLLDLLSRSRAKAEQRYGVQIKTIVIQEAGLDGFWIHRLLLANGVESHVVDAASIAVARRHRRAKTDGIDGETLLRTLMAWARGERRVCSMVRAPSPEDEDRRRLTRERGTLLKERIQHTNRIKGLLGGQGVRDYNPLRRDRFERLEALRTGDGRELPAMLKAEIRRELDRIALATTQLAAVERARDALIRTDAEEPNNPAALLLKLKGLGPEFASLLWLESLFRSFGNRRQVAAYAGLAPSPWQSGGVERDQGISKSGNRRLRKTMIELAWFWLRHQPDSALSHWFQARVGAAKGRIRRIAIVALARKLLVALWRYTTQGVVPEGAVFKAA

SEQ ID NO: 445183 - protein, 350 aa, unidentified
MLIIGCDYHPGFQQIAFVDTETGELQERRLQHREEAEKFYRDLAAQEMKVRVGMEASGHARWFERLLSELQFELWIGDAAEISSRRVRKQKTDRQDAQLILKLMLKDDFPQIWVPSWENRDLRQLLWHRHRMVQARTRMMNQLQAVALNEGLRCKKKLWREAGREQLEAFKLAPWASQRRRDLLELLDRLNPTIAKLTQAIEEEVEKCPAARRLKTHPGVGPLTALAFVLIIGKADRFQCGKQIACYLGLVPLEKSSGNQRRLGHITKQGNSLLRFLLVEAAQVTVRSLPEWRSKYCHLTMRRGRKIAKVAMARKLAVRLYWMLRKEWDYERLRKFGSHAGKPGPGDGVK

SEQ ID NO: 445184 - protein, 382 aa, unidentified
MDRKCSWSRIIGLDLSKATFKGCILSGEGFTDRKNFSGEMKQDESGYVLINNTIQAGDIVLMEAGSSSFNLARYLLKNSRANDVVVLNPANLRIIWDSQKKNDKADAMKIACIARDMRPESWPRVTVPSEQEQSERSVIMHWVFLRKQETMLFNRFFALFNSLGYPEIDKPKLKSKSEFRVETINNLLSSNELAFTDAVMLDEQITVIQSQLHFMEDRLRTICLNHPKQALAWLSLPGIGLINAATLIAYIGDGSRFTKPDQLLNYAGMVPKQNQSGTVDIKGKITKRGCSAIRRNVVQGAQVVMQLPATCEITKFAYRKKKECPFNGKVAVAVANRMLRTGLALLHHNDLYRPMIQDGYDRLERKLNVNKLQALVSHLTNK

SEQ ID NO: 445185 - protein, 434 aa, unidentified
MEVINSHAAGIDVGSRSHHVAVNQELKDVREFGVYASDHDQMIEWLREMGVKTIAMESTGNYWQTLFAALQSAGFEVILVNGQQTQNIHKTDVKDSRWIQKLHSLGLLTSSFLPSEQIGKIRNYHRHRQSLVEEGAKMVNKMQKALRLMNIRLDVAVSDIMGKSGTAIIEAILQGERSGERLAQLANELVKKSKEEISRALQGNWREELLYELKDCYELYQIFQMRMIKCDREIETLLQIAIEKNNPDEVAPKLTKKKQRKNQPKFDLATLSYLYTGVDLFAIEGVSYNTVMAFIAEVGTDIKKFPTAKKFCNWLRLAPNNKISGNKRISSRTPKGKHKLAQSLLHAANAIGKTKKGALTSFFKRIAYKKGREAAIIATARKVAVIIWNMIDKQMPYKPLEEKIYNEKIKQNVLNGIRKKMKRLDLSINDLQTG

SEQ ID NO: 445186 - protein, 367 aa, unidentified
MKKVSTAATKQSRNISRQRLTIGLDLGDRNSWYCVLDEAGTIRLEQRVRTTTKALQEVFGAMPRSRIALEIGTHSPWISRLLSELGHEVIVANARKVRLIGESRKKDDRLDAQTLARLARIDPELLYPVKHRSAQAQADLMMIRARAALVRARTGLVNTARGLAKSYGERLRGCNVRNLDPEKAEGLSPELQRALEPLLATIEELSERIVEYNDRIEALAQTRYPQVELLKQIKGVGTLIALTFLLTLEDPHRFGKSRDVGGYLGLQPGRRKSGESEPQLHISKEGDPYLRTLLVQGAQHILGPFGIDCDLRRWGLKLAERGGRNGKKRAIVATARKLAVLLHHLWVSGEVYEPLHNSSRLTVAAAA

SEQ ID NO: 445187 - protein, 335 aa, unidentified
MGLHKTAICVMDESSKILLAQEVASEAEVIARALKRYDASQLKLGLETGQLSIHLTRRLRQLGYDAVCMDARQVAAALSTVINKTDANDARGIAHLLRCGLYRSVHVKSEDAIDKRVLLASRKQVLGQVAALESSIRGLCKLYGLRLGPARRAAFIPRIREAMAGMGELAREGIAAQLSALEALRRSLKQMDAALKEQTQHSKQAALLMSMPGIGPLNATSFMATLDEAGRFEDSRAVGAYLGLTPRQYSSGETERRGRISRCGPTHTRALLYEAAHCLLHFYKGESQLKTWGKRLAQKKGMKRAIVAVARRMAIILHRMLVTGQPYDDSKLKVA

SEQ ID NO: 445188 - protein, 361 aa, unidentified
MKGGPKMKIAVGMDLHARKTTAFAVSANASIEIKTNEHTFLEEFNKEFSSFSSNEEGMSALVRFLCGHDVHILIENSTKTHEIYWMLTGMGMDVTVAFAADLYRITKSKKKTDRHDAIELAGYMRRKLNGEIEFRVSFMPNREWLMRRELCRTLYDESSNLSDTRRQIRSHMLLHGMVYQATDIVGTAPLEYLGSLGDPVLDSLVARARDSRKRMKNLEHLILRQFGDDPLYKSLRTIDGVGSVIAAYIAALTVDVRRFENAKEFSAFFGLVPGMRESADSSPHCHITRRGDDVARMMIYQAALVHISIDPDGESGVTRTFRRLNGNGKKMPFKKAMTAAARKMAELMFAVMRSGRPYEPR

SEQ ID NO: 445189 - protein, 358 aa, unidentified
MDYYAGIDVSLELASVCIVDANGKIVKETKVESCPDALVAFFNDLRLPMAQIGLEAGPLSQWLHAGLTQAGFETVLLETRHVKAALSAMTVKTDREDARGIAQLLRMGWFRPVHPKSVRSQEVRALLVARKLLQNKLKDVELSIRGILRGFGLKVGEVTRKKFESRIRQLVTGHAMLERIADAMLSARAGLLMQFNKLDKSVRQIARYDKVCLQLMTVPSVGALTAITYKSAIDDPQRIKKSKSAGPLFGLTPRKYQSGETDVTGGITRVGDEMVRTALYEAANSLLSPKTRFSALKRWGLEVAQRRGLKRAKVAVARKLAVILHRMWVDGTPFRWSKADGAHTDPSRAKTSGSGSCR

SEQ ID NO: 445190 - protein, 413 aa, unidentified
MKKNCNSQTKSGQKTKPTKARGPVQRESKEVMAELVAKLSEKLEQNPAQEKAAEGKPQVAPAPNRDRLTVGVDLGDQWSNYCILGLEGETLAEGQLRTTREDVAEFFRALAAARVIFEVGTHSAWVREVVVGCGHEVLVANPRLMEGTKRRKRKNDRLDAQKLARLGRIDPQSLFPIQHRSTEVRQDLVVLRARDILVQARTQLINATRGLVKSMGARLPKCSSPSFPKKVEEMLPAEVSEALLPLVRLAEELSDRIQVYDEKIEKLGREKYGHTKLLRQVKGVGPLTSLGYVLTLENPDRFAKSRDVGPYLGLVPKQEDSGDSQPQLGISKTGDMMLRRLLVGSAHYILGPFGPDTDLRRYGLQLCDRGGKNAKKRAVVAVARKLAVLLHRLWISGEVYEPLRQGAPTTEAA

SEQ ID NO: 445191 - protein, 354 aa, unidentified
MELHTIGIDLGKTVFHLVGLNPCGEVVVRKKFSRKQLLHFTANLNVKLIGMEACGGSHFLGQALREQGHEVRLMPAQYVKPYVKTNKSDYIDAEAIAEAVERPKMRFVPIKSDDQLDLQSLHRVRERWVMRRTAVINQIRGLLLERGITLRQGRCHVDAALPGILEDASAKLSGAVRLLLAQLRLELDHLQMRIDEADAVIQKIAGENEACRRLVAIPGIGPVTATAIIAAIGNGAAFKKGRGFSAWLGIVPGEYTTGGKQKLLGISKRGNSYLRRLFVQGARAVLQQSAKQSSGLSAWLAQLTSRTHRNVAAVALANKLARMAWAVLAKNEPYRPPDVGRCGDNVTGLQMTPG

SEQ ID NO: 445192 - protein, 387 aa, unidentified
MPQPNDLSRSLATLEQDSTLIAVIEMGQSSWLVAGIVPGIERQPLKKLAADQDGLLQLLHRWRKEAAQAGHPIKRIAVAYEAGRDGFWLARWLRAREIEAYVIHPSSVPVSREHRRAKTDRLDTELLKRAFLGWLRGEPKHCSMAAIPTVEDEDARRPSRERESLVGECTRIVNRVKANLARLGIRGFRPRLAHAPKRLETLRTPEGTAVPANTLAELQRDMVHLRFVKQQIKEIETARAKRLEQASEGGRDAMVRLLARVVGIGIETADMLVQEVFSRKLRDRKAVARYAGLTGAPDESGQKRRERGLAKAGNARVRHAMIELAWGHLLHQKDSALAEWYERRTVDARGGTRKTMIVALARKLLIALWRLVTTGEAPAGLLLRPAA

SEQ ID NO: 445193 - protein, 387 aa, unidentified
MQASTVSTPITDRINTIFVAIELSQKTWLVTMHSPDKDKISRHKVQGGDHAGLLALIDRVRDRAARTLGAVPAVVSCYEAGYDGFWLHRLLMAAGITNYVFDPSSIAVDQRARRVKTDRIDGETMLRTLMAYLRGEPRVVRIVRVPMPEQEDAHRNTRERHRLTKEQTAHTNRIKALLRLHGFAVGQPRRRDWLNWLAAQRDWQGQGVPPRVLSEIENEHARLMLVRKQLDALARTPAAADPAPAVAEMVRRSELLQRLKSLGPAFATTLTQEAFYKDFHNRRQVASYFGLAPSPWQSGGTDRDQGISKAGNPRARCSAIELSWLWLRHQPDSELSRWFRQRTLNAGKRTRRIAIVALARKLVVALWRYLTTGLVPAGAVLKSAAVQ

SEQ ID NO: 445194 - protein, 366 aa, unidentified
MKKISTVAKRGNEIFKEPKLTIGLDLGDRASYYCILDEAGNVILEHSLPTTPKGIHQVFSRIPRSRIALETGTHSPWVSRHLSQLGHEVIVAHARNVRLIGESSRKDDQLDARTLARLARIDPGLLGPVRHRSAKAQIHLTVIRARATLVSARTALVNAARGLTKSYGERLKKCGTGQMNREIAKALSQELRDALEPLLREVESLNERIDEYDRRIEQIAKEVYPEVALLQQVKGVGTLIALTYVLTLDDPHRFRRSRDAGCFLGLRPGRRNSGMSEPQMHISKEGDRYLRTLMVQGAHYILGPFGQDCDLRRWGLKLAERGGKNAKKRAVVAVARKLAVLLHKLWVSGEVYEPLRNNHQVVSAVA

SEQ ID NO: 445195 - protein, 340 aa, unidentified
MPLYGGIDLHANNSVVVLLNEQDQVVYEKRLPNHLPTVLDLLDPYRAEIMGFVVASTYNWYWLVDGLMEAGYRVHLAHPAAMQQYSGLKDTDDHSDARWLAHLLRLGVFPEGYIYPKAERAVRDLLRKRAHLVRQHTANVLSVQNILVRNTGTRLSIKRIRELTKQELEGLLPEVAQVLAVTSSLAVLACLSHQIKTLEQTVHKRLKHTPSYEQLLTVDGIGTILAPTIALETGTIGRFPTVGHSASYCRCVDRSKIRNGKRKGQGNVKNGNRYLGWASMEAAQFALRFHPSAQRFYQRKLAKSNNNTTLARKAVAHKLSRACYDIMRDRVPFDALKAFG

SEQ ID NO: 445196 - protein, 455 aa, unidentified
MKHEPEEIPDAEHELVIERVAAVDVAKASGKVAVRVPGKAGRRVSRVWDVAATTAAVTELAEDLVELGVERVTVESTSDYWRIWYYLLEAAGLEVQLVNARDVKNVPGRAKTDKLDAVWLAKLTEKGMLRPSFVPPTEIRRLRDYTRLRADLTHDRSRQVQRLEKLLEDALIKLSTVATDIMGVSGRAMIEALIAGQRDAKVLAGLARGRMKTKRAALIEALSGRFDDHHAELARMLLDQIDALTAQIDTLTARIEQLLAAMPEAQPVDPRRDGPTSGHPVGVTADTLAECARLTTVERLDEIAGIGEHNAQVIIAEIGLDMSRFPTPAHLVSWAKLCPRTIQSGPVTRGGRTGKGNPYLKGALGDAAAAAAKTNTFLGQRYRRIVKRRGKLKALVAVARSILVIVWNLLNDPTARFHDLGPDYHTNRIATERRMRNHIAQLTAMGYRVTLEPAA

SEQ ID NO: 445197 - protein, 413 aa, unidentified
MQTLVEVGCGLDVHQATVVACLLRVRRDWRVDKQLRTFGTTTRELVQLRSWLMAEGCTHVAMESTGVYWKPVYAVLEGDELEIIVANAQQVKKVPGRKTDVKDAEWIADLLCHGLLRPSFVPPLPIRELRDLTRYRRKLVESRSAERNRLLKLLESANIKLASVATDVFGLSGRLMLEALIADKTSLSEMAGLAKGKLRRKIPQLELALEGKLQEHHRFLLRLQCSRLEAVEKDLAILEQRIQQKLEPYAAQLALLQEIPGIDLTLASVIIAELGVDMSTFQSVSQLASWAGVCPGNNESAGKRKSSRVPKGNVYLKTALVEAANAAARAKGTYLRDKFYRLKARRGYKRAAVAIAHKILVSIYHMLSQNVSYNDLGDLYLDKLNTHHVTRNLVRRLERLGYTVTLSPQPTAA

SEQ ID NO: 445198 - protein, 418 aa, unidentified
MADEIMAEETIRWFAGIDWGSATHQACLLDEAGTVVGERAFAHGGAGLAALCDWLVSLAGDPGSVAVAIEVPHGPVVDALLDRGFAVYAINPKQLDRLRDRISVAGAKDDRRDARVAAAGLRTDPHLFRRVLAGDPSVIELREWSRLAEEVQQERVRQGNRVRQQLWRYYPQLLALSDDVTAEWVLALWNMAPTPAQAARLREATLARLLRQHRIRKLDAPAVLAILRQPAIPVAPGVTEAAVLHLRSLVARLRLANQEFRQAERKLEELCTALSETQPTAQDSGPGDATILRSLPGVGPVTLATLLTEATGPLARRDYPALRTLSGVAPVTKRSGKSCIVVMRYAAQVRLRNAVFHWARVAVLNDRRCRGRYEALRARGHSYGRALRGVGDRLLGVACVLLRRGMLFDPDYGSSASA

SEQ ID NO: 445199 - protein, 349 aa, unidentified
MTLFVGLDVSVKETAVCVVDDTGKVVCEQKVPTEPDDIVRLLASIGEDYGRIGIEAGPLSQWLVNGLTAAGLPVVCVETRHMMALLKAQQINKSDRNDARGIAQMMRVGLFKPVHVKTQMAQEQRMLLTSRKLLQRKLLDVECDLRGTLRNFGLKVGVVSTGKFEARIRELVTGFPRLALVVEPILAVRQVMRQQFAVLHKMLLDTVRHDPVCRRLMTAPGVGVVVALTYRATVDQPQRFVHSRAVGAHVGLTPRRHQSGEIDYDGGVSKSGDTMLRTMLYEAAQSLLTRPGKWSWLKAWGMRVAQRRGMRRAIVAVARRLAVILHRMWVDGTEFRWSNSPAAVVPQAA

SEQ ID NO: 445200 - protein, 369 aa, unidentified
MESTKTRGPQQRAALMKRTTKYVALDVHRATTSASVREESGRVIARSVLPTDSAVITEFVRGMRGAVHVALEEGTQAQWLHDLLAPLVDRVVVCDRRGAPRQGNKADQVDADQLSEQLRRGGLRAVYHGSADRATLKELTRTYRNLVEDATRVMLRLKALFRARGIPAPGKRVYHPRTRAQWLAQLQDPGARLRAEALYAELDVLRHLRPRAKAAMVTEARRDPAWPVLRTIPFFGAVRVALLLATMQTPWRFRTKRNLWAYAGLAVVTRSSADYALVAGQTVRRRRPPLTRGLNRNHNRVLKDVFKGAATAATARPGPLQDFYHGVIARGTREELARLTLTRKLAALTLRLWKKGERYDPTKLTTPVR

SEQ ID NO: 445201 - protein, 313 aa, unidentified
MSDNLPQTIGIDISKASLDCYAHPIGVERQFTNTAKGHKALIAWLRQWPVERIAYEATGTYHRALEAALADWPCVKLNPERARRFAQATGILAKTDRIDAMLLARMAATLQPPVRPARSAQQAQIAELINARDGLVRDRTALKNREKNLTIAFLKRQCRQRLEQIERHIEALDTEITNLIAADAALARRHEILTSIAGVGTLTANQLIATMPELGSLENKQAASLAGLAPVARQSGQWKGKSFIRGGRANVRQALYMPALVAARYNPDLKAKYQQLVTAGKPAKIAITAVMRKLVVTANAMLKADRCWTQSPA

SEQ ID NO: 445202 - protein, 351 aa, unidentified
MIIVGVDYHPSVQQVAFLDTETGETGERRLNHSDGEAERFYRDLQRRQVKVRVGIEATGHARWFERLLAELKFELWIGDPARIKAARVRKQKTDRQDAQLLLRLLIEGRFPHIWVPSPENRDLRQLIWHRHRLVQMRTRAMNQIQAAAMNEGVRRKKTLWSKTGRRQLEALPLAPWATRRRQDLLELVDRLNTTIDELTAAAEQEARKRPEVLRLMTHPGVGPITALAFVLVLGSPDRFGCGHQIGSYLGLIPCEDSSADRQRLGHITKQGSSLLRFLLVEAAQAAVRWDPDWRRRFVHLAMRRDRRIAKVAMARKLAVSLYWMWRKGFDYPQTLQFGSHAGKPGYVHGVK

SEQ ID NO: 445203 - protein, 348 aa, unidentified
MAHFVGLDVSVKETSVCVVDDAGKVILEQKVLTEPADIIALLASLGVTFGRIGIEAGPLSQWLVNALTAAELPVICVETRHMKALLTAQQINKTDRNDARGIAQMMRVGLFKPVHVKTLVAQEQRMLLTSRKLLQRKLLDVESDLRGTLRNFGLKVGVVSRSRYEVRISELVESFPRLAAIVGPLLAVRRVMRQQLAVLHKMLLDMVRGDPVCRRLMTAPGVGAVVALTYRATVDQPQRFVHSRAVGAHVGLTPKRYQSGEVDYDGGVSKCGDALLRTMLYEAAQVLLTHGSKWSWLKAWGVRVAQRRGMRRATVAVARRLAVVLHRMWVDGSEFRWSKDSAAVPTAA

SEQ ID NO: 445204 - protein, 353 aa, unidentified
MTKIIGCDFHPRFQQIACLDTKTGECNERRLMHTGEAERFYRSFAGCQVRVGVEATGNFAWFRRLLGELGHELMLGDATAIRASNPRSQKTDKRDARHILRLLVEERFPVVWQPGVENERLRQLLLHRSSLVRMRTRIENQLDSVGKNEGLVESRRWTAKRRSAVEGLKLDGWYGERRRDLLALLDGLQERIKPLDQAVRTAAEADPLARLLMTHPGVGPVVSLAYVLTIGDWQRFPRGKQVGSYLGLIPCEDSSGDKRRLGHISKQGNPMLRWLLVQAATVAQKYDADWHRQYVRLSMAKHHGVAKLAIAHKLAVRLYWMLRSGQDYKQIVERGSHAGQSACPNGCGKKPRT

SEQ ID NO: 445205 - protein, 339 aa, unidentified
MDATTYGLDLAKRLMQVHWVEAETGEICRRQLKRGQLLEFFAQRAPAVIAMEACGSAHYWGRKLQALGHQVRLIAAQFVRPFVKSNKTDAADAQAIWEAAQRPGMRFVALKSQSQQSVLMLHRIRQQLVKIRSMQVNQLRGLLYEFGAELPSGRCAGLQRIPGELARLEAVLPPMVIDTVREQLARLRALDEDIARIERRLAACNKNDSASRRLMDIPGVGLLTATAAVATIGDARAFRSGREFAAFVGLVPRQCGTGGRVKLLGISKRGDVYLRTLLIHGARAVIAHGKQREPWLERLLARRPVNVAVVALANKMARTIWALLAHERTYRKDYAAAAA

SEQ ID NO: 445206 - protein, 348 aa, unidentified
MEHHVGIDVSLQLSSLCVLNADGKVVREAKVASEPEALVGFLRGLGLPITRVGLEAGLLAQWLYDGLREAGFDAVLLETRHVKAALSAMAVKTDRRDARGIAQLLRMGWYRPVHRKSVPSQEVRALLAARKQLQIKAMDLEQTLRGLLRGFGMKVGDVSRGKLPARVRELAAGHAMLERIVEPMLVACQAIWCEFNKLHREVLAVVKADEVCRRLMSVPGVGAVVSLTYRAAVDDPGRFKKSKSVGAFFGLTPRRYQSGETDVSGHITRVGDAAVRTALHDAANALLSRVTKFSTLKRWAMDVAKRRGMRRAKVALARKLATVLHRIWADGTEFVWGKDPTVSAATAA

SEQ ID NO: 445207 - protein, 394 aa, unidentified
MRLAGIDIASEIHVLAMVAADGSVALKATPFTEDDIGYQKALALLGTPGEVLIAMEATGHYWKNLFAVLAAAGHAVALLNPLRTHRFAGVDLERTKTDAIDAVGIARFAAEKRPATTPVPDALTEELRELVQLRQRLLQDFGDRVRQLHRLVDLGFPEFTRYVRTLDSELASAILRDYPTAAAFRGVSVRRLAALRYDGHHRVGLDLARQLIDAARRSVGQHHSATYRLQIRYACDDLDTLRHRLRDLDRDLDGKLRVHEVGRLLTTINGIGTQSAARVIAAVGDPAHFRSGSALAAYVGTIPALKQSGKRQSVRGALTPIGNAPLRADLWMPTLCAVRSNPWLRAHYQRLLARGKLPKVALLACMHKLVLAIYSVAKHRQPFVPHIASEQATT

SEQ ID NO: 445208 - protein, 407 aa, unidentified
MNAVGIDVSKGKSMMMALQPMNQVVLKPREYSHTKAGLGQMAHDILRLGEETRVIMEATGRYHEPVAAALHEYGIRVTVMNPLFIKQSGGGSIRKVKTDKADAKKIAKYGLDNWMDLREYAPVETIREQLKLVSRQFNLYMKNVVALQNNLISLTDKVFPGVNEVFSSKDRADGSQKWVDFITTFWHCECIALVSEAVFTERYRKWCKRKGYHFSGTKAAELYIGSIGHITTLPKNSNTKLIITTAAKELASAKSTLAVLRAEMDRLARQLPEYDTVRAMYGVGEKTAPQLMAEIGDVRRFPRRSSIVSFAGVDPAVDESGKHISKSNPITKRGSPHLRKTLYQIVCTYLKKSPTDEPVYQFLDKKRAEGKPYFVYMTAAQNKFLRIYYARVKECLIMASVQESSES

SEQ ID NO: 445209 - protein, 355 aa, unidentified
MCAKKTGSIEDLAVVGIDIGKDTFHLVGFDRSGQLVIRKQIKRLALNATFEQLPRCIVGMEACLSAHFVSRTLRGMGFEPRIIPAIYVKPFNKGQKNDYNDAEAIAEAALRPNLRTVSEKDQDQLDLQALHRVRARLVSRRTATINQIRAFLIEQGITVRSGLRALKNSFETILEQRRDEISPRMRGILIGLYGDWLWLDKRIEDVSGEIEEISRTEENCANIMTIPGIGPMISTAMVAAVGQGEAFDRGRDFAAWVGLVPRQFSTGGRTILGRITKRGSRYLRMLFVQAAKVIMMRPHRWSDFSFGPWLTEAVARMPRNKAAIALANKLARTAWSLLRHGTRFDAPKDATMEVI

SEQ ID NO: 445210 - protein, 486 aa, unidentified
MKNQPPHSSKKGKKGSRQRSSQKPWSEMNRKQRREMQRKIQSPDLNLEVVHPNAAGIDIGNEVHYVAVPPNRSSEAVRRFGCTTAELRAMADWLKQCGIQTVAMQSTGVYWIAVFDILEEAGLEVYLVNARETKNLPGRKSDVQESQWLMKLHTYGLLRNSFRPPQEIRTLRTYWRQRSDLVRAAGRHIQRMQKALTQMNIQLANVLSDISGKSGQAIIKAILQGERDGGELATLCDRRVQASQEEVAGSLEGNWQDDLLFVLQQEQDGYEFCQKQMADCDRHLEQCLQQRADRSQGASLPVEKRKERRKKKKGNHPQFDLRTALFRMAGTDLTLIDSVDVMTAMTILSEAGWDMSKWKTEDHFVSWLRLCPDNRISGDKIIGKGRLPTNNRVTIALKMAASTLRTSQTYLGAQFRRLRTKLGSPVAIKAMAAKLARLIYRMLRFGMQYVDQGAEFYEAQHRKLQISHLKRKASQLGFQIIEAAAA

SEQ ID NO: 445211 - protein, 375 aa, unidentified
MVHHSEAFVALDTAKLRNAVAIADAGRNGEIRYLGEIDNTETATRKRLVQLAGKYARLTFCYEAGPTGYGLHRLIKSLGHDCMVVAPSLIPTKPGDRVKTNRRDAVNLAKLLRAGELIAVWVPDERHEALRDLVRARDAAAKDYRVKRQNVSSFLLRYGLHFPGKKTWGRTHMNWLTSIKLEHHEQRIAFEEMLLAVRQVRERIERLQQAMRDAVPDWSLASVVEALQALRGMDMVGAIVFLAELGDLSRFENPRQLMAYLGLTPSESSTGESVKRGGITKAGNTRARRLLIEAAWSYRFPPRVSKDMQTRVGAAPRTAREIAWKAQTRLCGRFRTLTRKGKRSTIVATAIARELSAFIWAINREVARSHATASQ

SEQ ID NO: 445212 - protein, 343 aa, unidentified
MEIRSVGIDLGKTTFHLVALGDNGKVLLKKKFTQRQLIAFTANLQTCLIGMEACSGAHFLGRTLRQQGHDVKLIPAQFVKPFVKSNKNDFIDAEAIAEAVDRENMRFVPIKTDDQLDLQALHRVRDRLIARRTSVINQLRAFLLERGLVFAKSPARLRERMPEILENADEDLTPRMRNLLALLWNEWKDLEQQLVDLNQEVERIASSDAACTRLRQIPGIGPLVATAIVAAIGNGAAFRKGREFAAWMGLVPKQYSTGGKAKLAGISKRGNHYLRKILIHGARAVVLRSKRDRIAMGQWMTALEARAPRNVLIVAMANKLARIAWAVLSSGQDYRAVQEPVAA

SEQ ID NO: 445213 - protein, 387 aa, unidentified
MQRNDLSRSLVAFDQNSTLVSVVELSLKSWLVAGLMPGVERSPLKKQGADPDMLLALLHRWRMEAIKAGGKVERIVVAFEAGRDGFWLARWLRARGIEVYVIHPTSIPVPREHRRAKSDRLDTQLLMRSVLGWLRGEVKHCSMVAIPTLAEEDARRPNREHETLVKERCRLVNRMKATMVRLGIRNFNIKLRKAVDKLAGLRTPEGVPLPANTLDELRRDMARLRLIQEQTKAIETARLARLKAAPQEGAHPMLLMLAKVLGIGVETADMLVHEVLSRDLRDDRAVGRYGGMTGAPDESGSKRREKGLAKGGNARVRRGMIQLAWRWLMFQKGSALAQWYRTRTAGARGDVRKTMIVALARKLLIALWRYVTTGEVPAGAKLRPAAI

SEQ ID NO: 445214 - protein, 406 aa, unidentified
MQGPVITVDVSKGSCHYQPYVSNGHPMRKPKVLHDTVEGFQSLSDLIDTMKDRYECETIPVIFEATGVYHHCLQKYLDDHQIPYYIISPLMSASYRKTTPNSNKTDDLDCSHIAKAYYGECNLFPYDKPSKSFHNLRELNRYYECELNHLRMRKNTFRKYLDIVYPRLDKCFKGHSSLYDEIPMEVIKQYPHPSLLLKHKEETIVKKIEKKTSHNALFIQNIVHEMYECSMHCYSGADVTDVESMILPELVDDLQSQKERCDEILKQLVSEAQKTPYFTSIVSIVGIGDNLAARIIAELGDMSRFSCRRAITAYAGLNPKIRQSGDMDGIHLAISKKGNKHLRCLMYLAVSCNYRLKKGDVLYEFNQKKRQQSFSPLKPKAATIATAHKLLLIIYALCTNGTVYHS

SEQ ID NO: 445215 - protein, 437 aa, unidentified
MDGRAKRRKSQKQQQKTMNDSTQWQQHRAFGALDWASEKHSVIVVDQTGKVIEDFEIEHSALGWKKFREKLQPYGSIPFAIETSQGVAVEQLLEAGMIVYPLNPKSAQAYRERKAPSGVKDDRLDAWSFADALRVDGQDWKALRPEEPLIKELRLLCRDEVSLIEQRTAFVNQLRHALAEYYPAALEAFEDWTSISAWMFLQRFPTPELLAQAGKRQWQKFLHSRRLWGSDQGPRRMEIFARATEFAGTAPTVKAKSLLALSLVQMLFAIEKQLALYRQRIEELFARHPDHDLFGSLPGAGPKIAPRLLSEIGDDRQRFGGDPQNLQCLAGSAPVTKRSGKQRKYWHVHQRWACDKHLRHAIHLFAEQSLSRCVWAEIYYQHHRQKNQSHANALRRLSHRWLKIIYKMWIDRTPYNAELHHRNQLQHGSWIFQLQQS

SEQ ID NO: 445216 - protein, 415 aa, unidentified
MADQRQWYAGVDWASESHHVFLTDGDGRKIAERVFKHSGEGLAEMAAWLMVASGATDPSDVMVAIEVPHGPVVETLLERRFKVHAINPKQMDRFRDRFTLAGAKDDSRDAEVMSSALRTDPRCFRLLAVADPVLSELREWSRMAEELGVERNRLTNRMREQLWRYFPAMLELDSDLGAGWLLDLWQTVPTPDKAAGVRETTITKLLKRHRIRRFDAAHVLGVLRKPPVQVTAGTIEAASAHIATLIARIRLVNRQIGQAHERLDSLTARLVPPEEAAPGQSKQHDAEILASLPGLGRIVLATLLAEAYDALQRRDYAALRSLTGVAPVTKRSGKSCIVVRRYACHPRLANAVYHWARVAMQHDPTSRAKYAALKSRGHSHGRALRSVADRLLNVACAMLKSGTTFNPAITMQKSS

SEQ ID NO: 445217 - protein, 485 aa, unidentified
MKTKQQEGAQEAKKANPSANQDKWHDMNRKQRREMMRKIQSEDLSLEVIHPDAAGIDIGNESHYVAVPPSRDSQPVRRFGCTTAELKAMAAWLKQCNIRTVAMQSTSVYWIAVYDILEHADLEVFLVNARDTKNLPGRKSDVQESQWLMKLHTYGLLRNSFRPPQEIRTMRTYWRQRNDLVRAAARHIHRIQKSLTQMNIQLANVLSDVSGLTGQTIIKAILGGERDPYKLAAFRHPRVKASVEQIARSLEGNWQQDLLFVLKQEQDGYEFCQRQMTECDQQLSHYLKQREDRSQAAPLPEEKRQQRLKKKKGNKPQFDLREGLFRMTGTDLTQIDCVDVMTATTIISEAGWDMSKWETEHHFVSWLRLCPDNRISGEKIIGKGRLPTNNRVTTALKIAASNLRVSDTYLGAQFRRLRTKLGAPIAIKAMAAKLARLVYRILRHGMKYVDQGATFYEAQHRQLQIKHLKWKAAKLGFKVIEVPAA

SEQ ID NO: 445218 - protein, 343 aa, unidentified
MQVVRIGLDLAKYVFEVHGVDSLGKVAVRKTLRRDAVARFFANLPRCLVGMEASNGAHYWARVLSDLGHEVRLISPQFVTPYVKSNKNDRNDAEAICEAVGRPSMRFVPPKSTDQLAIQAVHRIRRRLVADRVRLVNQIRGLLSEHGIVIARDISQLRRSLAVIVGNGDDGLRGMVRSLMRELQAEMAEIDDRIATYDRRIREIFRASEQCQRLGKIEGIGPVTATALIAAVGDRTCFKNGRQFAAWLGLVPKQRSSGGRARLFGISKRGDRYLRTLMIHGARAALGKVAGKQDPRSLWLSKLRQRRHPNVAAVALANKNARIVWAMLSGGTFYEHAPSVKPA

SEQ ID NO: 445219 - protein, 432 aa, unidentified
MSKRRDRVCGADVHRDLIVATTYGEDETPIREHFGTTHAELERFRDWLIANNCQRVAFEATGVYWIPIYDVLSPSIDTIVANPWMIKNIPNDKSDAKDSSRIASLCFNNQIKRSRIFSKDDRALRTMTRSRSGYIKTRTQLRNRIHKYLASCGIKLSSCISNIFGKSGRYILNGLVEEKSIDEILDGIPSGKIRKKQDLIRDALGNDLDETSRVLIKDTLDLLDLLETKVEKTSQMILDQLQGKNKDLAIVMSIPGIGFIAGSIILSEIGDYRDFGTPGQLAKWCGLSPGENESAGKKRPCGITKQGSKYLRTILVEIAHVVARMGNTRLSRSFRSMKGRKNYNVAITALARKLICLIHHLLVNQELYQEGDCDKRDSKPAKSECVSASLSEEDLEDKVAAIVDAFYRLDANSQKVVSRSILVPGRQLDGGG

SEQ ID NO: 445220 - protein, 401 aa, unidentified
MVSDFMKGRYNLMKIYVGIDIAKLNHFAAAISSDGEIILEPFKFTNDADGFQLLVSKLESFDKNSIIIGPPSTAHYGDNLVRYLVAEFYQVCVLNPIKTCQMRKNNIRKTKTDKVDTFVIAKTLMMQDDLRFVSFYDLDMMDLKALGRFRQKTIKQRTRLKIQLTTYVDQVFPEIQYFFKSGLHQHAVYALLKEAPSPKEIASMHMTHLANLLKVNSHGHFTKEQAKELRVLAQKSVGANDSSISIQITQTIQQIELLDSQLEKIEAEMTDIMRFNDSVIMTIPGIGYINGGMILGEIGDIHRFSNPNKLLAFAGLDPSVYQSGNFQAKTTRMSKRGSRVLRYALVNAAWNVVRNNATFKAYYDAKRAEGRSHYNALGHCAGKLVRVIWKMLTDEVEFNLE

SEQ ID NO: 445221 - protein, 399 aa, unidentified
MRYAGIDVGSQTHVVAIVGPDGDVMVKPTSFSENAAGYDKLLELLGPPSKLIVALEATGHYGKNLCAFLRHRAYGVAVINPIRTNRFAQENLARAKTDTIDALGIAHFALQKTLTPQPPIDTKAAELKELVLFHERLVQDFTDRVRQLHRLVDLGFPEFRTLVRTLDSRLATTILREYPTAAAFDQSCRRRLARLRYDKQRRVGPLRACRLVESARSSIGQHHTPAFQERVRYITQDLDRLRDRIDSLKSDIETVVGDLPLACLLTSIPGIGSLTAARIIAAVEDPARFRSAAAFAAYVGVVPATRLSGLHRPTRARITSLGNARLRKALWMPVLSSVRHNPWLRDYYQRLRERGKHPKVALTAVMRKLVTAIYSVAKHQRPFTHPPPGPTRSRLSPPT

SEQ ID NO: 445222 - protein, 369 aa, unidentified
MLYLAIDQHAKQITVCVRNEDGDTVLRRQVSTRPEKIKAFFQQLTEMDNQFMAILEVCGFNDWLIEVLRKWNCREIVLIHPEKPSKKKTDRRDAHKLADLLWLNRERLATGQIVHGLRRVYLVTQKEREDRQLTALRKTLGQRRTRTLNKIHRIINRHNMIWNYPTKSFQTQAGRRWLETVKLPEIDRLEMDMLLEEWKTWDEEIAKVDEKIAQRASQVEPGKIFSPTQILMTAPGVSHYSGLTLASRIGPIKRFPRPRSLANYFGLTPSCRNSGNVQDRLGSITKEGSKIARFILGQLVLHFLKKDPKMREWYRRIKLRRGSKIARVAVMRRITTIFWHMLTHEEAYSIGGPPPRLRREAQTARSEAA

SEQ ID NO: 445223 - protein, 317 aa, unidentified
MHQHNTTYVGIDISKSKFDVRSTEGSKGVVYQYTPDGMKQFIQLLQKLQPELICLEATGGLERKLVALLHKHKFPVAVVNPRQIRDFARAKNRLAKTDQIDANTIMEFAQTMNPRITEPLIQAQQKMRDFTARRGQVCKQLLQERNRLGSAADKQVAKLINQSIRFLEKQLKAIEKELKQLIDADEESRKRSKILQSVPGIAGTTAALLISELPELGSLNRKQISRLVGVAPTNRDSGTLRGKRTIGGGRVRVRNGLYMPTVTALYHNPVISTFYKRLVKNGKPKMVALVAAMRKLLIILNTMLKEGKQWEAKVINF

SEQ ID NO: 445224 - protein, 426 aa, unidentified
MDVNCSPTTTLVAIDIAKFFHDVLIEYPDGCRRRMRIANTRADWEKLAAAVRTAGAPCQVAFEATGDYHRPLACFLDQQGYTLQLASSVAVARTRDALYNSWDKNDPKDAQVILHLLKTGATQHFHDPLKSGYHDLLEIANTYEQISRRKVVVWNVIVTHYLPLYFPEAEQYSHSSRAEWFTQLLILAPCRAAVAKYTEAEFRKVARKIGGAKTDKMRWLNDFYRTAMSSVGLPVVEESEAIRMFRVVLGEYLAVCKLRARLEKEIVDRLKDHSDFQRLQTIPGIGPILALIILAESGDMRRFSHHRKFLKYCGLDLSTEQSGQFRGTSKLSKRGNARLRYAFWMAGAVAVGARQNTFRQKFERYIRRDPGNADLRRKAYTAVAAKIARVAYAIVKAGTDYRRFHEAASPGGGVRSLRSVEAVTTS

SEQ ID NO: 445225 - protein, 323 aa, unidentified
MSQSPFQITLGVDIAKLKFDVACLINGKYKHKTFTNDEPGYSVFTAWFIALCCDVKPLICMEATGSYSFPLADFLVSQGHAVSMVNPAKVHAFAKSELSRAKTDKADAKLIARYALLVQPPLWTPPPANIRELQALVRRVEHLLEMIRMERNRQDTANSKVIDSIHTVLQTLEAELEATRKAIHDHINNDPDLKHRGDLLATIPGIGEASIAHLLLALSQHHAFTHAKQVVAFAGLAPALRQSGQWSGSTHIAKNGDALLRKALYMPALCALRFNPLIRTFCERLKANGKNGKAIACAAMRKLIHIAFGVLKSGKPFDPNYAA

SEQ ID NO: 445226 - protein, 344 aa, unidentified
MGVVVGVDSHKSSLTIAVLDDLGRPIGVREFVNDSHGHDAVVKWVALHGTKLVIGIEGSGNYGAALTRRLLEAGEDVREVPAFLSHRERKKSASRGKSDAHDAVAIARVVARGEGLSSPQRTAIFEDLKLLSDHRDQLVRARTQLINRTHKNLVISHPGYEGLIPKLTSNKNLRDTLKMLRGDHCVRAELIRDRIEEIRRSNAKIAAVEKQMAAKVTESGTGLTQLQGIRFIVAAKILGEIGDPARLRSRSSFAMMSGTAPVEASSGRTKRHRLNRGGNRQLNYALHMMAIARCRGDQDTKIYVARLRSEGKSGKEAMRCLKRQLSNVVFRQLIADLKGSEMAA

SEQ ID NO: 445227 - protein, 389 aa, unidentified
MEARTVNNLPPAAAHDDAVRCLLAIELSKKSWIVAVNTPLSDKISRHTLKAGDGKELLDLCERIRTRVARETKKRVEIVSCYEAGYDGFWLHRLLETHGIRNYVIDPASLQVDRRARRAKTDRVDVERLLRSLMAYLRGEPKVWSVVRVPSVAEEDDRRRHRERGRLINERIQHVNRIKGLLAIHGIYDYQPLRRDRMQQLEQMRTADGRTLPPRLKAEIQRELERLVLVVGMIKTIEAERDAIAAAKTETEHTSAKKVQDLAKIKCIGPEFATTLVGEVFYRSFDNRKQLASYVGLTPAHFQSGSMCRDQGISKAGNTKARTVMVELAWLWLRHQPDSPLSVWFRDRVGKLKGRIRRITIVAVARKLLIALWRYLETGLVPKGAALKA

SEQ ID NO: 445228 - protein, 337 aa, unidentified
MKVTLIGIDLAKNIFQVCDVNQNGKPVFNKQVKRARLMSLLCEYTDAQIAMEACSGSNYWGRELKERSFKVKLIPPQHVKPFVKGNKNDRNDAFAITEAARRPHLHGVEPRTLAQTDMIQVHRLRERLVDQRTGLINQLRGFLTEYGIVVAQGKEKLQSALPGLLESDDNGLTLSSRRTLGRMQQQWLSLNQEIRALDKEIACQAKEHEGACRLMGVKGIAEKTSTAVIAHIGNGSSYKNGRHFSANLGLVPKEHSSGGKQKLGSITKRGNRYLRRLLIQGAWSVIRYADKSEDRLSRWAKQLIARRGRHKAVIAVANKLARIAWSMLYHQTDYRAG

SEQ ID NO: 445229 - protein, 341 aa, unidentified
MKKFIRIGVDLAKNYFQVHALVSDVGPAVTRKLRRSKMHEFFSQIEPSLIGMEACGSAHYWARELKAMGHEVLLMPPAYTKPYVKRGKNDAVDADACCEAMSRPGMRFVPVKSAEQQATLMLHKTRELLVKQRTMSVNALRGHLSEFGIIAAKGIGRVDELLDLVESDTTLPNAARASAKVLAQALEGLDKAIDDLEDEITNAQAQNEMTRLLYKVPGIGKIIASVIAASVPDPSVFKSGRDFTAWLGLTPRQNSSGGKQALGAITKQGNRYIRKLLVLGATSLLNVVGKRKGALRDWIVGLLAKKPARLVTVALANKLARILWAMMKTGESFRTEIFAKG

SEQ ID NO: 445230 - protein, 420 aa, unidentified
MQTGDGKRSRGELKHTPEALDAWAAELSQRFGGRPVAIALEQARGALFATLSKYAHLHLFIVDPSRLNHYRKSVSPSGAKSDLVDGDLILDFQLKHPELLRCQEPDTVETRSLQFLTEQRRALVNQHTCQVQVLTHWLKQVFPQMIAWFDDLSTPLVADLLQRWPELAKLKKARPETLLQFFHDHNCRSAERNQQRLEEIRTAVIATHDAALLKTANLVIHTSVQMLATLRASIEQFEGQIQAVYATHPDRFLIESFPGAGPALEPRLIAALGTNRSRFKSAADMACCFGIAPVTESSGNSRWVHWRWACSKFVRQTFHEWAACTVRKQGWARDHYERQRAKGKGHHAAVRSVAYKWIRILYRCWRDRVPYSEQRYLEALGAHGVGKGKATASAVEPSINLPAVQWKNCGGFSKPTQFSS

SEQ ID NO: 445231 - protein, 366 aa, unidentified
MRVYVGLDVHSKWSVFVIEQEDGKVIGRGQIPTTPAGLGRLKEEHRLSPGTAVALETGTVAFYVARELTRLGLKAVVIDAHEVRVKAQRPGQKSDRRDAFEICEGLRRGIYRTIVHVPSEEISRLRETLSRRRHFVWVRTGEINAAKRLLRAAGLGHLSKSLGTEAAWKKLLVALPVEGELRSYVAQHGAVWRCVQEQIAVLEEALATQQAPVASTVERLQSVPGVGPIVALTAVAVFSDVSRFGSCKEAASYGGLVPSSNQSGDRDTHGRITKRGSAALRSMLCEAAHHAARPTHPLNPYFAKLCAKGGYKKAVVAVAHRLCRILFAMLRDGAVFDIGKLGVEEGPFRRTRIRHYRLKAVPAVRG

SEQ ID NO: 445232 - protein, 317 aa, unidentified
MSDATTTVVVGIDVSKSHLDIGAEGAVLQELRYTNDSDGHQALVEALVAARPRVVILEPSGGYEAELVCSLQAAGLAVVMVNPQQARDFARSMGERAKTDRIDAAMLASFGAVLVRRPDLEALIQPKIAAEQQDLVALVNRHRQLLTMLGAERTRLAMARVTVRPSIEAMIKAIRKQLKDVDAEMAANVKRHYAAQAKLLRSAAGIGPIACAWLIATLPELGKLDRREIASLVGVAPFARESGLMRGKRRIAAGRFDLRRVLYMATLTASRYNPVIKVFYARLIAAGKPHKVALVACMRKLLTILNAMVRTATPFRA

SEQ ID NO: 445233 - protein, 386 aa, unidentified
MKDETFVPREYDVFAGLDVDKKSIAATFSSPQGFIRSLHMPYSVDYLLNHVRKHFGDQKVAFVYEAGPTGYGLYDGLVAQGYRCLVAAPSMIPRAPGQRVKTNRLDSRGLSESLRGGQLKSIHVPSPIYRELRHLTQLRDTVVREAAAHKQRIKALLLLEGIGFPPATAGRQWTLRVKAQLRKLRCSRTVRFKLDQLLDSLEFCEKQVVSSTKEIRRFCKEDVELFQSIEYLMSIPGIGWIVASQLLARIGDWRQIDNVRQLGSFLGLVPTENSTGDSVDRGSITRAGDGRLRSKMIQAAWSAIRQDGELREFYRSVCQRNPRGKGARIAIVAVARKLSTRIYAVLKKQRPYIVRKQVHSAPLTQEETSPQGTTRRCAEPGETDNS

SEQ ID NO: 445234 - protein, 421 aa, unidentified
MSQVIIGMDPHKRSATIEVMAADEAVLGGGRYETDAAGYAAMPAGVRRWPHRIWAIEGSRGIGRHLASRLVAEGEQVVDVPPKLSARTRVFTAGQGRKTDATDAHSVALAATRMRGLHLVIDDVQLEVLRVLADRRRALGEDHTRMICQLHRLLLELITGGAKRSLSAAQARALLARVRPRDPAGQARRRVAAELIADLERIYQRKKAADKELAAVVKATGTTLMALDGIGPSGAARLLAGAAGITRFPDRGHFASWNGTAPIDASSSDHVRHRLSRAGNRQINRVLHIMAVVQLRHPSKGRAYYDRKVAAGKTPMEAMRALKRRLSDVVFRQMAADARAARTGPGGHTGAATSSSAAGSDPDAGSSDKSLPGPATSDPTPQSHPILPDTPAAIVPRRTAAAVKRTLLDGREDRRTLDRRE

SEQ ID NO: 445235 - protein, 311 aa, unidentified
MEHSRVIGIDVSKDHLDVHVRPTGEAFRVRCDDAGFAALIERVRPLAPTVLVLEATGGYEVTVAATLAGAGLPVAVVNPRQIRDFARATGQLAKTDTLDARVIALFAEAVRPAARPVPDAQAHALGELVARRRQLVEMLGAELNRRRLLRDGRLQRHLDAHIAWLKDALRRLDHDLTTLIRSTPAWRETEDLLRSVPGIGPVTACTLIADLPELGRLDRRKIAALVGLAPFAHDSGAFRGRRMIAGGRAHIRRALYMATLAATKHNPPLRAFYQRLVAAGRPGKVALTAAMRKLLTILNAILRDRRAWLSP

SEQ ID NO: 445236 - protein, 459 aa, unidentified
MSQRRRPLQPAAPPVVNPHAAGIDIGATTIYVCVPLDRDPEPIRHFATFTEDLHTLATWLERCGVTSVAMESTGVYWIPLFQILETRGVEVCLVNARHVKHVPGRKSDVQDCQWLQYLHSVGLLRPSFRPPEAVCAVRSLLRHRDTLVQLAAMHTQHMQKALTQMNLQLHHVLSDLTGGTGLAILDAILAGERDPQVLATHRDPRVKAAPETIVKALVGDYRVEHLFTLRQALESYRHYQRLIGECDAQIATLLDSFASRIDPGAPPLPPARAKVQRHQPPFDLRGELYRILGVDLTAVPGFATSPLTLFAELGRDLRKFPSGKAFASWLGLCPDNRISGGKVLSVKTRQVIHRVANVLRMAAQSLQRSRSALGAYYRRMRARLGAPKAITATAHKLARILYHLLTTRQPYEETRVAAAEAHYHRRSESRLRAHARALGFQLVPVTPEAISMPPTVEVS

SEQ ID NO: 445237 - protein, 327 aa, unidentified
MNEKILGIDISKKKFNVALEKGELVESGTFRNDETGFTKLGRWLRKRDAKRIWACMEATGQYGDELALHLHEQGQKVSVVNPARIKKYGESKLQRNKNDKVDARLIADFCRTQAPYLWTPPAAEVRKLRALARRQNVLQGDRTREKNRLQAGYHPPEVEASIRAHLAFLNEQIAAIEAQTQQHINDHPNLKKDQELLDTIPGIGLKTAACILGELSDVSRFDHARHAVAYAGLSPHNHQSGDSILRPAHLSKIGNSALRAALYWPAITALRFNPIIMALGERLAKKGKKKMVIIGAAMRKLLQLAYGVLKSGQPFDPNFAANIQDNA

SEQ ID NO: 445238 - protein, 347 aa, unidentified
MYHVGVDLHKETSWFYIIDSNGKKVDSKNILNKPEILRKYFEQIPNPFVLAVEATYNWYYFVDLAQEYAKEVFLANSYELKAFAKRHKKTDKIDAGLIANILQKGFLPVVAIADQYTRQVRELLRYRLRLVIDRSRNISRLKALLDKLGINSNGDFTTDKRLRTITMEKSPCVYTQIVKNYIKIITELTQKLKTIEKDISAVSCSNHHMINLMSIPGIGDFSAALIKSEIIDISRFASFNRLCVYAGLSPRVSASANKIHHGPLNKNRRKNLQWILLENVHHFIKAIPEMQEKYEILKQRKGHNTAKVAMAREMLKIIYHVLKEQRPFYFSNKNQIQSVASPALSGV

SEQ ID NO: 445239 - protein, 474 aa, unidentified
MNTINKLTTFANGIYKVLVGLDLASKEIQLSLADLDGIEHDFKLSPKNFFKFITEHANQNFVFAMEACGGSNYWATLIQRLGAEVYIFPAKSCRNHNCSKNKDDKGDARGVRNALLIYKTYPNSATFKHCIIRDEVNRQEMFLVKSYSDIKSNITATNRNLIAFLREQDALKGYSYEMTPSQTIRCIRDFISEYEHCKNKVSGLCSYLERQCAMLEMYAISLAGIENEFFEKYASTNQSCEKYLSVQGVGVPLAVAVSVYTQDKFDRFRNANSFISFMQLVPVHHGTGGKNKVGKHSTEGNKILKALFYEGGNSLVVAHNKLITNKKLDDKKLDLKDKRLKIAYAKDIARQIFKVATDDPLKSEPAQEQKNDPAQWNTSSEIVLSTSDKKLARNKISKFRSKLKKLENSIRSALVDPVLYEILKDTAGEQLQSLLNSIKLKVNESTPWQKHLIAEIKSSAEYNEDSSVYEAALD

SEQ ID NO: 445240 - protein, 345 aa, unidentified
MEHYVGLDVSLKLTAICIVDRTGKIEREGVVASDPETIAAFVKLHAPHVARVGLETGATSTWLWTELSKLGLPVICIDARHAKAALKMQINKSDRNDAVGIARIMQCGWYKEVRVKDLDSHAIKALLVSRALLVKIKRDLENQIRGLLKNLGLVIGRAKMNVFAVRAAELTEDRPELAGAVEPLLKAREAIGRQIADLDGKVMRLARNDAQVRRFMTAPGVGAITALCFLATIDDPTRFKRSRSVGAYVGLTTRRYASGEVDWTGRISKCGDKMLRCYLYEAANVLLTRVAKWSALKAWGIRLAKRSGLRKAKVAVARKLAVILHRMWIEGSEFKWSSKEANQPA

SEQ ID NO: 445241 - protein, 328 aa, unidentified
MAATPPLTFVGIDVSKAQLEIAVRTGAQPRRVPALAQVPNDATGIARLVRALTTLAPTLIVLEATGGFQSAVVAALGMAGLPVAVVNPRQVRRFAEAMGQLAKTDRLDAALLALFAERVRPTPRPLPTETQQELDAVLLRRRQLIEMRAAEQVRLAQATRREVRASLTAHIAFLTAQLDEGDGLLDRLVAASPLWQAQEDLLASVPGVGQVTARTLLAELPELGTLSRHAVAALAGVAPFARESGGWRGTRQIRGGRAVVRTALYMATLAGTRWNPVLRAHYQRLRAAGKPAKVALVACMRKLLTILNAILKTQQPWCASHPSIASTA

SEQ ID NO: 445242 - protein, 351 aa, unidentified
MDIWSLKTVLEQGSLHRLPSNPNGCRGIEARILQDRVLEDVMKTKVFVGVDVSKDSLDVAISAEEQILTFANDQKGVDALVKKLSRIDVELTVFESTGGYELLAASSLAEAGLPVVIVNPRQVRNFAKATGILAKTDAIDARVIAHFAQAVKPDVRPLKDRATSELTALVTRRRQIVEMIVAESNRLKLANKRNKKDIKDHIRWLEKRLDKIETDIGQTIQNSPIWHCKDNILRSVPGIGPITSATLICDLPELGVLSPKKIAMLAGLAPLNCDSGKFKGRRRIWGGRAAVRSGLYMATLAAIRCNPAIKGFYQRLIAAGKCHKVAATACMRKLLIIANAMLRDQTLWQQN

SEQ ID NO: 445243 - protein, 338 aa, unidentified
MSKITTIGLDLAKNVFHVVCCDEHGKVVKKKMLKRSQVLEYFANLSTGLVGMEACASAHHWARELGALGHQVKLIPPQYVKPYVRGNKNDYNDALAIAAAVIRPEMRFVSVKTREQQDLQALHRLRERRLQERTALCNQLRGLLAEYGLILPKGVNILRRRLPELLEDGENGLSDLFRRLLAQSYRQLQELDGAIDFYTQEMKRPSQQDEACRRLQTIPGYGPIVASVFHSVVGNGEAYRRGRDVSASLGLVPRQHSSGGKEVLLGISKRGDRYLRSLLVHGARSVVIRAAKKDDRLSCWINKVKAERGFNKAVVALANKMARIGWAVLVNKTVYQVA

SEQ ID NO: 445244 - protein, 397 aa, unidentified
MIAVGIDVSKSKSTIAILNGDGSIRAKPFDVHHVADELQALVDYIKRTSEPPTILMEPTSHYHYPLLKAFTEAELPVCLINPYQMKKYGDTELRKAKTDKRDSLRIAQYALEKSYSLIPYTPQDQKYEDLRFLSRQYSQRISTLTVAKVQLLSLLDETMPGITTILPLKSRDPDNCVLLRFIKRFKSFDVIRKMGKTRFLDSYQVLVKKTKDRFAGSKGLAIYELVLNSVTTRGENPLSAMTQDQCVDLVSTSQKAADEINLQMRIIAETMPEYKVLRSMAGVGDRLGPIILGEIGDIRRFHSGKALNAYAGNDAPPYQSGQFESRNRHISKRGNPALRKACFEVMQALKLTKPQDDPVYLFLLKKEQEGKPYNVAKMAAVNKFLRIYYARAMELYK

SEQ ID NO: 445245 - protein, 403 aa, unidentified
MTSDDGSGQVYGGVDTHEDSIHVAVINTAGRDVGDREFPTTPAGYDRALAFIASHGEPIAIGIEGTSSYGVGITTAAREQGLLVVEVMRPERAERRRLGKSDPIDAYQAARAAMGSHRIAPAKDSTVIEGIRALHNARRSAMKARTAAMRQIHTQLITAPSQIRDRFRDMGSEKRLTVLAKMQVPVNRTPLERAVLLALKTLAMRCNDLQREHERLGVELDQLVTAANPGLRAAYGVGPDTAAQLLLTAGGNPERLRSEAAFAALCGTSPVPASSGKITRHRLSRGGDRGANGALYRIALVRMSSDARTKDYVAKQREAGQSSKEILRKLKRAIAREVFRYLATPVTAPTVADLRPLRQSKNITLTAAANHFAVWPSVISRLERGLQRDDTLAETYREWLQAA

SEQ ID NO: 445246 - protein, 344 aa, unidentified
MDATTVGVDLAKNVFEIALADERGHIFERQRLNRARFDRFFVNRVPCRIVMEACGSAHHHARRLRDQGHEVCLLPAQYARAYVRRNKTDAADAAALIEAARCPDIRPVPIKSVDQQALQQLHRLRSQWMGARNSRISFLRGCLREFGISIPLGPKRAIDAVRVTLADPASPVPSLLHPSLIELLEEIDSLEQRCKNLDRELKRLHVDDPVIERLLKIPGVGDLTATALRASVVDVHRFPTGRHFASYLGLTSREHSSGERRRLGRISKQGDPYLRTLLIHGARSVLLAAQSAQRRGLTLDRLRTWALDLQERRGHNKATVALANKLARIVWATWRHERDFASVP

SEQ ID NO: 445247 - protein, 349 aa, unidentified
MREYISFDSHKYYTLMEREDIQTQVARQRRIEHAPDAIRAALRGCEADTPVAVEATGNWYWIVSEIEQAGLRPLLVHPRKAKLMMGMINKTDKLDVHGLNRLQRNGTLPTVWIPSADLRDLRELTRTRLMLSAQRTRLKNRLTATLAKYGRQHSEFTDAYGPRARTELRQRLEALPTQTRFVSELLLQQLDFVQQQIQTIEQRLQQLVQITPEMQLLQTLPGIGVILAATIALELGQIDRFASAAHLASYAGTTPRVHASGDKTRFGALRTDINQYLKWAFAEAGNSVALYHQRRPQRHVSQLYRRVRLRKGHGKAIGAVARHLAEATFYVWSRREAYREPTGGRSKAV

SEQ ID NO: 445248 - protein, 420 aa, unidentified
MQELVRKEIPAKRLIVAVDCGKVANRALLASGERGVIGESVSLSTLREGIDELERLIASAPAAGPPVIALEATGSLHRAWAAELERRFRGSLRLFAPSETQAARTQLGSRRFKTDERDCAALVSLARQGLGRRPDDQSIEALLSAVRYRRALVGMRKVLQQRLHYQLNALAPGLSAPAGHGRALKLEDPSGQAVLACAVAFLGRAPSARSLSARAPGRLTRRNALFWAERWRGCLPAPADAAQRAERLGWDLERWRVLQRDIARTEGQLTTLLAATQGQVLTTLPGVATVRAAAFAAHSLPVERFASAEQLYSATGLAPASYESGSLQKRGRISRAGLSERRDALMGIAWGLSQRSSAFRQRDRELRARGKRPIEARVALARHACRLCFALLQTQEPFCEERYARTRHGAGGDGVNSYAA

SEQ ID NO: 445249 - protein, 384 aa, unidentified
MEKMSSNVACAGMDVHYKFSHVTFRDAGGRIVSRQRLDHPDRRGLARRLGHWPEGIPVVMEASFGWGWLSDVVEEAGLAVHLSNCFKVEQMRQARGWVKTNKKDADLVSLLPFEPCDWWKVWRAPPEVRNRREQMRFRGDLVALQTEVKNRIHAVFHRHGIFHEFSDLFGGRGRRFLVELCIGGSEYLSPEALQALRGQVKLLDHLRRQLADVARVLRRQLAKTPLIRRLDHIDGFGLILSHVLTAEIGRIERFRSHKALASYCLLAPRSNDTGQEDPSQSPKGRHLGLRGNRTLKWAFLEAARGAVRSGGRWRAMFDRVTAGGTKDRNRGYIKVARELVKVVYVVWAKGVDYQADPPARPGRRTPKNKSRSGTGQLYHPMVHA

SEQ ID NO: 445250 - protein, 334 aa, unidentified
MWHVGIDLHRTTVVLAAVNDVGEALNPISIPCSDTATIIDVVKTLGVFRAVIEATGTYRWLYNLLRPHGTVLLAHPMRLRAMIQRRTKTDKLDAQLLANLLRINQIPLAYIPPEPYQQLRDLTRSRARLGRHLAEVKIQLRALLARQNQESPYRTPFGPRGLGWFRGQDFGPIENMVRDELLERFRHYAKQMTLFDKRLEEMRQAFPQVDALADIHGFGLYSALLIVAEIGEAERFRTAKQVGAYTGLTSRIHQSGGHCYQGSITRQGSPWLRWVLVQAAMKAVHKDAALKNFYSRIRKRSGAKIARVAAARKLAEICWKRLRRWQREHASQAA

SEQ ID NO: 445251 - protein, 458 aa, unidentified
MVQTKRPRSRREMPAVHPDAAAIDVGATMHVVAVPPDRDPEPVRTFGTFTADLHRLADWLRACRIKTVVMESTGVYWIPIFEILEQKGFDVQLVNARDAKHVPGRKTDVSDAEWLQRLHEHGLLRGSFQPKGEVKALRSYLRQRERLLDSAATYIQHMQKALTQMNVQLHHVVSDITGVTGMRIVRAIVAGERDAATLASFRDSRCKEPVETIREALIGNYREEHVFALTQALELYDIHQKKVAECDKRIETVLEQLKATRPTPAKPLPAPRHKTKQPNAPNFAARDALYAVLGVDLTQIHGLGPYLALKLIGECGTDLSAWPSAKHFTSWLSLAPRNKISGGKILSSTTRRSNNRAASLLRLAAVTVGRTETALGAFFRRLSARIGKAKAITATARKIAVLFYNALRHGMKYTDPGAAYYEERYRQRVLSNLQRRARAFGYVLQAAAPKAPQAVGVS

SEQ ID NO: 445252 - protein, 341 aa, unidentified
MTNNLYVGADIAQAKFDAAVWQGTTGTALKSFSNDTNGFAQFAARLSAVSPAHDTQIVLVLEPTGGYELALVAFAYDHDWQVCLPNPKQVRDFAKSSGRRAKTDAQDALLLAQFGAEQKPAPQEELPAPIQELIELLHRREDLQQLKHSESNRLQGLQQRPRPAQAVIASLERTIAALAAELTAIEQALAELLTQNPDLKREAKRLRTVPGIGERNVLPILVLFYRWRARTSGRGTPKGLVAFVGLDPQPYESGRSVHKRTTISKMGDRSVRRYLYLGALGGVRGKNGLRTFYKRLVSRGKAKRLALVAAAHKILIWAWAVFAQGVDFDPARFPQEAPAAI

SEQ ID NO: 445253 - protein, 518 aa, unidentified
MARPRYSKKPRGFLVQKPLGQFTDRVRAVGPEHFGVVSIDCAKARSKFLLCDFYGNVLIEPTPVEHTQSELRAACERVRSAMGVHALTDIVVAIERTGTYHRPVQDAFRRAHFETRLVHPFASKQFRQPADPDNKTDDADLGGIFRAAVNGFGLLQPLWPDVYLELQQLSRQRRDLVCKTTILRCQIKETLHQLMPGYAELFRDHFFDTPVALPLARVTGSAQAVLDAGLNGLRQRVPQGLHYRMATLARILDWAGTAAPSQNPWQLLREQLDHLADDFLQKAKEIRGLEQRLGHLLVMTPYVQLLALPGICVVSSGELAAEMGPIEHYADGNRITGRAGLCPSRYQSDEVDSHGPLRRRANRRLRAALLRIADNLIRHNHHYRARAERWQRQNKDPRWIRVKVSKSFSRLVFVMLTGRCLVQHPACQPRHSICDKLLGFHCERQTDIQCALADIERLSAQLSGRTQQEERQMLQNQLDDPRCRRHRGPQAIGKIIPLVLARLGIRIVQSQTEGEDPN

SEQ ID NO: 445254 - protein, 344 aa, unidentified
MQIASVGIDLGKTTFHLVALGARSKVLVRKKFSRPQLLAYTANLPSSLIGLEACAGSHCLGAVLREQGHQVQLIPAQFVKPYRKSNKNDFIDAEAIAEAVTKENMRFVQLKTQEQLDVQAMHRVRDRLVQRRTALINEIRGFLLERGITFAVQPVHLRRNLPAVIEDAEQNLSPRLRWLLDRLWQEWKQIDSDVHVITEEIERISHEDARCRQLRQIPGVGPLVSTAIVAAIGNGAAFRRGRNFAAWVGVVPRQYSTGGKQRLYGISKRGNIYLRRLLIHGARAVLFRIKHDTGGFGQWVHRLAQRAPHNKVVVAIANKLARMAWAVLSSGRNYRHQPLQPVAA

SEQ ID NO: 445255 - protein, 326 aa, unidentified
MAKRIMICAGIDTGKRKLDVALDGSSEQLQVDNTPEGYKVLSDWLRRHRVKRIGIEASGGYEQAVVAGLRRKRFVVVVFQPAQVRAYAKFHLQRAKNDKIDAALIAACTAAVKKIHTPPDPRLLPFAERLTMIDQIGEDIARLKNRLETCRDPRIQQTWKQDVAGLNKRERTEFKALVAAIREHRDLAERLDLIYSVGGVGLSTSVAILVRMSEIGKLSREQAAALAGLAPYDDDSGKHVGARHIDGGRQRLRRALYTAALPASFRWNPQLIALYKRLIAAGKGHKRALIACARKLLIFVNTVVARGTPWQNQPPPLAVMTPTPAG

SEQ ID NO: 445256 - protein, 397 aa, unidentified
MSTIVYVGLDVHKEKIQACSFIPGYGIKPDLVFANDTLSGDYQVAGKYLAGLRRHFGKDARFVCGYEAGCLGFSLCRELSGKFGVECHVMAPSTMSQEPGSRIKTDRRDAEKIAKCLSSNAYKEVRMLDREDESVRDYIRMRDDFKQVQKELKQKILAMLLRRGVRCDTCKVPWTKKFMAWLGSADMGGALAREAMDEYVSGLERVNEKLEKLDRRILELSGAPRYRDNVRKLVCLPGIKEHTALALCCEVGDFSRFKSPKDLAAFLGLVPGERSSGDKTRRTGLTKAGNSHLRRLLTEAAQGALRSKPSYKSKALKARQAGAPEAVVAYADRARARFTGKYRRMASGERLGPGLDFLEARKPYNVVVGAVARELACFACGMVNGLYDGAESASFKD

SEQ ID NO: 445257 - protein, 343 aa, unidentified
MDHFAGLDVSVKETSICIVDETGRIVGEVKVASEPEALLQMLMNPAYHFKRIGLEAGPLSQWLFSALGEAGLPVICVETRHMQAVLKAQINKTDRNDARGIAQMMRVGLYRPVHVKTLRSQKLRMLLTHRKLLQSKAIAIDNDLRGTLRNFGLKVGMVGKVKFEARIKELVENFPDLAVLVEPLLVVRRVLREQLGILHRRLLAIVRDDDVCRRLMTTPGVGPVVALTYRATVDVPARFRNSKAVGAVFGLTPSKYQSGEINRTGAISRCGDEMMRMMLYEAAQSMLVHSARWSWLKAWAMKIARHRGMKKAIVALARRLAVVMHRIWVDGTEFRWTREVVAA

SEQ ID NO: 445258 - protein, 436 aa, unidentified
MSDKGFSVITENVAGIDIGTEKYHASIDGQTVKVFGTNTPSTIDLIAYLKASGITDVSMEATGVLWVPLFDMLESQGIKAHLLNGAHAKNIPAQKSDYKDCRWLRKVLMYGLVRDSFVPEANIRELRVYVRERDGSIESAAESIQHMQKAFELMNVKLHNVLSDTMGVSGTRIIEAVIKGEKNAHRLSRLAHSSITDKKLPELEAALTGNYKEEYVFLLEQAYEKYNFIQKQIRKCDKKIEKLLKKMAKNMPEPPKTASKPVRHNQPQIENLHDDLMRILNGRQATVLPGIADKTVMKLISELGTDFSIWPSDKHFVSYIGLSPRKYQSGKMNRTHRMPVKSNAGQIFRECALSISASKHIALKGFYNRIKSRSGHKTALKATARKLAVLFYRLMTKGMEYVEMGLKQYEEKYKERVLKNIEKKAREFGYVLQVQN

SEQ ID NO: 445259 - protein, 307 aa, unidentified
MFVGIDVAKDRLDVHLKPSGEAFDVARDGEGIDELVKRLAAVSPTLVVLEATGGFEAIVAAGLAAAGLAVAVVNPRQIRDFARATARLAKTDTLDAAVIAHFAEAVKPPPRPLADPQARLLGELMARRRQLIEMIVAEGNRRRLLTARRALKSVDRVLATLKAQLALIDDDIDTAVRGTPAWREAEDLLLSVPGIGPRIARTLIAEMPELGRLDRREIASLTGVAPFNRDSGTMRGRRTIAGGRPVVRSALYMSILVSIRRKLPLAETYHRLRAAGKPAKVAIVACMRKLITILNAILRDKKPWAPA

SEQ ID NO: 445260 - protein, 409 aa, unidentified
MKLYVGIDVSSRDLATCIMDHEGNTCARFKVDNHLLGATFLRDQILLWANKRKPTEILIGMEATSVYSWHPAMFFHQQEVLQAWNVKVFTINPKLIRKFKEAYVDLEKTDDIDAWIIADRLRFGRLKMTAVLKEQFLALQRLTRMRYHLVHQLTREKQYFLQHLFYKCSSFTQEVDSSIFGHAILELLLESWSLDDICQMDVKQLADFLRQKGRNRFADPECIAKSIQKAARSSYRLSKCVEDSIDLLLGLSIQSIRSLQSQLKELDKAITRHLEGIPNTLQTIPGIGPVYTAGILAEIGQIERFHNQAALAKYAGLTWSKHQSGRFQAEDTSLIRSGNRYLRYYLVEAANSVQRHDATFRAYYRKKYEEVPKHQHKRALVLTARKLVRVIDALLRNGQIYTPRKGEDR

SEQ ID NO: 445261 - protein, 445 aa, unidentified
MHYKRLLALIDSVSSYLSVGLDVGADFTWMSIALPNGSFIGKPFKIIHSDPRSRDLAVTKIKEAQETYSLKSRCFLESTGIYHIPLLCFLRDKGFDCSVINPIITKNSTNINIRKLHNDKFDSKKAALVGLNVSLKTSILPDDSVVDLRNLVRDYYYFKDLQSAVALKLTAELKVSFPAYAKVFSKVTTQSSLKLLSSYPLPADMLAASKEDIVDIIRSTARFGEAYALRKYDAIISAAQDAAVFGRALPSNAVRIRLYIDTYQEYQKHLDALLKALHETVEKLQDTLIYDQICLLQSLYGIGFLSAVVLVAEMGDFKLFSSPKKLYAYFGLDPAVKQSGKLNGDKVHMSKRGSSLARRVLHMAALNNVKVAKGSGTPVNPVVYDYYTRKCSGKKKPVAMGAVMHKICNIIFAMLRDNKPFEIITPEEHCRRFATEHPDKIRKAA

SEQ ID NO: 445262 - protein, 346 aa, unidentified
MIYYAGLDVSLKEISICVVDADGKTVARGISPADPEGVAGWFRAKSLSPKLIVHESGQLSIWLQRGLERLRLPIICIDARKAHKSLSARPNKSDAADAEGLAQLARTGWFTPVHVRSEDSDLLRCLISARAHLISLRKDLEGHIRGILKTFGVRLTGIGKGGQRQGFRDQLADAGERNAVLRSIADGFIASHSTLCQAAADLDRAVKEKAKTHPVARRLMTVPGVGPVVALNFIALVDDPSRFRRAENVGAFLGLTPRRYQSGEMDWSGRISKCGDGTMRSLLFEAATTLIGRVQKFSALKSWALRLAGRRGFAKAAVATARKLSVLMLTLWKTETEFKLKKETIA

SEQ ID NO: 445263 - protein, 351 aa, unidentified
MSHKTAATVAHTIGIDTGKNTLHLIGLDDKGAIVLREKVARDRITVRLANVPQCLIGIEAGMATHYVARELSALGHDIKQVPPAYAKPFRQGHKNDFRDAHAIAEAVQRPYTRCVPVKTDDQLDLQALHRVRSRLVGQRTAVINQIRGFLLEHGIAVRQGLRFLRQQLPDILAKRSDVLSPRMIRIMEDLSGDWRRLDERIQHVTEEIEVLAHGSESCRQLMTVPGIGPLIASAMVAAIGNGAAFAKGRDFAAWLGLVPKQMSTGDRTILGRISKRGNRYLRTLLMQGARVILLRPANWAKHGFGPWLTAAANRLHHNVLATALANKLARITWTVLAQARSYEARVEPRTA

SEQ ID NO: 445264 - protein, 387 aa, unidentified
MPQPNDLSKSLVALDHNSTIIAVVEMSQSSWLVGGVVPGIERQPRKKLEPSPERLLALLHRWRDEAIRTGGNITRDCACVRSRPRRLLAARWLAARGIEAHVIHPSSVAVSREHRRAKTDRLDTELLKRAFLGWLRAERGHCSMARIPTIAEEDAKRPNRERECLVRERTRIVNRIKATLARLGIREFKPTLRKAAERLAALHTPEDPPLPPNVSAELQRDLARLGFVVSQIKEIEKARQRRLEQHSESGPHATVRLLARVVGIGIETADMLVHEVLSRPMRNRKAVARYAGLTGSPDESGAKRREQGLARAGNARVRRGMIQLAWRFLLFQKQSSLAQWYRARTADSRRGTRKTMVVALARKLLIALWRFTTTGEPLEGVILRPAG

SEQ ID NO: 445265 - protein, 418 aa, unidentified
MTATDTTASTLLVAIDISKHRHEVLIGVPGKKRRRRLTITNTLDDFRRLAAILMDYGLPVRIGFEATGNYHRPLAHHLGQAGFDLKLVSSVGLARTREALHNSWDKNDPKDAQVILHMLEIGAVQFFHDPLVTGTADIQELSKTHEIVSRSKTELWHRILTHYLPLYFPEAERFHRSSRTDWFLAFLEKYPSPHMITAMSREAFVADAWQVVGRKVSKERLLSDIYATAVGSVGLPVHPESDAVRMFRLVLAEGRSLVRQRNEIEARAVELLSDHPDYQLLTTIPGIGPINALTILAEAGDLRRFRHHRQFLKFCGMDLATVQSGMFRGQSRISKYGNARLRRTLWMAGQVAVLKHTNSFRDKFERYIAGDRHNAHLRRKAYTAIAAKMARTVHAVVKHGEPYRPFFEGVSPGGRTLV

SEQ ID NO: 445266 - protein, 418 aa, unidentified
MKQDNNSQKKSEPTTKRVKSRGPVRRDTKEVLAELVEKLKEKLDPKKVAATSAGEKHLRGELGPNLDRLTVGVDLGDQWSNYCILGLEGETLAEGQLRTTQEDIAEFFQALNAARVVFEVGTHSPWVQDVICGCGHEVLVANPRLMEGSKRRKRKNDRIDANKLARLGRVDPKSLHPIQHRSREVRQDLVVLRARDALVAARTELINATRGLVKSMGKRLPKSSSPSFAQKAEEAVPVEIREALLPLVRMAAALSDCIQGYDEKIEKLGREKYGHTALLRQVKGVGPITALAYVLTLENPKRFVKSRDVGPYLGLVPKQEDSGESQPQLGISKTGDTMLRKLLVGSAHYILGPFGPDTDLRRYGLRLCERGGKNAKKRAAVAVARKLAVLLHCLWVSGEVYEPLRQGMSATIAPAVAA

SEQ ID NO: 445267 - protein, 411 aa, unidentified
MRIVGFDVSSSVAEIAYLEDGTLHAGGRTGLRRDELERFAEKLRATDHVVLEATGNTAAIVNVLRRHVARVAIANPLQIRLIAEARVKTDKIEAAVLAQLYASGFLPEVWMPDEHTLALRRQISRRSQLVRQRTRLKNEIHAVLAAHLIERCPATDLFGKKGRAWLGVQPLPLDERLGVEQRLRELDRLGEDLREVEQALAQATIDDARLRVILTITGVNTTVAIGLLSAIGDIERFPNPEKLVSYFGLNPSVYQSGPTPARHGHITKRGRSYARAMLVEAAWGATQAPGPLRAFFLRVRDRRGQQIAVVATARKLAVIVWYVLTRDEPFAWDRPALTAHKLRALELQAGMPAQHGSRKGPAAAYSLKSVRQQERAVAEQSERTYQRLFNRWKQSRPKSDSAPIRWPEART

SEQ ID NO: 445268 - protein, 359 aa, unidentified
MERDGEEHCRVVGGVDTHKDLHVAAVVDERDRVLASRCFPTTRHGYKQMLTWMRSFGWLQRVGVEATGTYGAGLLRYLQHAGVEVLEVTTPDTHDRRKRGKTDDLDAQNAAHAAFAGRRTVTPKSRDGMIESLRVLKACRKTAVAARRVALQMIHNTIVSAPDELREALRTMTRMQLVRTLAAWRPDLTDYRNVVSAYRITLKSLARRYLELHDEIADLDTMITAIVEELAPALVARNSVGHGSAAQLLLTAGDNPERLRSEAGFAALCGVSPVPASSGKTTRHRLNRGGDRAANSALHIIAIGRLRTDARTKAYVAKRIAEGHSKLEAIRCLKRYIARELFALIRQRGREINQGPIAA

SEQ ID NO: 445269 - protein, 338 aa, unidentified
MTHTVVGVDIAKNVMQVHWVDPQTGEVVNRPIKRAAFLEYFANRSPCLIGMESCSGSQHWARQLVQMGHQVKLMPAKFVKAFNIANKSDAADARAIWMATQMQSKPVAIKTESQQAVLALHRMRQQLIKFRTMQINSLRGLLTEYGEVIGTGRAASEKGIIGVFARLSDRLPMMLIDTLREQWNGVDEIDRQVAQIERRLNEWMKNNEAVKAIAAIPGVGLLSATAAVATMGDAGTFKSGRKFAAWLGLVPAQSGSGGKVALLGISKRGDTYLRTLLVHGARSVIYHVKEPGAWVEQMKLRRPLNVVIVAMANKLARIIWAVLAHQKGVVAKSDRCRG

SEQ ID NO: 445270 - protein, 420 aa, unidentified
MDEITEEPAALVERVAALDIGKASLTACIRVPHGDKPGARRQEVRTYATLTPALLELRDWLVCQGVTLVVMEATSAYWKPPFYLLEDDIECWVVNARDVKNVPGRSKTDKLDAVWLARLTERGMLRPSFIPARPQRQLRDLTRYRRTLTQERTREKQRAEKLLEDAQIKLSSVISDIFGASGRAMLDALVGGQANPHELAALARGKMRAKTSVLHEALTGHFTDHHAFMLGMMLDRIDALTDQIGTLTTRIEQAIAPFAAQVAQLDEIPGIGPAAAQDLLAEIGADMSRFPTAGHLVSWAKFAPRARQSAGRSKAATTGKGNPWLGGTLGEAAAGAARTKTFLASRYKRIVKRRGKKRALVAVGNSILTIAWHLLSDPAAHFTDLGPDWHDRLAPLRRKRQLITELERLSGKKVTLHDAV

SEQ ID NO: 445271 - protein, 348 aa, unidentified
MYNSKDIILAVDYHDENLVIRQFNCHTGEERLLKYRTTSRNIRKVICDSANEVAQIGGRVFWIMESTTGWARVKKAIGPLATMLVANVLQMPLPPKAYRRKTDKIDTGRILREFLNGSLPMAFQPSDELRQIRRLVATRESLVSRRTALRNWINRYLAHETWRSRAGLWTAKGMRSLKKFVASVEGPDKVVLSVKLKELEHLVELQTTVEAEMLAIYKQWPQAQWIDEIPGIAEISAVSILARVGPVERFDSPEELISFAGLAPGIQQSDGSKREGRIGGGGTDKHLRHYLIEATFWARRVPRYRPTYERMLDKRGPKIARVVVARMMLRSIHKMLRAQVRFNRLRAA

SEQ ID NO: 445272 - protein, 336 aa, unidentified
MKSYEKVMGIDVSKKKLHLSLFDGTKHRQYQIENDISSMEEFLKQHPEEDFSHILFVMESTGVYHLRIALFLAKDLSYQVSVVNPLVIKKYAEMLLKRTKTDKVDARLIAQYGYHNSPPPFLVRDEESYELDQLLKGIEDLQLQMVTLKNQIEALTHQPYINQLMLTTYQEVLSQLKKKVKELEKEVKKIIANYAPQEFLLLKSIPGIGDRVAAALLAMLNRFEYFDNVKEVCSFCGLSPGSYQSGETVKKKRGIVKKGNRYLRKMLYVAALSASRYNPDCKRLYQRLLSKGRPKKVALVAVANKLLRQAFAVVKSGIPYDPNYLEKKMNLLPQTA

SEQ ID NO: 445273 - protein, 450 aa, unidentified
MMKSIKKEMMNVLDARSTWFVGVDTHKHQHTAVAIDAFHQPHLCITFSTQPEQFPALLKRIEDEVPQGFTLVFGLEDTQGLGRSLAQWLVDQGLSVREVNPVYTSRERARGPGPDKSDSLDAQAIAEVLYRKWSQLPELRPNDRVQALKHLVATREQLVRQRTMVKNQLHSQLHQQYPGYEKFFSDSFGVAARAFFSRFPSPGHLRNYGVKRLGAFLKRQAGNLGEKKARRILQQVNKLSPKDEASRALDGLIPTLIDLLGQLDSHVKEIRRRMKRHLRKSPYQLHTMPGLGTVLAATMEAEIGDIGRFRGADQLARYAGIAPAEDSSGHRSRRRHRPHGRRQLNKAFYLLALGQIKGYSNGRWGNPEARRYYERKLAEGKTPKHALRCLMRRLVDIIYAMMRDRSVYRMPVDMPSGEGEEGAAERNESPDVASPHASVVAHNAINLAEP

SEQ ID NO: 445274 - protein, 353 aa, unidentified
MTTFCKTSTTLSSIGIDIGKDVFHLVGFDDNGTIVIRRKIKRLALIREFNKFPSCIVGMEACLSAHFVSRTLRKLGFKPRIIPAKYTKPFNKGQKNDYNDAEAIAEAVLRPNLKCVTEKTQEQLDLQALHRVRARLVSRRTATINQIRAFLIEQGIAVRRGARSLRNSLFAILENREDEISVRMSDIIIGLYEDWLWLDERIESTTKEIEEISKQEPNCQRVKSVPGIGPLISTAMVAAIGTGEAFERGRDFGAWLGLVPRQYSTGGKPILGRISKRGSKYLRSLLVQAAQVILMRPHNWEKFSFGPWLKQAADRMHKNKLAVALANKLARIAWSVLRHGKLFDENRIMEMAV

SEQ ID NO: 445275 - protein, 326 aa, unidentified
MTKDTIGIDISKDTLDVHRLSTGETAQFPNAPAGLRALRRWIGVKTPDLVVYEATGAYHALLERTCAGALPLVKVNPLQARRFAQARGTRAKTDAVDARALAMMGSALDLVADAPADKKQPALKELQIARMALIKERTRLLNRSKTQSLTLLKRQAKARLAQIKRQLCELEDALLDLARQCPKRARAFDILCSIPGLGRVSAVAILVECPEIGTLTRKQIASLAGLAPMTRQSGQWRGKAFIQGGRKFLRDALYMPALVAARYNPDLRQKYQAMTSDGKPAKVALTALMRKLIELANALGSVDVHLSQSIVAAIEMKAEKLVSVLQ

SEQ ID NO: 445276 - protein, 364 aa, unidentified
MRKVSKRALQMEAKHNSAPAMTVGLDLGDRFSRYCLVNALGEVVEEGRIQSSLEAMRRHFEGELRLRVALECGTHSPWVSRLLSELGHQVVVANARKIAMITASTSKNDRNDAEQLARLAAYDPRLLSPLRHRSQQRQQDLNLIQVRATLVRARTMLVNALRGLVKSAGGRLPSCSTESVAVRGPAHIPPALAAAARPLLEQMVALNGQIAGLDREIEKLREKYAEIGVLRTVPGVGPVVAAAYVLTLDSCDRASNRAAGAWLGLRPRQKQSGDSDPQMRISKEGDRYLRSLLVQSAQYILGRFGPDSALRRWGLKLAQSGGKRGKKRALVAVARKLAVLLHSMWRSGKRFQPFPQPAATAVVA

SEQ ID NO: 445277 - protein, 315 aa, unidentified
MTKSRPHVNVGVDVSKDKLDVYLLERDLLLTVPNDEPQIASLVKRLARYHLERIVIEATGRLEHAFVSAALAHGLPIVVVAPLKVRRFAQAIGQLAKTDAIDARLIARFAATLKPEAPPIVDAKAHLIKDLVVRRRQLTSLRTTEKNRRSVMPEALTPSIDRIIESLDRELASLEKLIHTAVEQHAAWRHKRDLLTSMPGIGPSVASSLIGDLPELGSLSRREIASLTGVAPFNRDSGAFQGKRRIRGGRAHSRTALFLSAMVAIRYNSDIKRFYARLLAAGKHKKVALTACIRKIVTALNAMLRDNQPWRSSFA

SEQ ID NO: 445278 - protein, 350 aa, unidentified
MLIIGCDYHPGFQQIAYVDTETGEFQERRLQHPEEAEKFYRALWEPSVKVRVGMEASGHARWFERLLEELSFELWTGDAAKIRAKRVRKKKTDREDARHILELLVENRFPKIWVPTWQNRDLRQLLWHRHRMVQTRTRIMNQLQAVAINEGVRYKKRLWREAGRQQLESLSLAPWASRRREDLLEVLDRINPTIAELTQAIENEAEKCCEARRLMTHPGVGALTAVAFVLILGEAHRFGCGKQIAAYLGLVPEEDSSGERRRLGHISKQGNSLLRFLLVEAAQATARCDQRWRNQFFHLAQRRGRKIAKVAMARRLAVRLYWMWRREWNYEQLQSFGSHVGQPGNPHGVQ

SEQ ID NO: 445279 - protein, 320 aa, unidentified
MNQESTFIGIDVAKTRLDVAIRPTGQQWQVAYTEKGIQGLVDQFADLHPTLVLLEASGGLELRIVTALAAAGLPVAVVNPRQVRDFAKATGELAKTDVLDAQILAYFAEAVRPTPRSLPDTETQALTALVARRNQVMSMLVAEKNRLYASQPPVRQRIQTHIAWLEQELDEMDRGLNETLHKSPVWREKENLLRTVPGVGPQLTISLLAYLPELGTLNRKSIAALAGVAPFNRDSGTLRGKRVVWGGRSRIRASLYMGTLVATRYNPVINTFYQRLVAAGKPKKVALTACMRKLLIILNAMLKHHTSWQSLNPQLLGPCS

SEQ ID NO: 445280 - protein, 461 aa, unidentified
MKKHITKRQTTIKKSKSLEKLNYKAVGIDVGANSIFVCAGLADGTQMIREFSTFTDDLNAMAEWLEILGCDGIAMESTGVYWIPVYDILSAASFNVSLVDARVLNAVPGRNKTDVTDCQWIQQLHAYGLLKGAFRPDDQSVTFRGYVRQHTRLTEAAATQIQLMHKALTQMNIQLRQVLRSIASLTGLQIIRAIVNGERDAYVLAEYRDPRCKNKKEDIAKALTANYRDELIFSLKQALEGYDFFQQQIAHCETKITPFLAAWKPKKNDSEALENIDKNVCKETVDSKINSPQTIVNLQKIFDVNLTDIPGISINSAIKLLAEIGNNISNFPTVKHFTAWIGVCPNNKISGSKILSSKTKPTANRVAQILRMAANTLYRSKTALGEFLRRMKVRIGAPAAITATAHKLAKIIFKMLTEKKEFKEAGENAYQRRYEERMLINIKRKAAAMGYDIVKVEPKVA

SEQ ID NO: 445281 - protein, 355 aa, unidentified
MSSEKYIGLDVHQATISVAVMDSQGKTIMESILETKASTLLEFFAGLRGSLFVTFEEGTWAAWLYDLLKPHVSDVLVCNPRKIPLHKQGNKSDKIDARKLAERLRLHDLKSVYHGETGVRMLRELARSYLTVVKDLSRVMNRLKALYRSWAIPCAGRDVYYTRHRSQWLEKIPEAGTRRRAEQLYQQLDMLKHLRQQARRELLAEGRKHAITAKLRQIPALGPIRCALAVALIQTPHRFRSKRQLWTYSGLGLETRDSGEYHYVHGQVRRRKKQATIRGLNKDYNHDLKGLFKGAATRASVQPGPFQDFYQRSLAKGIKPTMVRLTLARKLAAITLTLWKKGEDFDIHKLNSQAA

SEQ ID NO: 445282 - protein, 340 aa, unidentified
MTQHKIIGIDLAKNIFFLFEISHKGKNLCRKKLQRSKLLSYIANKETCTIAMEACSGAHYWAREFSQFGHEVILYAPQHVKTQRRKQKNDYNDAEAITEVALYKRPHPVPHKSVEQQDIQSLIRMRRLLVTERTRIVNQVRGLISEYGIIMPKGAAAFRKAIPEILENDENKLSCILRELLSHQYERYLYIDEQVKWFDDKLNQTIKQFENAKRLMSIPGFGPLTSQAVAVWLGSGQQFKTGRDASAAMGLVPRQDTSGDKVILLGITKRGNTYIRSLLVHGARAALRRAKFKSDNLSKWMLELQERRGPNRAAVALANKLMRIAWAVTTKNEEYQPTQS

SEQ ID NO: 445283 - protein, 342 aa, unidentified
MSIVYVGLDLGSSNFQQVALTHDGESRVNRDFNTSEGNLVKAFSDLKGEIHVHLEAGELAPWAASVIAPLVSRVVCSHPQSNAWIAKDADKCDRIDAYKLAELLRLNRYKEVHYAPVQRRREFKTLVQHYDELTAQQARLKTRIKGRLRMQGVIVRGERLFSVTGRRPVLAEVKSREVRTAINQLYAVLDQSVAAQTQARLLMLRVAQAFPEIKLFRTAPGIGPIGACRFSAYIHTPNRFSSKRKLWKYCRLSVSHRSSNGKPLRRPRLDRSGCGRLKDVSRKAFEVAVRSRHDNGFKRAYQRALETTHDATHARLTVQRKIVSTLRAMWLNQTPYCDELIR

SEQ ID NO: 445284 - protein, 340 aa, unidentified
MALYCGVDFHARQQVIVWSNTDDGEIHHLKLWHDDLAKVKAFYAGLPRPAIVGLEASGYSAWFEELLFELHHQVWIGNAAEIRKRARSRQKTDRRDAETILDLLLKDEFPRIYRPSAASRAVLQKLRYRHRLVQLRTKARNHLHALALSAGLSMKAKLLSQAGREKLQSLPLTETQQQQRDEWLALVDHLNPVIKRVDKELPALIEPDPRVQRVLTHPGIGPLTALALVHTLGPVERFANGRKVTAYVGLDPLEDSSGDYQRIGSISKQGSKLLRFLLVEAAQTAAQRDPDLKRLYYRVLKRRDHARASVAVARRLLVRAYILLRDEIDYAEFRRRSCRS

SEQ ID NO: 445285 - protein, 341 aa, unidentified
MNPELSVVGIDLAKSLFHLVGMDERGKIIVRKRLTRGEVMPFMAKLPRVLVGMEACGGAHYWARQLREQGHEVKLMAPQYVKPYVKTNKNDLRDAEAIAEAVTRPSMRFVLIKNVEQQDLQALHRVRERLMRARTALVNEMRGLLAEYGIVLPTGVNAFRNALAAKLEAEHAKLTPLSQELFGKLREEFKKVEAEVAYYDEKLQALATTHPESQRLLTIPGIGPVTATALIAAVGDVRGFTNGRQFAAWLGLVPKQYSTGGQTRLLGISKRGDRYLRKLLIHGARATLRWARTKTDSRSQWIQGLLERRGWNRTAVAVANKNARIVWALLSRGGLYGESTH

SEQ ID NO: 445286 - protein, 443 aa, unidentified
MKTHLFDLIIGLDRSDRKADLYYIDTRTGRRWCQSIDTTPEALWEWLRELRQQYPQARVALCLEQPAVHLIPFLESYEWITLYPINPITLQKYREAFVTSRAKDDGKDARYMAELLWNHHEQLQVWAPQDSATRAVQQMVFHRRAVVDERTALTNRLQALLKQYFPQALELCGEDLWRLMATNFLLKWPSLGAVKRAKGATLKSFYYLQGSRSQKLVEQRLELIKRAVAVMDETAVIQSFVLRVQLLCRELQLVQRTISQFDQQIAQAYAAHPDRKIFASLPGAGPVLAPRLLASMGSQRERFGTAANQLQHYTGIAPVTKRSGGSCYIHRRYLCPKFHRQSFHEYAKESILWSRWAAAYYLQQRTKGSPHQTAVRALAFKWQRIIWRCWQDHQPYDEPRYEAALRKNGSQLVALFDRIQVGKSPWKNPVKKTKKSLAGLPQR

SEQ ID NO: 445287 - protein, 429 aa, unidentified
MNDTIGIDISKDKLDAYWLSNREHKQFCNDQKGVKALAFWAREAGIVRAIFESTGVYHRRVETGLAEHGISFSRVNPRQARRFCEGAGQLAKTDRVDAAMLAKMGALLELKADLPKSEALHDLKQLATARQALIKDRTAAKARLAATTHKLLARQIKRRLKQIEHDLCQVSEMIDAIVAADEDLAARAEILTSIPGIAKVTACAILTDMPELGQMTGKQAAKLAGLAPISRQSGKWQGKERIQGGRASVRRAIYLPAVVATRFNPDMKTKYEQLISVGKCKKLAITAVMRKLIVMSNALLRDQRKWTQNLDQYGYSAMLCFACRQWMPKGIPVCNRSRRNGYILGMSPEPRRTLATLPCRLGPNAAFKTLWLIEHKSPYRWKCLSSTPGRSHFVDTAPAVTRCVLRDWKTHMPRPARQHSKYRSVFPVL

SEQ ID NO: 445288 - protein, 472 aa, unidentified
MYEEERIRHARYCQLRREIRGSGEYLIVGIDIAKDKHHAFFGTATGKVLLKRLVFHNTKEGIMKLMGQVEALQIRHNLSEVVFGFEPTGNYHKPLGDHLVKNGHLVVLVSPAAAKKNREIMDGRWDKNDTRDAANIADLISQGKCLFYEYPPQGIRDLRDFLSLRRRFKKEEHRLRMRIRNNLVTKHFPEFDRFFGESEAESLSIVKWCLDPQKIHALDFEKFFVMVTSKRRSLEQERRLRAIHCTARDSIGCTIGEAGGFESGTLVNQVKEVRAVIKDIESRMEEISRGFAEYEFLLSIPGFGPYISSVVLASIGNPWRFQNSSQVIRLAGYDLNASRSGKTSDKAVPEISKKGNAELRYALYQAALIGSTRNRDIMDYFTRKLKGRSREKGIGTKMRVKLAVKLLVIAWTLMKKKEPFNPEYLKDSCLVKQSGVSHILEEKRAVAMVRSRASVSSSRRDRRPLIANRSAG

SEQ ID NO: 445289 - protein, 468 aa, unidentified
MPSHPTHKKRHLDDLTCVHPNAAGLDIGSAEIVVAVPADRDPQAVRVFQTFTPDLYALLAWLLACGIDTVAMESTGVFWIPIYELLEQHGITPYLVNARHVKTVPGRKSDWNDAQWLQKLHALGLLQASFRPDAEIRTLRTLVRYRTELIERRAPHINHMIQALKHMNIQLNLVLTDITGVTGLVMLRAIIAGERDPQRLAQFRQAGCKHSEAEIAKALTGSWDDAQLFVLAQAVDLFDYYTAKIAECDTKLEQQYQAMESRHEKDAALPDLPPAKPDSKSKNALTFNARAQIARVIGVDLVAVMGISAITAQTIISEIGTDMERFPSVKHFCSWLGLAPHNDISGGKVLRSRTMKVRNRANQAFRQAAQSVAQSDSSFGAYYRAMRARLGPKQAIVATAHKIARTVYYLLKTGEPYREESAAEYDTKRQERELKHLARRAQKLGYTLTAVPAPAPESHPEPGGEGSF

SEQ ID NO: 445290 - protein, 416 aa, unidentified
MKLFVGIDVSSEKLDVCFLTDDNQLSILSEISVANDIEGASFIRETILEFNNSYHFDQIVIGMESTSMYSFHPSMFFHEDEKLKKLNTLVTIENPFRVKQFSRMFDENKTDRNDALRIADFLRIQRFTTSPIKEEKYMALQRLTRTRYQLIKQLIRTKQHFLENLTYKCNTLAREMRDESTSLFSATLISLMTEDFTLDELAELPLEAFCDLLQEKGKGRFKQPEKIAKAIQRAITMSYRLGALAQESINVVLSVLVREIRALEKNIKELDKAIEQVIVVIPEYQCLTSIPGVGKVYAAGLIAEIGQIERFEDQTKLAKYAGLSWKVNQSGNYQSQNTPLTKQGNRYFRYYLVEAANSVKNYLPEYKAFYQSKYKEVPKQQHKRALVLTARKFTRLVDTLLRKHQLYTPPRSVIEK

SEQ ID NO: 445291 - protein, 387 aa, unidentified
MAQVNDLSRSLTAFDPISTLVVVVEMSKASWLVSGAVPGVERQPLKKLEPDATALLRLIERWRNEAMRSGRPISRIALAYEAGRDGFWLARWLIARGIEAHVIHSASVAVSRERKRAKTDRLDAAMLMRVFLGWLRGERGHCGMVAIPTMEEEDARRPSRERESLVDERSRITNRMKSALARLGIRGFKPHLRKAPERLAGLRTAEGTGLPANIIEEFRRDMARLALVREQISSIEKTRAERLERAPDTGPHAMVRLLARVIGIGIETADMLVREILSRKLRDRRAVARYAGLTGSPDESGLKRREKGLAKAGNARVRRGLIQLAWRFLMFQKDSALAQWYRTRTEGPSGARKTTMIVALARKLLIALWRLVTTGEVPDGVELRLAA

SEQ ID NO: 445292 - protein, 356 aa, unidentified
METAYDGRQVVGMDLHRRRSVLVRMTGDGRRLGTAKITNSPEELRREIARAGKAPQVVLEATYGWYWAADTLAAAGAEVHLAHPLGVKAFSYRRVKNDERDSADLADLLRMGRLPEAWIAPHEVRELRELTRYRQKLVRLRTSCKDQVHGVLAKLGVTVTCTDIFGKAGSAWLDQLRLPQPYAGKVTSLRHLAGELTTEITMLSEVIASLLAGDRGYQVIQQLPGIGPVLAAVIVAEIGDVTRFRNAAQLCSWAGLTPRHRESDTKVARGHVTKQGSRLLRWALIEAIQRIPRDCVIGTAKDAIIARRGKEAKNIAKVAAARKLLTLVFYGMRDGQIRCLPQPRQHLPATQTARPA

SEQ ID NO: 445293 - protein, 413 aa, unidentified
MEVIVTHCAGLDIHQASVVACINRPGSGGRSHKDVRTFATMREDLIALRDWLTNAGCTLVAMESTGVYWKPVYETLEGHFDLMVANARHIKNVPGRKTDVKDCEWIADLARHGLISRGFVPPRAIRDLRELVRYRRKVAQLQTGERNRLIKVLETAGIKLAGVISDVLGVSGRAMVRALIAGEDTPEVMAALAHARLRASKADLARALAAPPKPHQRFMLGTQLARIEQAEADLERIDAELVEMAAPYRRPIELLMSIPGVNWINAVTIVSEIGVDMEAFHSAAHLASWAGLCPGNNESAGTKRSGKVRKGNVILKATLVNAAIAGSGPRGHRGTFLAEKFRRLAARRGKMKAAVAIAHKILVSIWHMLNDGTFYHDLGAGFLDRLDRTRNARHLIRRLANMGFDVQLTEKAA

SEQ ID NO: 445294 - protein, 325 aa, unidentified
MFTSYRIMKKEITFDQVIDRGCGIDVHKSVIVATISGLGLKETTKTFSGFTASIEEMRDWLKQEKITHVAMESTGVYWKPIFNILEEDFDILLVNARHIKNVPGHKTDKKDSKWIAKLLLSGLLKGSFIPPKPIRELRDLTRYRRKIVGQVAAEKNRLQKILEDANIKLSSVVSNMSGATATKIINAMIDGEQNIEELLKFRHGKMQSSKEDLAASLKGKLTEHHKFMLTTIKESIQEKESLIGKLDTRIEEHLKANELILDSELLQTIPGVGKGAAAGILAEIGNDMGQFPNEQHLASWAGMSPGNNESAGKKKAVESRMGISF

SEQ ID NO: 445295 - protein, 424 aa, unidentified
MSKKKSGLAGLQALFARVCGLDVHKKLVVACVRILNPKDGTVQSTLRKFGTMTADLLELRQWLAEQKVTNVAMESTGVYWQPVFNLLEGHFQVWVVNAQHIKKVPGRKTDMKDAEWIAQLLQCGLLRPSFVPDRQQRELRDLTRQQTKLVQQRNAVDNRIQKVLETANIKLGSVASDVLGVSGRKMIEALMAGEKDVTILAELAQRKLREKIPQLQRALEGELTEHHRFLLRQLLGQYDFLEKEIASVSERLGAVAPPSFRAAVEQLDAVAGVGERGARALLAETGTDMSRFPSHKHFASWAGRCPGNHESAGKRRSGKTPAANRHLDAVLTEMAHAAVRTKNSYFKAQYHRLAGRRGKKRAIGAVKHSLLVTVYFMLRDNRPYKDLGVDYFDKLNPQQRIRYHVRRLRELGQEVELSPMADAA

SEQ ID NO: 445296 - protein, 340 aa, unidentified
MDKLDFSGIEVSAEELVVALQREGKRRDLKTFPNTAAGHQAVIRHLSCPGRTVRVVLESTGLYGLDLALALQRAQLEVMVANPRAVRHFAQALMQRSKNDRLDAWVLLEFAARMPFQAWQPPATPALQLHAVARRLQALTEMQTAEKSRLAALEATATTPPALRRDLERSLRSQRRALARLSVEAQKIIQQEPGLKLRFDLLISAHGSIAATSAIQILAELAVLSPDMDARQWVAYAGLDPRECSSGSSVHRKARISKAGNAHLRRALFMPALVAIRHQPHLRAFYQHLCAQGKPKMVALTAVMRKLLHAIYGMFNHQQPFDGSKVYRRPDPEISTEKAA

SEQ ID NO: 445297 - protein, 479 aa, unidentified
MSKKANDKRKEVIKLLRSQKIRDVQEIESYKLSVCHPASAGIDLGSREIYLALSPAIAAEMELPIVHVFNTCTQGLTECKDLLVSCGISTVSMESTSVYWTTIYSMLESSGIEVCLVNPKKFRMVPGRKTDILDCQWLQTLHYYGLLSGSFVPEGKISELRSYMRERDNILKDRARYVQRMQKALTKMNLLLHNVLSDITGQSGLSIIQAILAGERDPKVLASYRSLRVKSSEEEIIASLSGYYKQDQLFLLQTNYDSFVFFTNKLYQIDAQIENLLKNFPLKKEPTDTCPQPRENKKQNPKRQGKNGIRVKNGDLNDMLYRIVGSDLTTIPGLQANTILQILSEVGTDMSKFPTANHFASYLGFVPHNKITGGRVISSRTDRINSPAAQAFKKIIPSISQRDTALGAFYRRIVYRVGTGKAVVATCRKLAIAFYYAITQGKEFIDEGKERYIKRQEERERNALTRLAAKYNMKLNAAS

SEQ ID NO: 445298 - protein, 330 aa, unidentified
MGKNYLQIHALRADGSAMSRKLTRSKMRAFFARLAPCRVGMEACGSAHYWARELAAMGHEVVLMPPAYIKPYVKRGKNDALDAAAICEAMSRPDMRFVPIKSADQQAVLMLHKTRELMVKQRTMSVNALRGHLAEFGLVVAKGISRVDELLELADKDASLPEEARETAKLLAAHVEGLDRSIDVAEKKIARANARSGTGQLLDRIPGVGPLIASAITASVPDPGVFESGRDFAAWLGLTPRQNSSGGKAKLGAITKQGNRYIRKMLVVGCTSALRVAGKRKGALADWIAALRARKPERLVAVALANKLARICWAIMTTGEDFRQEMFARA

SEQ ID NO: 445299 - protein, 346 aa, unidentified
MLYAGLDLSRKRLDFHLLDGEGATVEFGCAPPDADGLHGLTRRLERHREPIRAAIESMNGARFVHDRLELAGWQVEIADAQKVKGLAPLACKTDRMDAWVLAELARRDLVPAIWLPDPLVRAERERARWRLHLVRHRSSLKQRVHAVLLTHGKPCPVSDLFGVRGRQVLARLDLPEPWQGTIEASLRLIDELDREIGECERELRRFGADHRYVPLLCTVPGISWVLAYTIAAELGDITRFPSPRKLAGYSGLCPRVYQSGERDLRGPLAKQGPRYLRWALVEAATHACTHPAYRERYQQTKARIGKQRGAKVAQVDLARRLAEAIWHMLTRDQPFAPAGATDPLAA

SEQ ID NO: 445300 - protein, 346 aa, unidentified
MNQIIRIGMDTSKHFFQLHGVDAAERPVLRRKLRRHEVLGFFAKLPPTVIGMEACGAAHYWARELCKLGHEVKLMAPQHVKAYVKRNKNDGRDAEALCEAMSRPTMQFVPVKTEEQQAALMLAGVRQQLIARRTQLSNAIRGYAAEFGLAAAKGLDKIEPLLARIAQDESLPALAREVFALEGRQYAQLQVELKAIEVKLMAWHRANACSQRLAQIPGLGPIGATALVMKTPDPRAFASGRHFAAWLGLTPKDHSTAGKTRLGKITRAGDEVLRSLLVAGATAVIQQARRGRGHPSSWLIALLSRKPPKLAAVALANKIARIAWKLMTTGESYDSARMPGASAAAA

SEQ ID NO: 445301 - protein, 347 aa, unidentified
MRFFTERHPYYCGVDLHARSMYLCVLDDEGQVKLHKNIPAEPDAFLDAIAPFIDNVVVGVECIFTWYWLADLCAEQEIPFILGHALYMKAIHGGKAKNDRIDSLKIATLMRGGSFPMAYVYPAAMRATRDLLRRRNYLNRKRADLLSHIQNTNSQYNLDPFPERITFKRNRGEVAEQFVDPDVRLSIEADLDLIDHLDLIKKKLELYIVRNARAHDPQAVYRLRSVPGIGPILSLVILYEIGDIERFPRVQDFASYARLVKCAKESAGKRYGTSGSKIGNAHLKWAFSEAGVLFLRANPEGMKYRKRLERKHGKAKSLSILAHKLGRAVYYMLKRDQAFDLERFVQA

SEQ ID NO: 445302 - protein, 493 aa, unidentified
MGQKGKRNPTPVTGSVPEEIPDAEHELVIERAAAVDVAKSSGKVCVRLPGKTGRRFSRVWDVPARTAAITALGEQLTELGVLKVTVESTSDYWRIWYYLLEAAGLDVQLVNARDVKNVPGRPKSDKLDAVWLAKLTEKGLLRPSFVPPAPIRRLRDYTRLREDLTRERSRYWQRLEKLLEDALIKVSSVASTLDTLSTRDMIEALIAGERDPRRLAELARGKMKAKRSELITALDGRFDDHHAELARMLLTQVDTLTAQIDTLTGRIDQLIAELPDNQAASDDTDDDHRGTTAPGAGENARAGTEPGAGASPPTAGMPIRVDPATVAEYARLGTVGRLDEITGIGAHAAQVIIAEVGLDMARFPTPEHLVSWAKLCPRTIQSGPVTRAGKTGKGNPYLKGALGQAAAAAAKTNTFLGERYRRIVKRRGKLKALVAVARSILRIVWHLLADPLARFRDLGPDYHTRRIDIHRRMRNHIAQLTALGYRVTLEPAA

SEQ ID NO: 445303 - protein, 318 aa, unidentified
MNSPSMTVGIDVSKQRLDFARFPQGDTFSVAYTDTGLAKLLKRLRGWSPQIILLEASGGYEYGVVAALVAASLTPVLINPRQVRDFARALGILAKTDKIDAKVLAEFAFRVQPEPRPLPAAQQQELNHLLSRRRQLLEMIQMECNRREVSPFLRVRQSIDHNLDSLRRQLTDLEREINDFFNQSPLWVQQDALLRTVPGIGPQTVLSLQAWLPELGALNRHQIAALVGLAPFNRDSGVLRGRRMIRGGRHKVRQALYMATLSAVRYNPVIKALFERLAGQSGKPGKVALVACMRKLLIMLNAMVKNQTTWRPMTPLTS

SEQ ID NO: 445304 - protein, 349 aa, unidentified
MQHYAGIDVSLGLLSVCIVDAKGKIVKEAKVGSDPDTLVAFLRGLDLAIERIGLEAGPLSQWLHAGLTSAGFEAVLLETRHVKAALSAMTVKTDRKDARGIAQLIRMGWFRAVHCKSAGSQEVRALLVARKLLLSKLLDVEFSIRGILRGFGLKMGMVTRKRFEARVRELYAGHAMLEQICSAMLTARSALQTEYAKLHKALLVIVREDEVCRRLMTTPGVGPLVAITFKTGVDDPSRIHKSKAVGALFGLTPKKYQSGETDVTGGITRAGDEMVRTALYEAASVLLSRVTRFSALKRWGMDVAKRRGTKRAKVALARKIGVILHRMWVDMTSFRWTKGAPTTMRLARV

SEQ ID NO: 445305 - protein, 413 aa, unidentified
MTTNPQLQSINSNVCLYMSIELAAASWKLGFADQLGRRPRVRSIEAGNFHQLRSEIASAKKKFGLEPDAAVISCYEAGRDGFWVHRCLDSIGIESHIVEPASIQVNRKKRRAKTDRIDAQRIVSALMRFKAGDQFACRMIRIPDTEVEDVRNINREMRTIKTERTAFTNRIKGLLCTQGVTQVVIDGSFPRRLKRMRTAEGKPLGEYLQARLLREFDRLALATSQIRALQMQQAKMIRTAAKETEKPEAEHTSPKCAVIAEFLARLSGIGPVTAWTLSSEIFSWRDIENRRQLAALAGLTPTPNASGDDEKEQGISKSGRGEFRVLLIEVAWGWLMHQPRSDLTKWYEKRFNDGTKRNRKIGIVALARKLLVAIGKFVRFGEIPAGAKLKDKHQFKYMPALKIPGTELNCLPA

SEQ ID NO: 445306 - protein, 307 aa, unidentified
MSNTHVATIGIDLGKNIFHVVGLDATGAIALRKKRSRNQLEQSLANISPCLIGMEACAGAHHLGRKLEKLGHKVRLLPAQYVKPYLKGHKNDFRDAEAIAEAVQRPTMRFVPLKSAEQLDLQALHRARSRLVTQRTAVINQIRGFLLERGLPVRQGAAALRLVLPRLLSMLTDDLSPRIVRLIHDLAEDWRYLDWRVACITKEIDELADQDAHCRRLMSAPGVGPIVSSAMVAAIGTGDAFAKGRDFAAWLGLVPKQISTGDRTILGRISRRGNRYLRNSFEQARGDWATRRLLLRRFKTSSCQPSG

SEQ ID NO: 445307 - protein, 332 aa, unidentified
MPSQVAPQTADKTIPSFVLGVDVSETHLDLALSDGRFLESVKFDPAGIKTLLALLGQFSIELIVVESTGGIERPLLDALLDAGKAVALVQPARVRQFALAGGDFAKTDKIDARLIARFGKLMAPRVLAKRSEKQADLDALVTCRRQLVDVRTLQTSQKRLVTNKAALKAVNAVLKTVESQIESLDKKIRDIIDSNDEFRDIDRIVQSVPGVGPVVAANIIASFSELGNLDRAQTAALLGVAPFNHDSGKRRGQRHIRGGRTDVRNVFYMAATNAMTHNPVIKEFADRLLRAGKLFKVVATACIRKLAVLLNAMLRDGLTWDEMTVTKKVKPA

SEQ ID NO: 445308 - protein, 431 aa, unidentified
MKVMYERVAGIDVHKDMIKVGVRSPGDKAWTRKTEILEYRTFYGVLQLMAADLRKRAVTHVVMEASGVYTEPVYYALCELDFERVEVINPAHAKALKGHKTDAKDCARLAELYECGLLRGSYIPAAELKELRDLTRYRVKTVQARTSEIQRLGKALESGGIKIGSVVSDITGKSAIAMIEALIDGERRGTVLADLAIGRMRTAGKLADLSMALAGRFTGHHAMLCRLHLDRLAVFDTAVSGLDERITARAVPWRREQDLLMSVPGFGDIVSQVWLAEIGPAPHQWFSTHEKLASWVTLSPGNNISAGKRKHGRTGDAGTYIKPMLVQAAWSAIRTPGRLQARYGRLVRRFGGAKNPAAKKKAIIAIAHTLLKIAYQVLKSGTPYQDLGADFYTQRESPQQRQAYLLRQLEELNPGCTITISLPEAALTPGA

SEQ ID NO: 445309 - protein, 313 aa, unidentified
MSVSVPKPIVGVDVAKNELVIYQAERDLLETISNDKAAIKKWLKALPAPVDLAIESTNIYHLALADLAHEAGCTIYMVSGYELSHYRKGVNIRAKTDALDAKLLARYLKNEYEELHSWVPPSPLYRRLLSLFRRRAALVQARVGLVQSWANEPLLKSAFAKQVASMQRLETLVEKMINDQLKEAGLLAQLKRCTKVEGIGFLTGARLIAAFERGDFRNADAFIAFLGMDLRVSQSGQKDGRRSLTKRGDPEARRLLHNAAMSACRTSTWKGFYEEQRARGFSTTQALVILARKLARVVFALLKGQSEYQPKAG

SEQ ID NO: 445310 - protein, 353 aa, unidentified
MKGTAMTTMVEDTRVVTGGVDTHADMHVAAALDSVGGLPGVREFPATAAGYAGLLSWLRSLGNLALAGVEGTGSYGAGLARYLAAAGVRVVEVDRPDRQDRARQGKSDPLDAVSAARAAQSGRASGAPRGRDGAVEAIRALMVAKRSARQERTQAVNQARALIMTGPEELRARFARRSPAQLIEAIAVLRPRPGDVPGYATRVALRELGRRAQFLDAQLGRLDELIVPLVTARAPGLLSLHGVGPDTAALLLVAAGDHPERLRSESSWAHLCGAAPIPASSGKTAGRYRLNRGGDRQANSALWRIVIVRLKSHPATRAYADRRGKEGLSKKEIIRCLKRYVAREVYRQLRAES

SEQ ID NO: 445311 - protein, 338 aa, unidentified
MPTDQTGQTYALFVGVDIAAQTAMVATQRPGAKASRSFTIEQTPEGYTSLLRQLQATGFVPCQVLVVMEATGSYWISLATRLVHEGFAVSVINPAQAHHFAKALLKRAKTDAIDAQTLAQLAMILQPEPWTPPPQIYYALQQRLAQRDDLLNLRQQVRNQLHALVQHPEVIAEVRARMESLLATFASQLTEVESEITAALSQDSAWAAAATRLQSIKGVGWVTAAWTLVTTLNLTSCDTVDALTAYAGLAPMPRQSGSSVWHRPSIGHTGNGRLRTAFYMATLSAAQHNPVIKAFYTRLRGVGKPEKVARCAAARKLLHIAWAVVKKDQPFDPNYALG

SEQ ID NO: 445312 - protein, 417 aa, unidentified
MITIQNCHLSTFVGIDVSKRKLTSHILDNHGNDLAKNFEVANNLKGCKKLAQLIYTKSNIEDIENIQIGMEATNVYWVHAFRFLANYKPLISNYNLTMYRLNPKIVKNFKKAYNELPKTDSVDAWVIADRLRFGRVKKSSTPEEVYRPLRQITRFRFKLGESVRAEKNRALSLVFLKFSDYDSSSPFGTFSDASMALLEDFTLEEIINTDVKELATFLFENSNNRLGGSHSIEDIIKTLKKAARNSYRLKPRLDQAISQTLAMTFDNIRFFERQLKRATKVIKRELKAIPQTLDTVDGIGPILTAGIISEIGDINRFDNQAKLASYAGLTWTRHQSGSFEAEETSLTKKGNKYLRYYLVEAANSLRVHNEEYCQYYYKKYNEVSKHQHKRALVLTARKFVRLVFALLSKGEIYQPRR

SEQ ID NO: 445313 - protein, 332 aa, unidentified
MQREYVGIDFHRRRSVVVQVGASGERLSVSRIDNTPAAVGAAGDHPEVVIEATYGWYWAVDVLQELGATVHLANPNALNWGERRVKNDIVDATDLADMLRLGRLPEAWIAPPAIRELRELVRYRAKLVQLRSGLKAQVHAVMAKEGVLPTVVDMFGPGGQVQLDEMGLAESYTIRVESLRDLIEIYDREIVMLEREIHRRLRHDRGYQAVQAINGVGRTIAAIIVVEVGDVTRFATPRHLCSWAGLTPGRRESDRKGHDTGITKHGSKLLRWALIEGISRYHGGRHLAAEFHRIADRRGRNKARVAIARRVLTLAYYGLRDGEIRCLTQEAA

SEQ ID NO: 445314 - protein, 317 aa, unidentified
MSEETFVGIDVSQGYLDLATRPGRGVRRFINDKGGILYLATFLGEISPASVVMEATGGLEVPVAVALAVEGIPVAIVNPRQVRDFARATGRLAKTDTIDAEVLAHFAQALRPEARPLLDERSKEMAAFLARREQVVNMIVAEKNRLKRALSAKVEENIKAHITFLEGQLKEIEEDLRRAVEESPLWRTKDDLFKGVPGIGQMTSMTLLFDLPELGTLGRKEIASLVGVAPINWDSGTHRGKRKVWGGRARVRCVLYMATLVAARYNPIIKAFYRRLIESGKAKKVALTACMRKLLTILNAMVKHNTPWAYQTIDPCS

SEQ ID NO: 445315 - protein, 362 aa, unidentified
MDIAADKHVVAVIDEQKAVVVKPTTFTEDATGYAKLVELLGPPGEVLVAMGARGHYWRNLFAVLAAGGHAFELLNPIRTRRFAGEDLQRTKTDAIDALGIARFAAEKRPGATHLPDSVTLELRELIRLRNRLAQDMGDRVRQIHRAVDLGFPEFTRYVRGLDSELATAILREYPTAEAFLGLPWKKLSKLCFDGRHKVGEEIAKASVGRHYRPAYRVQVRFACEDIDLLRRRLRELDADIERTLGDHEVGTLLTTIDGIGPTTAARLVAEFGDLSAFAKPAAMAAYLGCRPGLRQSGKRLAIRAGLTPHGNARLRAKLGMPALTAVRKYAWLRAYYEGLRARGRLPKVALVAAIRKLLVAVH

SEQ ID NO: 445316 - protein, 286 aa, unidentified
MEHYAGIDVSLELSSVCVVDAQGKIVKEAKVASEPEAVVAFFEALGFAVKRIGLEAGPLSHWLHAGLKEAGFETVLLETRHVKAALSAMTVKTDRKDARGLAQLLRMGRFQPVHAKSMASQEVRALLVGRKQLLGRLIDVELSIRGILRGFGLKVGSVTRKGFEARIRELVTGQATLERIAEAMLSARAALKAEYEKLHKAVLAIVREDPVCRRLMTVPGVGPLVAVTFKSAVDDPSRIAKSKAVGALFGLTPKKYQSQNSNAGAWTSPSGEVQSGRRSPWLARSQ

SEQ ID NO: 445317 - protein, 458 aa, unidentified
MRAPKRRFPRTAPAARLPLHNPAAAGLDIGAEEIWACVPAERDPQPVRAFGTCTPDLHALADWLTQCQVRTVAMESTGVYWIPIYEVLEARGFAVALVKARHLKNVPGRKSDVQDCQWIQRLHSYGLLNASFRPAEDLRVLRTYLRQRAMLVEHRAVHIQHMQKALHQMNVQVPQVVSDIRGQTGVAIIRAIVAGERDPQVVARLRHGRCQASEAEIAKALSGHYRPEHVFTLKQALALYDFYTQQVQECDATIAHHYTAIKPTYDESAPPPPLGPNPKPNSHAKNAPAFDVRGCLYRILGIDLTATDGLEASSAQTILSEIGTDMSKWPTEKHFASWLGWAPHTDISGGKGLRSNPLKVHNRAAQALRLAAQALGRTQTALGSYYRRLRARKGPTPAITATAHKLARMLYHVLKHRTPYQPQSQEAYDQHLRQRAIRHLKRTATRLGFTLLPQPVAA

SEQ ID NO: 445318 - protein, 370 aa, unidentified
MQEDITFIGMDAHKKKIQVAMLMPDMGVTEWTVPNEPAAVRRMVKKIQREAKGEVKSCYEAGPCGYELQRRIRAQGMACTVIAPSLIPVRPGDRIKTDRKDALKLAELYRAGLLTEVAPPTEDEEAVRDLCRCREDVRQDLLRSRHRLSKFLTRRGYRFTQGKKNWTNLHRKWLRSLRFERPADQATFDAYLLAVEQLEERRRTLEAHMDAFAVLEPYREPVAWLRCFRGIDTVTALTIVAELHGFSRFNSPRQLMGYLGLTPSEYSSGEKRRQGAITKTGNIHVRRVVVEAAHHYRHKPAVGQRLKKRREGQPGWVIAHADRAMERLHRRFMRMIMGGKHYNKSVVATARELVGFIWAVLYVRVEEGKC

SEQ ID NO: 445319 - protein, 332 aa, unidentified
MSVYVGIDVHRKRSQVAVIDEGGKVLVNRNVPNGVKPVLSVIGGLPAGTPAAYEAAFGWGWLLETLEGYGFEPHMVHPLQCKAIASARLKNDKVDVATLAQLLRADLLPEAWIAPPQVRQLRAMLRHRAQLVRLRTLLRNRIHAVLADHGHGRPAGCWSGPGRRWLASLELPAVSREVIDDGLALMDALQQPIDRLDQEVRQRAKADPRVKVLTQLPGVGPFTALVLLAEIGDISRFGSARKLASWAGLTPTVRGSDRTVRHGHISKQGPTWARWVLCEAAQTAKRHPDFAPGYEALARRRGKKIATTAVARKLLTRAYHLLTDASAAGEPR

SEQ ID NO: 445320 - protein, 341 aa, unidentified
MKYVGVDLHKQTISVCVMAEVAQKRKVQQRKSLLCKDVQAIRRFFEGLGTFRVVVEATSSYEWFLLLIEDLSDRCVLAHPKKLRIIAETKHKSDKIDAQRLAEFLMLDMIPEAHRPSPRVREHRVLVRHRNRVQRQITKVKCQLRHKAASYNADIVGLFSARGLIHLAKIAMNHADRFECQALEDQLEFLQQQLKSADQELRAFAQTGPVAEREARAILATVPEVGPVTTDVILSETADVRRFRSAKRAVAYAGLDPGIRESAGKGKQLSISKDGSPLLRWALIETAWRLVRKTTRWKRLFERLRASTGHKKKAIVGVARRLFCVLFAMLRDGKAYRLAAD

SEQ ID NO: 445321 - protein, 407 aa, unidentified
MEVLFPRCAGLDVHAGNVTACARIATGAQVTYAHHTASTTTRGLLALADWLTAHECTHVAMEATGVYWKPVWHVLEDHFTLILANAMHIRNVPGRKSDMNDATWIADLLAHGLIRSSFVPPAPIQELRDLTRTRRQLVHEVARHVLRIQKTLEDANLKLTQVMSNIVGVSGRAILNALIAGETNPDRLADLTRGRLKAPRADLLDALHGRVTDHHRFMMKLHLTHIDTLETAIATLEARIGDALGPFRAAVSLLTTMPGLSETTARVLLAEIGTDMSRFPTVGHLISWAGLCPRLDESAGKRRSTRTRQTSPWLKPTLINAAWAATRKKDSYLRAQFLRIKSRRGAKKAILAVASSMLTAAFFMLRDGVEYHDLGARHFEQRDKDQVAKRLLQRLRDLGVAVEVKAA

SEQ ID NO: 445322 - protein, 399 aa, unidentified
MFVGWDWASATHDVTVLDDAGVVVDRWAFRHTEQDLVGALDRLARLAEPAALPVIIERASGLIVERLLAAGHPVVPVHPTAFWAARPRWGASGAKSDPGDSYKLADYLRTDGHRLRRLDPPDTGLQELQALVRLREDHLRARTAASNQLGALLEAHWPGPKAVFFRLASPIALAFLTDYPTPQAAARLGQARMASFCRRHSYRGDKTPAELLTRLQSAPTAPVGIPAATLAILVRAQVQLLRTLLGTIAELDAAIATRVVLHPRAKLLASLPGVGTINLAQLLAEVGPVLDRVANAEQAAAECGAAPVTRASGKTTGVYFRWAANRRARKALTAFAHNARMQSPWAGRLYADARARGKRNPHATRIVARAWLRVIWACWHTGIPYDPHAHLAEQRLAAA

SEQ ID NO: 445323 - protein, 438 aa, unidentified
MLMAMEERCAGIDVGKRMIAVTVMTGPVHEDPEVETREFPSTNHCLLEMWEWLKQRGCTAVVMESTGSYWKPVFNVLEKDFRVDLANPMHVRNLRGHKTDVADSIWLAHLLRHGMVRASFIPPEDIRHLRDLTRRRKRLIGAGASEKNRIAKVLEDANVKLSSVLNSLFGVSGQAMLERMLQGEFDAAELAQLAKARARLKRAEIEEAISLNQFNDHHRLMIGQSLDHIHFLESQIEALDREILKQLEPYRELYELLQTIPGIRAECAAVILAEMGPDMRVFPSAAHAASWAGVCPGNNRSAGKQRTGRTTGGNRWLKASLVECSWSAGRTRDSAFARKFNKWQRTLGKKKAAVAICHAMVQVIYFVLKERVPYIADTKADQQRKHRQRQIRHHCRKLRELGAGVEEIQAALQAQGIEVPAPTGKGARRIGALGLKAY

SEQ ID NO: 445324 - protein, 347 aa, unidentified
MDQQCHYVGLDVSLETTSICVIDDAGAIIWRGKCHSDPDTITAIVRHRAPGAVRVGLETGQLSNWLTLSLRRRGVPVVCMDARHAKAALSLQINKTDANDAFGLAQVVRTGWYREVAVKSMDAHTLRMLLVARSRLVSQRQATANTIRGLLKTFGLVVARGSKGLFPVRVREQIAGNPAVIAIIEPLLAVWHAIRDQVAMLDRQMLARARNDQVARRLMTIPGVGVVIALAYTAVIDDPARFRRSVSVGAYLGLTPRRYQSGEVDTTGHISKCGDSLLRGYLYEAAAVLLYRDGRASVLKSWGLGLAKRIGMRRAKVAVARKLAVIMHRIWSDQSEYRWTAIPSTTA

SEQ ID NO: 445325 - protein, 334 aa, unidentified
MNNIIYDHYVAIDWAASNMAIARMTKKSNKISVVDVPADIKELQLYLKSLKGTVILAIEETSTSQWLYTELVDHVDEIFICDPHRNRLLSEGPKTDKIDAAKLVQLLKADLLKEVFHSTHKFIYLRRLVSGYEDLVKSGVRLKAQRYSLLRVCGKDGYEKGEINLGSRNEQFVLNGLDRQIASYEEEKKAYEKEFQRLSKKYPEIGHQKSLPGIGVINAVKVVARVVTPWRFANKGHYLSYSGLVKLLQVSGGRNYGRKNPRYSRQLKNVYKTGVLAAVGGNNPLNDYYEHLIQEKGYAPHVARHKTCRRLAVLSYGVFKSGHNYQPYAEKPIG

SEQ ID NO: 445326 - protein, 360 aa, unidentified
MAKARSLVGLDVHATKIVAAVLDAETGELEFFRFSGDVSQAAGFCAGLPRPVRAAYEAGPTGYGLARELARRGVDCVVAAPSKIPRAAGDRVKTDRRDAELLVRLLLAGKLHPVRVPGLEEEALRDLVRAREAVRVDLMRARHRLSKLLLRHGVRFDEGSAWTARHRAWLAGVTLPYAAAQATLLDASGAIDALAHRRDGLQREIVAMLPGSPWQVQVERLRCLRGIDTLSAVGLCAEIGDFERFAHAEQLMSYLGLVPCESTTGQQRRLGSITKTGSGHARRLLVEAAWHYRKRPAVGKALAERQDGQRAEAVAIAWSAQRRLHRTWARLEQRAKRRTIIAVAAARELSGFCWAIARIE

SEQ ID NO: 445327 - protein, 456 aa, unidentified
MSKQRKSAMPAVHAKPTQRKHAAGIDIGATSIYVAVPVDRDPQPVRSFQTFTEDLHRLADWLQRCRIKTVAMESTGVFWVPLFQILEQRGFEVCLVNARHVKNVPGRKTDVSDCQWLQYLHSVGLLQASFRPAQQVCALRSLLRHRDSLVQTASTYAQRIQKALDQMNLQLHHVISDITGVSGVTILDAILNGERDPLKLASLRDHRIKATEETVAKSLVGDYRPEHLFTLRQSLDAWRYHRKLIAECDDEVQRHLVQFASKADPKQNPLPHPRKVSSSKVYSSQPGYDLRTEHYRILGVDLTEVPGINTLLVHTLLAEVGPDLSKFRSAAAFASWLGLCPDNRISGGKILSVRTRHVQNRAALALRIAAHTLHHNQSVLGHYYRRMRAKLGAPKAITATAHKLARILYHLLTTGQPYQESIFAERETQNQKRALFSLHARARTLGYQLIPLTAST

SEQ ID NO: 445328 - protein, 514 aa, unidentified
MFKRTVRKAKERAYVGKPLGVIQPRVAAVGPERFGIVAVDCGKGASVWMLADFYGRRLLAPQELLHSPGSLACAISQLRELLVRHNLADQIVAIERTGRYHLPVQQAYRAAGFETRIVHPLASRQYRELSDPANKTDATDLDGILRAATNGFGLTELPLEGSYLALCTLARHRRDLVEKRAAVLCQIREYLELTLPGYATCFDDLWDHRYALYLARQCDTPADFTARGLNGLKEMLRKEGRLFQERTLNRVLQWARTALPVSVEASLYRQVWHDLDDDRLEKNRQILRLEQQLAEHLALTPYVLLLSLPGINVVSAAELAGELGPIKHYASARAITGRAGLFPRRYQSHHVDRCGGLSPAGLRPLRFILLVIADNLIQCNPYYRGRALRCKDRQLDARLIRVKTAGAFSRVLFQMVAGGRVFTHPACQQRDYVLQKLLAFHHVHGTPLDQALRNLETARTQIPAQEYAAEAAPLSVELAKSRKLRRGGVKTLQDLLPVLLARLGVGSLQSESSE

SEQ ID NO: 445329 - protein, 355 aa, unidentified
MNRKNTHTLGIDLAKNVFQLHRIDNLGQVCFKGKLSRNKLLAFLGELSPCIVAMEACSGSHYWSRKATSFGHEVRMIAPQFVKPFVKGNKNDAADAEAITEAAMRPSMRFVSVKTPQQQDINVIHRVRQRLIHNRTQLANQIRGILAEYGIVMAKGRQKVGKLIQNLLAGEQSPIDLTPLTMELLGELWDEWNLLEDKISRQNVRIAKISAETEECQKLEKITGIGKIISTALVAVMGSPHNFKNGRQFAAFLGLVPKHKGTGGNNRIGKISKRGNVYLRTLLIHGARSALRVILYRFRSGTSLLGGAEKRFYGMYEKKGYNKTCVALANKIARVCWALLAKDEEYSAQKAFCIV

SEQ ID NO: 445330 - protein, 322 aa, unidentified
MSEPVLGIDIAKQKFDAALLIGGKLKHKSCKNSTEGFELLSQWLRKQGVARLHACLEATGSYGDELALYLHEAGHTVSIVNPARIKGFAQSELIRTKTDKIDSGIIARFCLAMKPQSWIPPSPEVRALRALVRRAESLIDMLTQEKNRLGTAHESVIPLIKEHIDYLKKEIEEVRRQIADMIDRDPNLKRKKDLLASIPAIGKVTIASILAEVDDLGRFTHVRELVAFIGLAPKETLSGSSIKGKPRLCKTGHPRLRRALYMPALVSLQCNPLMIAFYRRLKEKGKNGKVIVCAIMRKLVHVIFGVLKSGKMYDPNYKPAFA

SEQ ID NO: 445331 - protein, 364 aa, unidentified
MDVHLRSTTVCALDAETGEAVTRRFRGNPWGEVAEWMSGFPGPSLAAYESGYLGFAPQRELSGLGVDCVVAAVSKVPRSAADLSSKNDRNDAARMAKAILSHDVTPVWVPSPEIEGLRDLAGAHDAATARLAAAKQRLLAFLARRGYAYGGTTPAGNPRRYWTYGFLRWLDGIRPADDGGIRALAALRNEVEAAAETRDDLLAEYRAAVAAGPLSAEVEALQSIKGCGFALAAAFASEVGDFSRFRSGRQVTAYFGLAPKQRSSADSVRLGGISGAGNALVRRLAVEGSWRYAQAGHQPKLMPKGSGVPLEIRMHGRKGSERLLRRREEMLERGMPQAKANAAATAELVRWLWALGTMCREATE

SEQ ID NO: 445332 - protein, 423 aa, unidentified
MNCTQNNKLMQITSETMVIGVDIGSEIHYARAFDFRGFEFSKKAFRFQNNREGFNAFDSWATELMKKNNKTKAFVGIEPTGHYWYGFGCHLQNMCVEFGMVNPYHVKRSKELDDNTPSKHDRKDPKTIAMLVKDGRYLMPYMPEGVYRELRNLMELRRQNVVQLISIQNRVKRWLAIYFPEFNTVFKKWTGKAALLALKYFSTPQAVIEMGEEKIVAIWKQTIKRAVGNKHARKLIKAAEESIGLKHGLESAVLEISTLLDEYEIYARRLQVIMQKVEEQVNKVPNANKLLGIKGIGIVAIAGFLGAVGDIGRFDAPEQIVKLMGLNLRENSSGKHKGKTTITRRGRSDGRYAIFQAVLPLVARNTEFRQLHLYYINRENRPLKKMQSIVALCGKLIRVFYAILKTGSHYNGEKMMKDIKRVA

SEQ ID NO: 445333 - protein, 345 aa, unidentified
MTEIKLLAIDLAKRVFQLHGVDASGAKVFERRLMRDQLEPFVAALPACEIAMEACGSAHDWGRRFTALGHHVRLLPPPEVARLVDRRKKNDWRDARAIALAARLEHVRPVPLKSAAAQAEQFEHRRRAQLIKARTGAINLLRAMLLEFGIAVPKGPESLKRRRAGVMAGAPFAGIPPGCQALAADLFDQIEALNAAVAAADRRIGALVKQRPASRLLLTIPGIGPINASAAPAAIPDIRAYANGRAFAAALGLVPRQNSSGDKVVLGPITKRGNRYLRTLLVHAGRAVLVKARRTENPQDELLVWAKRLLRRMHWNRAAVALANKLARIVWAVLAFNQPYRPRPL

SEQ ID NO: 445334 - protein, 457 aa, unidentified
MATKKTKKRGKAAGQLSTINEHAAGLDVGATFHVVAVRGDQDAEPVRTFRSFSGDLHAMAEWLKSVGIKTIAMESTGVYWIPVFEILESHGFEVLLVNARDVKNVPGRKTDVNDAQWLQQLHQHGLLRGSFRPRDGVVGLRSYLRHRQGVVEYAASHVQHMQKALMQMNVQLHHVVSDITGATGMKIVRDIVTGKHDPGQLAKHRDVRCTASEETIREALTGNYRAEHVFALKQGLELWDFYQTKIAECDVAIEAALTLLNAKRPVPAKPLPRRRQPKTKGEPSFDVRTALYTMLGADLSTIHGFGPYTVLRLVAECGDDMTKWPTAKHFTSWLSLAPGNKISGGRVLSSSTRRSSNRTAAQLRLIAVAIGKTQTALGAFYRRLGARIGKAKAVTATARKLAVLFYRALRYGMTYADPGAEYYEERYKRRVIDNLERRARGLGFQLVQNAPVVEGVS

SEQ ID NO: 445335 - protein, 346 aa, unidentified
MSLELQSLLPYPNSCVGASPHQQGRDTKMLSFCGIDVSKDRLDVMVLPEEQCCSVPNDASGWAALVERLRNFSIMAIGLEASGGYERGVMRALLAAGMSVRQVNPFKLRQFARASGVLAKNDPLDARMIFVGIMPTRPAQRPTPATEQLVETLAVRRQLSAEKVAAENASRLLEETILRRLSRRRIRRLAADIEVLDERLLEIVATDAVLARRYRLLTSMPGVGSLLACTLIALLPELGRMNRKQVAALAGVAPYAFESGTLRGRRCIWGGRANVRQVLYMAALSASNWNPALKAFHDRLEAAGKKPKVTIVAVMRKMITTLNAMVRDDVVWADRHSGRNSVTTAR

SEQ ID NO: 445336 - protein, 416 aa, unidentified
MRQLLFVGDDWAEDHHDVEVMDEAGRRLSKATLPEGIAGITRLHAMIAAQLDPDGDLDAQAGQVLIGIETDRGPWVQALIAAGYQVYAVNPLQAARYRERHSVSGAKSDPADAHLLADMVRTDHHQLRVVADDSELAEAVKVVTRGHKTLIWERTRHTLRLRSALREYFPAALAAFEDLTAADTLELLAKAPDPASAARLSTTQIAAALKRARRQHRDRRAGEIQAALRTPQLGQPPLVAVAYAATVRAQVAILGVLNEQIELLQGQVEAHFGQHPDAEIYTSQPGLGQILGARVLAEFGDDPTRYGNARARKNYAGTSPITKQSGKKKVVLARYVHNDRLLDALGGQAFAAINRSPGARAYYDKQRDRGLGHRAALRQLANRLVGILHGCLKSGTRYDEATAWSHHIQEDQLTAA

SEQ ID NO: 445337 - protein, 320 aa, unidentified
MVIMITSKQSHAGDPFFTSRGALPKVVENDEASFKTKLGKKVKSFKDALFVVEATGGYERQIVKWLQANDLDVAIVNPKQVRHFAKGIGHDAKTDPIDAKVIAKFGEVVQPEPKAIPCSESEKLDALVTRRKQLLDLINQESNRLKQAYGSEVKEMIRESLESLKNQKKALEKRIKKAVAADKKNARKIEICESVDGVGKVTVATLMSDLPELGQLNRAEIAKLVGIAPIDRDSGTKSRKRLTQGGRSYIRKVLYMATLVATRRNPVIQVYYQRLLAKGKLKKVALVAAMRKLITTLNYLVKTDQLWEPPDSFKQERGAA

SEQ ID NO: 445338 - protein, 318 aa, unidentified
MKSEMKQNINVGVDTGKFQLDIYIRPLDIFFSVSNDENGIREAVKTIKQHQPERIIIEATGRLEMPFIMACAKANLPFVIANPIHIKRFAGAIGQCAKTDKLDAQIIAHYGEAIQPPLSTLKPDTMQAMSDLVARRSQLLGMQTMEKNRSQVLSKSLQMTIKPILTALKNQIEKVESRIVSLIESCPDYQAKNTILQSMKGIGKIASASIISNLPELGYMTNKQAASLVGVAPMNRESGVFKGKRTVQGGRHQVRTVLYMAMMSAIQSNPVFKETYQRLVEAGKPKKVAIIACVRKMVVILNSMLRDGVLWEAPKAKI

SEQ ID NO: 445339 - protein, 343 aa, unidentified
MQITTYGLDLAKKVMQLHWVDMETGEIHRKQMKRRALLEFFANRQPGIVAMEACGSAHYWGRELRKLGHEVRLIAAQFVRPFVKTNKNDAADAAAIWETVQRPDMRFVAVKSEEQQSVLSLHRIREQLIKVRTMQVNQIRGLLYEFGADLPQGRQKGLKEVPDALADLEEFLSPMFLDTVRQQLKRLEQMDKDIADIEKCLALWKKDQEAVTRLMAIPGVGLLTATAIIATVGDMKSFRSGREFAAFLGLVPRQSGTGGKVRLLGISKRGDSYLRKLLTHGARAVVNCQIKNRNLWIDKLLCRRPHNVVVVAQANKMARTIWALLVKNTEYVASHTMNAASIS

SEQ ID NO: 445340 - protein, 343 aa, unidentified
MQVSTIGVDLAKNVFQVHGVDSVGKVVISRQLRREQVIDFFSKIPLCLVGMEACGTAHHWAREVSKLGHTVRLMPPSYVKGYVKRSKNDAADAAAICEAVTRPSMRFVPIKSADQQALLMLHRTRDLLIRQRTQLINALRAHLAEFGLVAETGREGLAQLAGIITDESNREALPSAMKQALQAIVDQLAALELQIATLDRAIHAHHRANDMSCRLETVPGIGVIGATAIASTVTDPSAFKSGRDFAAWIGLVPRQHSTGGKERLGGISKQGDRYLRRLLVIGATAVVRHARQHPQKHPWVMRLLAKKPAKLVAVAVANKMARIAWAIMVKGGYYRAPELAAAA

SEQ ID NO: 445341 - protein, 356 aa, unidentified
MNKISKLDFEGQQIYVGMDVHKKSWSISVLTDEFEHKTFTQPPEVSTLVNYLKRNFPGASYKSVYEAGYCGFWIHDCLQERGVQCLVVNPADVPTKDEERRKKTDRVDCRKLAKSLRSGEIEGIYVPCRPKVEDRTLIRTRHSMVKKQTRCKNQIKSILQFYGIQIPEELVDSHWSKRFITWIEAIRMERASGNFALKAYLEELNNMRKIIAELTRGIRSLANAEEYRQNVCLLKSVPGISILTAMTILTELYEISRFRNLDKLCSYVGLIPDTNSSGETDRDMGITKRRNAQLRGILIESAWVAVRKDPALLMTFNTLCKKMPKNNAIVRIARKLLSRIRYVLKNQQKYASAIVQ

SEQ ID NO: 445342 - protein, 355 aa, unidentified
MSQEKYIGMDVHQATISVAVMDASGKLIMECLLETKAATMVEFIQGLHGTLSLTFEEGTSAAWLHDLLKPHVSRLVVCDPRKAALLKDGNKSDRIDARKLAEMLRTNQLKPVYHGEHGIRTLKELGRSYLTITKDVTRSMNRIKALYRSWAVPCGGTSVYAPRHRAEWLAKIVEPGVRIRAERLYRQLDGLQPVRLQARRELLRESHQHAAVQLLRQIPSIGPIRSALLVALLQTPHRFRSKRQLWAYSGFAVETHDSGEYRSVRGKLQRNRERITVRGLNDNHNKDLKNLFKSAAISASTRPGPLQDFYVALVAKGIRPTMARLTLARKIAAISLTMWKKGVSFDPKQLHRQAA

SEQ ID NO: 445343 - protein, 426 aa, unidentified
MNQPGIDQTENDYAAFIAIDWADQKHAFSLQMAGHTKKETGTLEQKPEVIGAWMAKLRERFGGRQIAVAVEQSRGALIHALLSYDFIVIYPLHPVTVAKFREAFKSSGAKSDPLDTDQILQILTKHRDLLKPLNPDTQETRLLGRLVEDRRKMVDLRTSQIEALSACLKEYFPQAIEVLSGNLSTRLACDFLKKWPAFESFQQAKDSTIKAFFYGHNIRSPQIIEKVLRIANSAQALTTDPAVVGSGGQLAQAYARVISTLNPVIEQYEERIKTLFSKHPEAYLFNKLSGAGPAMAPRLLAFFGTDRSRYATANNVQSFCGIAPVTKSSGKTKSVYMRRACPRFDRQTFHEFARLSVVKCQWARNYVEYYTGKGKKYATIIRALAFKWIRILFACWKNQTPYNDDQYMAALAKRGSTFATLHLKKS

SEQ ID NO: 445344 - protein, 426 aa, unidentified
MPFAGLDVHKKEIEAVILDDSGQLLLRERIATRRETLERFARRHLQPCRVALEATTNTWAVVGVLTPLVEEVVVSNPLRTRAIASAKVKTDKVDALVLAQLLRSNYLPRVWTPDEQTRLLRQQTSERANLSADRTRLKNRIHSVLHQRLIEPPVKDLFSGAGMRWLAQFSLDTPGQRALERSLRQLAQTEAEFQLLDGELAAHAYRQPQIKLLMSLPGVDYAVAESVLGVLGEVTRFPDPDRAAAYFGLAPSTHQSGAHCYHGRITKQGSAHGRWMLIQAAQHVAKHPGPLGVFFRRLAKKKNRNVAVVATARKLVTIAWHMLKNNEPYRYAQPKTVEAKYSRLRVRVTKQKRKTGAKGQQRPAGYGSGKRTRAVPALDGIYAGEGLPALASAAPGEQSMLERHRVAEYAAHIREPHRVPRSSTSS

SEQ ID NO: 445345 - protein, 313 aa, unidentified
MYKYIGIDISKATLDLYDGVKSYKVSNDLPGFKEVCKLSDKKRELCLIFEPTGIYSHALIEYCQKHKIKAIIVGSKEARDYARSIKQRSKTDKIDAMVLYRYHTQIEEETIAVPSVDTHVRKITQRRNAYDKYRQAMAQLNNLIEATSKNDNTLIRSLQKQRASLQRAADKLLEEIEILLLEKQEHKDTLSHLQTIPGIGKKSALALLLEFLRYPEARSHEMVALMGLDPVLKDSGVFKGKSRISKQGGKRLRQTLYMATVVSIQHNDRLKIFYERLVSHGKPKKLALLAAMRKLLRIAFAVVKNNEPYRALV

SEQ ID NO: 445346 - protein, 343 aa, unidentified
MQVITTIGLDIAKSVFQVHGIDAGGQVVIRRQLKRRYVLAFFEKLSPCLVGIEACASSHYWSREIKALGHTVRLMPPAYVRPYVKRQKNDMADAEAICEAVTRANMRFVETKTPEQQSGLMLHRTRHLFIRQQTAVINAIRAHLGEFGIVAPVGRNGVEELLDVVADPSDKRVPEIVRACLAALGAQLRRLKEQILEFDRMIRAWHRSSEMSLRLDDCPGIGPVLATALAATVADPKAFRSGRNFSAWIGIVPKQHSSGGKNRLGGISKQGDRYLRGLFVAGALAVIRYAKIHGTKHRPWLRALLARRPTKVAAIALANKIARMAWAMMAKGERYKEPVALAA

SEQ ID NO: 445347 - protein, 348 aa, unidentified
MDTIGLDLHKRESQLCVGHADGTVTEQRIVTSRERFTALFAAQPPARVLLEASTESEWVACHLESLGHTVIVADPNYAPMYATRSRRVKTDQRDARTLMEACRAGTYRPAHRLSAPRRHVRAELAVRDAVVRTRTRYVALAKALVRRDGLRVPSSAAERVGVHLQALPASPALAAELAPLVTLLPVLNATIAAADQRVAALEQTDPSVALLMTAPGIGAVTASALVATIDDITRFASAHQFEAYLGVVPGERSSGEQRRVGPITKAGNRRARWLLVEAAGRILRSKDPDSAALRAWARTVAARRSNRIAVVALARRLAGVLYAMWRDGVPYEAGKIRGPRRALVPRAG

SEQ ID NO: 445348 - protein, 315 aa, unidentified
MQTVTTIGLDIAKSVFQVHGVDAAGQVLIRRQLKRRYVLAFFQKLPACLVGIEACASSHYWSRELQALGHSVRLMPPAYVKPYVKRQKNDMADAEAICEAVTRANMRFVPTKTPEQQSGLMLHRTRHLLIRQQTSVINAIRAHLAELGITAPVGRTGIEELLRVVADPSDKRVPELVRTCLAALGSQLLGLKKQILQFDRMILAWHRSNQTSKRLNCIPGVGPLLATALTASVADAKSFRSGRNFSAWIGLVPKQHSSGGRERLGSISKQGDRYLRRLFVAGALAVITPRYQSSTLAYRVIGSPADQGGGYRACQ

SEQ ID NO: 445349 - protein, 412 aa, unidentified
MSDDTVSWFAAVDWGSEQHQACIVDAAGRTKGERAFPHGGTGLAALCDWLVSVAGDPGMVAVAIEVPHGPVVDALLDRGFAVHAINPKQLDRLRDRFSVAGAKDDRRDARVAAAGLRTDPHLFRPVQAGDPAIIELREWSRLAEELQQERVRLGNRIRQQLWRYYPRLLEVSDDVAAEWVLVLWTMAPTPAKAARLREATVARLLKQHRIRRIDAATALGILRAPAIKVAAGVTEAAILHLRSLMARLRLANCEFHQAERKLGELCAVLTQAEPAQGGEPSDAAILASLPGVGRSTLATLLTEAGGPLARRDYAALRTLTGVAPVTKRSGKTCIVVMRYAAQARLRQAVFHWARTAVQHDPKSRGRYEALRARGHSYGRALRGVADRLLGVACVLLKRQTLFDPAHGTTVEP

SEQ ID NO: 445350 - protein, 259 aa, unidentified
MSVTMIGLDTAKSVFQVHGVDETGKTVLKRKLRRSELIPFFEKLEPCTVVTEACGAGHHWARVLTGFGHEVKLIAPEAVRPFVKKGKKNDPADAAALCTVGARPDTKFVPIKTLEQQGILALHSARSLLVKHKTATANAMRGTATEFGLTVPKGIEKLDELIELVDADQSIPEKARQGIEELRSHWVAIARRIENLDQQIVEHARKDETARRLATVPGIGPITASLIAATIGDNIGVFKSARQFAAWLVPRVLDSGGDV

SEQ ID NO: 445351 - protein, 353 aa, unidentified
MEQFIGCDAHKKFSLFIAMNQEGGYGKPIRVVHDRDRMRAFLEALPAGSQIALETSGSYYWLVDEIARAGHEAQLAHALTAKRRMEGRHKTDERDARGLAMLLRNGTLPRVWIPPAELRDQREMVRWRMSLVGSRSQIKNRIHGVLLRYNVEATASDLYGDAGRAELEDLLAELPQWTRQSVEEQLETIDHLDRQIEDCEQKLEVLLEASAERDLLQTLPGVGRILSAVIALEIGDIARFATPQNLASYAGLVPAARESAGKKRKGKCPADCNTYLKWAFIEAGNVVAAHHKNWSGRHVAELYQRVKKSSGMHGKATVAVARHLAEASYWMLTKQQIYREPNGPRQALSSTHG

SEQ ID NO: 445352 - protein, 356 aa, unidentified
MTSTKYVGMDVHKESISIAVMNSAGKIVMECVIETKASVLLQFFNGLRGDVRVTFEEGTWAAWLYDLLKPRVSEVVVCNPRKNALLKDGSKSDRIDARKLAELLRGNHLKPVYHGEHGLRTLKELGRSYLTITKDVTRVMNRLKALYRGWGIPCAGHEVYVPRHRSEWLGKISEAGVRRRAEHCYQQLDVLRLLRQQVRRDLLLESRKHPAWRLLGLIPGIGPIRAALLIALIQTPHRFRTKRQLWTYSGLGLETHDSAQYRVVEGQLQRSKKSVTLRGLNQDHNRDLKDIFKGAATKVSSSNSGPFHDFYEHLLAQGRKPTMARLTLARKIAAITLIVWKKEVRFDASYLKSQTA

SEQ ID NO: 445353 - protein, 431 aa, unidentified
MKYKQSKKQNQRIQQITELTLVVGADIAKKTHVARAVDFRGIELGKDCVFGNDHSGLTKLVSWMKGLQRQHAKTDIILGIEPTGHYWFPLAEFLHRENIKVVIVNPHHVNKSKELEDNSPTKNDYKDARLIADLVRNGKYSEPKLPTSVYADLRILMNLREKVMVNFGQVQRRIQNWLDRFFPEYSLVFKDWEGKASLITLSEFPTPQEIVSLGASAIVRRWKEDVKRAIGSKRAVQLLQAATNSIGLTEGLAAAKIELRALLEQYELFSRQLEEIMAQVEALLAQIPGTKEMLTVPGIGVVTLAGFLAEVGDLSGYDHGQQIIRLAGFNLKENSSGKKKGKSTITKRGRSRLRALLFRAMMPMVAKNAEFKALHHYFTQRSHNPLKKKQSIVALCGKLIRVLYTLGTKCIPYNASDVLGPVRQSQIQMAA

SEQ ID NO: 445354 - protein, 429 aa, unidentified
MNSTQNKKIEQVKETTMIVGIDVGSEKHYFRAFNWRGIELTRKPVAFSNSMEGFNSFYNTIVELMQKSELEEALVGIEPTGHYWFDLGQFMGEKSIKFVMVNPHHVHKTKELDDNSPSKNDRKDPRVIAGLVRDGRYFYSYMPTGVYAELRNASNRRFVLVEEQTRAKNRLQKWIAVYFPEYKGIYTHIDAKGGLLVLKQAPTPEEIVKLGEEGIIKIWKDAKLRGNGNKKALKILNAAMRSIGLRTGLTEARMEIQDLIEDYELQTKRLERVNDLIKELCQQIRYADKLLEIKGIGITTVAGFIAEVGDITRFDSTKELQKLAGLELVADSSGKHNGKTKISKRGRKRLRYLLFEAAISVVGKNEEFKEIHRYYTTREKNPLKKMQSLIAVACKLIRVFHVILTKGVSYDASKMLEDIRHPGEQLKAA

SEQ ID NO: 445355 - protein, 355 aa, unidentified
MKTQVKKIDFSNQNIYCGVDVHKKRWQVTICTEHMVQKSLSFERPFVDKLKHYLDKHYPGGNYYVAYEAGFSGFWPQKALKAAGMEAIVVNPADIPTTDKERKHKNDKRDSRKLALSLRSGELRGIYIPDDTALQHRSMVRERWSIANSERRVKNQIKCHLMFHGMEIPQEMDRSYWSRRFIGWLEQIQKEHSDEALAFKINRLLILRQLQVQATRSLRELAGHERYVKTYRILRSVPGVGLLTAMLLLVEIIDIKRFPRFAELCSYVGFIPTSKSSGEQERYGEMTNRKNNRITSGLVQSSWSAIKSDPELLMKYEHYRKKMGAQKAIVRIAKILLRRIRMVWLTQTPYQKSEF

SEQ ID NO: 445356 - protein, 347 aa, unidentified
MRFYTHQHKYYCGIDLHTRKMYICILDEKGEIREHRNLKTDRDTFLKAIAPFREDIVVAVECIFTWYWVADLCHNEGIPFVLGHALYMKAIHGGKAKNDKIDSQKIAVLLRGGMMPMAYVYPVKMRATRDLMRRRNHLMRKRSELYAHIQNTNSQYNLPDSFGPISRHQNRNGIAGQFEHPSVQKSIAVDIEMIRTYDGILSQLEKSIIKLANNHDPVSYALLQTIHGVGKIIALIILYEIENIRRFASVQDFVSYSRLVKCAKESNGKKCGSGGSKIGNAHLKWAFSEAAIFFLKGNDPAKKYLDRLTRKHGKSKALSILAHKLGRAVYFMLKNKEAFDQNKLLNL

SEQ ID NO: 445357 - protein, 342 aa, unidentified
MEEYIGLDVSLKETHICVMDGAGAVLAQAREATQPELLAASIGRLAGNVRTVVLETGGQSSWLHRELTARGLPAVIVDARRAKAALSCRLNKTDANDAEGLAHLARTGWYREVAAKRPEIRLARSLLLARRQLTKQRRDLENQVRALLRGFGLAVGTLARSQFEARVWELAGREPGLADALESLLAVRRALDIQIKTLEKRIVAATADSEVCRRLMTVPGVGPMTALAFVTALDDPHRFRRSSSVGAYLGLTPRRHQSGAMDWSGRISKHGDSLARHMLYEAANSLLSRVRRWSAPKAWAARMVKRVGGKKARVALARKLAVILHRIWVDGSEFKWSNEAMV

SEQ ID NO: 445358 - protein, 482 aa, unidentified
MKPSQQNQMEKASCRRTQVGWQSMNRKQRREMTRKIQAADLSLEVVHPDAAGIDIGNEAHYVAVPPARDDEAVRRFGCTTAELRDLADWLKQCGIRTVAMQSTGVYWIAVYDILEAAGFEVYVVNARETKNLPGRKSDVQESQWLMKLHTYGLLRNSFRPSQEIRTMRTYWRQRNDWIRSAGRHIQRMQKALTQMNIQLANVLSEVSGVTGQAIIKAILAGERDPHELARFRDPRVKASPAEIARSLEGNWQEDLLFLLQQEQDSYEFCQKQMKECDERLQHFLQQREDRSAGASLPEEKRKERLKKKKTNKPRFDLRAELFRRTGTDLTQIDGVDVRTAATVISEAGWDMRKWRTENHFVSWLRLCPDNRISGDKIIGKGRLPTTNRLTVALKIAATTLRPSRTYLGAQFRRLKTRLGAPIAIKAMAAKLAPLGVSNAALWDAIRRSRGELYEARHRQREINSLKRKATNLGFQIIEASAA

SEQ ID NO: 445359 - protein, 364 aa, unidentified
MQPYLGCDAHKHYSVFVAVDERGKATQPVRIEHNVAAYQRYLDTLPNGTEIAIESTGNWYWIVDLMEQAGHRPHLANPSEAKKRMGKTHKTDALDAKGLAILLRNGTLPESWIPPGELRDQRELLRTRMALRDLRTSLKHRIHSAIDRYGLHATGISDLFGVRGRAYIAEVLPDLPKETARMVSLELDSIDQLNIKLMILEQHIDCTLASSPEIRLLHTLPGVGKILAPILWLEIGDIERFQRAENLASYAGLVPRVIASGGHIRHGGTCRNVNRYLKWAFVEAATCATHLRAYREGHIGLLYRRLAPGKGHGRAIVAVARHLAEASYWMLRKREPYRQPQPHPPSSKFGQARDTSDHAAKVSG

SEQ ID NO: 445360 - protein, 372 aa, unidentified
MKSIAYVGMDVHQIEIRMAVVDAKSGQLIAEELTRNTEDSVRKVMRRLCKRYELRCCYEAGGCGYVLYHWLKAMGIQCAVIAPSLIPRRPGERVKTDRRDALKLALLYRAGELTEVHVPTAEQEVARTVVRLRETLRREVMASRQHLLKFLQLRGLAYRDGRNWTEGHWRYLRGLRFEGAEAAVYSEYLGMLEFKLSRLKEAEGQIQELSVQEPYRDRVARLRCYRGVDTLTAMVLVSEVWDFKRFASAGHFMSYLGLVPQEHSSGSSRRQGPITKTGNTHCRRVLVESAWHYRYRPSVSVRVRRRQQGQPVGTIERSWKAQYRLHDTFRRLGSRKERQVAAVAVARELAGFIWAEMVAEPACSAGSRQAAA

SEQ ID NO: 445361 - protein, 341 aa, unidentified
MICVGIDVAKDKHDCFILDSEGVVLADAFTIPNNLEGFQTLLDKLRDCSTPQDSIKVGLEATGHYSYNILGFLLDNGLATYVLNPLRTNLYRKSLSLRKTKTDRVDARTIAAMLLSDAGLKPYTDTAYHNEELKSLTRYRFDKVNERAQLKQSVSRLVCILFPELEKLVSSLHTASVYALLEEFPDARQIAAAHLTRLKTLLAEASRGRCGRDMAVEIRNAARCSVGSRMPAKSLELQHTIRLIRELDAEIEEIETAIQAIMEELHSPITTIPGIGYRMGAMILAEVGDFSRFDSPDKLLAYAGMSPSTYQSGQLKNCYPHMEKRGSRYLRYALYNAAKYR

SEQ ID NO: 445362 - protein, 388 aa, unidentified
MEARTVNALPPAAADHAAIRCLLAIELSKKSWVVAINTPLADKISRHTLPGCDWTGLLELIQRVRTRVARELGRPVEMISCYEAGYDGFWLHRLLEGQGVHSLVVDPASVQVDRRARRAKTDRIDAERLLRSLMAYLRGEPKVWSVVRVPSVAEEDDRRLHRERDRLIAERIQHVNRIKGLCAIHGIYDYQPMRPDRTRRLEQLRTGDGRALPPRLKAEIARELQRMELVLRMLKEIDAERNAIASARMSTHTNAKKIQDFVKLKAIGPEIATVLTGEVFYRPFNNRRELASYVGLTPSHFQSGSTCRDQGISKAGNPKARTTMIELAWLWLRHQPDSAFSVWFRERVGNLKGRIRRITIVAMARKLLIALWRYLETGVLPTGAVLKV

SEQ ID NO: 445363 - protein, 317 aa, unidentified
MKKENFAGIDVSQGYLDLAIRPRKEMKRFTNDKVGIDDLVVFLRKLPSTSVVMEATGGLEGPVAAALAVAGIPTAIVNPRQVRDFARATGKLAKTDAIDANVLAHFAEALRPEPRPLPDKKSKEMSDLLARRGQVVGMITAEKNRLSRVVSLRVVEAVKAHIVFLEVELENIDSDLKQAVKDSPLWRAKEDLLRSVPGIGHVTSITLLCDLPELGTLGRKEIASLVGVAPINRDSGTYRGKRMVWGGRARVRSALYMATLVATRHNPIIMAFYHRLVEAGKANKVALTACMRKLLTILNAMVKHNTPWTYQIIGHCS

SEQ ID NO: 445364 - protein, 367 aa, unidentified
MRLSIGVDLHKSQFTVYWKPEKSSEGKFARFSTTEAGYGAFEHQVLSAISQGIDVAMAVETTGNARYFRARMQRLGARVVVVNSLKFKVITQSVNKTDRRDASTLAEFLEKDMLPEAVLCSEESEKLRRLLKVRKRLVESIVVIKNQLHALLLDVGIESIRGQLQSKKERRRVQNVLAAHTLAGAAVEPLFETIDQLSDQVKKIEKVIEELTSDDATVKLLKTIPGVGFVTAATLRAWIDDIGRFDRPQQLAAYAGIVPWVQSSNETVRYGRITKRGPSELRTALVQAVLGMVRLKRVTGTWRIMTRYDRMKREKGSGRSIIATARLLSEIIWHMLTKSEPFDPLRMTDSEMRRKAREMRAAAFNAA

SEQ ID NO: 445365 - protein, 404 aa, unidentified
MEDTACGVDVHKDLLVVTILISSSKETRRFTNDVDGINNLKEWLKANECKRVVMESSGIYWISLYLALEDAGFDVSLANARQVKAIPGRKTDQSSSEWLAHLLRSGLVKPSYVPEKRLRELRDLTRLRVKLVGTATAFRNRCHKVLNRVNIRLGSRLSDIFGKAGLEILEGLMEGKTVNQILEHTENRWLKKREDEVREVVKGVLSQCDIFFLKQCVDMVKHVEEKILEVDSRIEMLVNVRDVEIVSSVPGVGRKSAAAITAEIGDPHRFEDGKKVVSASGLAPSVYQSAGKNLTGGITKQGSKWLRRSMVLAARSAVKARDSELRRYYLRLKAKKGDKTAIVALARKMLTIIHHLLVNGEEYVEEGFEKRLRGGRAVQFRGVPLEEMVEVLRDAGFVVSGPFG

SEQ ID NO: 445366 - protein, 347 aa, unidentified
MAAVMIGVDPHKASHTAVAIGAAEEPLGELRVRAAAAQAERLVAWAAPWPERTWAVEGAGGLGYLLAQQLVAAGELVLDVQPKLGARVRLLATGASNKNDPNDARSVAIAALRSAAPRKVTAEDHAAVLKLWSKRHHDLGRARNQVACRLHAVLCDLVPGGISKEITAAQAARVLESAEPSGAVALARCELAAEFLDDLRRFDAQMRDTKKRLAVAVRASGTTLTEIFGVGPVITATMIGYVADASRFPSRDNFAAYNGTAPIEVSSGNRKIYRLSRRGNRRLNHAVHMAAVTQIRYRHSDGRAYYDRKLAEGKTPKEALRSLKRQLSDTIFARLQADARQAATHPR

SEQ ID NO: 445367 - protein, 332 aa, unidentified
MYSIGLDVSKSSVNVFVPKGALDLEIENSLKSFKSLYAKLKKLYKKEIEKLVFVFESTGSYSVLLHKFCAQKHIKVFMINPKQARNYAKATAERNKSDLIDARVLSRSIVIAKEREIAIPVINPLVEEIKELMAYYKLKVKQRVQLSNHLEALDVKKSNKTLVKTIKSELKQLQLQEDKIIETVQNLIAKDQTLQSKYNAIISIKGIGKIAGIVLLHLFIRYPNANQRKITSLTGLDPIIEKSGTSVRKNSRISKAGAKLYRGSLFMASMVAIRHNPQMKAFYERLKNNGKHTTAAQVAVMRKLVVIAYSLYKSGEVYDQEKYQKATGVSQE

SEQ ID NO: 445368 - protein, 390 aa, unidentified
MRKPKQRKPNDLSRSLAALDVDHTLIAVIEMSLSSWLVAGIVPGVERQPLKKLKTDACALLELLHRWRAEAVRAGHKITRIAVAFEAGRDGFWLARWLKAHGIEAHVIHASSIAVSREHRRAKTDRLDTDLLKRSFLGWLRGERDHCKMVAIPTLEEEDAKRPNRERESLVGEQSRLVNRMKATLVRLGIRGFNPKLKRAAGNLEALRTPEGTPIPSNTLAELKRDMERRRFICDQIRKIEQARIERLDRAPNTGPNAMVRLLARVIGIGVETADLLVHEVLLRNMRDRRAVARYGGLTGSPDRSGTISREKGIARSGNARVRRGMVQLAWRFLLFQKDSALAQWYRQRTQNAPRSRKTMIVALARKLLIALWRLVREGVIPEGIVMRPA

SEQ ID NO: 445369 - protein, 310 aa, unidentified
MFVGIDVSKKTLDVALRPGGEIFQVTNDESGWSVLVERLAGLSPALVVMEATGGYERGVVAALALARLPIVVVNPRQVRDFAKATGKLAKTDRLDAGVLAHFAEVVKPEQRPILDESLQALDEMLTRRRQIVEMITAETNRMHAMRDPALRKRIFKHVQWLRAQLDEIDTDLDSTLKKMPLWREKEQLLRSVPGVGPVTARTLLAELPELGTLDGRKIAALVGVAPFNCDSGSAIRGKRHIWGGRAPVRAALYMAALVATRHNPVIRATYKRLLSAGKPKKVALVACMRKLLITLNAMVRTTTPWTLAAA

SEQ ID NO: 445370 - protein, 412 aa, unidentified
MNRKARRCCGIDVHKASLSACIRLHGKGRKVSEEIRTFGTTGDELLALHDWLKEHQVTEVAMEATGVYWKPVYYVLEDGFRVILVNPAEIKRMPGRKTDVSDCAWLAQLLDHGMLRPSFIPPREIRELRDLVRYRVSLKHDHTRSANRLHKVLQDADLKLSSVMSDILGVSGRQILSQLAKGNCDPVALADLARANLRGKLPQLRQALSGRFNAHHAFLLSRLLADLDNTEEAMAQVAQRIEAQLVPFAAELERLCTIPGVKQVAAAAILAEIGAEMSWFPSTADLDSWAGMAPGNNQSGGKRRRAKARKGNRWLRTMLVESGNAAGRTRNTALSALYRRMIVRGGRKHAAFVVGRHILNIAYHLLRERTTYRELGPTYFEQRRVEQLKRRCLDQLRNLGFDANLVPLPKAA

SEQ ID NO: 445371 - protein, 422 aa, unidentified
MNEPEAIVYSAYVGIDWADSKHDVCICPSDSDAREFDVILHHPEAIDAWVKGLYQQYGGPIAVALELSKGPIVYALQKYDFIDLFPINPSTLAKYREAFQPSKAKDDPTDAELAVDMLLRHPEHFKVLKPQSAEMRALTTMVEQRRRLVNERGRITNRLRSALKQYYPQVLEWFEHIDTPLFCAFVKCWPTLTQARRARANTLKRFFHEHHMYREDVIERRRQAIKAASPLTLDEAVIVPYRMQVLILVEQLELMFKAIDQFDDETAKLASQHPDYALFQPLPGAGPSLTPRLMVAVGEQRERFSSAADVQKLSGIAPVTERSGQKHWVHWRLQCPTFMRQTFVEWAAQTINKSYWAGAYYRQQRDKGSTYQAAVRSLAFKWIRILYRCWQTGVAYDESRYLKALERRGSPLVKKQEVLELA

SEQ ID NO: 445372 - protein, 434 aa, unidentified
MKLPKHLRFINQHAAGIDIGSRSHFVAVPEGADEQPVREFSTFTGDLERLVEWLASCGVTTVAMESTGVYWIPVFEILESHGFEVRLVNARHVKNVPGRKSDVLDCQWIQQLHTYGLLRGAFRPTEQVCTLRAYVRQRATLVRSSSSYVQRMQKALSQMNLQLHNVVADITGLTGMRIIKAILAGERTPEVLATMRDKRCKNSESTIARSLKGHYRPEHLFSLRQAVELYEFHQEKIADCDREILEQLSCFDSEDAPHDAPPADVGEALQRMSGVDLTSIDGLDTTIALKILAEIGTDMSRWKTAKHFASWLGLSPGTKITGGKILSSATKPVANKAAAAFRMAAFTLFKSKSALGAYLRRQRARLGSPKAITATAHKLARLVYAMLTGGTSYVDAGQEYYEERYRARVVQNLKRKAHDMGFELVSRQTVTAPR

SEQ ID NO: 445373 - protein, 421 aa, unidentified
MTPTSHDTFAAFIGIDWADAKHDGCLQAAGTAKRECFQLEHTPEAIDAWVTTLRTRFHGQPVAVCLELDKGPLVSALRKYDFLVLFPINPLMLARYREAFTPSRAKDDPTDAALQLELLLTHRDKLHPLTPQSATMRALTQLVEHRRRIVGDKVRMTNRLTSTLKNYFPHVLQWFQDKDTPIFCDFLSRWPTLKAVQLARRSTLESFFRDHHVRSPEVIARRIQAIRAALPLTTDDGVIAPHVLLVQALVAQLRVTLQAITDFDTAIAQRAQSHPDFPLFQSLPGAGPVFASRLLVAFGEQRERYPSATALQKYAGIAPVTERSGKKSWVHWRLQCPKFLRQSFVEWAAESIRHSFWAQVYYQQQREKGKAHQAAVRALAFKWIRILYRCWQERTPYDEATYLQALARRGSSLIQNLAKAS

SEQ ID NO: 445374 - protein, 425 aa, unidentified
MFNHPKMKYVYLGIDSHKDTHCIVAINCFYEKLGTITVRNSPKELENLLTEVKKFKLKGTSLAFGLEDVSEYGRSLAVFLKEKKFIVKHVNSYLVAHERESLNIIHKTDEFDAECAARVLLNRFDTLPNADSQDKYWVLKTLVTHREAIVKNNIALKNRIHSIIASHYPSYSKFFCNIDTLGALAFYEKYPSPSKLKGVTVEELDELLFKVSGKSNPKDKGNKILEYVEADGYNEIEYQDIRDMAVKSSITLLKTNIKELAEIDNKLKELLQHFDYNLTSIRGVSTVLAATIISEIGNISKFSSPAKLARYSGVAPTTYASGKSELQFANRRGNKSLHHAFYTLSVGLIATPGNMIRNKYFYDYFHRKVSEGKTKRQALNCLQRRLVSIVWAMMTHKTEYINPDLISIDDFNADNTETIESTISQ

SEQ ID NO: 445375 - protein, 341 aa, unidentified
MKNLFIGVDFSKEKVDVAIIFADGLTETAARVFNEFKTTVSGYKQLVKWVEQNSYGIDSSLWLFCGENTGDYSKGLCNFLYGKGYDMWLENAKSIKDASGLRRLKSDRADASMIAEYAIRNYDKAVMYEPLSESLAQLRELFLYRQMVVRHRCSFQVRRGEKRLTMEKSPTKTMISQSGRHIVSELNKEVEKIDKRIAELIKSDEELTEVFTIVTSVPGIGTQNAVCLMVYTDNFRRFNYDSRKIACYYGIAPFGKDSGTSVHSDPHVHYMANRQIKAMLTQAALAAVNFNPIMARYYMRLVERGKKKQVALNNVKNKLVHLITAMVRNRQLFSPEYKISA

SEQ ID NO: 445376 - protein, 367 aa, unidentified
MKKVSTAAARQGRNISRQTLTIGLDLGDRNSWYCVLDEAGQIQLEQRVRTTAEALQEVFGAMARSRVALEIGTHSPWISRLLSELGHEVIVANARKVRLIGESRKKDDRLDAQTLARLARIDPELLYPVKHRSAQAQADLMMIRARAGLVRARTGLVNTVRGLAKSYGERLRGCNVRNLNPEKAEGLSPELQRALEPLLSAIEDLSERIAEYNQRIEALAQQSYPQVALLKQVKGVGTLIALTFLLTLEDPHRFGKSRDVGGYLGLQPGRRKSGESEPQLHISKEGDPYLRTLLVQGAQHILGPFGIDCDLRRCGLKLAERGGRNAKKRAIVATARKLAVLLHHLWVSGEVYEPLHNNSRMTVAAAA

SEQ ID NO: 445377 - protein, 384 aa, unidentified
MAVAVNRERETVFGPQRVSNYQLDDWAGRVLTPQDAIVLEMTTNTYLFHDTLLPLVHSVIAVHPPNVPLVTNVHVKTDKKAAETLAQLLAAGMLTGVWIPPHEVRDLRSLISRREKMVHLSTMAKNRLHALEHRKHLVLPDNPFSPDQRTWWENLELSTTEKLLVRSDLETLEFAQKQVEQIEECVKQKSIQDERIPLLIQLPGVAMLTATTILAAIGDITRFPTAKKLVGYAGLGTRVRDSGMTHSSGRITKAGRKDLRRAMVNAANHAVLDNPHWKAEMERLEPHLGRSKAIVAIARKLLVAVWHVLSRQVADCFADPQNVARSFLSHAYQVRVRNLPRGQSAPAFTRQQLDRLGLGKDLQKISFGSKLIKLPPSKLLIEKK

SEQ ID NO: 445378 - protein, 412 aa, unidentified
MKDLLEISCGLDVHKDKIVACILSGPIGKTTVSEIREFTTLIPDMAALRDWIVSCNCHHVAMESTGIYWQPIYEILEDAYSGDITLLVVNARHMKNVPGKKTDMRDSEWIATLLRAGLLNGSFIPDKQIREFRYLNWYRKSIIRDITSQKNRVEKFLQSSGFRLSTFISDIFGASGRNIICHLIQHGCIDRESLDSCLKTKTRNHINEILVAVNGTLSQIQQDFLEMLMDHYDSLKSHLAEIETALEEAMAPFSLHIEQLTSIYGINTTASCAIIAEIGTDMSYFKTAEHICSWAGLCPGNNESAGKRKSTSITKGNPYIKSMLCEIAWVIAGKRNTYLSAWYWRIKQKKGAKKAIVALARKLLVIIYTMLKQGTLFDENCFETRRKNCEQKQVSHYIRELEKRGYHIEASA

SEQ ID NO: 445379 - protein, 336 aa, unidentified
MSELATVGIDLAKSLFQIHGIDENGRVLVRRQLRRSQLLAFFEKLPRCLIGMEACGGAHDWARKLQGLGHDVRLMPPSYVKPYVKRGKTDAADAAAICEAVTRPSMRFVAVKSEACSSVLVIHRTRDLLVRQRTQICNAIRAHMTEFGVIAAKGAQNVDRLRTQMHQLPETARLPVSLLFEQLVDTDTRIERLTREIEAAHAQSETSQRLVTIPGVGKLSATIIAATTPDVGNFDCARDYAAWLGLTPKPHSTGGKQRIGRISKMGNRYIWRLLYLGAMSQIMVRHRCGPRQDWLSDMLARKKTKVAAIALAYRMARTIFAVLRDGSRYQPQATAA

SEQ ID NO: 445380 - protein, 343 aa, unidentified
MEHIAIDLGGTESQICVRSSDGTIVEEVRWGTPRLGSYLKRRPPSRVILETSAEAFRVADTARELGHDVRVVAATLVPSLGVGARGVKTDRRDAQVLSEVSTRIELPSVHIPSEISRTWKSTCTAREALVTSRTQLINTVRGWMRTGLLKTRKGDVPTFTKRVRDAALATPQGLPEFVEHVLSVIELLNDRIAVADKQLKELAHEHPVCNRLMSIPGVGPVTSLRFVSALDQIERFSNAHAVQCYLGLVPGEDSSGTRKRRTGITKAGPPRLRWALAQAAWSLRNARTRRLDPLVLWATEVEKRRGKKIAMTALARRLAGVMYAIWRDGTRYEAARLRPRLAP

SEQ ID NO: 445381 - protein, 342 aa, unidentified
MKDTMIGVDLAKNVFQLHGASMTGEVKFRKKLTRPQFMAFMADHPAAVVVMEACGSASYWARELSKAGHEVKLIAPQYVKPFVKRQKNDAADAEAIVVAAQRPEMRFVPPKTEEQQARAVLFRARERLVHQRTELSNALRAVLYEYGHAVPQGAVHLKRIVEILEAETCDLPELAREEARDLLEQITEKTVRIEAKTRKIAAQAALTPTARRLQTMPGVGPMTALAVEAFAPAMATFKCGRDFAAWLGLVPRQMSSGGKERLGRISKAGQSDIRRLLIIGAMSRLNWMGARSIREGSWLDRLRARKPKMLVAIALANKMARMIWAMLTKQQDYKDPVPAGAA

SEQ ID NO: 445382 - protein, 267 aa, unidentified
MENFYFIGVDVSKKKLDFCVTFEGKVVHEEETANHQTAIMSLLRNLEEDYGIASSQMLVCAEHTGQYTFPLACACKAVECRLWLENAAEIKYSSGVQRGKSDKVDAKRIAIYASRFQDKVQYYERPTEDIERLRQLESERTLYVTDLAKYKGQLKDQKDYMPKALYERKMKRLQSLMENLEEAIQAITDEMDEVIASCPVLFRQRDLLMSIDGVGRVVATNMIIATEAFTRFDNPRKFNCYAGVAPFSYSSGSSLHSKAECLIGRTR

SEQ ID NO: 445383 - protein, 390 aa, unidentified
MKKNTTTKKSPKKALTKGQKTQIHRMAANQRLTVGLDLGDQTSRYCILDEAGDAVSEDQLATTKTGLDGLFAKMPASRIALEVGTHSPWISRHLAALGHEVIVANSHNVKLITQSVRKNDRIDARQLARLARVDPKLLSPIRHRGEEAQRDLAVIRARAELLAARTQLINSARGLVKPLGERLQKCDADQVGAGLGESVSEGAQGVIGPLLQTVEAISEQIGKYDEQIEGIAQRYPEVKLLQQVYGVGPLIALTYVLTLEDAQRFAHSRDVGPYLGLTPQQHESGKSQPELGISKAGDGLLRSLLVQGAHCILRKKAPESDLRTWGLGKMGKGGKRAKKRAIVAVARKLAVLLHHLWATGEVYDPHYHRKAAEAAAAAAAKAKGEAKVAA

SEQ ID NO: 445384 - protein, 343 aa, unidentified
MDYFAGLDVSVKETSICIVDDAGKIVREVRVASEPEALLQVLTNTIYRFKRVGLEAGPLSQWLYSVLAEAGLPVICVETRHMRAVLKAQINKTDRNDARGIAQMMRVGLYRAVHVKTLRSQKLRMLLTHRKLLQSKAIAIENDLRATLRNFGLKVGMIGTVKFETRIRELVEKLPDLAMLAEPLLIVRRVIREQLDILHRRLLAVVRDDDVCRRLMTIPGVGPVVALTFRVTVDVPARFRNSKAVGAVFGLTPAKYQSGENDRTGAISRCGDEMMRMMLYEAAQSMLMRSTKWSWLKAWAMKIARHRGMKKAIVALARRLAVIMHRMWVDGTQFRWTREAAAA

SEQ ID NO: 445385 - protein, 394 aa, unidentified
MTYFVGIDNSSLDHKVHILKNNGDIYSKFIIENSLDGFNKLHETIKNFDQSMIGFELPHGPLTDFLREKNYVAYSLNPLKIKRFKETTIVSGNKDDNIDAAAIAEYMRKNSAICRPLLYNSSEIEKLKILCIVHSRMSKENTRYKNKLHFAIKQYFSLHESLFTNFGCTVQIEMLMKYPTFNDLRQASEDDLISFLKTNKYRVPKYIRKVIDKIKKYDQIVSPDVEYVYSLEVKMLCEILRTVKLNLKNVEKEMESILDNHHMGHIFRSLPGAGIILGSKLLALFGDNFDRFDTANQAQCLFGTAPKNYQSGNYHKVLMRKACNKHARAVLFKYAFESLNRSTWARVYYDEQRNKGKTHSVAIRALSNKWVKVIFKLWKDDIFYEEEKKISSAA

SEQ ID NO: 445386 - protein, 323 aa, unidentified
MQTPSAVLNIGADVAKDAIVVACAEGSFPVRAVANQRTAVLAFLMGLPAGSRIGVESTGSYHELFADAAHQLGFQVFLLNPKDTRHYAKAVGLRGKTDRVDAELIARMIAHEHAKLHAWIPPTPQQREIARLLNRRATLISLREAVAMSLHELDDFAADLKVLRTRFNQLIARIDLRIKTLIEASPERQQNFTRLCTITGVGPVDGTALVNTLERVPMKSADAFVAFTGLDPRPDDSGQHRGKRRLSKRGPAELRRLLYLAALSAIKTKTWRPLYEHYRAKGLSSTAALVILARRIARAAWSIYTYKTEFDPARLTNPVLRTH

SEQ ID NO: 445387 - protein, 471 aa, unidentified
MSYDRILFCYAFRHGINQKLKTMSAKKSKTVKKVKINEFTLVHPNAAGIDISSKDHVVAVPEDRDDTPVRTFDSFTCDLHKIAEWLNKCRVDTIAIESTGIYWLQLFLLLQAYGFEVYLVNSKHTKHVTGRKDDESDAQWIQKLHSCGLLNRSFQPEEDIRALRSLVRHRKNLIHSMSTHINRIHKALEQMNIKLGVVINDILGKTGKAILQSIIAGERNPKELAKHRDRRIKASIETVEKSLEGIWREEHLFELKQSYELHEYYQEKITECENKIQKQLEEYVAKSNYGDISELRESAKKKFKKSELSFDTSVYLKKIMDVDITNIYGISYTSALEIFAEVGIDMKRWPTQNHFTSWLNLAPNNKKSGGRIISSKVPKKKSTAGQTFRVAANSLWNSKNPLGDYFRKIKSRQGHSKAIVASARKLAIIYYNMLSKKEEFNPKSILEYQAKYKQMKIKRLKKQLADLEQAA

SEQ ID NO: 445388 - protein, 365 aa, unidentified
MNAIHYIGFDVHKKTISFCVKTADGQIVEEGSLQAERTVLRRWAAGRKQVWHGAMEATLFSAWIYDTLKPYAQQLSMGHPAKMKAITAGKNKSDQIDARTIADLLRCNLLPASYVLPPQLRDLRRLLRYRNLVVQQSVRMQNKMAGLLMESGTAFNKQKLHQKKYFADLMKSLEEVPESVKDLLRMSRGSMEMFQSTQKQLVKRLLSEPALEQRVERLMSIRAVGPITALTWALEIADPQRFASIADAVSYCGLSAAFRSSAGKQQRGPISKQRNAWLQPVLIEAAKLAPLWNPQLAAVHARALERGHANRATLQVARKLVAYLLAVDKSGQPFQVHTPPPPAATTAKKKPARKSKKAVALAPAA

SEQ ID NO: 445389 - protein, 441 aa, unidentified
MAMRKRDDDLVFPNAAGIDVGGSSHWVAVPRQASDESVREFGAMTDDLNAMADWLLACGVDTVALESTGVYWIPVFEVLEQRGLKVWLVDARQMKYVPGRKSDVQDCQWLQKLMSLGFLRAAFRPTDEVCVVRAVARQRDVLLTEQASWVQRMQKALVQMNIQLTEVLTDVMGMTGQAIIRAILAGERDPKVLARHRNGRVKASEQDIAKALTGNWRDEHLFVLCQALAMYDDIAKLLRDCDAKLQGLLSALGSAKVDLGKTPRAGSKTRAEFDTRQILANWAGVDLTRINGLGLSAVMKILSELGPNLSRFANVKHFCSWLGLCPGTKISGGKVLSAKTKRSANRVRQALKMAAMSLSHSDSALGAFYRRLSGRMDKPRANTATAHKLARMVYFMLTRGEAFVDEGQQRYEEQQRERSIAALKRRAAALGFQINPTSVHA

SEQ ID NO: 445390 - protein, 381 aa, unidentified
MKLNSQMKLGVFFRQCVGVDISKDKFTACLYMFDRAADVGCHTASVDFANTRQGFNQLVRWSRKEAQRGYPLTYLMEPTGVYYESLAHHLHKIGQTVYVVLPNKARKFCEAEGIKTKTDAMDARCLALMGCVSRKLCPWSPPEPIYRELRQLTRFRADLCKVRTSMENRKEALQHMVGVCSDVLGGCDKLTREIDKLLNQNEKTIALKLAENKDLMTKVNRVATIKGVGWTTVVSIVAETEGFHLIKNRKQLASFAGLDVIARQSGKEDPKHGISKKGNANIRAALYMPALSATRCNRQMKDTYNRICLKHPKEKMIGLVAVMRKLLLLIYTLWNNGEQYDPAKGQTDTTSEAESGEYSQQMTQEPDWNAVNQDGEPFSRQ

SEQ ID NO: 445391 - protein, 440 aa, unidentified
MSQVVNPFISVGIDVAADSSEMAIALPSLQFLDKRSFRIYHNKPESLSAAVDKIKKAEEEYFMKVRIFMESTGNYHYPLFCFFRDAGFEADIINPLITNSSRNSNIRKVKNDNFDAKRIAKTGFDPNLKVSNMPTELVLNLRNLTREYYYLVDVRSSYVTKLSTQVSVAFPQFKGIFSELAGKTSLMILKKYTSPDEILKANPNVLAEEIAVTSRRRKTSVDKCNQIIQAANDAKTFGAGVETNFWNIKRFIQNIEFYDQQIKEILQQMKSIVDKHLDELFIQQVELLESIKGFGFISALTLMCEIGNFNAFSKPKQLFAYFGLDPSVNQSGKFNGNRMKMSKRGSKYARRVLYMAAVQSVGTTTNGAAKNPVIRDFYEKKCREGKNKLTALGAVSHKLCNIVFAVLRDHKPFIMKTPQQHQADYIASSDSCITALKLAA

SEQ ID NO: 445392 - protein, 322 aa, unidentified
MPSNSPSNIGIDVCQHKLDVAVYETNEHFVVSYELPECIDLIERLKRLNPVRIVIEASGGVEHFLVSLLAAARLPVIVVNPRQIRDFARATGKLAKTDRLDAFAQARFAAMVKPEVRPLKSEETQALDALLTRRHQLVEMTVAERQRMTQARQQRRLEVAEDIKAHLEWLQERLTKCEAELANAIRQSPMWREREQLLRSAPGVGRITALTLMADLPELGQLEHKQITALCGLAPHPNDSGKSHGRRSTHGGRSRVRATLYMATLTAIRNNEIIQTFYQRLLANGKTKQLALTACMRKLLVILNAMVKSNSPWRSDTNPQIS

SEQ ID NO: 445393 - protein, 344 aa, unidentified
MPIITVGIDLAKAVFAVHGVDEAGNATLVKPKVARDQLVPLIAQLPPYLIGMEACSGAHHWARVFAEHGHTVKLMAPKLVSPYRMSGKRGKNDAADAAAICEAVTRPSMRFVPVKDEHQQATLCLHRTHQGFIEERTSTYNRLRGLLSEFGVVLPQSPERLRKEIGPCLDTLPGWARRCMSELLEHTSHIEDRLVELDRAINQIAREDDRSRRLLQLRGVGSTTASALVASIGDGHDFRNGRQVAAWLGLTPSQYSSGGKQRLGSITKAGDAYLRSLLVLGARSVMANLGNKQDPLSRWIRNLMERRGYWRAAVAIAAKNARMAWAVLHYGDTFKPEQAEPTGA

SEQ ID NO: 445394 - protein, 367 aa, unidentified
MFERTSVGLDVHARSVVACALDGLTGEVFRHRLTPDRDEILAWIISLPPPVKVVYEAGPTGFGLARFLGSAGIDTVVAAPSKLQRPSGDRVKTDAKDALHLARLLKLGEITAVQVPSVEQEAARDLVRSREDLRGDLMRSRHRISKLLLRQGIVYSGGQAWTAAHELWLARQHFDAPARQLTYESSLEAMHEISDRRDRLDQAITVMAYGSGYTPVVRALQCLRGISTLTAFGLAVEIGDWDRFTGSTIGAYLGLVPTEHSSGASRSQGSITKTGNSHARRLLVEAAWHHRRPYNTPSRLMRSRWEEANSEARIRGHAGNRRLHERWIKYLERRKRPVIANVAIARELSGWCWSLATGNPATRHSPI

SEQ ID NO: 445395 - protein, 341 aa, unidentified
MRIVGVTGGVDTHADTHVAAAIDDNGGLLGVESFPADQTGYEELLGWLVGFGEVEQVGVEGTGSWGVGLSRFLADQKIVVVEVDRPNRQTRRKKGKSDPTDAVSAARAALSGTATITPKSRNGQVEQMRVLMVARRSAREQRIQSLNQLRHLVFTAPESIRVRFKDRYKTGLVTEAANMRPRKGSDPVTYTTNLVIRNLARRIRVFNSEIREIDRTLTELISETAPSLFNLHGVGTDTAASLLVAAGDNPDRLHSERSWAHLCGVTPLPASSGKVTRHRLNRGGDRQANAALYRIVLTRMSSHEDTRRYVARRRTEGLSTPEIIRCLKRYVARQTYKHLTT

SEQ ID NO: 445396 - protein, 327 aa, unidentified
MEHFAGIDVSLERSSVCVVDALGKIVKEAKVSSEPAALVAFFEALGFAVKRIGLEAGPLSQWLHAGLKRAGFEAVLLETRHVKAALSAMTVKTDRKDARGLAQLIRMGWFRPVHAKSMRSQEVRALLVARKQLLGRLIDVELSIRGILRGFGLKVGPVTRKGFDARIRELVTGQATLERIAGAMLSARVALKAEYEKLHKTVLAIVRDDAVCRRLMTVPSVGPLVAITYKSAMDDPNRITKSKAAGALFGLTPKKYQSGEKDVTGGITRAGDEMVRTALYEAANVLLARITRFSKLKRWAMDVAKRRGSKRAKVALARKIAVILHRM

SEQ ID NO: 445397 - protein, 338 aa, unidentified
MGKITTVGLDLAKQVLHVVCCDMRGKVIRKRMLRRAQVREYFSNLVPCLVGMEACGSAHYWARELQGLGHEVKLLPPQFVKAFVRGNKNDYNDALAIAEAVVRPEMRGVAVKTVEQLDAQALHRLREQCLAARTALVNQLRGLLAEHGLVLSPGIGHVRRRLPALLEDAENGLSDLFRRLLAQGYQRLQEHDTHIAYYTTELKRQSQQDAACQRLQTIPGYGPIVASVFHSTVGDGQAYRRGRDVSAALGLVPRQHSSGGKSVLLGISKRGDRYLRSLLVHGARSVVRQAAHKDDRLSRWINRIKAERGHNKAVVALANKLARIGWAVLYNRSTYQAA

SEQ ID NO: 445398 - protein, 400 aa, unidentified
MLYIGIDVGKRNHEATILDESGKELCESIKFPNSIAGAEKLLSKILNLKDAIFVLEATGHYWLSLYCYLSSKELVVQVINPIQSDSLRNLYIRRNKTDKKDSFIIADIARINRMPKTKLADENILKLQTLTRLRFEFIDQVTALKARIIGVLDRIFPEYESIFSNIFIKSSRELLKNTASPEEILEFDLSELAESLNKASKGKFGTVKAKELQSKAANSFGITLGLDAFRLEIKLLLSQIEFLEAQIETIDSSVKELLREFKACFITTIPGIGDVLAASILAEIGDINRFNHVKKLVAYAGLDATIYQSGQFTGTRAKISKRGSPYLRRSLWSAANSARRFNPVLRNFYQIKIKQGKHPQVALGAVARKLTHLVYYILKEQKPFDPNYQWSNAKIYVDSL

SEQ ID NO: 445399 - protein, 422 aa, unidentified
MDDMSYTVAGIDIHKKALMVVVGTTGDEVVDPAGEKVEFQCRRFGTGDQERKHLIQWLQEHQVHEVVMESTAQYWKPVWLDLEPHFAKLHLAQAQSNKAPKGRKNDFGDAKRLTRRLVAHELILSFVPAAEQRQWRTLTRGKLQLVRDRVRLQSQLEALLEESRIKLSSVITDLLGVSGRRILKALAEGETNPETLADLGEDRLKCTQEELKDALTGKVETVHRELLKLYMERLHLLDQQIEKLEQLMANALHKQHQEAVLRLAEVPGFGLDSAQQLIAEIGVDAEAFPSAGNFASWAGVCPGLEESAGQNHSSRSAKGNVYVRRILTQAAQAAVKKKGSFFQTLFRRFLPRMKYSGAIWAVAHRLARLVWKILHENVRYIEQGENTTPQAQKRRAQKLTRALRKLGYSVTLTSVASQPAGA

SEQ ID NO: 445400 - protein, 335 aa, unidentified
MKHYAGIDLSMETSHICVVDADGRKLGAVCVDSTPEVIAAALECYRPVDRAVIETGRMTPSIALGLRELGVAIICIDARQAHQSLKAMKANKTDPHDAAGLAQLARTGFYKEVHVKSPAAHGVRSVITARGHLVEARVRLDNTIRGLCATFGIRLGIGQGERFLARMRVAASIPGLGEAVASLLRVRERLVDEIRQLDHQIKAISIASPACQTLMSIPGVGVQTSAAFAAAVDDASRFKRSRTAGAYFGLVPRRHQSGELDWTGRITKQGDGTVRKLLYEAANSILTRTRQTFALKSWALKIAKRRGLRKARVALARRLAVIMHAMLRDGTLFEA

SEQ ID NO: 445401 - protein, 314 aa, unidentified
MKVEYGNVAEDAVWAGVDTHAATNWLSVVDARGSELFSGEFATDPEGYRKLCDEIRRLGSPVAAGVECTGTYGAGLVRAMAAYGIACYEVITPGRPRRGPGCDKDDAADALRAAKQALSGENLAVPKSQDGWVEEVRNMTVAREELVKQCTSLANRALATVRKGPDEIRARLERLGTAKMMGVLAGWDEAEADPICDAVMFSLAALGRVWAEARRSARLLEERIERTLKAGNPALASMYGCGPISAAMLAIAAGDNPERMGSEASFAALCGVSPIRASSGKVERHRLNRGGNRNANKALHIIAMHRMRTAAIPA

SEQ ID NO: 445402 - protein, 411 aa, unidentified
MEQIHDRVAGLDVHRDEVAVCVRRPGPRGGVQTGKARFSTTSGGLAAMASWLAECGVTLAAMEATGVYWKPVYYALEGRFELWLCNAHHVKNVPGRKTDMSDAEWLADVAAHGMVRPSFVPPPAIRELRELTRYRKTQIDVRAAEIARLEKVLQDAGIKLTSVASKVLTQSGRAIIEALIAGQRDPRALAELAKGKLRPKIPQLTAALQGHFGAHHAAVAACILGHLDFLDAAIAGLDEQVAIRIANGYQPAARLLRDVPGLDRRSIEVIIAETGADMSRFPNPGHLASWAGVCPGNHESAGKRRRVATTPGNQWLRRALIESARAAARTKGSYFGAQYRQIARRRGPNKAAVAVAHSLLDVIWHMLTTGEAFTDLGEDYFTSRQDKEHQARRLIGQLEKLGFTVQLTPAG

SEQ ID NO: 445403 - protein, 467 aa, unidentified
MARKVKNVKGKGHKDYPQSLKTIQPHSAGIDLGSREHWVAGPPSKDGKPNVERFGTTTPELLRLADWLKEQGVETVAMESTGVYWIPLFEILDNRQFEVVLANARQISHVPGRKTDMLDCQWLQLLHACGLLRGSFRPSDDICQLRSLIRERNTMVQQRSDWVRRMQKNLDQMNVCVHHAVSDITGVTGMSIIRAIANGERDPHVLARLRDSRCRKSEEQITNELTGNWRPEHLFNLCQALKMYDQFCTVIADYDSEILSYLEVIQPTDNNDKSAPPPASKSKAMNLTKRGQEPLRQALYRLCGFDLTTIDGIGVDTASVLVSELGLDFTVFPNERHFVSYLKLAPNLSISAGKKVPKKFKASTCTRVATALRMSALTLRNSKTALGAFYRRISRYKGASVAVFATARKLAQYVYRLVCYGQSYVDSGAQAYEARFNLRRVNLYTKILNDLGYKVQTLTKDEAIDTC

SEQ ID NO: 445404 - protein, 337 aa, unidentified
MSKITMIGIDTAKQVFHLVGIDQHGKYELRQKRSRSKLLSSLAQREPCEVVLEACAASHHWARQIAAQGHRVHLIAPQHVKPYRRGQKNDYRDAEAIISAALSPGMHFVGVKGVEQQAEQALHRVRSRLLSHRNAAANGLRALLGEYGYAFAKGLKSLRRGAIDFIDRGEAAALGLSELIRDVLEELDGLEARMKRYEGQIRQRVRQDELSRSLSTELAGVGALSASALRVKVADVRDFNNGRNFAAYLGLAPGHRGTGGEVSIGKLPRGRDRYLRQLLIHGARSVVSRLGNKQDARSRWLRGLVERRSFNTACVALAHKNARQAWAMMARQQALAG

SEQ ID NO: 445405 - protein, 374 aa, unidentified
MNRLLLQPTLRQGKPARSAPSRPPAAGTAVTIAVDLARSKWVYACRWDGAERRRLSTPAGLRHLQALVGEYLPRGGTVTVVYEACGFGHQIAWWVAAQPGATVLVVAPSTVEQAPGTRVKTDGHDAGALAFKAERGLLRSVYIPPPALHQDRQLSRTYAQVCGDRRRAQVRLRLTFQEQGVLDAPARTAGWTALERWIAPQQATLPPPVRACVAELLHQRAAAAASAQRLRTQLVALGRTAPYQAVVDALSAQPGVGRFTAGRVVLELGDITRFPTAPSLAHYLGLTPAEASSGATIRRGHTRKCGPGAVRGWLLQCAWVAIRPGGDAALRAGFERLAPRLGRKRAIVAVARRLALRLRARWRAALAAPPAAAP

SEQ ID NO: 445406 - protein, 341 aa, unidentified
MNGSKTVVGIDIAKRVFQLHWIDMETGEIVSLQLKREQFLEHFANRHKCLIGMEACGGAQHWARKLTAMGHQVKLLLGKAVKGFVIGNKNDRQDARAIWTAVQQPHVKAVAIKTEAQQAILALHRMRSQLVKFRTAQINGLRGLLTEYGEVMPQGKAGVRKGISDALGKLADRLPAMVIDTLREQWARIEKMDEEIATIEQRIKHWLKQDDACKRIAEIPGVGPLTATAAVAMMGDPKAFKSGREFAAFAGLVPRQTGTGGRIKLLGISKRGDTYLRTLLIHGARSVLTHAKDPGPWVTELRRRRPLNVAIVALANKMARTIWAVLAHERTYQKGFVSRPV

SEQ ID NO: 445407 - protein, 346 aa, unidentified
MKYFAGLDVSLKEISMCVVDDDGSVVFRKSLPFCPLAVRDALEEQKLMPERIVHESGQISIWLQRQLEDLGLPAICIDARSAHKVLSAKLNKSDRSDAEGLAQLARIGWFTAVHVRSEDADRLRTIIGARDRFVRLRMELEAHARGILETFGIRLTAIGNGRQRQRFRDQLSIARQSDPALAVIIDHVLPSHEAICAAAAALEVEITAIAKRHDLSRRLMTIPGIGPVVALSFLALIENTERFPKTANVGAFVGLTPRRYQSGEVDYSGRISKRGDAAMRRLLYEVASTLINRVKRYSPLKSWAVRLAARRGFKKAAVATARKLAVLMLTLWKTGEEFHWTKEATT

SEQ ID NO: 445408 - protein, 343 aa, unidentified
MKIHVLGIDLGKTVFHLVGLDSVGRVVIRKRCSRTQLLAFTANLQVQLIGMEVCSGGHFLGRALRAQGHEVRLMPAQYVKPYVQTNKSDYLDAEAIAEAVQRPRMRFVPIKTEEQLDLQALHRVRERWVMRRTAVVNQIRSLLLERGLTLPKGRSHLDEQLPRILEDAELHLSDSFRVLLAQLKLELEQLASRIEEMDRVIQKSARENEACQRLTEIPGVGPVTATALIAAVGNASAFGKGRNLSAWMGIVPGEYSTGGKQKLLGISKRGNKYLRRLFVQGARSVLQQRHKQAPGLSSWLAQLLGRTHQNVVVVALANKLVRMAWAVLCKNERYRAPVFAVTT

SEQ ID NO: 445409 - protein, 423 aa, unidentified
MKSQSDMEFTVFVGLDWADKKHDICLQAAGCEDREFDRFAHQVTAIEQWALSLHQRFGGRIAMALELAKGPIVYALQKYDFLVLFPINPSMLAKYREAFKPSRAKDDPTDAELALDLLVRHRERFQPLQPQSEPMRTLQYLVEQRRRFVDDKVRYTNRLGSALKQYYPQALDWFADQDTVLFCDFILRWPTLMQVKRARKASLVDFFRAHNMRFPKLIEKRICAVKAAAPLTQDGAVITAYKLQAQVLVEQLRVTLQAIRRFDQEIATISPKLPDYALFHALPGAGSALAPRLLVAFGEQRDRFAGADECQKYFAVAPVTERSGNKTWVHWRWQGSTFLRQTLVEWAGQTINKSFWAGAYYRQQKEKGSSHQAAVRALAFKWVRILYRCWQTRTPYDESKYLEALRRRGSPLLKQLGEPMENT

SEQ ID NO: 445410 - protein, 394 aa, unidentified
MILVGIDIGKNKHTFSIIDKNSEEILLSPSDFSNNLKGLLFLIQKLSSYTKSELLIGMEDTGHYHFALLKYLLDRRYTVALINPTTTDLTRKLQGGITKNDPLDSLTICDVISSNHRNKPYRVTKLNRFDLYEQKQLTRHHHNLKEELNTYKNRLQKCIDIVFPEFNSLFHSKYGIVYMNILKIFSSAKAIANADIRSIRKCFEFKGKGKRIFLSAEQLKLTAKSSIGIPSVAEEIQIRHLVSQIELLKKQISEIDKRIEEFSLKNNSPILTIPGISHFSGTSIISELGDICNYTKASQIIKFAGVAPYHYESSQFTAQHTAITKKGSKYLRKTLYQIILPVISNNEVFHAYYTKKLNEGKGHRCAQGHCIRKLLRVIYHILSTGQPFNPELLV

SEQ ID NO: 445411 - protein, 315 aa, unidentified
MSDVPCFVGIDVAKAQLDIALRPSGERWAVANDASGVATLVDQVQTLHPTLIVLEATGGLERAVTSALAAAGLPVVVVHPRQARDVARATGQLAQTEALDARALAHFADVIRPTPRPLPDAQTQELRALLGRRQQLIGMRTAEQNRLAGTSARLTQDIVAHITWLNAAIATLDNDLETTLRASPLWRENDDLLQSAKGIGPVCARTLLLELPELGTLTRQQIAALVGVAPLNCDSGTLRGRRMIWGGRAHVRTVLYMGTLVATRCNPQITVFYERLLAAGKVKKVALTACMHKLLTILNAMLKHRTPWQPQEVQS

SEQ ID NO: 445412 - protein, 366 aa, unidentified
MKKNSTVATNRNKIFKQPRLTIGLDLGDRSSHYCILDEAGNVILERNLPTTPKAIQQVFRKIPRSRIALETGTHSPWVSRQLTQLDHEVIVAHARNVRLIGESSRKDDQLDARTLARLARIDPELLGPVRHRSAKAQIHLTVIRARAALVSARTALVNAARGLTKSYGERLKKCGTGQMNRELAKGLSQELREALDPLLREIESLNERIAEYDRRIEQIAKEVYPEVALLKQVQGVGTLIVLTYVLTLDDPHRFRRSRDAGCFLGLRPGRRNSGMSEPQMHISKEGDRYLRTLMVQGAHYILGPFGEDSDLRRWGLKLAERGGKNAKKRAVVAVARKLTVLLHKLWVSGEVYEPLRNNHKLVSAVA

SEQ ID NO: 445413 - protein, 288 aa, unidentified
MKIIGCDFHPSYQQIAMLDSVTGEIVEKALSHERKEEVRAFYAVLERSVRVGIEASGQSQWFEGMLAELGHEVWIGDAAKIRASCERKRKTDRRDAELLLRLLAEDRFPRIWVPTAAERDGRQLLLHRHKLVRMRTQVKNQLQAQALNQGVQRKRKLWSEAGRKQLESLPLLPWASRRRAELLQLFDQLEASISELDRAVTEQASARPAARRLMTHPGVGPVTALAFALTMGPAERFQRGKQVASYLGLIPSEHSSRGAPAAVGTHQQTRQSVSARVAGGSGTERGAA

SEQ ID NO: 445414 - protein, 347 aa, unidentified
MVIVDSTRVVIGGVDTHLDEHVAAVVDGVGGVLGVARFPVTPSGYGRLVSWMRSHGRLERVGVEGTGSYGAGLSRHLLRAGLVVMEVTRPNRQERHLNGKDDDLDAIEAARAVIAGRALATAKTSTGNSEALRVLVGAQRSAKQARISAMVQLRHLMFTAPDDLRERYAKLSRKELTAQCARLRPRLDGDMVRYATKTSALTLARRAQALAGEIDELDALIAGLVKQTAPGLLNVYGVGTDVAAAILVAVGDNPERIRTEAAFAKLCGVAPLPANSGKRTGRHRLNPGGNRHANNALWHIVLTRVSQHEPRTTAYFERRREQGLSTREIFRCLKRYVAREIFTALPR

SEQ ID NO: 445415 - protein, 320 aa, unidentified
MMAQDDRIVVGIDVAKDKVDACIRALSLRQVCPNTGQGHRKLVAWLRKYKATKAVMEASGGYERDWARLLRQAGIEVRIVDPKRVRSFALSAGRLAKNDTIDAEMIAWFAEIFSEAPSQAHDVAHEELLALVKGRKGLLDLKTRVQSQNEHAAPGLVQKAHARVLKNLVSEIAKLEAAIAARIKASPHLAERAEIIESVPGFAETTSANLIAGIPELGQVSNEIAGALLGAAPYDDDSGHRHGERHIKGGRRWVRNAIYMPCLGAATQNNPVLKAFYDRLIAKGKKPKVALVACMRKLIVILNTMIARRQKWDPSRYTLG

SEQ ID NO: 445416 - protein, 382 aa, unidentified
MNRTCNWSRIIGLDLSKATFKGCILSGEGFTRRENFSGEMKRDESGYMLIRDRIHENDIVLMEAGSSTFNLARYLLKESDAVDVVVLNPANLRIIWDSQKKNDKADAMKIACIARDMRPEAWPRVTVPSEQEQSERSVIMHWVFLRKQETQLLNRFFALFNSLGYPEIDKARLKKESEFREETINNLLAFNELAFTDALMLHDQISLLQSQLAFMEDRLRAICVNHPKEALAWLSVPGVGLVNAATLIAYIGDGSRFSKPDQLLNYAGMVPRQSQSGTVDLKGRITKRGCTAIRRNVVQGAQVVMQLPPTCDLTRFAYRKKKECPFNGKVAVAVANRMLRTGLSLLHHNQLYRPMIENGYDRLTRKLTANKLKALVDHLPSN

SEQ ID NO: 445417 - protein, 285 aa, unidentified
MAIRKQCIGIDVSKSTFTACLCQQAEDGKLTFSKVLDFGNDSKGFDQLLRWVKGLIVSESELVFLMEATGVYYENLAHHLYKIKKRVHVVLPKTSKHYFSSLNVKTKTDAVDARILSQFGIERVHKLWSPPPSALLQLMNLTRYYVQLQEQKTTLGNISHSKDCAHDIQVFITKSNKKLITEIDKEIERCLKEIKKAIEKEDVLKEHVRKVLTIKGVGLITVATILAETMGFEQIHSSKQLVSYSGYDVVQRESGTSIKGKTRISKKGNRYIRNAHYFPAMVACR

SEQ ID NO: 445418 - protein, 419 aa, unidentified
MSKSNIARQFAQVQPGTLHAGVDLALEQNVVVVINEKAARLDHFSFPQDRGGYDYFLRRLEGLRQKYQASEVVVAMEPSNYFWKLLARELEEKKITYHLVNAYTVKKHREGDQLDRSKDDWRDAGQIAELSRNGNYTETRLQKGAYEELRQYATLYDQSVQGIRREKQVLWGLVGQVFPELSQVFKNLIGETGQALLVTCASAAIIRELTVEDFIAQVRAAYSGKKLHVSKLRRVHQLAATSIGVTEGLEAIQLAIQVHLAELQTFQKQLKRVTTAMTTCLASLPEAPYLLSVKSLQAVSAAIFLAEVGDPKRYQAAAQWVKLAGIQPAPNTSGKKQRSQTPRSRQGRARLRTMLFFTCLRMVQVDDHFAQIYAHLQRRQNNPLTKMQAQGVLMNKLLHILWALIHNQTFYNPSFGQSI

SEQ ID NO: 445419 - protein, 396 aa, unidentified
MEVTRIGMDIAKQIFELHGVDRRELPVLRRTVTRARLLEFLTQLTPCTIGMEACGGAHYWYRAISRLGHTVQLLPAHKVKPYVDGNKNNRHDAAAICEAMSRPSMRLVQPKSPAQQDLQTLHRARGLLVGELTALSNQIRGLLHEYGIVMRKGAAALKRTVPELLGGSDERLTPILRQVLAEQFERYTYLVQRREQYDRQLSQMSKQDARCRRLLKIEGIGPLSATALVAAIGNGHEFHNGRHFSAYLGLVPGHSNTGDKTVMRGITKRGNRYLRTLLIHGGRSAVYAARRHTNPRAVWLNRLRESRGHNVAAVALANKNARVAWAILRYGEDYCPARAHRQAPEPRRRAHRLASEKMLAGAVHSTHPGRQSREHFFIPPSAQTKGGTKKSFKQRT

SEQ ID NO: 445420 - protein, 435 aa, unidentified
MNFIGVDLHKKSITICVMDEKRKILARKTVACTQTDEILEFFRQFRPFKVVVEATASYVWFVELVEPLAEKVVLANPKKLRVIAESTKKTDRLDAQVLTEFLVLDMIPESYQATPRLRQHRALVRHRQYLQGRITSVRSKIRHILSNYNADRKDLFSSNCGLAYLKEVRLNDVDRFVMKQLWAEWQDHLAQRLAVSKKLKAFVAKAPQREAEAREILKTAPQVGSVTAEVILSELGDISRFRNAKTVCAYAGLVPVVRQSGERKSKDMKITKEGSGLLRWALVEAAWRLVGKSPKWAALFSRLRHRSGKKRAIVAVARKLLCVLYAMLRTSTPYKIVTTQTTAPRTTGKESVRTSTPDQTTPTETTAPRTTGKKLVRTSTPEQTTPTETTAPRTTGKKLVRTSTPEQTTPTETTAPRTTGKKLVRTSTPDQTITT

SEQ ID NO: 445421 - protein, 409 aa, unidentified
MIYLGLDWAEDHHDVALMDEAGTVLDERRIGDTMEGVVLIHELVDQQEPNPSKVMVGTESVHGLVPQALVAAGYMVYEINPMASSRYRDRHHLSGAKSDRGDAKMLADAVRTDSHNHRPYVGNSDLAEGIKVLARTHQTLIHDRQDQVNNLRSTLRQYYPSLLLAFPGFASPSERDSQDAMALVEKAPTPAQGRALTTSQITTVLRQAGRKRALDRRAQEIRDALRVPQLETTPIVTQSYGSSAQAIAGIVRVMTIQIDLLTAELASRFEQHPDAKIICSLPGLGPVLGARALGEFGDEPNRYTDARARKNYATTSPVTKASGKLRVVTTRRGGNRRLGETSLRWAFSAAQSSPGAKRYYDALRSRQKTHAQAVRAVANRMVGILHACLEKRVLYNETIAWPEPLDMAA

SEQ ID NO: 445422 - protein, 315 aa, unidentified
MYLGIDVSKLTIDCCLISDGLFFERKFKNSQAGFQDLKDWLKENGATERLHCCCEATGKYYEAAAEYLSKYYRMSVENPRKIKGFGTAVLQRTKTDRQDAKTIAQYCKALEPRPWQKPTEAQTKLRELTRYQHRLKRQKAAEQTKLQTAPAYLLPLIQSTITHLQQQIKAVQNQLNQFHKDNPDYKIQKERLKTITGIGEAAANSLLSVLTQTDRFKTAAQFVAYLGLDPKENQSGTSLKGRPRISKLGNTHLRTTLFIPAMHAYRSRNFAKYVSRLQKNGKRPKVIIVALMRKLAVIAFTLLKNGQDFQVERYK

SEQ ID NO: 445423 - protein, 429 aa, unidentified
MDEVDDVELLVERVAALDLGKAVLEACVRVPHPQRPGRRMQELRGYGTTTAQLLAMVAWLRHWQVQRVVMESTSTYWKGVYYLLEAEGFDCWLVNAREVKNVPGRAKTDRADAVWLAKVAERGMCRPSLVQPPEIRRLRDLTRYRRALVQDRTREQQRAEKLLEDAQIKISSVLSDLHGVTGRAMMEALIAGERDPRTLARLAKSGARKKTDQLEEALRGFFTDHHATILKMMLDNSDRIGAQIAALDARIEEAIGPFSRQADRLADIVGVNTVAAAELIAETGVDMTRFPSAAHLVSWAKFCPQTHQSAGKSMSKGRGKGNPWLAGTLGRIAFANSRADTFLGARYRRLARRRGKQKAIVATGNSVLTVIYHLLSDPDARFCDLGPGYYESRINKHRRARDLATQLQALTGQHIAIRDGKAVITDNAA

SEQ ID NO: 445424 - protein, 418 aa, unidentified
MTSEFTFYVGVDWATEHHQVCISDCDGRVVRQQRIEHSGKAITDFMASMEDLAQGQVDRIAVAIEVPRGPVVEAFLEHRWAVFAINPKQLDRFRDRHTVAGAKDDSRDAFVLADSLRTDQRCFRRLSADHPAIVRIRELSRTEDHVGVDLRRTVNQLYQLLLRYYPQLLQICPTPDEPWIWALLEVAPTPERAGKLKVQRIRQLLAKHRIRRWSAEKVAEILSAPQLPLASGTADAVSEHALLLVPQLRLLSTMRKQVADRMEALLDEMATSSEDTPETQVFRDVAVLCSLPGIGRVVSGALLAEAAGPLRQRDYYAIRAHGGVAPVTRQSGKTRQVGMRYRCNTRLRNALYHWARTSVQHDPCSKQQYARLRAAGHSHGRALRGVTDRLLTVLIAMLKSGQSYDPTRRQSNVSAPAA
